(19) United States
(12) Patent Application Publication
(10) Pub. No.: US 2006/0048240 A1
(43) Pub. Date: Mar. 2, 2006

(54) Sequence-determined DNA fragments and corresponding polypeptides encoded thereby

(76) Inventors: Nickolai Alexandrov, Thousand Oaks, CA (US); Vyacheslav Brover, Simi Valley, CA (US)

Correspondence Address: BIRCH STEWART KOLASCH & BIRCH, PO BOX 747, FALLS CHURCH, VA, 22040-0747, US

(21) Appl. No.: 11/096,568

(22) Filed: Apr. 1, 2005

Related U.S. Application Data
(60) Provisional application No. 60/558,095, filed on Apr. 1, 2004.

(51) Int. Cl. A01H 1/00; C12N 15/82; C07H 21/04

(52) U.S. Cl. 800/278; 435/468; 536/23.6

(57) ABSTRACT

The present invention provides DNA molecules that constitute fragments of the genome of a plant, and polypeptides encoded thereby. The DNA molecules are useful for specifying a gene product in cells, either as a promoter or as a protein coding sequence or as an UTR or as a 3′ termination sequence, and are also useful in controlling the behavior of a gene in the chromosome, in controlling the expression of a gene or as tools for genetic mapping, recognizing or isolating identical or related DNA fragments, or identification of a particular individual organism, or for clustering of a group of organisms with a common trait. One of ordinary skill in the art, having this data, can obtain cloned DNA fragments, synthetic DNA fragments or polypeptides constituting desired sequences by recombinant methodology known in the art or described herein.

[0001] This Nonprovisional application claims priority under 35 U.S.C. § 119(e) on U.S. Provisional Application No(s). 60/558,095 filed on Apr. 1, 2004, the entire contents of which are hereby incorporated by reference.

[0002] This application contains a CDR, the entire contents of which are hereby incorporated by reference. The CDR contains the following files:

| FILE CREATE DATE | FILE SIZE (BYTES) | | FILE NAME |
|---|---|---|---|
| 03/30/2004 02:20p | 156,091 | | sequences.311987.710-0004-55300-US-U-38512.01_0a_1 |
| 03/30/2004 02:20p | 4,222,975 | | sequences.311987.710-0004-55300-US-U-38512.01_1 |
| 03/30/2004 02:20p | 12,507 | | sequences.3708.710-0004-55300-US-U-38512.01_1 |
| 03/30/2004 02:20p | 6,484 | | sequences.3769.710-0004-55300-US-U-38512.01_0a_1 |
| 03/30/2004 02:20p | 800,995 | | sequences.3769.710-0004-55300-US-U-38512.01_1 |
| 03/30/2004 02:20p | 68,609 | | sequences.3847.710-0004-55300-US-U-38512.01_0a_1 |
| 03/30/2004 02:20p | 97,676 | | sequences.3847.710-0004-55300-US-U-38512.01_0a_2 |
| 03/30/2004 02:20p | 7,835,635 | | sequences.3847.710-0004-55300-US-U-38512.01_1 |
| 03/30/2004 02:20p | 5,057,218 | | sequences.3847.710-0004-55300-US-U-38512.01_2 |
| 03/30/2004 02:20p | 125,325 | | sequences.4565.710-0004-55300-US-U-38512.01_0a_1 |
| 03/30/2004 02:20p | 68,854 | | sequences.4565.710-0004-55300-US-U-38512.01_0a_2 |
| 03/30/2004 02:20p | 8,617,020 | | sequences.4565.710-0004-55300-US-U-38512.01_1 |
| 03/30/2004 02:20p | 2,726,389 | | sequences.4565.710-0004-55300-US-U-38512.01_2 |
| 03/31/2004 02:16p | 63,980 | | sequences.311987.710-0004-55300-US-U-38538.01_0a_1 |
| 03/31/2004 02:16p | 121,154 | | sequences.311987.710-0004-55300-US-U-38538.01_0a_2 |
| 03/31/2004 02:16p | 102,802 | | sequences.311987.710-0004-55300-US-U-38538.01_0a_3 |
| 03/31/2004 02:16p | 181,110 | | sequences.311987.710-0004-55300-US-U-38538.01_0a_4 |
| 03/31/2004 02:16p | 8,297,713 | | sequences.311987.710-0004-55300-US-U-38538.01_1 |
| 03/31/2004 02:16p | 9,474,173 | | sequences.311987.710-0004-55300-US-U-38538.01_2 |
| 03/31/2004 02:16p | 9,434,627 | | sequences.311987.710-0004-55300-US-U-38538.01_3 |
| 03/31/2004 02:16p | 5,088,450 | | sequences.311987.710-0004-55300-US-U-38538.01_4. |
| 03/31/2004 02:16p | 16,502 | | sequences.3769.710-0004-55300-US-U-38538.01_0a_1 |
| 03/31/2004 02:16p | 3,208 | | sequences.3769.710-0004-55300-US-U-38538.01_0a_11 |
| 03/31/2004 02:16p | 46,439 | | sequences.3769.710-0004-55300-US-U-38538.01_0a_12 |
| 03/31/2004 02:16p | 22,935 | | sequences.3769.710-0004-55300-US-U-38538.01_0a_2 |
| 03/31/2004 02:16p | 20,462 | | sequences.3769.710-0004-55300-US-U-38538.01_0a_3 |
| 03/31/2004 02:16p | 1,153 | | sequences.3769.710-0004-55300-US-U-38538.01_0a_5 |
| 03/31/2004 02:16p | 6,501 | | sequences.3769.710-0004-55300-US-U-38538.01_0a_9 |
| 03/31/2004 02:15p | 13,982,206 | | sequences.3769.710-0004-55300-US-U-38538.01_1 |
| 03/31/2004 02:15p | 12,012,804 | | sequences.3769.710-0004-55300-US-U-38538.01_10 |
| 03/31/2004 02:15p | 10,386,904 | | sequences.3769.710-0004-55300-US-U-38538.01_11 |
| 03/31/2004 02:15p | 10,188,530 | | sequences.3769.710-0004-55300-US-U-38538.01_12 |
| 03/31/2004 02:15p | 10,172,120 | | sequences.3769.710-0004-55300-US-U-38538.01_2 |
| 03/31/2004 02:15p | 8,886,889 | | sequences.3769.710-0004-55300-US-U-38538.01_3 |
| 03/31/2004 02:15p | 10,356,156 | | sequences.3769.710-0004-55300-US-U-38538.01_4 |
| 03/31/2004 02:15p | 13,185,963 | | sequences.3769.710-0004-55300-US-U-38538.01_5 |
| 03/31/2004 02:15p | 12,705,824 | | sequences.3769.710-0004-55300-US-U-38538.01_6 |
| 03/31/2004 02:15p | 14,333,822 | | sequences.3769.710-0004-55300-US-U-38538.01_7 |
| 03/31/2004 02:15p | 12,610,311 | | sequences.3769.710-0004-55300-US-U-38538.01_8 |
| 03/31/2004 02:15p | 10,998,181 | | sequences.3769.710-0004-55300-US-U-38538.01_9 |
| 03/31/2004 02:15p | 68,064 | | sequences.3847.710-0004-55300-US-U-38538.01_0a_1 |
| 03/31/2004 02:19p | 78,899 | | sequences.4565.710-0004-55300-US-U-38538.01_0a_1 |
| 04/01/2004 01:27p | 150,038 | | sequences.311987.710-0004-55300-US-U-38557.01_0a_1 |
| 04/01/2004 01:27p | 133,589 | | sequences.311987.710-0004-55300-US-U-38557.01_0a_2 |
| 04/01/2004 01:27p | 7,750,398 | | sequences.311987.710-0004-55300-US-U-38557.01_1 |
| 04/01/2004 01:27p | 5,026,024 | | sequences.311987.710-0004-55300-US-U-38557.01_2 |
| 04/01/2004 01:27p | 61,691 | | sequences.3708.710-0004-55300-US-U-38557.01_1 |
| 04/01/2004 01:27p | 34,024 | | sequences.3769.710-0004-55300-US-U-38557.01_0a_1 |
| 04/01/2004 01:27p | 3,491 | | sequences.3769.710-0004-55300-US-U-38557.01_0a_3 |
| 04/01/2004 01:27p | 8,824,701 | | sequences.3769.710-0004-55300-US-U-38557.01_1 |
| 04/01/2004 01:27p | 11,296,407 | | sequences.3769.710-0004-55300-US-U-38557.01_2 |
| 04/01/2004 01:27p | 10,028,357 | | sequences.3769.710-0004-55300-US-U-38557.01_3 |
| 04/01/2004 01:27p | 1,069,932 | | sequences.3769.710-0004-55300-US-U-38557.01_4 |
| 04/01/2004 01:27p | 21,374 | | sequences.3847.710-0004-55300-US-U-38557.01_0a_1 |
| 04/01/2004 01:27p | 8,016,492 | | sequences.3847.710-0004-55300-US-U-38557.01_1 |
| 04/01/2004 01:27p | 71,898 | | sequences.4565.710-0004-55300-US-U-38557.01_0a_1 |
| 04/01/2004 01:27p | 9,188 | | sequences.4565.710-0004-55300-US-U-38557.01_0a_2 |
| 04/01/2004 01:27p | 9,172,883 | | sequences.4565.710-0004-55300-US-U-38557.01_1 |
| 04/01/2004 01:27p | 1,081,095 | | sequences.4565.710-0004-55300-US-U-38557.01_2 |
| 09/26/2002 01:45p | 2,109 | KB | Miscellaneous feature 001018 Protein Domain data.txt |
| 04/01/2005 04:27p | 67,789 | KB | Miscellaneous Feature - Ref 1.doc |
| 04/01/2005 04:28p | 54,246 | KB | Miscellaneous Feature - Ref 2.doc |
| 04/01/2005 04:29p | 63,629 | KB | Miscellaneous Feature - Ref 3.doc |
| 04/01/2005 04:30p | 53,407 | KB | Miscellaneous Feature - Ref 4.doc |
| 04/01/2005 04:33p | 45,580 | KB | Miscellaneous Feature - Ref 5.doc |
| 04/01/2005 04:32p | 35,312 | KB | Miscellaneous Feature - Ref 6.doc |
| 04/01/2004 12:12p | 46,264 | KB | Miscellaneous feature MA_data.txt |
| 04/01/2004 12:12p | 793 | KB | Miscellaneous feature Orthog_list.txt |

### FIELD OF THE INVENTION

[0003] The present invention relates to isolated polynucleotides from plants that include a complete coding sequence, or a fragment thereof, that is expressed. In addition, the present invention relates to the polypeptide or protein corresponding to the coding sequence of these polynucleotides. The present invention further relates to the use of these isolated polynucleotides and polypeptides and proteins.

### BACKGROUND OF THE INVENTION

[0004] There are more than 300,000 species of plants. They show a wide diversity of forms, ranging from delicate liverworts, adapted for life in a damp habitat, to cacti, capable of surviving in the desert. The plant kingdom includes herbaceous plants, such as corn, whose life cycle is measured in months, to the giant redwood tree, which can live for thousands of years. This diversity reflects the adaptations of plants to survive in a wide range of habitats. This is seen most clearly in the flowering plants (phylum Angiospermophyta), which are the most numerous with over 250,000 species. They are also the most widespread, being found from the tropics to the arctic.

[0005] The process of plant breeding involving man's intervention in natural breeding and selection is some 20,000 years old. It has produced remarkable advances in adapting existing species to serve new purposes. The world's economics was largely based on the successes of agriculture for most of these 20,000 years.

[0006] Plant breeding involves choosing parents, making crosses to allow recombination of genes (alleles) and searching for and selecting improved forms. Success depends on the genes/alleles available, the combinations required and the ability to create and find the correct combinations necessary to give the desired properties to the plant. Molecular genetics technologies are now capable of providing new genes, new alleles and the means of creating and selecting plants with the new, desired characteristics.

[0007] When the molecular and genetic basis for different plant characteristics are understood, a wide variety of polynucleotides, both endogenous polynucleotides and created variants, polypeptides, cells, and whole organisms, can be exploited to engineer old and new plant traits in a vast range of organisms including plants. These traits can range from observable morphological characteristics, through adaptation to specific environments to biochemical composition and to molecules that the plants (organisms) exude. Such engineering can involve tailoring existing traits, such as increasing the production of taxol in yew trees, to combining traits from two different plants into a single organism, such as inserting the drought tolerance of a cactus into a corn plant. Molecular and genetic knowledge also allows the creation of new traits. For example, the production of chemicals and pharmaceuticals that are not native to a particular species or the plant kingdom as a whole.

[0008] The achievements desribed in this application were possible because of the results from a cluster of technologies, a genomic engine, depicted below in Schematic 1, that allows information on each gene to be integrated to provide a more comprehensive understanding of gene structure and function and the deployment of genes and gene components to make new products.

I. The Discoveries of the Instant Application

[0009] Applicants have isolated and identified genes, gene components and their products and promoters. Specific genes were isolated and/or characterized from Arabidopsis, soybean, maize, wheat and rice. These species were selected because of their economic value and scientific importance and were deliberately chosen to include representatives of the evolutionary divergent dicotyledonous and monocotyledonous groups of the plant kingdom.

[0010] The techniques used initially to isolate and characterize most of the genes, namely sequencing of full-length cDNAs, were deliberately chosen to provide information on complete coding sequences and on the complete sequences of their protein products.

[0011] Applicants have identified that gene components and products include exons, introns, coding sequences, antisense sequences and terminators. The exons are characterized by the proteins they encode and Arabidopsis.

[0012] Further exploitation of molecular genetics technologies enables one to understand the functions and characteristics of each gene and its role in a plant. Three powerful molecular genetics approaches are used to this end:
[0013] (a) Analyses of the phenotypic changes when the particular gene sequence is activated differentially; (Arabidopsis)
[0014] (b) Analyses of in what plant organs, to what extent, and in response to what environmental signals mRNA is synthesized from the gene; (Arabidopsis and maize) and
[0015] (c) Analysis of the gene sequence and its relatives. (all species)

[0016] These are conducted using the genomics engine depicted in FIG. 1 that allows information on each gene to be integrated to provide a more comprehensive understanding of gene structure and function and linkage to potential products.

[0017] The species Arabidopsis is used extensively in these studies for several reasons: (1) the complete genomic sequence, though poorly annotated in terms of gene recognition, is being produced and published by others and (2) genetic experiments to determine the role of the genes in planta are much quicker to complete.

[0018] The phenotypic tables, MA tables, and reference tables and sequence tables indicate the results of these analyses and thus the specific functions and characteristics that are ascribed to the genes and gene components and products.

II. Integration of Discoveries to Provide Scientific Understanding

[0019] From the discoveries made, Applicants deduce the biochemical activities, pathways, cellular roles, and developmental and physiological processes that can be modulated using these components. These are discussed and summarized in sections based on the gene function characteristics from the analyses and role in determining phenotypes. These sections illustrate and emphasize that each gene, gene component or product influences biochemical activities, cells or organisms in complex ways, from which there can be many phenotypic consequences.

[0020] Furthermore, the development and properties of one part of the plant can be interconnected with other parts. The dependence of shoot and leaf development on root cells is a classic example. Here, shoot growth and development require nutrients supplied from roots, so the protein complement of root cells can affect plant development, including flowers and seed production. Similarly, root development is dependent on the products of photosynthesis from leaves. Therefore, proteins in leaves can influence root developmental physiology and biochemistry.

[0021] Thus, the following sections describe both the functions and characteristics of the genes, gene components and products and also the multiplicity of biochemical activities, cellular functions, and the developmental and physiological processes influenced by them.

[0022] A. Analyses to Reveal Function and In Vivo Roles of Single Genes in One Plant Species

[0023] The genomics engine focuses on individual genes to reveal the multiple functions or characteristics that are associated with each gene, gene components and products of the instant invention in the living plant. For example, the biochemical activity of a protein is deduced based on its similarity to a protein of known function. In this case, the protein may be ascribed with, for example, an oxidase activity. Where and when this same protein is active can be uncovered from differential expression experiments, which show that the mRNA encoding the protein is differentially expressed in response to drought and in seeds but not roots.

[0024] Thus, this protein is characterized as a seed protein and drought-responsive oxidase.

[0025] B. Analyses to Reveal Function and Roles of Single Genes in Different Species

[0026] The genomics engine is used to extrapolate knowledge from one species to many plant species. For example, proteins from different species, capable of performing identical or similar functions, preserve many features of amino acid sequence and structure during evolution. Complete protein sequences are compared and contrasted within and between species to determine the functionally vital domains and signatures characteristic of each of the proteins that is the subject of this application. Thus, functions and characteristics of Arabidopsis proteins are extrapolated to proteins containing similar domains and signatures of corn, soybean, rice and wheat and by implication to all other (plant) species.

[0027] C. Analyses Over Multiple Experiments to Reveal Gene Networks and Links Across Species

[0028] The genomics engine can identify networks or pathways of genes concerned with the same process and hence linked to the same phenotype(s). Genes specifying functions of the same pathway or developmental environmental responses are frequently co-regulated i.e. they are regulated by mechanisms that result in coincident increases or decreases for all gene members in the group. The Applicants have divided the genes of Arabidopsis and maize into such co-regulated groups on the basis of their expression patterns and the function of each group has been deduced. This process has provided considerable insight into the function and role of thousands of the plant genes in diverse species included in this application.

[0029] D. Applications of Applicant's Discoveries

[0030] It will be appreciated while reading the sections that the different experimental molecular genetic approaches focused on different aspects of the pathway from gene and gene product through to the properties of tissues, organs and whole organisms growing in specific environments. For each endogenous gene, these pathways are delineated within the existing biology of the species. However, Applicants' inventions allow gene components or products to be mixed and matched to create new genes and placed in other cellular contexts and species, to exhibit new combinations of functions and characteristics not found in nature, or to enhance and modify existing ones. For instance, gene components can be used to achieve expression of a specific protein in a new cell type to introduce new biochemical activities, cellular attributes or developmental and physiological processes. Such cell-specific targeting can be achieved by combining polynucleotides encoding proteins with any one of a large array of promoters to facilitate synthesis of proteins in a selective set of plant cells. This emphasizes that each gene, component and protein can be used to cause multiple and different phenotypic effects depending on the biological context. The utilities are therefore not limited to the existing in vivo roles of the genes, gene components, and gene products.

[0031] While the genes, gene components and products disclosed herein can act alone, combinations are useful to modify or modulate different traits. Useful combinations include different polynucleotides and/or gene components or products that have (1) an effect in the same or similar developmental or biochemical pathways; (2) similar biological activities; (3) similar transcription profiles; or (4) similar physiological consequences.

[0032] Of particular interest are the transcription factors and key factors in regulatory transduction pathways, which are able to control entire pathways, segments of pathways or large groups of functionally related genes. Therefore, manipulation of such proteins, alone or in combination is especially useful for altering phenotypes or biochemical activities in plants. Because interactions exist between hormone, nutrition, and developmental pathways, combinations of genes and/or gene products from these pathways also are useful to produce more complex changes. In addition to using polynucleotides having similar transcription profiles and/or biological activities, useful combinations include polynucleotides that may exhibit different transcription profiles but which participate in common or overlapping pathways. Also, polynucleotides encoding selected enzymes can be combined in novel ways in a plant to create new metabolic pathways and hence new metabolic products.

[0033] The utilities of the various genes, gene components and products of the Application are described below in the sections entitled as follows:
[0034] III.A. Organ Affecting Genes, Gene Components, Products (Including Differentiation Function)
   [0035] III.A.1. Root Genes, Gene Components And Products
   [0036] III.A.2. Root Hair Genes, Gene Components And Products
   [0037] III.A.3. Leaf Genes, Gene Components And Products
   [0038] III.A.4. Trichome Genes And Gene Components
   [0039] III.A.5. Chloroplast Genes And Gene Components
   [0040] III.A.6. Reproduction Genes, Gene Components And Products
   [0041] III.A.7. Ovule Genes, Gene Components And Products
   [0042] III.A.8. Seed And Fruit Development Genes, Gene Components And Products
[0043] III.B. Development Genes, Gene Components And Products
   [0044] III.B.1. Imbibition and Germination Responsive Genes, Gene Components And Products
   [0045] III.B.2. Early Seedling Phase Genes, Gene Components And Products
   [0046] III.B.3. Size and Stature Genes, Gene Components And Products
   [0047] III.B.4. Shoot-Apical Meristem Genes, Gene Components And Products
   [0048] III.B.5. Vegetative-Phase Specific Responsive Genes, Gene Components And Products
[0049] III.C. Hormones Responsive Genes, Gene Components And Products
   [0050] III.C.1. Abscissic Acid Responsive Genes, Gene Components And Products
   [0051] III.C.2. Auxin Responsive Genes, Gene Components And Products
   [0052] III.C.3. Brassinosteroid Responsive Genes, Gene Components And Products
   [0053] III.C.4. Cytokinin Responsive Genes, Gene Components And Products
   [0054] III.C.5. Gibberellic Acid Responsive Genes, Gene Components And Products
[0055] III.D. Metabolism Affecting Genes, Gene Components And Products
   [0056] III.D.1. Nitrogen Responsive Genes, Gene Components And Products
   [0057] III.D.2. Circadian Rhythm Responsive Genes, Gene Components And Products
   [0058] III.D.3. Blue Light (Phototropism) Responsive Genes, Gene Components And Products
   [0059] III.D.4. CO₂ Responsive Genes, Gene Components And Products
   [0060] III.D.5. Mitochondria Electron Transport Genes, Gene Components And Products
   [0061] III.D.6. Protein Degradation Genes, Gene Components And Products
   [0062] III.D.7. Carotenogenesis Responsive Genes, Gene Components And Products
   [0063] III.D.8. Viability Genes, Gene Components And Products
   [0064] III.D.9. Histone Deacetylase (Axel) Responsive Genes, Gene Components And Products
[0065] III.E. Stress Responsive Genes, Gene Components And Products
   [0066] III.E.1. Cold Responsive Genes, Gene Components And Products
   [0067] III.E.2. Heat Responsive Genes, Gene Components And Products
   [0068] III.E.3. Drought Responsive Genes, Gene Components And Products
   [0069] III.E.4. Wounding Responsive Genes, Gene Components And Products
   [0070] III.E.5. Methyl Jasmonate Responsive Genes, Gene Components And Products
   [0071] III.E.6. Reactive Oxygen Responsive Genes, Gene Components And H₂O₂ Products
   [0072] III.E.7. Salicylic Acid Responsive Genes, Gene Components And Products
   [0073] III.E.8. Nitric Oxide Responsive Genes, Gene Components And Products
   [0074] III.E.9. Osmotic Stress Responsive Genes, Gene Components And Products
   [0075] III.E.10. Aluminum Responsive Genes, Gene Components And Products
   [0076] III.E.11. Cadmium Responsive Genes, Gene Components And Products
   [0077] III.E.12. Disease Responsive Genes, Gene Components And Products
   [0078] III.E.13. Defense Responsive Genes, Gene Components And Products
   [0079] III.E.14. Iron Responsive Genes, Gene Components And Products
   [0080] III.E.15. Shade Responsive Genes, Gene Components And Products
   [0081] III.E.16. Sulfur Responsive Genes, Gene Components And Products
   [0082] III.E.17. Zinc Responsive Genes, Gene Components And Products
   [0083] III.E.18. Vigor Responsive Genes, Gene Components And Products
   [0084] III.E.19. Sterol Responsive Genes, Gene Components And Products
   [0085] III.E.20. Branching Responsive Genes, Gene Components And Products
   [0086] III.E.21 Brittle-Snap Responsive Genes, Gene Components And Products
   [0087] III.E.22. pH Responsive Genes, Gene Components And Products
   [0088] III.E.23. Guard Cell Responsive Genes, Gene Components And Products
[0089] V. Enhanced Foods

### SUMMARY OF THE INVENTION

[0090] The present invention comprises polynucleotides, such as complete cDNA sequences and/or sequences of genomic DNA encompassing complete genes, fragments of genes, and/or regulatory elements of genes and/or regions with other functions and/or intergenic regions, hereinafter collectively referred to as Sequence-Determined DNA Fragments (SDFs) or sometimes collectively referred to as “genes or gene components”, or sometimes as “genes, gene components or products”, from different plant species, particularly corn, wheat, soybean, rice and Arabidopsis thaliana, and other plants and or mutants, variants, fragments or fusions of said SDFs and polypeptides or proteins derived therefrom. In some instances, the SDFs span the entirety of a protein-coding segment. In some instances, the entirety of an mRNA is represented. Complements of any sequence of the invention are also considered part of the invention.

[0091] Other objects of the invention are polynucleotides comprising exon sequences, polynucleotides comprising intron sequences, polynucleotides comprising introns together with exons, intron/exon junction sequences, 5′ untranslated sequences, and 3′ untranslated sequences of the SDFs of the present invention. Polynucleotides representing the joinder of any exons described herein, in any arrangement, for example, to produce a sequence encoding any desirable amino acid sequence are within the scope of the invention.

[0092] The present invention also resides in probes useful for isolating and identifying nucleic acids that hybridize to an SDF of the invention. The probes can be of any length, but more typically are 12-2000 nucleotides in length; more typically, 15 to 200 nucleotides long; even more typically, 18 to 100 nucleotides long.

[0093] Yet another object of the invention is a method of isolating and/or identifying nucleic acids using the following steps:
[0094] (a) contacting a probe of the instant invention with a polynucleotide sample under conditions that permit hybridization and formation of a polynucleotide duplex; and
[0095] (b) detecting and/or isolating the duplex of step (a).

[0096] The conditions for hybridization can be from low to moderate to high stringency conditions. The sample can include a polynucleotide having a sequence unique in a plant genome. Probes and methods of the invention are useful, for example, without limitation, for mapping of genetic traits and/or for positional cloning of a desired fragment of genomic DNA.

[0097] Probes and methods of the invention can also be used for detecting alternatively spliced messages within a species. Probes and methods of the invention can further be used to detect or isolate related genes in other plant species using genomic DNA (gDNA) and/or cDNA libraries. In some instances, especially when longer probes and low to moderate stringency hybridization conditions are used, the probe will hybridize to a plurality of cDNA and/or gDNA sequences of a plant. This approach is useful for isolating representatives of gene families which are identifiable by possession of a common functional domain in the gene product or which have common cis-acting regulatory sequences. This approach is also useful for identifying orthologous genes from other organisms.

[0098] The present invention also resides in constructs for modulating the expression of the genes comprised of all or a fragment of an SDF. The constructs comprise all or a fragment of the expressed SDF, or of a complementary sequence. Examples of constructs include ribozymes comprising RNA encoded by an SDF or by a sequence complementary thereto, antisense constructs, constructs comprising coding regions or parts thereof. Such constructs can be constructed using viral, plasmid, bacterial artificial chromosomes (BACs), plasmid artificial chromosomes (PACs), autonomous plant plasmids, plant artificial chromosomes or other types of vectors and exist in the plant as autonomous replicating sequences or as DNA integrated into the genome. When inserted into a host cell the construct is, preferably, functionally integrated with, or operatively linked to, a heterologous polynucleotide. For instance, a coding region from an SDF might be operably linked to a promoter that is functional in a plant.

[0099] The present invention also resides in host cells, including bacterial or yeast cells or plant cells, and plants that harbor constructs such as described above. Another aspect of the invention relates to methods for modulating expression of specific genes in plants by expression of the coding sequence of the constructs, by regulation of expression of one or more endogenous genes in a plant or by suppression of expression of the polynucleotides of the invention in a plant. Methods of modulation of gene expression include without limitation (1) inserting into a host cell additional copies of a polynucleotide comprising a coding sequence; (2) inserting antisense or ribozyme constructs into a host cell and (3) inserting into a host cell a polynucleotide comprising a sequence encoding a variant, fragment, or fusion of the native polypeptides of the instant invention.

### DETAILED DESCRIPTION OF THE INVENTION

I. Description of the Data

[0100] As noted above, the Applicants have obtained and analyzed an extensive amount of information on a large number of genes by use of the Ceres Genomic Engine. This information can be categorized into two basic types:
[0101] A. Sequence Information for the Inventions
[0102] B. Transcriptional Information for the Inventions

[0103] I.A. Sequence Information

[0104] To harness the potential of the plant genome, Applicants began by elucidating a large number gene sequences, including the sequences of gene components and products, and analyzing the data. The list of sequences and associated data are presented in the Reference and Sequence Tables of the present application (sometimes referred to as the “REF” and “SEQ” Tables). The Reference and Sequence tables include:
[0105] cDNA sequence;
[0106] coding sequence;
[0107] 5′ & 3′ UTR;
[0108] transcription start sites;
[0109] exon and intron boundaries in genomic sequence; and
[0110] protein sequence.

[0111] The Reference and Sequence Tables also include computer-based, comparative analyses between the protein sequences of the invention and sequences with known function. Proteins with similar sequences typically exhibit similar biochemical activities. The Reference table notes:
[0112] sequences of known function that are similar to the Applicants' proteins; and
[0113] biochemical activity that is associated with Applicants' proteins.

[0114] Also, by analyzing the protein sequences, Applicants were able to group the protein sequences into groups, wherein all the sequences in the group contain a signature sequence. The groups are presented in the Protein Group Table. The signature sequences are reported in the Protein Group Table. More detailed analyses of the signature sequences are shown in the Protein Group Matrix Table.

[0115] To identify gene components and products, Applicants took a cDNA/coding sequence approach. That is, Applicants initiated their studies either by isolating cDNAs and determining their sequences experimentally, or by identifying the coding sequence from genomic sequence with the aid of predictive algorithms. The cDNA sequences and coding sequences also are referred to as “Maximum Length Sequences” in the Reference tables. The cDNA and coding sequences were given this designation to indicate these were the maximum length of coding sequences identified by Applicants.

[0116] Due to this cDNA/coding sequence focus of the present application, the Reference and Sequence Tables were organized around cDNA and coding sequences. Each of these Maximum Length Sequences was assigned a unique identifier: Ceres Sequence ID NO, which is reported in the Tables.

[0117] All data that relate to these Maximum Length Sequences are grouped together, including 5′ & 3′ UTRs; transcription start sites; exon and intron boundaries in genomic sequence; protein sequence, etc.

[0118] Below, a more detailed explanation of the organization of the Reference and Sequence Tables and how the data in the tables were generated is provided.

[0119] a. cDNA

[0120] Applicants have ascertained the sequences of mRNAs from different organisms by reverse transcription of mRNA to DNA, which was cloned and then sequenced. These complementary DNA or cDNA sequences also are referred to as Maximum Length Sequences in the Reference Tables, which contain details on each of the sequences in the Sequence Tables.

[0121] Each sequence was assigned a Pat. Appln. Sequence ID NO: and an internal Ceres Sequence ID NO: as reported in the Reference Table, the section labeled “(Ac) cDNA Sequence.” An example is shown below:
[0122] Max Len. Seq.:
[0123] (Ac) cDNA Sequence
   [0124] Pat. Appln. Sequence ID NO: 174538
   [0125] Ceres Sequence ID NO: 5673127

[0126] Both numbers are included in the Sequence Table to aid in tracking of information, as shown below:

| | |
|---|---|
| <210> | 174538 (Pat. Appln. Sequence ID NO:) |
| <211> | 1846 |
| <212> | DNA (genomic) |
| <213> | Arabidopsis thaliana |
| <221> | misc_feature |
| <222> | (1)..(1846) |
| <223> | Ceres Seq. ID no. 5673127 |
| <220> | |
| <221> | misc_feature |
| <222> | [symbol] .. [symbol] |
| <223> | n is a, c, t, g, unknown, or other |
| <400> | 174538 |

acaagaacaa caaaacagag gaagaagaag aagaagatga
agcttctggc tctgtttcca 60
tttctagcga tcgtgatcca actcagctgt . . . etc.

[0127] The Sequence and Reference Tables are divided into sections by organism: Arabidopsis thaliana, Brassica napus, Glycine max, Zea mays, Triticum aestivum; and Oryza sativa.

[0128] b. Coding Sequence

[0129] The coding sequence portion of the cDNA was identified by using computer-based algorithms and comparative biology. The sequence of each coding sequence of the cDNA is reported in the “PolyP Sequence” section of the Reference Tables, which are also divided into sections by organism. An example shown below for the peptides that relate to the cDNA sequence above

PolyP Sequence

[0130] Pat. Appln. Sequence ID NO 174539
[0131] Ceres Sequence ID NO 5673128
[0132] Loc. Sequence ID NO 174538: @ 1 nt.
[0133] Loc. Sig. P. Sequence ID NO 174539: @ 37 aa.

[0134] The polypeptide sequence can be found in the Sequence Tables by either the Pat. Appln. Sequence ID NO or by the Ceres Sequence ID NO: as shown below:

| | |
|---|---|
| <210> | 174539 (Pat. Appln. Sequence ID NO) |
| <211> | 443 |
| <212> | PRT |
| <213> | Arabidopsis thaliana |
| <220> | |
| <221> | peptide |
| <222> | (1)..(443) |
| <223> | Ceres Seq. ID no. 5673128 |
| <220> | |
| <221> | misc_feature |
| <222> | [symbol] .. [symbol] |
| <223> | xaa is any aa, unknown or other |
| <400> | 174539 |

Thr Arg Thr Thr Lys Gln Arg Lys Lys Lys Lys Lys
1 5 10 15
Met Lys Leu Leu Ala Leu Phe Pro Phe Leu
25
Ala Ile... etc.

[0135] The PolyP section also indicates where the coding region begins in the Maximum Length Sequence. More than one coding region may be indicated for a single polypeptide due to multiple potential translation start codons. Coding sequences were identified also by analyzing genomic sequence by predictive algorithms, without the actual cloning of a cDNA molecule from an mRNA. By default, the cDNA sequence was considered the same as the coding sequence, when Maximum Length Sequence was spliced together from a genomic annotation.

[0136] c. 5′ and 3′ UTR

[0137] The 5′ UTR can be identified as any sequence 5′ of the initiating codon of the coding sequence in the cDNA sequence. Similarly, the 3′ UTR is any sequence 3′ of the terminating codon of the coding sequence.

[0138] d. Transcription Start Sites

[0139] Applicants cloned a number of cDNAs that encompassed the same coding sequence but comprised 5′ UTRs of different lengths. These different lengths revealed the multiple transcription start sites of the gene that corresponded to the cDNA. These multiple transcription start sites are reported in the “Sequence # w. TSS” section” of the Reference Tables.

[0140] e. Exons & Introns

[0141] Alignment of the cDNA sequences and coding portions to genomic sequence permitted Applicants to pinpoint the exon/intron boundaries. These boundaries are identified in the Reference Table under the “Pub gDNA” section. That section reports the gi number of the public BAC sequence that contains the introns and exons of interest. An example is shown below:
[0142] Max Len. Seq.:
[0143] Pub gDNA:
   [0144] gi No: 1000000005
   [0145] Gen. seq. in cDNA:
      [0146] 115777 . . . 115448 by Method #1
      [0147] 115105 . . . 114911 by Method #1
      [0148] 114822 . . . 114700 by Method #1
      [0149] 114588 . . . 114386 by Method #1
      [0150] 114295 . . . 113851 by Method #1
      [0151] 115777 . . . 115448 by Method #2
      [0152] 115105 . . . 114911 by Method #2
      [0153] 114822 . . . 114700 by Method #2
      [0154] 114588 . . . 114386 by Method #2
      [0155] 114295 . . . 113851 by Method #2
      [0156] 115813 . . . 115448 by Method #3
      [0157] 115105 . . . 114911 by Method #3
      [0158] 114822 . . . 114700 by Method #3
      [0159] 114588 . . . 114386 by Method #3
      [0160] 114295 . . . 113337 by Method #3

[0161] (Ac) cDNA Sequence

[0162] All the gi numbers were assigned by Genbank to track the public genomic sequences except:
[0163] gi 1000000001
[0164] gi 1000000002
[0165] gi 1000000003
[0166] gi 1000000004; and
[0167] gi 1000000005.

[0168] These gi numbers were assigned by Applicants to the five Arabidopsis chromosome sequences that were published by the Institute of Genome Research (TIGR). Gi 1000000001 corresponds to chromosome 1, Gi 1000000002 to chromosome 2, etc.

[0169] The method of annotation is indicated as well as any similar public annotations.

[0170] f. Promoters & Terminators

[0171] Promoter sequences are 5′ of the translational start site in a gene; more typically, 5′ of the transcriptional start site or sites. Terminator sequences are 3′ of the translational terminator codon; more typically, 3′ of the end of the 3′ UTR.

[0172] For even more specifics of the Reference and Sequence Tables, see the section below titled “Brief Description of the Tables.”

[0173] I.B. Transcriptional (Differential Expression) Information—Introduction to Differential Expression Data & Analyses

[0174] A major way that a cell controls its response to internal or external stimuli is by regulating the rate of transcription of specific genes. For example, the differentiation of cells during organogenensis into forms characteristic of the organ is associated with the selective activation and repression of large numbers of genes. Thus, specific organs, tissues and cells are functionally distinct due to the different populations of mRNAs and protein products they possess. Internal signals program the selective activation and repression programs. For example, internally synthesized hormones produce such signals. The level of hormone can be raised by increasing the level of transcription of genes encoding proteins concerned with hormone synthesis.

[0175] To measure how a cell reacts to internal and/or external stimuli, individual mRNA levels can be measured and used as an indicator for the extent of transcription of the gene. Cells can be exposed to a stimulus, and mRNA can be isolated and assayed at different time points after stimulation. The mRNA from the stimulated cells can be compared to control cells that were not stimulated. The mRNA levels of particular Maxiumum Length Sequences that are higher in the stimulated cell versus the control indicate a stimulus-specific response of the cell. The same is true of mRNA levels that are lower in stimulated cells versus the control condition.

[0176] Similar studies can be performed with cells taken from an organism with a defined mutation in their genome as compared with cells without the mutation. Altered mRNA levels in the mutated cells indicate how the mutation causes transcriptional changes. These transcriptional changes are associated with the phenotype that the mutated cells exhibit that is different from the phenotype exhibited by the control cells.

[0177] Applicants use microarray techniques to measure the levels of mRNAs in cells from mutant plants, stimulated plants, and/or selected from specific organs. The differential expression of various genes in the samples versus controls are listed in the MA Tables.

[0178] a. Experimental Detail

[0179] A microarray is a small solid support, usually the size of a microscope slide, onto which a number of polynucleotides have been spotted onto or synthesized in distinct positions on the slide (also referred to as a chip). Typically, the polynucleotides are spotted in a grid formation. The polynucleotides can either be Maximum Length Sequences or shorter synthetic oligonucleotides, whose sequence is complementary to specific Maximum Length Sequence entities. A typical chip format is as follows:

| | | |
|---|---|---|
| Oligo #1 | Oligo #2 | Oligo #3 |
| Oligo #4 | Oligo #5 | Oligo #6 |
| Oligo #7 | Oligo #8 | Oligo #9 |

[0180] For Applicants' experiments, samples are hybridized to the chips using the “two-color” microarray procedure. A fluorescent dye is used to label cDNA reverse-transcribed from mRNA isolated from cells that had been stimulated, mutated, or collected from a specific organ or developmental stage. A second fluorescent dye of another color is used to label cDNA prepared from control cells.

[0181] The two differentially-labeled cDNAs are mixed together. Microarray chips are incubated with this mixture. For Applicants' experiments, the two dyes that are used are Cy3, which fluoresces in the red color range, and Cy5, which fluoresces in the green/blue color range. Thus, if:
[0182] cDNA#1 binds to Oligo #1;
[0183] cDNA#1 from the sample is labeled red;
[0184] cDNA#1 from the control is labeled green, and
[0185] cDNA#1 is in both the sample and control,

[0186] then cDNA#1 from both the sample and control will bind to Oligo#1 on the chip. If the sample has 10 times more cDNA#1 than the control, then 10 times more of the cDNA#1 would be hybridized to Oligo#1. Thus, the spot on the chip with Oligo#1 spot would look red.

| | | |
|---|---|---|
| | Oligo #2 | Oligo #3 |
| Oligo #4 | Oligo #5 | Oligo #6 |
| Oligo #7 | Oligo #8 | Oligo #9 |

If the situation were reversed, the spot would appear green. If the sample has approximately the same amount of cDNA#1 as the control, then the Oligo#1 spot on the chip would look yellow. These color differentials are measured quantitatively and used to deduce the relative concentration of mRNAs from individual genes in particular samples.

[0187] b. MA Table

[0188] To generate data, Applicants label and hybridize the sample and control mRNA in duplicate experiments. One chip is exposed to a mixture of cDNAs from both a sample and control, where the sample cDNA is labeled with Cy3, and the control is labeled with Cy5 dye. For the second labeling and chip hybridization experiments, the fluorescent labels are reversed; that is, the Cy5 dye is used for the sample, and the Cy3 dye is used for the control.

[0189] Whether Cy5 or Cy3 is used to label the sample, the fluorescence produced by the sample is divided by the fluorescence of the control. A cDNA is determined to be differentially expressed in response to the stimulus in question if a statistically-significantly ratio difference in the sample versus the control is measured by both chip hybridization experiments.

[0190] The MA tables show which cDNA is significantly up-regulated as designated by a “+” and which is significantly down-regulated as designated by a “−” for each pair of chips using the same sample and control.

[0191] I.D. Brief Description of the Data Contained in the Sequence Listing-Miscellaneous Feature Field

1. Reference and Sequence Data

[0192] The sequences of exemplary SDFs and polypeptides corresponding to the coding sequences of the instant invention are described in the Sequence Listing. The Miscellaneous Feature field of the Sequence Listing contains data associated with the particular sequence. For example, it may refer to a number of “Maximum Length Sequences” or “MLS.” Each MLS corresponds to the longest cDNA obtained, either by cloning or by the prediction from genomic sequence. The sequence of the MLS is the cDNA sequence as described in the Av subsection of the miscellaneous feature field.

[0193] The Miscellaneous Feature field also includes the following information relating to each MLS:
[0194] I. cDNA Sequence
   [0195] A. 5′ UTR
   [0196] B. Coding Sequence
   [0197] C. 3′ UTR
[0198] II. Genomic Sequence
   [0199] A. Exons
   [0200] B. Introns
   [0201] C. Promoters
[0202] III. Link of cDNA Sequences to Clone IDs
[0203] IV. Multiple Transcription Start Sites
[0204] V. Polypeptide Sequences
   [0205] A. Signal Peptide
   [0206] B. Domains
   [0207] C. Related Polypeptides
[0208] VI. Related Polynucleotide Sequences

[0209] I. cDNA Sequence

[0210] Indicates which sequence in the Sequence Listing represents the sequence of each MLS. The MLS sequence can comprise 5′ and 3′ UTR as well as coding sequences. In addition, specific cDNA clone numbers also are included when the MLS sequence relates to a specific cDNA clone.

[0211] A. 5′ UTR

[0212] The location of the 5′ UTR can be determined by comparing the most 5′ MLS sequence with the corresponding genomic sequence as indicated in the miscellaneous feature field. The sequence that matches, beginning at any of the transcriptional start sites and ending at the last nucleotide before any of the translational start sites corresponds to the 5′ UTR.

[0213] B. Coding Region

[0214] The coding region is the sequence in any open reading frame found in the MLS. Coding regions of interest are indicated in the PolyP SEQ subsection.

[0215] C. 3′ UTR

[0216] The location of the 3′ UTR can be determined by comparing the most 3′ MLS sequence with the corresponding genomic sequence. The sequence that matches, beginning at the translational stop site and ending at the last nucleotide of the MLS corresponds to the 3′ UTR.

[0217] II. Genomic Sequence

[0218] Further, the miscellaneous feature field indicates the specific “gi” number of the genomic sequence if the sequence resides in a public databank. For each genomic sequence, the miscellaneous feature field indicates which regions are included in the MLS. These regions can include the 5′ and 3′ UTRs as well as the coding sequence of the MLS. See, for example, the scheme below:

[chemical structure]

[0219] The first and last base of each region that is included in an MLS sequence is reported. An example is shown below:
[0220] gi No. 47000:
[0221] 37102 . . . 37497
[0222] 37593 . . . 37925

[0223] The numbers indicate that the MLS contains the following sequences from two regions of gi No. 47000; a first region including bases 37102-37497, and a second region including bases 37593-37925.

[0224] A. Exon Sequences

[0225] The location of the exons can be determined by comparing the sequence of the regions from the genomic sequences with the corresponding MLS sequence.

[0226] i. Initial Exon

[0227] To determine the location of the initial exon, information from the
[0228] (1) polypeptide sequence section;
[0229] (2) cDNA polynucleotide section; and
[0230] (3) the genomic sequence section
[0231] is used. First, the polypeptide section indicates where the translational start site is located in the MLS sequence. The MLS sequence can be matched to the genomic sequence that corresponds to the MLS. Based on the match between the MLS and corresponding genomic sequences, the location of the translational start site can be determined in one of the regions of the genomic sequence. The location of this translational start site is the start of the first exon.

[0232] Generally, the last base of the exon of the corresponding genomic region, in which the translational start site is located, will represent the end of the initial exon. In some cases, the initial exon ends with a stop codon, when the initial exon is the only exon.

[0233] In the case when sequences representing the MLS are in the positive strand of the corresponding genomic sequence, the last base will be a larger number than the first base. When the sequences representing the MLS are in the negative strand of the corresponding genomic sequence, then the last base will be a smaller number than the first base.

[0234] ii. Internal Exons

[0235] Except for the regions that comprise the 5′ and 3′ UTRs, initial exon, and terminal exon, the remaining genomic regions that match the MLS sequence are the internal exons. Specifically, the bases defining the boundaries of the remaining regions also define the intron/exon junctions of the internal exons.

[0236] iii. Terminal Exon

[0237] As with the initial exon, the location of the terminal exon is determined with information from the
[0238] (1) polypeptide sequence section;
[0239] (2) cDNA polynucleotide section; and
[0240] (3) the genomic sequence section.

[0241] The polypeptide section will indicate where the stop codon is located in the MLS sequence. The MLS sequence can be matched to the corresponding genomic sequence. Based on the match between MLS and corresponding genomic sequences, the location of the stop codon can be determined in one of the regions of the genomic sequence. The location of this stop codon is the end of the terminal exon. Generally, the first base of the exon of the corresponding genomic region that matches the cDNA sequence, in which the stop codon is located, will represent the beginning of the terminal exon. In some cases, the translational start site represents the start of the terminal exon, which is the only exon.

[0242] In the case when the MLS sequences are in the positive strand of the corresponding genomic sequence, the last base will be a larger number than the first base. When the MLS sequences are in the negative strand of the corresponding genomic sequence, then the last base will be a smaller number than the first base.

[0243] B. Intron Sequences

[0244] In addition, the introns corresponding to the MLS are defined by identifying the genomic sequence located between the regions where the genomic sequence comprises exons. Thus, introns are defined as starting one base downstream of a genomic region comprising an exon, and end one base upstream from a genomic region comprising an exon.

[0245] C. Promoter Sequences

[0246] As indicated below, promoter sequences corresponding to the MLS are defined as sequences upstream of the first exon; more usually, as sequences upstream of the first of multiple transcription start sites; even more usually as sequences about 2,000 nucleotides upstream of the first of multiple transcription start sites.

[0247] III. Link of cDNA Sequences to Clone IDs

[0248] As noted above, the cDNA clone(s) that relate to each MLS are identified. The MLS sequence can be longer than the sequences included in the cDNA clones. In such a case the region of the MLS that is included in the clone is indicated. If either the 5′ or 3′ termini of the cDNA clone sequence is the same as the MLS sequence, no mention will be made.

[0249] IV. Multiple Transcription Start Sites

[0250] Initiation of transcription can occur at a number of sites of the gene. The possible multiple transcription sites for each gene is indicated and the location of the transcription start sites can be either a positive or negative number.

[0251] The positions indicated by positive numbers refer to the transcription start sites as located in the MLS sequence. The negative numbers indicate the transcription start site within the genomic sequence that corresponds to the MLS.

[0252] To determine the location of the transcription start sites with the negative numbers, the MLS sequence is aligned with the corresponding genomic sequence. In the instances when a public genomic sequence is referenced, the relevant corresponding genomic sequence can be found by direct reference to the nucleotide sequence indicated by the “gi” number shown in the public genomic DNA section. When the position is a negative number, the transcription start site is located in the corresponding genomic sequence upstream of the base that matches the beginning of the MLS sequence in the alignment. The negative number is relative to the first base of the MLS sequence that matches the genomic sequence corresponding to the relevant “gi” number.

[0253] In the instances when no public genomic DNA is referenced, the relevant nucleotide sequence for alignment is the nucleotide sequence associated with the amino acid sequence designated by “gi” number of the later PolyP SEQ subsection.

[0254] V. Polypeptide Sequences

[0255] The PolyP SEQ subsection lists SEQ ID NOs and Ceres SEQ ID NO for polypeptide sequences corresponding to the coding sequence of the MLS sequence and the location of the translational start site with the coding sequence of the MLS sequence.

[0256] The MLS sequence can have multiple translational start sites and can be capable of producing more than one polypeptide sequence.

[0257] A. Signal Peptide

[0258] The miscellaneous featuee field also indicates in subsection (B) the cleavage site of the putative signal peptide of the polypeptide corresponding to the coding sequence of the MLS sequence. Typically, signal peptide coding sequences comprise a sequence encoding the first residue of the polypeptide to the cleavage site residue.

[0259] B. Domains

[0260] Subsection (C) provides information regarding identified domains (where present) within the polypeptide and (where present) a name for the polypeptide domain.

[0261] C. Related Polypeptides

[0262] Subsection (Dp) provides (where present) information concerning amino acid sequences that are found to be related and have some percentage of sequence identity to the polypeptide sequences. Each of these related sequences is identified by a “gi” number.

[0263] VI. Related Polynucleotide Sequences

[0264] Subsection (Dn) provides polynucleotide sequences (where present) that are related to and have some percentage of sequence identity to the MLS or corresponding genomic sequence.

| Abbreviation | Description |
|---|---|
| Max Len. Seq. | Maximum Length Sequence |
| rel to | Related to |
| Clone Ids | Clone ID numbers |
| Pub gDNA | Public Genomic DNA |
| gi No. | gi number |
| Gen. Seq. in Cdna | Genomic Sequence in cDNA |
| | (Each region for a single gene prediction is |
| | listed on a separate line. |
| | In the case of multiple gene predictions, the |
| | group of regions relating to a single prediction |
| | are separated by a blank line) |
| (Ac) cDNA SEQ | cDNA sequence |
| Pat. Appln. SEQ ID NO | Patent Application SEQ ID NO: |
| Ceres SEQ ID NO: | Ceres SEQ ID NO: |
| 1673877 | |
| SEQ # w. TSS | Location within the cDNA sequence, SEQ ID |
| | NO:, of Transcription Start Sites which are |
| | listed below |
| Clone ID #: # -> # | Clone ID comprises bases # to # of the cDNA |
| | Sequence |
| PolyP SEQ | Polypeptide Sequence |
| Pat. Appln. SEQ ID NO: | Patent Application SEQ ID NO: |
| Ceres SEQ ID NO | Ceres SEQ ID NO: |
| Loc. SEQ ID NO: @ nt. | Location of translational start site in cDNA of |
| | SEQ ID NO: at nucleotide number |
| (C) Pred. PP Nom. & | Nomination and Annotation of Domains within |
| Annot. | Predicted Polypeptide(s) |
| (Title) | Name of Domain |
| Loc. SEQ ID NO #: | Location of the domain within the polypeptide |
| # -> # aa. | of SEQ ID NO: from # to # amino acid |
| | residues. |
| (Dp) Rel. AA SEQ | Related Amino Acid Sequences |
| Align. NO | Alignment number |
| gi No | Gi number |
| Desp. | Description |
| % Idnt. | Percent identity |
| Align. Len. | Alignment Length |
| Loc. SEQ ID NO: | Location within SEQ ID NO: from # to # |
| # -> # aa | amino acid residue. |

2. MA_diff Data

[0265] The MA_diff data present in the Miscellaneous features field presents the results of the differential expression experiments for the mRNAs, as reported by their corresponding cDNA ID number, that were differentially transcribed under a particular set of conditions as compared to a control sample.

[0266] The Table is organized according to each set of experimental conditions, which are denoted by the term “Expt ID:” followed by a particular number. The table below links each Expt ID with a short description of the experiment and the parameters.

[0267] The first column contains the cDNA ID number, which corresponds to those utilized in the Sequence Listing and Miscellaneous Features fields. This identification number is followed by the “Expt ID” identifier. Next, the differential expression under those particular conditions is shown. Here, increases in mRNA abundance levels in experimental plants versus the controls are denoted with the number one (1). Likewise, reductions in mRNA abundance levels in the experimental plants are denoted with the number minus one (−1). Lastly, the utility of the sequence is noted.

MA_diff (Experiment) Table

[0268] The following Table summarizes the experimental procedures utilized for the differential expression experiments, each experiment being identified by a unique “Expt ID” number.

| Experiment | | | | | |
|---|---|---|---|---|---|
| short name | genome | EXPT_ID | Value | PARAMETER | UNITS |
| 3642-1 | Arabidopsis | 108512 | 3746-1 | Plant Line | Hours |
| Arab_0.001%_MeJA_1 | Arabidopsis | 108568 | Aerial | Tissue | Tissue |
| | | | 0.001%_MeJA | Treatment | Compound |
| | | | 1 | Timepoint | Hours |
| Arab_0.001%_MeJA_1 | Arabidopsis | 108569 | Aerial | Tissue | Tissue |
| | | | 6 | Timepoint | Hours |
| | | | 0.001%_MeJA | Treatment | Compound |
| Arab_0.1 uM_Epi- | Arabidopsis | 108580 | Aerial | Tissue | Tissue |
| Brass_1 | | | | | |
| | | | 1 | Timepoint | Hours |
| | | | 0.1 uM_Brassino_Steroid | Treatment | Compound |
| Arab_0.1 uM_Epi- | Arabidopsis | 108581 | Aerial | Tissue | Tissue |
| Brass_1 | | | | | |
| | | | 6 | Timepoint | Hours |
| | | | 0.1 uM_Brassino_Steroid | Treatment | Compound |
| Arab_100 uM_ABA_1 | Arabidopsis | 108560 | Aerial | Tissue | Tissue |
| | | | 1 | Timepoint | Hours |
| | | | 100 uM_ABA | Treatment | Compound |
| Arab_100 uM_ABA_1 | Arabidopsis | 108561 | Aerial | Tissue | Tissue |
| | | | 100 uM_ABA | Treatment | Compound |
| | | | 6 | Timepoint | Hours |
| Arab_100 uM_BA_1 | Arabidopsis | 108566 | Aerial | Tissue | Tissue |
| | | | 1 | Timepoint | Hours |
| | | | 100 uM_BA | Treatment | Compound |
| Arab_100 uM_BA_1 | Arabidopsis | 108567 | Aerial | Tissue | Tissue |
| | | | 100 uM_BA | Treatment | Compound |
| | | | 6 | Timepoint | Hours |
| Arab_100 uM_GA3_1 | Arabidopsis | 108562 | Aerial | Tissue | Tissue |
| | | | 1 | Timepoint | Hours |
| | | | 100 uM GA3 | Treatment | Compound |
| Arab_100 uM_GA3_1 | Arabidopsis | 108563 | Aerial | Tissue | Tissue |
| | | | 100 uM GA3 | Treatment | Compound |
| | | | 6 | Timepoint | Hours |
| Arab_100 uM_NAA_1 | Arabidopsis | 108564 | Aerial | Tissue | Tissue |
| | | | 1 | Timepoint | Hours |
| | | | 100 uM_NAA | Treatment | Compound |
| Arab_100 uM_NAA_1 | Arabidopsis | 108565 | Aerial | Tissue | Tissue |
| | | | 100 uM_NAA | Treatment | Compound |
| | | | 6 | Timepoint | Hours |
| Arab_20%_PEG_1 | Arabidopsis | 108570 | Aerial | Tissue | Tissue |
| | | | 1 | Timepoint | Hours |
| | | | 20% PEG | Treatment | Compound |
| Arab_20%_PEG_1 | Arabidopsis | 108571 | Aerial | Tissue | Tissue |
| | | | 20% PEG | Treatment | Compound |
| | | | 6 | Timepoint | Hours |
| Arab_2 mM_SA_1 | Arabidopsis | 108586 | Aerial | Tissue | Tissue |
| | | | 2 mM_SA | Treatment | Compound |
| | | | 1 | Timepoint | Hours |
| Arab_2 mM_SA_1 | Arabidopsis | 108587 | Aerial | Tissue | Tissue |
| | | | 6 | Timepoint | Hours |
| | | | 2 mM_SA | Treatment | Compound |
| Arab_5 mM_H2O2_1 | Arabidopsis | 108582 | Aerial | Tissue | Tissue |
| | | | 1 | Timepoint | Hours |
| | | | 5 mM_H2O2 | Treatment | Compound |
| Arab_5 mM_H2O2_1 | Arabidopsis | 108583 | Aerial | Tissue | Tissue |
| | | | 5 mM_H2O2 | Treatment | Compound |
| | | | 6 | Timepoint | Hours |
| Arab_5 mM_NaNP_1 | Arabidopsis | 108584 | Aerial | Tissue | Tissue |
| | | | 1 | Timepoint | Hours |
| | | | 5 mM_NaNP | Treatment | Compound |
| Arab_5 mM_NaNP_1 | Arabidopsis | 108585 | Aerial | Tissue | Tissue |
| | | | 5 mM_NaNP | Treatment | Compound |
| | | | 6 | Timepoint | Hours |
| Arab_Cold_1 | Arabidopsis | 108578 | Aerial | Tissue | Tissue |
| | | | Cold | Treatment | Compound |
| | | | 1 | Timepoint | Hours |
| Arab_Cold_1 | Arabidopsis | 108579 | Aerial | Tissue | Tissue |
| | | | 6 | Timepoint | Hours |
| | | | Cold | Treatment | Compound |
| Arab_Drought_1 | Arabidopsis | 108572 | Aerial | Tissue | Tissue |
| | | | 1 | Timepoint | Hours |
| | | | Drought | Treatment | Compound |
| Arab_Drought_1 | Arabidopsis | 108573 | Aerial | Tissue | Tissue |
| | | | Drought | Treatment | Compound |
| | | | 6 | Timepoint | Hours |
| Arab_Heat_1 | Arabidopsis | 108576 | Aerial | Tissue | Tissue |
| | | | 1 | Timepoint | Hours |
| | | | Heat (42 deg | Treatment | Compound |
| | | | C) | | |
| Arab_Heat_1 | Arabidopsis | 108577 | Aerial | Tissue | Tissue |
| | | | Heat (42 deg | Treatment | Compound |
| | | | C) | | |
| | | | 6 | Timepoint | Hours |
| Arab_Ler- | Arabidopsis | 108595 | Ler_pi | Plant Line | Hours |
| pi_ovule_1 | | | | | |
| | | | Ovule | Tissue | Tissue |
| Arab_Ler- | Arabidopsis | 108594 | Ler_rhl | Plant Line | Hours |
| rhl_root_1 | | | | | |
| | | | Root | Tissue | Tissue |
| Arab_NO3_H- | Arabidopsis | 108592 | Aerial | Tissue | Tissue |
| to-L_1 | | | | | |
| | | | Low Nitrogen | Treatment | Compound |
| | | | 12 | Timepoint | Hours |
| Arab_NO3_H- | Arabidopsis | 108593 | Aerial | Tissue | Tissue |
| to-L_1 | | | | | |
| | | | 24 | Timepoint | Hours |
| | | | Low Nitrogen | Treatment | Compound |
| Arab_NO3_L- | Arabidopsis | 108588 | Aerial | Tissue | Tissue |
| to-H_1 | | | | | |
| | | | 2 | Timepoint | Hours |
| | | | Nitrogen | Treatment | Compound |
| Arab_NO3_L- | Arabidopsis | 108589 | Aerial | Tissue | Tissue |
| to-H_1 | | | | | |
| | | | Nitrogen | Treatment | Compound |
| | | | 6 | Timepoint | Hours |
| Arab_NO3_L- | Arabidopsis | 108590 | Aerial | Tissue | Tissue |
| to-H_1 | | | | | |
| | | | 9 | Timepoint | Hours |
| | | | Nitrogen | Treatment | Compound |
| Arab_NO3_L- | Arabidopsis | 108591 | Aerial | Tissue | Tissue |
| to-H_1 | | | | | |
| | | | Nitrogen | Treatment | Compound |
| | | | 12 | Timepoint | Hours |
| Arab_Wounding_1 | Arabidopsis | 108574 | Aerial | Tissue | Tissue |
| | | | 1 | Timepoint | Hours |
| | | | Wounding | Treatment | Compound |
| Arab_Wounding_1 | Arabidopsis | 108575 | Aerial | Tissue | Tissue |
| | | | Wounding | Treatment | Compound |
| | | | 6 | Timepoint | Hours |
| Columbia/CS3726 | Arabidopsis | 108475 | Columbia | species | Hours |
| flower SA | | | | | |
| | | | SA | Treatment | Compound |
| | | | 5 weeks | Timepoint | Hours |
| Columbia/CS3726 | Arabidopsis | 108476 | CS3726 | species | Hours |
| flower SA | | | | | |
| | | | 5 weeks | Timepoint | Hours |
| | | | SA | Treatment | Compound |
| Corn_0.001Percent_MeJA | Zea Mays | 108555 | Aerial | Tissue | Tissue |
| | | | 24 | Timepoint | Hours |
| | | | 0.001%_MeJA | Treatment | Compound |
| Corn_0.1 uM_Brassino_Steroid | Zea Mays | 108557 | 24 | Timepoint | Hours |
| | | | Aerial | Tissue | Tissue |
| | | | 0.1 uM_Brassino_Steroid | Treatment | Compound |
| Corn_100 uM_ABA | Zea Mays | 108513 | Aerial | Tissue | Tissue |
| | | | ABA | Treatment | Compound |
| | | | 6 | Timepoint | Hours |
| Corn_100 uM_ABA | Zea Mays | 108597 | Aerial | Tissue | Tissue |
| | | | 24 | Timepoint | Hours |
| | | | 100 uM_ABA | Treatment | Compound |
| Corn_100 uM_BA | Zea Mays | 108517 | Aerial | Tissue | Tissue |
| | | | 6 | Timepoint | Hours |
| | | | BA | Treatment | Compound |
| Corn_100 uM_GA3 | Zea Mays | 108519 | Aerial | Tissue | Tissue |
| | | | 100 uM | Treatment | Compound |
| | | | Giberillic | | |
| | | | Acid | | |
| | | | 1 | Timepoint | Hours |
| Corn_100 uM_GA3 | Zea Mays | 108520 | Aerial | Tissue | Tissue |
| | | | 6 | Timepoint | Hours |
| | | | 100 uM | Treatment | Compound |
| | | | Giberillic | | |
| | | | Acid | | |
| Corn_100 uM_GA3 | Zea Mays | 108521 | Aerial | Tissue | Tissue |
| | | | 100 uM | Treatment | Compound |
| | | | Giberillic | | |
| | | | Acid | | |
| | | | 12 | Timepoint | Hours |
| Corn_100 uM_NAA | Zea Mays | 108516 | Aerial | Tissue | Tissue |
| | | | NAA | Treatment | Compound |
| | | | 6 | Timepoint | Hours |
| Corn_100 uM_NAA | Zea Mays | 108554 | Aerial | Tissue | Tissue |
| | | | 24 | Timepoint | Hours |
| | | | NAA | Treatment | Compound |
| Corn_1400- | Zea Mays | 108598 | Shoot apices | Tissue | Tissue |
| 6/S-17 | | | | | |
| Corn_150 mM_NaCl | Zea Mays | 108541 | Aerial | Tissue | Tissue |
| | | | 1 | Timepoint | Hours |
| | | | 150 mM_NaCl | Treatment | Compound |
| Corn_150 mM_NaCl | Zea Mays | 108542 | Aerial | Tissue | Tissue |
| | | | 150 mM_NaCl | Treatment | Compound |
| | | | 6 | Timepoint | Hours |
| Corn_150 mM_NaCl | Zea Mays | 108553 | Aerial | Tissue | Tissue |
| | | | 24 | Timepoint | Hours |
| | | | 150 mM_NaCl | Treatment | Compound |
| Corn_20%_PEG | Zea Mays | 108539 | Aerial | Tissue | Tissue |
| | | | 1 | Timepoint | Hours |
| | | | 20% PEG | Treatment | Compound |
| Corn_20%_PEG | Zea Mays | 108540 | Aerial | Tissue | Tissue |
| | | | 20% PEG | Treatment | Compound |
| | | | 6 | Timepoint | Hours |
| Corn_2 mM_SA | Zea Mays | 108515 | Aerial | Tissue | Tissue |
| | | | SA | Treatment | Compound |
| | | | 12 | Timepoint | Hours |
| Corn_2 mM_SA | Zea Mays | 108552 | Aerial | Tissue | Tissue |
| | | | SA | Treatment | Compound |
| | | | 24 | Timepoint | Hours |
| Corn_5 mM_H2O2 | Zea Mays | 108537 | Aerial | Tissue | Tissue |
| | | | H2O2 | Treatment | Compound |
| | | | 1 | Timepoint | Hours |
| Corn_5 mM_H2O2 | Zea Mays | 108538 | Aerial | Tissue | Tissue |
| | | | 6 | Timepoint | Hours |
| | | | H2O2 | Treatment | Compound |
| Corn_5 mM_H2O2 | Zea Mays | 108558 | Aerial | Tissue | Tissue |
| | | | 24 | Timepoint | Hours |
| | | | H2O2 | Treatment | Compound |
| Corn_5 mM_NO | Zea Mays | 108526 | Aerial | Tissue | Tissue |
| | | | NO | Treatment | Compound |
| | | | 1 | Timepoint | Hours |
| Corn_5 mM_NO | Zea Mays | 108527 | Aerial | Tissue | Tissue |
| | | | 6 | Timepoint | Hours |
| | | | NO | Treatment | Compound |
| Corn_5 mM_NO | Zea Mays | 108559 | Aerial | Tissue | Tissue |
| | | | 12 | Timepoint | Hours |
| | | | NO | Treatment | Compound |
| Corn_Cold | Zea Mays | 108533 | Aerial | Tissue | Tissue |
| | | | 1 | Timepoint | Hours |
| | | | Cold | Treatment | Compound |
| Corn_Cold | Zea Mays | 108534 | Aerial | Tissue | Tissue |
| | | | Cold | Treatment | Compound |
| | | | 6 | Timepoint | Hours |
| Corn_Drought | Zea Mays | 108502 | Drought | Treatment | Compound |
| | | | 1 | Timepoint | Hours |
| Corn_Drought | Zea Mays | 108503 | Drought | Treatment | Compound |
| | | | 6 | Timepoint | Hours |
| Corn_Drought | Zea Mays | 108504 | Drought | Treatment | Compound |
| | | | 12 | Timepoint | Hours |
| Corn_Drought | Zea Mays | 108556 | Drought | Treatment | Compound |
| | | | 24 | Timepoint | Hours |
| Corn_Heat | Zea Mays | 108522 | Aerial | Tissue | Tissue |
| | | | 1 | Timepoint | Hours |
| | | | Heat (42 deg | Treatment | Compound |
| | | | C) | | |
| Corn_Heat | Zea Mays | 108523 | Aerial | Tissue | Tissue |
| | | | 6 | Timepoint | Hours |
| | | | Heat (42 deg | Treatment | Compound |
| | | | C) | | |
| Corn_Imbibed | Zea Mays | 108518 | Imbibed | Treatment | Compound |
| Seeds | | | | | |
| | | | 4 | Age | days old |
| | | | Roots | Tissue | Tissue |
| Corn_Imbibed | Zea Mays | 108528 | Imbibed | Treatment | Compound |
| Seeds | | | | | |
| | | | Aerial | Tissue | Tissue |
| | | | 5 | Age | days old |
| Corn_Imbibed | Zea Mays | 108529 | Imbibed | Treatment | Compound |
| Seeds | | | | | |
| | | | 5 | Age | days old |
| | | | Root | Tissue | Tissue |
| Corn_Imbibed | Zea Mays | 108530 | Imbibed | Treatment | Compound |
| Seeds | | | | | |
| | | | Aerial | Tissue | Tissue |
| | | | 6 | Age | days old |
| Corn_Imbibed | Zea Mays | 108531 | Imbibed | Treatment | Compound |
| Seeds | | | | | |
| | | | 6 | Age | days old |
| | | | root | Tissue | Tissue |
| Corn_Imbibed | Zea Mays | 108545 | Imbibed | Treatment | Compound |
| Seeds | | | | | |
| | | | Aerial | Tissue | Tissue |
| | | | 3 | Age | days old |
| Corn_Imbibed | Zea Mays | 108546 | Imbibed | Treatment | Compound |
| Seeds | | | | | |
| | | | 3 | Age | days old |
| | | | Root | Tissue | Tissue |
| Corn_Imbibed | Zea Mays | 108547 | Imbibed | Treatment | Compound |
| Seeds | | | | | |
| | | | Aerial | Tissue | Tissue |
| | | | 4 | Age | days old |
| Corn_Imbibed_Embryo_Endosperm | Zea Mays | 108543 | 2 | Age | days old |
| | | | Imbibed | Treatment | Compound |
| | | | Embryo | Tissue | Tissue |
| Corn_Imbibed_Embryo_Endosperm | Zea Mays | 108544 | 2 | Age | days old |
| | | | Endosperm | Tissue | Tissue |
| | | | Imbibed | Treatment | Compound |
| Corn_Meristem | Zea Mays | 108535 | Root | Tissue | Tissue |
| | | | Meristem | | |
| | | | 192 | Timepoint | Hours |
| Corn_Meristem | Zea Mays | 108536 | Shoot | Tissue | Tissue |
| | | | Meristem | | |
| | | | 192 | Timepoint | Hours |
| Corn_Nitrogen_H_to_L | Zea Mays | 108532 | Roots | Tissue | Tissue |
| | | | Low Nitrogen | Treatment | Compound |
| | | | 16 | Timepoint | Hours |
| Corn_Nitrogen_H_to_L | Zea Mays | 108548 | Root | Tissue | Tissue |
| | | | Low Nitrogen | Treatment | Compound |
| | | | 4 | Timepoint | Hours |
| Corn_Nitrogen_L_to_H | Zea Mays | 108549 | Aerial | Tissue | Tissue |
| | | | 0.166 | Timepoint | Hours |
| | | | Nitrogen | Treatment | Compound |
| Corn_Nitrogen_L_to_H | Zea Mays | 108550 | Aerial | Tissue | Tissue |
| | | | Nitrogen | Treatment | Compound |
| | | | 1.5 | Timepoint | Hours |
| Corn_Nitrogen_L_to_H | Zea Mays | 108551 | Aerial | Tissue | Tissue |
| | | | 3 | Timepoint | Hours |
| | | | Nitrogen | Treatment | Compound |
| Corn_RT1 | Zea Mays | 108599 | Unknown | Plant Line | Hours |
| | | | Root | Tissue | Tissue |
| Corn_Wounding | Zea Mays | 108524 | Aerial | Tissue | Tissue |
| | | | Wounding | Treatment | Compound |
| | | | 1 | Timepoint | Hours |
| Corn_Wounding | Zea Mays | 108525 | Aerial | Tissue | Tissue |
| | | | 6 | Timepoint | Hours |
| | | | Wounding | Treatment | Compound |
| Drought_Flowers | Arabidopsis | 108473 | Flowers | Tissue | Tissue |
| | | | 7 d | Timepoint | Hours |
| | | | Drought | Treatment | Compound |
| Drought_Flowers | Arabidopsis | 108474 | Flowers | Tissue | Tissue |
| | | | Drought | Treatment | Compound |
| | | | 8 d (1d- | Timepoint | Hours |
| | | | post_re- | | |
| | | | watering) | | |
| GA Treated | Arabidopsis | 108484 | 1 | Timepoint | Hours |
| | | | 1 | Timepoint | Hours |
| GA Treated | Arabidopsis | 108485 | 6 | Timepoint | Hours |
| | | | 6 | Timepoint | Hours |
| GA Treated | Arabidopsis | 108486 | 12 | Timepoint | Hours |
| | | | 12 | Timepoint | Hours |
| Germinating | Arabidopsis | 108461 | Day 1 | Timepoint | Hours |
| Seeds | | | | | |
| Germinating | Arabidopsis | 108462 | Day 2 | Timepoint | Hours |
| Seeds | | | | | |
| Germinating | Arabidopsis | 108463 | Day 3 | Timepoint | Hours |
| Seeds | | | | | |
| Germinating | Arabidopsis | 108464 | Day 4 | Timepoint | Hours |
| Seeds | | | | | |
| Herbicide V3.1 | Arabidopsis | 108465 | Round up | Treatment | Compound |
| | | | 12 | Timepoint | Hours |
| Herbicide V3.1 | Arabidopsis | 108466 | Trimec | Treatment | Compound |
| | | | 12 | Timepoint | Hours |
| Herbicide V3.1 | Arabidopsis | 108467 | Finale | Treatment | Compound |
| | | | 12 | Timepoint | Hours |
| Herbicide V3.1 | Arabidopsis | 108468 | Glean | Treatment | Compound |
| | | | 12 | Timepoint | Hours |
| Herbicide_v2 | Arabidopsis | 107871 | Finale | Treatment | Compound |
| | | | 4 | Timepoint | Hours |
| Herbicide_v2 | Arabidopsis | 107876 | Finale | Treatment | Compound |
| | | | 12 | Timepoint | Hours |
| Herbicide_v2 | Arabidopsis | 107881 | Glean | Treatment | Compound |
| | | | 4 | Timepoint | Hours |
| Herbicide_v2 | Arabidopsis | 107886 | Trimec | Treatment | Compound |
| | | | 4 | Timepoint | Hours |
| Herbicide_v2 | Arabidopsis | 107891 | Trimec | Treatment | Compound |
| | | | 12 | Timepoint | Hours |
| Herbicide_v2 | Arabidopsis | 107896 | Round-up | Treatment | Compound |
| | | | 4 | Timepoint | Hours |
| Trichome | Arabidopsis | 108452 | Hairy | Tissue | Tissue |
| Inflorescences | | | Influorescence | | |
| expt | | | #1 | | |
| SA treatment_1 | Arabidopsis | 108471 | Columbia | Species | Hours |
| hour | | | | | |
| | | | 1 | Timepoint | Hours |
| | | | SA | Treatment | Compound |
| SA treatment_1 | Arabidopsis | 108472 | CS3726 | Species | Hours |
| hour | | | | | |
| | | | 1 | Timepoint | Hours |
| | | | SA | Treatment | Compound |
| SA treatment_4 | Arabidopsis | 108469 | columbia | Species | Hours |
| hour | | | | | |
| | | | 4 | Timepoint | Hours |
| | | | SA | Treatment | Compound |
| SA treatment_4 | Arabidopsis | 108470 | CS3726 | Species | Hours |
| hour | | | | | |
| | | | SA | Treatment | Compound |
| | | | 4 | Timepoint | Hours |
| SA | Arabidopsis | 107953 | 50 | Probe | % of |
| treatment_AJ | | | | Amount | Standard |
| | | | | | Amount |
| | | | SA | Treatment | Compound |
| | | | 24 | Timepoint | Hours |
| | | | Clontech | Probe Type | Probe |
| | | | | | method |
| SA | Arabidopsis | 107960 | 50 | Probe | % of |
| treatment_AJ | | | | Amount | Standard |
| | | | | | Amount |
| | | | SA | Treatment | Compound |
| | | | 24 | Timepoint | Hours |
| | | | Operon | Probe Type | Probe |
| | | | | | method |
| SA_treatment | Arabidopsis | 108443 | SA | Treatment | Compound |
| 24 hour | | | | | |
| | | | 24 | Timepoint | Hours |
| SA_treatment 6 | Arabidopsis | 108440 | SA treatment | Treatment | Compound |
| hour | | | 6 hour | | |
| | | | CS3726 | species | Hours |
| SA_treatment 6 | Arabidopsis | 108441 | SA treatment | Treatment | Compound |
| hour | | | 6 hour | | |
| | | | Columbia | species | Hours |
| Nitrogen High | Arabidopsis | 108454 | 10 min | Timepoint | Hours |
| transition to | | | | | |
| Low | | | | | |
| Nitrogen High | Arabidopsis | 108455 | 1 hr | Timepoint | Hours |
| transition to | | | | | |
| Low | | | | | |
| BR_Shoot | Arabidopsis | 108478 | dwf4-1 | Plant Line | Hours |
| Apices Expt | | | | | |
| BR_Shoot | Arabidopsis | 108479 | AOD4-4 | Plant Line | Hours |
| Apices Expt | | | | | |
| BR_Shoot | Arabidopsis | 108480 | Ws-2 | Plant Line | Hours |
| Apices Expt | | | | | |
| | | | BL | Treatment | Compound |
| BR_Shoot | Arabidopsis | 108481 | Ws-2 | Plant Line | Hours |
| Apices Expt | | | | | |
| | | | BRZ | Treatment | Compound |
| Tissue Specific | Arabidopsis | 108429 | green flower | Tissue | Tissue |
| Expression | | | | | |
| | | | operon | Probe Type | Probe |
| | | | | | method |
| | | | 50 | Probe | % of |
| | | | | Amount | Standard |
| | | | | | Amount |
| Tissue Specific | Arabidopsis | 108430 | white flower | Tissue | Tissue |
| Expression | | | | | |
| | | | 50 | Probe | % of |
| | | | | Amount | Standard |
| | | | | | Amount |
| | | | operon | Probe Type | Probe |
| | | | | | method |
| Tissue Specific | Arabidopsis | 108431 | flowers (bud) | Tissue | Tissue |
| Expression | | | | | |
| | | | operon | Probe Type | Probe |
| | | | | | method |
| | | | 50 | Probe | % of |
| | | | | Amount | Standard |
| | | | | | Amount |
| Tissue Specific | Arabidopsis | 108436 | 5-10 mm | Tissue | Tissue |
| Expression | | | siliques | | |
| | | | 33 | Probe | % of |
| | | | | Amount | Standard |
| | | | | | Amount |
| | | | operon | Probe Type | Probe |
| | | | | | method |
| Tissue Specific | Arabidopsis | 108437 | <5 mm | Tissue | Tissue |
| Expression | | | siliques | | |
| | | | operon | Probe Type | Probe |
| | | | | | method |
| | | | 33 | Probe | % of |
| | | | | Amount | Standard |
| | | | | | Amount |
| Tissue Specific | Arabidopsis | 108438 | 5 wk siliques | Tissue | Tissue |
| Expression | | | | | |
| | | | 33 | Probe | % of |
| | | | | Amount | Standard |
| | | | | | Amount |
| | | | operon | Probe Type | Probe |
| | | | | | method |
| Tissue Specific | Arabidopsis | 108439 | Roots (2 wk) | Tissue | Tissue |
| Expression | | | | | |
| | | | operon | Probe Type | Probe |
| | | | | | method |
| | | | 33 | Probe | % of |
| | | | | Amount | Standard |
| | | | | | Amount |
| Tissue Specific | Arabidopsis | 108497 | 3 week | Tissue | Tissue |
| Expression | | | Rossette | | |
| | | | leaves | | |
| | | | 100 | Probe | % of |
| | | | | Amount | Standard |
| | | | | | Amount |
| | | | operon | Probe Type | Probe |
| | | | | | method |
| Tissue Specific | Arabidopsis | 108498 | 3-week stems | Tissue | Tissue |
| Expression | | | | | |
| | | | operon | Probe Type | Probe |
| | | | | | method |
| | | | 100 | Probe | % of |
| | | | | Amount | Standard |
| | | | | | Amount |
| U.A.E. | Arabidopsis | 108451 | 13B12 | Plant Line | Hours |
| Knockout | | | | | |
| Ws Arabidopsis | Arabidopsis | 108477 | stems and | Tissue | Tissue |
| Drought 2 days | | | leaves | | |
| | | | 2 days | Timepoint | Hours |
| Ws Arabidopsis | Arabidopsis | 108482 | 4 days | Timepoint | Hours |
| Drought 4 days | | | | | |
| Ws Arabidopsis | Arabidopsis | 108483 | 6 days | Timepoint | Hours |
| Drought 6 days | | | | | |
| ap2-floral buds | Arabidopsis | 108501 | ap2 (Ler.) | Plant Line | Hours |
| | | | floral buds | Tissue | Tissue |
| nitrogen-seed | Arabidopsis | 108487 | 0.5 | Timepoint | Hours |
| set | | | | | |
| nitrogen-seed | Arabidopsis | 108488 | 2 | Timepoint | Hours |
| set | | | | | |
| nitrogen-seed | Arabidopsis | 108489 | 4 | Timepoint | Hours |
| set | | | | | |
| rh1 mutant2 | Arabidopsis | 108433 | mutant | Tissue | Tissue |
| root tips | Arabidopsis | 108434 | root tips | Tissue | Tissue |
| stm mutants | Arabidopsis | 108435 | stem | Tissue | Tissue |
| Aluminum | | SMD | | | |
| | | 7304, | | | |
| | | SMD 7305 | | | |
| Axel | | SMD | | | |
| | | 6654, | | | |
| | | SMD 6655 | | | |
| Cadium | | SMD | | | |
| | | 7427, | | | |
| | | SMD 7428 | | | |
| Cauliflower | | SMD | | | |
| | | 5329, | | | |
| | | SMD 5330 | | | |
| Chloroplast | | SMD | | | |
| | | 8093, | | | |
| | | SMD 8094 | | | |
| Circadian | | SMD | | | |
| | | 2344, | | | |
| | | SMD | | | |
| | | 2359, | | | |
| | | SMD | | | |
| | | 2361, | | | |
| | | SMD | | | |
| | | 2362, | | | |
| | | SMD | | | |
| | | 2363, | | | |
| | | SMD | | | |
| | | 2364, | | | |
| | | SMD | | | |
| | | 2365, | | | |
| | | SMD | | | |
| | | 2366, | | | |
| | | SMD | | | |
| | | 2367, | | | |
| | | SMD | | | |
| | | 2368, | | | |
| | | SMD 3242 | | | |
| CO2 | | SMD7561, | | | |
| | | SMD | | | |
| | | 7562, | | | |
| | | SMD | | | |
| | | 7261, | | | |
| | | SMD | | | |
| | | 7263, | | | |
| | | SMD | | | |
| | | 3710, | | | |
| | | SMD | | | |
| | | 4649, | | | |
| | | SMD 4650 | | | |
| Disease | | SMD | | | |
| | | 7342, | | | |
| | | SMD 7343 | | | |
| reactive oxygen | | SMD | | | |
| | | 7523 | | | |
| Iron | | SMD | | | |
| | | 7114, | | | |
| | | SMD | | | |
| | | 7115, | | | |
| | | SMD 7125 | | | |
| defense | | SMD | | | |
| | | 8031, | | | |
| | | SMD 8032 | | | |
| Mitchondria- | | SMD | | | |
| Electron | | 8061, | | | |
| Transport | | SMD 8063 | | | |
| NAA | | SMD | | | |
| | | 3743, | | | |
| | | SMD | | | |
| | | 3749, | | | |
| | | SMD | | | |
| | | 6338, | | | |
| | | SMD 6339 | | | |
| Nitrogen | | SMD | | | |
| | | 3787, | | | |
| | | SMD 3789 | | | |
| Phototropism | | SMD | | | |
| | | 4188, | | | |
| | | SMD | | | |
| | | 6617, | | | |
| | | SMD 6619 | | | |
| Shade | | SMD | | | |
| | | 8130, | | | |
| | | SMD 7230 | | | |
| Sqn | | SMD | | | |
| | | 7133, | | | |
| | | SMD 7137 | | | |
| Sulfur | | SMD | | | |
| | | 8034, | | | |
| | | SMD 8035 | | | |
| Wounding | | SMD | | | |
| | | 3714, | | | |
| | | SMD 3715 | | | |
| Zinc | | SMD | | | |
| | | 7310, | | | |
| | | SMD 7311 | | | |

3. Protein Domain Data

[0269] The Protein Domain data, located in the Miscellaneous Feature field of the Sequence Listing, provides details concerning the protein domains. The majority of the protein domain descriptions given are obtained from Prosite and Pfam, which are available on the internet. Each description begins with the pfam and Prosite identifying numbers, the full name of the domain, and a detailed description, including biological and in vivo implications/functions for the domain, references which further describe such implications/functions, and references that describe tests/assays to measure the implications/functions.

[0270] 4. Ortholog List Data

[0271] This data, also located in the miscellaneous feature field of the Sequence Listing, lists pairs of orthologs that were identified using the T Blast X program. Each column contains a cDNA_id number corresponding to a sequence from Arabidopsis, wheat, corn, soybean or canola. The sequence corresponding to all cDNA_id numbers can be found in either the Sequence Listing or the Miscellaneous Feature field.

II. How the Inventions Reveal How Genes, Gene Components and Products Function

[0272] The different experimental molecular genetic approaches focused on different aspects of genes, gene components, and gene products of the inventions. The variety of the data demonstrates the multiple functions and characteristics of single genes, gene components, and products. The data also explain the pathways and networks in which individual genes and products participate and interact. As a result, the circumstances or conditions are now known when these genes and networks are active. These new understandings of biology are relevant for many plant species. The following section describes the process by which Applicants analyze the experimental results relavent to the present invention.

[0273] II.A. Experimental Results Reveal Many Facets of a Single Gene

[0274] The experimental results are used to dissect the function of individual components and products of the genes. For example, the biochemical activity of the encoded protein is surmised from sequence analyses, and promoter specificity is identified through transcriptional analyses. Generally, the data presented herein is used to functionally annotate either the protein sequence and/or the regulatory sequence that controls transcription and translation.

[0275] II.A.1. Functions of Coding Sequences Revealed by the Ceres Genomic Engine

[0276] II.A.1.a. Sequence Similarity to Proteins of Known Function can be Used to Associate Biochemical Activities and Molecular Interaction to the Proteins of the Invention

[0277] The protein sequences of the invention are analyzed to determine if they shared any sequence characteristics with proteins of known activity. Proteins are grouped together based on sequence similarity, either localized or throughout the length of the proteins. Typically, such groups of proteins exhibit common biochemical activities or interact with similar molecules.

[0278] II.A.1.a.1. Presence of Amino Acid Motifs Indicates Biological Function

[0279] Localized protein sequence similarity, also referred to as amino acid motifs, have been attributed to enzyme or protein functions. A library of motifs, important for function, have been documented in PROSITE, a public database available on the internet. This library includes descriptions of the motifs and their functions. The zinc finger motif is one such entry in PROSITE, which reports that the zinc finger domain of DNA-binding proteins is typically defined by a 25-30 amino acid motif containing specific cysteine or histidine residues that are involved in the tetrahedral coordination of a zinc ion. Any protein comprising a sequence similar to the zinc finger amino acid motif will have similar functional activity (specific binding of DNA).

[0280] Protein sequences of the invention have been compared to a library of amino acid motifs in the pFAM database, which is linked to the PROSITE database. If any of Applicants' protein sequences exhibit similarity to these amino acid motifs or domains, the Reference Table notes the name and location of the motif in the “Pred. PP Nom. & Annot” section of the Reference tables For example, polypeptide, CERES Sequence ID NO: 1545823 is associated with zinc finger motif as follows in the Reference Table:
[0281] (C) Pred. PP Nom. & Annot.
   [0282] Zinc finger, C3HC4 type (RING finger)
   [0283] Loc. Sequence ID NO 133059: 58->106 aa.

[0284] II.A.1.a.2. Related Amino Acid Sequences Share Similar Biological Functions

[0285] When studying protein sequence families, it is apparent that some regions have been better conserved than others during evolution. These regions are generally important for the function of a protein and/or for the maintenance of its three-dimensional structure.

[0286] The Reference Table reports in section “(Dp) Rel. AA Sequence” when a protein shares amino acid similarity with a protein of known activity. The section reports the gi number of the protein of known activity, a brief description of the activity, and the location where it shares sequence similarity to Applicants' polypeptide sequence.

[0287] Using this analysis, biochemical activity of the known protein is associated with Applicants' proteins. An example for the polypeptide described above is as follows:
[0288] (Dp) Rel. AA Sequence
   [0289] Align. NO 524716
   [0290] gi No 2502079
   [0291] Desp.: (AF022391) immediate early protein; ICPO [Feline herpesvirus 1]
   [0292] % Idnt.: 33.7
   [0293] Align. Len.: 87
   [0294] Loc. Sequence ID NO 133059: 52->137 aa.

[0295] II.A.1.b. Differential Expression Results Explain in Which Cellular Responses the Proteins of the Invention are Involved

[0296] Differential expression results show when the coding sequence is transcribed, and therefore when the activity of the protein is deployed by the cell. Similar coding sequences can have very different physiological consequences because the sequences are expressed at different times or places, rather than because of any differences in protein activity. Therefore, modified levels (increased or decreased) of expression as compared to a control provide an indication of the function of a corresponding gene, gene components, and gene products.

[0297] These experiments can determine which are genes “over-expressed” under a given stimulus. Such over-expressed genes give rise to higher transcript levels in a plant or cell that is stimulated as compared to the transcript levels of the same genes in a control organism or cell. Similarly, differential expression experiments can reveal “under-expressed” genes.

[0298] To increase the cellular response to a stimulus, additional copies of the coding sequences of a gene that is over-expressed are inserted into a cell. Increasing transcript levels of an over-expressed gene can heighten or prolong the particular cellular response. A similar enhancement can occur when transcription of an under-expressed gene is inhibited. In contrast, the cellular response will be shortened or less severe when the over-expressed genes are inhibited or when expression of the under-expressed genes are increased.

[0299] In addition to analyzing the levels of transcription, the data are also analyzed to gain insight into the changes in transcription over time. That is, while the plants in the experiments were reacting to either an external or internal stimulus, a differential experiment takes a snapshot of the transcription levels in the cells at one specific time. However, a number of snap-shots can be taken at different time points during an external stimulus regime, or at different stages of development during an internal stimulus. These results show how the plant changes transcription levels over time, and therefore protein levels, in response to specific stimuli to produce phenotypic changes. These results show that a protein is implicated in a single, but more likely, in a number of cellular responses.

[0300] II.A.1.b.1. The Transcript Levels of a Protein Over Time in Response to a Stimuli are Revealed by Transcriptional Analyses Over Many Experiments

[0301] Applicants produce data from plants at different times after a specific stimulus. These results show whether the expression level of a gene spikes at a key moment during the cellular response, or whether the transcript level remains constant. Thus, coding sequences are not only determined to be over- or under-expressed, but are also classified by the initial timing and duration of differential expression. This understanding of timing is used to increase or decrease any desired cellular response.

[0302] Generally, Applicants assay plants at 2 to 4 different time points after exposing the plants to the desired stimuli. From these experiments, “early” and “late” responders are identified. These labels are applied to either the regulatory sequences driving transcription of the gene as well as to the protein encoded by the gene.

[0303] The following example illustrates how the genes, gene components and products are classified as either early or late responders following a specific treatment. The mRNAs from plants exposed to drought conditions are isolated 1 hour and 6 hours after exposure to drought conditions. These mRNAs are tested utilizing microarray techniques. The graph below illuminates possible transcription profiles over the time course, plotting all the (+) data points as +1 and all the (−) data points as −1: [image]
[0304] (The value for each time point is determined using a pair of microarray chips as described above.)

[0305] Data acquired from this type of time course experiment are useful to understand how to increase or decrease the speed of the cellular response. Inserting extra copies of the coding sequence of early responders into a cell in order to over-express the specific gene triggers a faster cellular response. Alternatively, coding sequences of late responders that are over-expressed are placed under the control of promoters of early responders as another means to increase the cellular response.

[0306] Inserting anti-sense or sense mRNA suppression constructs of the early responders that are over-expressed retards action of the late responders, thereby delaying the desired cellular response. In another embodiment, extra copies of the promoters of both early and late responders are added to inhibit expression of both types of over-expressed genes.

[0307] The experiments described herein are grouped together to determine the time course of the transcript levels of different coding sequences in response to different stimuli.

[0308] II.A.1.b.2. The Transcript Levels of a Protein Over Different Developmental Stages can be Identified by Transcriptional Analyses Over Many Experiments

[0309] Differential expression data are produced for different development stages of various organs and tissues. Measurement of transcript levels divulges whether specific genes give rise to spikes of transcription at specific times during development, or whether transcription levels remain constant. This understanding is used to increase speed of development, or to arrest development at a specific stage.

[0310] Like the time-course experiments, the developmental stage data classifies genes as being transcribed at early or late stages of development. Generally, Applicants assay different organs or tissues at 2-4 different stages.

[0311] Inhibiting under-expressed genes at either early or late stages triggers faster development times. The overall development time is also increased by this means to allow organs and tissue to grow to a larger size or to allow more organs or tissues to be produced. Alternatively, coding sequences of late stage genes that are under-expressed are placed under the control of promoters of early stage genes to increase development.

[0312] Inserting extra copies of the coding sequence of early stage genes that are under-expressed retards action of the late-stage genes and delays the desired development.

[0313] Fruit development of Arabidopsis is one example. Siliques of varying sizes, which are representative of different stages, are assayed by microarray techniques. Specifically, mRNA is isolated from siliques between 0-5 mm, between 5-10 mm, and >10 mm in length.

[image]

This graph shows the expression pattern of a cell wall synthesis gene, cDNAID 1595707, during fruit development.

[0314] The developmental course shows that the gene encoding a cell wall synthesis protein is up-regulated when the fruit is 0-5 mm, but returns to normal levels at 5-10 mm and >10 mm. Increase of cell wall synthesis leads to larger cells and/or greater number of cells. This type of increase boosts fruit yield. The coding sequence of the cell wall synthesis protein under the control of a strong early stage promoter increases fruit size or number.

[0315] A pectinesterase gene, cDNA ID 1396123, is also differentially expressed during fruit development. Pectinesterase catalyzes the hydrolysis of pectin into pectate and methanol. This biochemical activity plays an important role in cell wall metabolism during fruit ripening. To shorten the time for fruit ripening, extra copies of this gene with its endogenous promoter are inserted into a desired plant. With its native promoter, the extra copies of the gene are expressed at the normal time, to promote extra pectinesterase at the optimal stage of fruit development and thereby shorten ripening time.

[0316] II.A.1.b.3. Proteins That are Common in a Number of Similar Responses can be Identified by Transcriptional Analyses Over a Number of Experiments

[0317] The differential expression experiments also reveal the genes, and therefore the coding sequence, that are common to a number of cellular responses. By identifying the genes that are differentially expressed in a number of similar responses, the genes at the nexus of a range of responses are discovered. For example, genes that are differentially expressed in all the stress responses are at the hub of many of the stress response pathways.

[0318] These types of nexus genes, proteins, and pathways are differentially expressed in many or a majority of the responses or developmental conditions of interest. Typically, a nexus gene, protein or pathway is differentially expressed in generally the same direction in many or majority of all the desired experiments. By doing so, the nexus gene is responsible for triggering the same or similar set of pathways or networks for various cellular responses. This type of gene is useful in modulating pleiotropic effects or triggering or inhibiting a general class of responses.

[0319] When nexus genes are differentially expressed in a set of responses, but in different directions, these data indicate that a nexus gene is responsible for creating the specificity in a response by triggering the same pathway, but to a different degree. Placing such nexus genes under a constitutive promoter to express the proteins at a more constant level removes the fluctuations. For example, a plant that is better drought adapted, but not cold adapted is modified to be tolerant to both conditions by placing a nexus gene that is up-regulated in drought but down regulated in cold under the control of a constitutive promoter.

[0320] II.A.1.b.4. Proteins that are Common to Disparate Responses can be Identified by Transcriptional Analyses Over a Number of Experiments

[0321] Phenotypes and traits result from complex interactions between cellular pathways and networks. The pathways that are linked by expression of common genes to specify particular traits is discerned by identifying the genes that show differential expression of seemingly disparate responses or developmental stages. For example, hormone fluxes in a plant direct cell patterning and organ development. Genes that are differentially expressed both in the hormone experiments and organ development experiments are of particular interest to control plant development.

[0322] II.A.1.c. Observations of Phenotypic Changes Show what Physiological Consequences Applicants' Proteins can Produce

[0323] Another direct means of determining the physiological consequences of a protein is to make aberrant decreases or increases of its expression level in a cell. To this end, Applicants produce plants that include an extra expressed copy of the gene. The plants are then planted under various conditions to determine if any visible physiological changes are caused. These changes then are attributed to the changes in protein levels.

[0324] II.B. Experimental Results Also Reveal the Functions of Genes

[0325] II.B.1. Linking Signature Sequences to Conservation of Biochemical Activities and Molecular Interactions

[0326] Proteins that possess the same defined domains or motifs are likely to carry out the same biochemical activity or interact with a similar class of target molecule, e.g., DNA, RNA, proteins, etc. Thus, the pFAM domains listed in the Reference Tables are routinely used as predictors of these properties. Substrates and products for the specific reactions vary from protein to protein. Where the substrates, ligands, or other molecules bound are identical, the affinities may differ between the proteins. Typically, the affinities exhibited by different functional equivalents varies no more than 50%; more typically, no more than 25%; even more typically, no more than 10%; or even less.

[0327] Proteins with very similar biochemical activities or molecular interactions share similar structural properties, such as substrate grooves, as well as sequence similarity in more than one motif. Usually, the proteins share at least two motifs of the signature sequence; more usually, three motifs; even more usually four motifs or greater. Typically, the proteins exhibit 70% sequence identity in the shared motifs; more typically, 80% sequence identity; even more typically, 90%, 95%, 96%, 97%, 98% or 99% sequence identity or greater. These proteins also often share sequence similarity in the variable regions between the constant motif regions. Further, the shared motifs are in the same order from amino- to carboxyl-termini. The length of the variable regions between the motifs in these proteins, generally, is similar. Specifically, the number of residues between the shared motifs in these proteins varies by less than 25%; more usually, varies by less than 20%; even more usually, less than 15%; even more usually less than 10% or even less.

[0328] II.B.2. Linking Signature Sequences to Conservation of Cellular Responses or Activities

[0329] Proteins that exhibit similar cellular responses or activities will possess the structural and conserved domain/motifs as described in the Biochemical Activities and Molecular Interactions above.

[0330] Proteins play a larger role in cellular response than just their biochemical activities or molecular interactions suggest. For example, a protein can initiate gene transcription that is specific to the drought response of a cell. Other cellular responses and activities include: stress responses, hormonal responses, growth and differential of a cell, cell to cell interactions, etc.

[0331] The cellular role or activities of a protein are deduced by transcriptional analyses or phenotypic analyses as well as by determining the biochemical activities and molecular interactions of the protein. For example, transcriptional analyses indicate that transcription of gene A is greatly increased during flower development. Such data implicates protein A, encoded by gene A, in the process of flower development. Proteins that share sequence similarity in more than one motif also act as functional equivalents for protein A during flower development.

III. Description of the Genes, Gene Components and Products, Together with Their Use and Application

[0332] As described herein, Applicants provide an understanding of the function and phenotypic implications of the genes, gene components and products of the present invention. Bioinformatic analysis provides such information. The sections of the present application containing the bioinformatic analysis, together with the Sequence and Reference Tables, teach those skilled in the art how to use the genes, gene components and products of the present invention to provide plants with novel characteristics. Similarly, differential expression analysis provides additional such information and the sections of the present application on that analysis describe the functions of the genes, gene components and products of the present invention which are understood from the results of the differential expression experiments. The same is true with respect to the phenotype data, where the results of the Knock-in experiments and the sections of the present application on those experiments provide the skilled artisan with further description of the functions of the genes, gene components and products of the present invention.

[0333] As a result, one reading each of these sections of the present application as an independent report will understand the function of the genes, gene components and products of the present invention. But those sections and descriptions can also be read in combination, in an integrated manner, to gain further insight into the functions and uses for the genes, gene components and products of the present invention. Such an integrated analysis does not require extending beyond the teachings of the present application, but rather combining and integrating the teachings depending upon the particular purpose of the reader.

[0334] Some sections of the present application describe the function of genes, gene components and products of the present invention with reference to the type of plant tissue (e.g. root genes, leaf genes, etc.), while other sections describe the function of the genes, gene components and products with respect to responses under certain conditions (e.g. Auxin-responsive genes, heat-responsive genes, etc.). Thus, if one desires to utilize a gene understood from the application to be a particular tissue-type of gene, then the condition-specific responsiveness of that gene is understood from the differential expression tables, and very specific characteristics of actions of that gene in a transformed plant is understood by recognizing the overlap or intersection of the gene functions as understood from the two different types of information. Thus, for example, if one desires to transform a plant with a root gene for enhancing root growth and performance, one knows the useful root genes from the results reported in the knock-in table. A review of the differential expression data also shows that a specific root gene is over-expressed in response to heat and osmotic stress as well. The function of that gene is then described in (1) the section of the present application that discusses root genes, (2) the section of the present application that discusses heat-responsive genes, and (3) the section of the application that discusses osmotic stress-responsive genes. The function(s) that are commonly described in those three sections are then particularly characteristic of a plant transformed with that gene. This type of integrated analysis of data is viewed from the following schematic that summarizes, for one particular gene, the function of that gene as understood from the phenotype and differential expression experiments.

| Gene function known | Gene function known | Gene function known |
|---|---|---|
| from phenotype | from first differential | from second differential |
| experiments | expression experiment | expression experiment |
| Function A | Function A | Function A |
| Function B | | |
| | Function C | Function C |
| | Function D | |
| | | Function E |
| Function F | Function F | Function F |
| Function G | Function G | |
| | | Function H |
| Function I | | Function I |
| | Function J | |

[0335] In the above example, one skilled in the art will understand that a plant transformed with this particular gene particularly exhibits functions A and F because those are the functions which are understood in common from the three different experiments.

[0336] Similar analyses can be conducted on various genes of the present invention, by which one skilled in the art effectively modulates plant functions depending upon the particular use or conditions envisioned for the plant.

[0337] III.A. Organ-Affecting Genes, Gene Components, Products (Including Differentiation and Function)

III.A.1. Root Genes, Gene Components and Products

[0338] The economic values of roots arise not only from harvested adventitious roots or tubers, but also from the ability of roots to funnel nutrients to support growth of all plants and increase their vegetative material, seeds, fruits, etc. Roots have four main functions. First, they anchor the plant in the soil. Second, they facilitate and regulate the molecular signals and molecular traffic between the plant, soil, and soil fauna. Third, the root provides a plant with nutrients gained from the soil or growth medium. Fourth, they condition local soil chemical and physical properties.

[0339] Root genes are active or potentially active to a greater extent in roots than in most other organs of the plant. These genes and gene products regulate many plant traits from yield to stress tolerance. Root genes are used to modulate root growth and development.

III.A.2. Root Hair Genes, Gene Components and Products

[0340] Root hairs are specialized outgrowths of single epidermal cells termed trichoblasts. In many and perhaps all species of plants, the trichoblasts are regularly arranged around the perimeter of the root. In Arabidopsis, for example, trichoblasts tend to alternate with non-hair cells or atrichoblasts. This spatial patterning of the root epidermis is under genetic control, and a variety of mutants have been isolated in which this spacing is altered or in which root hairs are completely absent, such as the rhl mutant. Some surface cells of roots develop into single epidermal cells termed trichoblasts or root hairs. Some of the root hairs persist for the life of the plant; others gradually die back and some cease to function due to external influences.

[0341] Root hairs are also sites of intense chemical and biological activity and as a result strongly modify the soil they contact. Some roots hairs are coated with surfactants and/or mucilage to facilitate these activities. Specifically, roots hairs are responsible for nutrient uptake by mobilizing and assimilating water, reluctant ions, organic and inorganic compounds and chemicals. In addition, they attract and interact with beneficial microfauna and flora. Root hairs also help to mitigate the effects of toxic ions, pathogens and stress. Examples of root hair properties and activities that root hairs modulate include root hair surfactant and mucilage, nutrient uptake, microbe and nematode associations, oxygen transpiration; detoxification effects of iron, aluminum, cadium, mercury, salt, and other soil constituents, pathogens, glucosinolates, changes in soil and rhizosheath.

[0342] The root and root hairs uptake of the nutrients contributes to a source-sink effect in a plant. The greater the source of nutrients, the more sinks, such as stems, leaves, flowers, seeds, fruits, etc. can draw sustenance to grow. Thus, root hair genes modulate the vigor and yield of the plant overall, as well as of distinct cells, organs, or tissues of a plant.

III.A.3. Leaf Genes, Gene Components and Products

[0343] Leaves are responsible for producing most of the fixed carbon in a plant and are critical to plant productivity and survival. Great variability in leaf shapes and sizes is observed in nature. Leaves also exhibit varying degrees of complexity, ranging from simple to multi-compound. Leaf genes, as defined here, not only modulate leaf morphology, but also influence the shoot apical meristem, thereby affecting leaf arrangement on the shoot, internodes, nodes, axillary buds, photosynthetic capacity, carbon fixation, photorespiration and starch synthesis. Leaf genes elucidated here are used to modify a number of traits of economic interest including leaf shape, plant yield, stress tolerance, and to modify both the efficiency of synthesis and accumulation of specific metabolites and macromolecules (including carbohydrates, proteins, oils, waxes, etc).

III.A.4. Reproduction Genes, Gene Components and Products

[0344] Reproduction genes are defined as genes or components of genes capable of modulating any aspect of sexual reproduction from flowering time and inflorescence development to fertilization and finally seed and fruit development. These genes are of great economic interest as well as biological importance. The fruit and vegetable industry grosses over $1 billion USD a year. The seed market, valued at approximately $15 billion USD annually, is even more lucrative.

Inflorescence and Floral Development Genes, Gene Components and Products

[0345] During reproductive growth the plant enters a program of floral development that culminates in fertilization, followed by the production of seeds. Senescence may or may not follow. Flower formation is a precondition for the sexual propagation of plants and is therefore essential for propagation of plants that cannot be propagated vegetatively, as well as for the formation of seeds and fruits. The point of time at which the vegetative growth of plants changes into flower formation is of vital importance in agriculture, horticulture and plant breeding. Also, the number of flowers is often of economic importance, for example in the case of various useful plants (tomato, cucumber, zucchini, cotton etc.) where an increased number of flowers leads to an increased yield, or in the case of ornamental plants and cut flowers.

[0346] Flowering plants exhibit one of two types of inflorescence architecture: (1) indeterminate, in which the inflorescence grows indefinitely, or (2) determinate, in which a terminal flower is produced. Adult organs of flowering plants develop from groups of stem cells called meristems. The identity of a meristem is inferred from structures it produces: vegetative meristems give rise to roots and leaves, inflorescence meristems give rise to flower meristems, and flower meristems give rise to floral organs such as sepals and petals. Not only are meristems capable of generating new meristems of a different identity, but their own identity can change during development. For example, a vegetative shoot meristem can be transformed into an inflorescence meristem upon floral induction, and in some species, the inflorescence meristem itself will eventually become a flower meristem. Despite the importance of meristem transitions in plant development, little is known about the underlying mechanisms.

[0347] Following germination, the shoot meristem produces a series of leaf meristems on its flanks. However, once floral induction has occurred, the shoot meristem switches to the production of flower meristems. Flower meristems produce floral organ primordia, which individually develop into sepals, petals, stamens or carpels. Thus, flower formation can be thought of as a series of distinct developmental steps, i.e. floral induction, the formation of flower primordia and the production of flower organs. Mutations disrupting each of the steps have been isolated in a variety of species, suggesting that a genetic hierarchy directs the flowering process (see for review, Weigel and Meyerowitz, In Molecular Basis of Morphogenesis (ed. M. Bernfield). 51st Annual Symposium of the Society for Developmental Biology, pp. 93-107, New York, 1993).

[0348] Expression of many reproduction genes and gene products is orchestrated by internal programs or the surrounding environment of a plant. These genes used to modulate traits such as fruit and seed yield

Seed and Fruit Development Genes, Gene Components and Products

[0349] The ovule is the primary female sexual reproductive organ of flowering plants. At maturity it contains the egg cell and one large central cell containing two polar nuclei encased by two integuments that, after fertilization, develop into the embryo, endosperm and seed coat of the mature seed, respectively. As the ovule develops into the seed, the ovary matures into the fruit or silique. As such, seed and fruit development requires the orchestrated transcription of numerous polynucleotides, some of which are ubiquitous, others that are embryo-specific and still others that are expressed only in the endosperm, seed coat or fruit. Such genes are termed fruit development responsive genes and are used to modulate seed and fruit growth and development such as seed size, seed yield, seed composition and seed dormancy.

III.A.5. Ovule Genes, Gene Components and Products

[0350] The ovule is the primary female sexual reproductive organ of flowering plants. It contains the egg cell and, after fertilization occurs, contains the developing seed. Consequently, the ovule is at times comprised of haploid, diploid and triploid tissue. As such, ovule development requires the orchestrated transcription of numerous polynucleotides, some of which are ubiquitous, others that are ovule-specific and still others that are expressed only in the haploid, diploid or triploid cells of the ovule.

[0351] Although the morphology of the ovule is well known, little is known of these polynucleotides and polynucleotide products. Mutants allow identification of genes that participate in ovule development. As an example, the pistillata (PI) mutant replaces stamens with carpels, thereby increasing the number of ovules present in the flower. Accordingly, comparison of transcription levels between the wild-type and PI mutants allows identification of ovule-specific developmental polynucleotides.

[0352] Ovule genes are useful to modulate egg cell development, ovule maturation, metabolism, polar nuclei, fusion, central cell, maturation, metabolism, synergids, maturation, programmed cell death, nucellus, maturation, integuments, maturation, funiculus, extension, cuticle, maturation, tensile properties, ovule, modulation of ovule senescence and shaping.

III.A.6. Seed and Fruit Development Genes, Gene Components and Products

[0353] The ovule is the primary female sexual reproductive organ of flowering plants. At maturity it contains the egg cell and one large central cell containing two polar nuclei encased by two integuments that, after fertilization, develop into the embryo, endosperm and seed coat of the mature seed, respectively. As the ovule develops into the seed, the ovary matures into the fruit or silique. As such, seed and fruit development requires the orchestrated transcription of numerous polynucleotides, some of which are ubiquitous, others that are embryo-specific and still others that are expressed only in the endosperm, seed coat or fruit. Such genes are termed fruit development responsive genes and are used to modulate seed and fruit growth and development such as seed size, seed yield, seed composition and seed dormancy.

[0354] III.B. Development Genes, Gene Components and Products

III.B.1. Imbibition and Germination Responsive Genes, Gene Components and Products

Imbibition and Germination Responsive Genes, Gene Components and Products

[0355] Seeds are a vital component of the world's diet. Cereal grains alone, which comprise ˜90% of all cultivated seeds, contribute up to half of the global per capita energy intake. The primary organ system for seed production in flowering plants is the ovule. At maturity, the ovule consists of a haploid female gametophyte or embryo sac surrounded by several layers of maternal tissue including the nucellous and the integuments. The embryo sac typically contains seven cells including the egg cell, two synergids, a large central cell containing two polar nuclei, and three antipodal cells. Pollination results in the fertilization of both egg and central cell. The fertilized egg develops into the embryo. The fertilized central cell develops into the endosperm. And the integuments mature into the seed coat. As the ovule develops into the seed, the ovary matures into the fruit or silique. Late in development, the developing seed ends a period of extensive biosynthetic and cellular activity and begins to desiccate to complete its development and enter a dormant, metabolically quiescent state. Seed dormancy is generally an undesirable characteristic in agricultural crops, where rapid germination and growth are required. Some degree of dormancy is advantageous, however, at least during seed development. This is particularly true for cereal crops because it prevents germination of grains while still on the ear of the parent plant (preharvest sprouting), a phenomenon that results in major losses to the agricultural industry. Extensive domestication and breeding of crop species have ostensibly reduced the level of dormancy mechanisms present in the seeds of their wild ancestors, although under some adverse environmental conditions, dormancy may reappear. By contrast, weed seeds frequently mature with inherent dormancy mechanisms that allow some seeds to persist in the soil for many years before completing germination.

[0356] Germination commences with imbibition, the uptake of water by the dry seed, and the activation of the quiescent embryo and endosperm. The result is a burst of intense metabolic activity. At the cellular level, the genome is transformed from an inactive state to one of intense transcriptional activity. Stored lipids, carbohydrates and proteins are catabolized fueling seedling growth and development. DNA and organelles are repaired, replicated and begin functioning. Cell expansion and cell division are triggered. The shoot and root apical meristems are activated and begin growth and organogenesis. Germination is complete when a part of the embryo, the radicle, extends to penetrate the structures that surround it. In Arabidopsis, seed germination takes place within twenty-four (24) hours after imbibition. As such, germination requires the rapid and orchestrated transcription of numerous polynucleotides. Germination is followed by expansion of the hypocotyl and opening of the cotyledons. Meristem development continues to promote root growth and shoot growth, which is followed by early leaf formation.

Imbibition and Germination Genes

[0357] Imbibition and germination includes those events that commence with the uptake of water by the quiescent dry seed and terminate with the expansion and elongation of the shoots and roots. The germination period exists from imbibition to when part of the embryo, usually the radicle, extends to penetrate the seed coat that surrounds it. Imbibition and germination genes are defined as genes, gene components and products that modulate one or more processes of imbibition and germination described above. They are useful to modulate many plant traits from early vigor to yield to stress tolerance.

III.B.2. Early Seedling-Phase Specific Responsive Genes, Gene Components and Products

[0358] A few days after germination is complete, which is also referred to as the early seedling phase, is one of the more active stages of the plant life cycle. During this period the plant begins development and growth of the first leaves, roots, and other organs not found in the embryo. Generally this stage begins when germination ends. The first sign that germination has been completed is usually an increase in length and fresh weight of the radicle. Such genes and gene products can regulate a number of plant traits to modulate yield. For example, these genes are active or potentially active to a greater extent in developing and rapidly growing cells, tissues and organs, as exemplified by development and growth of a seedling 3 or 4 days after planting a seed.

[0359] Rapid, efficient establishment of a seedling is very important in commercial agriculture and horticulture. It is also vital that resources are approximately partitioned between shoot and root to facilitate adaptive growth. Phototropism and geotropism need to be established. All these require post-germination process to be sustained to ensure that vigorous seedlings are produced. Early seedling phase genes, gene components and products are useful to manipulate these and other processes.

III.B.3. Shoot-Apical Meristem Genes, Gene Components and Products

[0360] New organs, stems, leaves, branches and inflorescences develop from the stem apical meristem (SAM). The growth structure and architecture of the plant therefore depends on the behavior of SAMs. SAMs are comprised of a number of morphologically undifferentiated, dividing cells located at the tips of shoots. SAM genes elucidated here modify the activity of SAMs and thereby many traits of economic interest from ornamental leaf shape to organ number to responses to plant density.

[0361] In addition, a key attribute of the SAM is its capacity for self-renewal. Thus, SAM genes of the instant invention are useful for modulating one or more processes of SAM structure and/or function including (I) cell size and division; (II) cell differentiation and organ primordia. The genes and gene components of this invention are useful for modulating any one or all of these cell division processes generally, as in timing and rate, for example. In addition, the polynucleotides and polypeptides of the invention can control the response of these processes to the internal plant programs associated with embryogenesis, and hormone responses, for example.

[0362] Because SAMs determine the architecture of the plant, modified plants are useful in many agricultural, horticultural, forestry and other industrial sectors. Plants with a different shape, numbers of flowers and seed and fruits have altered yields of plant parts. For example, plants with more branches produce more flowers, seed or fruits. Trees without lateral branches produce long lengths of clean timber. Plants with greater yields of specific plant parts are useful sources of constituent chemicals.

[0363] III.C. Hormone Responsive Genes, Gene Components and Products

III.C.1. Abscissic Acid Responsive Genes, Gene Components and Products

[0364] Plant hormones are naturally occurring substances, effective in very small amounts, which act as signals to stimulate or inhibit growth or regulate developmental processes in plants. Abscisic acid (ABA) is a ubiquitous hormone in vascular plants that has been detected in every major organ or living tissue from the root to the apical bud. The major physiological responses affected by ABA are dormancy, stress stomatal closure, water uptake, abscission and senescence. In contrast to Auxins, cytokinins and gibberellins, which are principally growth promoters, ABA primarily acts as an inhibitor of growth and metabolic processes.

[0365] Changes in ABA concentration internally or in the surrounding environment in contact with a plant results in modulation of many genes and gene products. These genes and/or products are responsible for effects on traits such as plant vigor and seed yield.

[0366] While ABA responsive polynucleotides and gene products can act alone, combinations of these polynucleotides also affect growth and development. Useful combinations include different ABA responsive polynucleotides and/or gene products that have similar transcription profiles or similar biological activities, and members of the same or similar biochemical pathways. Whole pathways or segments of pathways are controlled by transcription factor proteins and proteins controlling the activity of signal transduction pathways. Therefore, manipulation of such protein levels is especially useful for altering phenotypes and biochemical activities of plants. In addition, the combination of an ABA responsive polynucleotide and/or gene product with another environmentally responsive polynucleotide is also useful because of the interactions that exist between hormone-regulated pathways, stress and defence induced pathways, nutritional pathways and development.

III.C.2. Brassinosteroid Responsive Genes, Gene Components and Products:

[0367] Plant hormones are naturally occuring substances, effective in very small amounts, which act as signals to stimulate or inhibit growth or regulate developmental processes in plants. Brassinosteroids (BRs) are the most recently discovered, and least studied, class of plant hormones. The major physiological response affected by BRs is the longitudinal growth of young tissue via cell elongation and cell division. Consequently, disruptions in BR metabolism, perception and activity result in a dwarf phenotype. In addition, because BRs are derived from the sterol metabolic pathway, any perturbations to the sterol pathway affect the BR pathway. In the same way, perturbations in the BR pathway have effects on the later part of the sterol pathway and thus the sterol composition of membranes.

[0368] Changes in BR concentration in the surrounding environment or in contact with a plant result in modulation of many genes and gene products.

[0369] While BR responsive polynucleotides and gene products can act alone, combinations of these polynucleotides also affect growth and development. Useful combinations include different BR responsive polynucleotides and/or gene products that have similar transcription profiles or similar biological activities, and members of the same or functionally related biochemical pathways. Whole pathways or segments of pathways are controlled by transcription factors and proteins controlling the activity of signal transduction pathways. Therefore, manipulation of such protein levels is especially useful for altering phenotypes and biochemical activities of plants. In addition, the combination of a BR responsive polynucleotide and/or gene product with another environmentally responsive polynucleotide is useful because of the interactions that exist between hormone-regulated pathways, stress pathways, nutritional pathways and development. Here, in addition to polynucleotides having similar transcription profiles and/or biological activities, useful combinations include polynucleotides that may have different transcription profiles but which participate in common or overlapping pathways.

III.C.3. Cytokinin Responsive Genes, Gene Components and Products

[0370] Plant hormones are naturally occurring substances, effective in very small amounts, which act as signals to stimulate or inhibit growth or regulate developmental processes in plants. Cytokinins (BA) are a group of hormones that are best known for their stimulatory effect on cell division, although they also participate in many other processes and pathways. All naturally occurring BAs are aminopurine derivatives, while nearly all synthetic compounds with BA activity are 6-substituted aminopurine derivatives. One of the most common synthetic BAs used in agriculture is benzylaminopurine (BAP).

[0371] BA responsive genes are useful to modulate plant growth, emergence of lateral buds, cotyledon expansion, senescence, differentiation, nutrient metabolism, control of fruit ripening, and parthenocarpy.

[0372] III.D. Metabolism Affecting Genes, Gene Components and Products

III.D.1. Nitrogen Responsive Genes, Gene Components and Products

[0373] Nitrogen is often the rate-limiting element in plant growth, and all field crops have a fundamental dependence on exogenous nitrogen sources. Nitrogenous fertilizer, which is usually supplied as ammonium nitrate, potassium nitrate, or urea, typically accounts for 40% of the costs associated with crops in intensive agriculture, such as corn and wheat. Increased efficiency of nitrogen use by plants enables the production of higher yields with existing fertilizer inputs and/or enable existing yields of crops to be obtained with lower fertilizer input, or better yields from growth on soils of poorer quality. Also, higher amounts of proteins in the crops are produced more cost-effectively. “Nitrogen responsive” genes and gene products are used to alter or modulate plant growth and development.

III.D.2. Blue Light (Phototropism) Responsive Genes, Gene Components and Products

[0374] Phototropism is the orientation or growth of a cell, an organism or part of an organism in relation to a source of light. Plants can sense red (R), far-red (FR) and blue light in their environment and respond differently to particular ratios of these. For example, a low R:FR ratio enhances cell elongation and favors flowering over leaf production, but blue light regulated cryptochromes also appear to be involved in determining hypocotyl growth and flowering time.

[0375] Phototropism of Arabidopsis thaliana seedlings in response to a blue light source is initiated by nonphototropic hypocotyl 1 (NPH1), a blue light-activated serine-threonine protein kinase, but the downstream signaling events are not entirely known. Blue light treatment leads to changes in gene expression. These genes are identified by comparing the levels of mRNAs of individual genes in dark-grown seedlings compared with dark grown seedlings treated with 1 hour of blue light.

[0376] Auxin also affects blue light phototropism. The effect of Auxin on gene expression stimulated by blue light is found by comparing mRNA levels in a mutant of Arabidopsis thaliana nph4-2 grown in the dark and treated with blue light for 1 hour with wild type seedlings treated similarly. This mutant is disrupted for Auxin-related growth and Auxin-induced gene transcription.

[0377] Blue light responsive genes are used to alter or modulate growth, roots (elongation or gravitropism), stems (such as elongation), cell development, flower, seedling, plant yield, and seed and fruit yield.

III.D.3 Carbon Dioxide Responsive Genes, Gene Components and Products

[0378] There has been a recent and significant increase in the level of atmospheric carbon dioxide. This rise in level is projected to continue over the next 50 years. The effects of the increased level of carbon dioxide on vegetation are just now being examined, generally in large scale, whole plant experiments often conducted with trees. Some researchers have initiated physiological experiments in attempts to define the biochemical pathways that are either affected by and/or are activated to allow the plant to avert damage from elevated carbon dioxide levels.

[0379] CO₂ responsive genes are useful to modulate catabolism, energy generation, metabolism, carbohydrate synthesis, growth rate and photosynthesis (such as carbon dioxide fixation).

III.D.4. Viability Genes, Gene Components and Products

[0380] Plants contain many proteins and pathways that when blocked or induced lead to cell, organ or whole plant death. Gene variants that influence these pathways have profound effects on plant survival, vigor and performance. The critical pathways include those concerned with metabolism and development or protection against stresses, diseases and pests. They also include those involved in apoptosis and necrosis. Viability genes are modulated to affect cell or plant death.

[0381] Herbicides are, by definition, chemicals that cause death of tissues, organs and whole plants. The genes and pathways that are activated or inactivated by herbicides include those that cause cell death as well as those that function to provide protection.

[0382] III.E. Stress Responsive Genes, Gene Components and Products

III.E.1. Cold Responsive Genes, Gene Components and Products

[0383] The ability to endure low temperatures and freezing is a major determinant of the geographical distribution and productivity of agricultural crops. Even areas considered suiTable for the cultivation of a given species or cultivar can give rise to yield decreases and crop failures as a result of aberrant freezing temperatures. Even modest increases (1-2° C.) in the freezing tolerance of certain crop species have a dramatic impact on agricultural productivity in some areas. The development of genotypes with increased freezing tolerance provide a more reliable means to minimize crop losses and diminish the use of energy-costly practices to modify the microclimate.

[0384] Sudden cold temperatures result in modulation of many genes and gene products. These genes and/or products are responsible for effects on traits such as plant vigor and seed yield.

[0385] Manipulation of one or more cold responsive gene activities is useful to modulate growth and development.

III.E.2. Heat Responsive Genes, Gene Components and Products

[0386] The ability to endure high temperatures is a major determinant of the geographical distribution and productivity of agricultural crops. Decreases in yield and crop failure frequently occur as a result of aberrant hot conditions even in areas considered suitable for the cultivation of a given species or cultivar. Only modest increases in the heat tolerance of crop species have a dramatic impact on agricultural productivity. The development of genotypes with increased heat tolerance provide a more reliable means to minimize crop losses and diminish the use of energy-costly practices to modify the microclimate.

III.E.3. Drought Responsive Genes, Gene Components and Products

[0387] The ability to endure drought conditions is a major determinant of the geographical distribution and productivity of agricultural crops. Decreases in yield and crop failure frequently occur as a result of aberrant drought conditions even in areas considered suitable for the cultivation of a given species or cultivar. Only modest increases in the drought tolerance of crop species have a dramatic impact on agricultural productivity. The development of genotypes with increased drought tolerance provide a more reliable means to minimize crop losses and diminish the use of energy-costly practices to modify the microclimate.

III.E.4. Wounding Responsive Genes, Gene Components and Products

[0388] Plants are continuously subjected to various forms of wounding from physical attacks including the damage created by pathogens and pests, wind, and contact with other objects. Therefore, survival and agricultural yields depend on constraining the damage created by the wounding process and inducing defense mechanisms against future damage.

[0389] Plants have evolved complex systems to minimize and/or repair local damage and to minimize subsequent attacks by pathogens or pests or their effects. These involve stimulation of cell division and cell elongation to repair tissues, induction of programmed cell death to isolate damage caused mechanically and by invading pests and pathogens, and induction of long-range signaling systems to induce protecting molecules in case of future attack. The genetic and biochemical systems associated with responses to wounding are connected with those associated with other stresses such as pathogen attack and drought.

[0390] Wounding results in the modulation of activities of specific genes and, as a consequence, of the levels of key proteins and metabolites. These genes, called here wounding responsive genes, are important for minimizing the damage induced by wounding from pests, pathogens and other objects.

III.E.5. Methyl Jasmonate (Jasmonate) Responsive Genes, Gene Components and Products

[0391] Jasmonic acid and its derivatives, collectively referred to as jasmonates, are naturally occurring derivatives of plant lipids. These substances are synthesized from linolenic acid in a lipoxygenase-dependent biosynthetic pathway. Jasmonates are signalling molecules which are growth regulators as well as regulators of defense and stress responses. As such, jasmonates represent a separate class of plant hormones. Jasmonate responsive genes can be used to modulate plant growth and development.

III.E.6. Salicylic Acid Responsive Genes, Gene Components and Products

[0392] Plant defense responses can be divided into two groups: constitutive and induced. Salicylic acid (SA) is a signaling molecule necessary for activation of the plant induced defense system known as systemic acquired resistance or SAR. This response, which is triggered by prior exposure to avirulent pathogens, is long lasting and provides protection against a broad spectrum of pathogens. Another induced defense system is the hypersensitive response (HR). HR is far more rapid, occurs at the sites of pathogen (avirulent pathogens) entry and precedes SAR. SA is also the key signaling molecule for this defense pathway.

[0393] SA genes are useful to modulate plant defense systems.

III.E.7. Nitric Oxide Responsive Genes, Gene Components and Products

[0394] The rate-limiting element in plant growth and yield is often its ability to tolerate suboptimal or stress conditions, including pathogen attack conditions, wounding and the presence of various other factors. To combat such conditions, plant cells deploy a battery of inducible defense responses, including synergistic interactions between nitric oxide (NO), reactive oxygen intermediates (ROS), and salicylic acid (SA). NO plays a critical role in the activation of innate immune and inflammatory responses in animals. At least part of this mammalian signaling pathway is present in plants, where NO potentiates the hypersensitive response (HR). In addition, NO is a stimulator molecule in plant photomorphogenesis.

[0395] Changes in nitric oxide concentration in the internal or surrounding environment, or in contact with a plant, results in modulation of many genes and gene products.

[0396] In addition, the combination of a nitric oxide responsive polynucleotide and/or gene product with other environmentally responsive polynucleotides is also useful because of the interactions that exist between hormone regulated pathways, stress pathways, pathogen stimulated pathways, nutritional pathways and development.

[0397] Nitric oxide responsive genes and gene products function either to increase or dampen the above phenotypes or activities either in response to changes in nitric oxide concentration or in the absence of nitric oxide fluctuations. More specifically, these genes and gene products modulate stress responses in an organism. In plants, these genes and gene products are useful for modulating yield under stress conditions. Measurments of yield include seed yield, seed size, fruit yield, fruit size, etc.

III.E.8. Osmotic Stress Responsive Genes, Gene Components and Products

[0398] The ability to endure and recover from osmotic and salt related stress is a major determinant of the geographical distribution and productivity of agricultural crops. Osmotic stress is a major component of stress imposed by saline soil and water deficit. Decreases in yield and crop failure frequently occur as a result of aberrant or transient environmental stress conditions even in areas considered suitable for the cultivation of a given species or cultivar. Only modest increases in the osmotic and salt tolerance of a crop species have a dramatic impact on agricultural productivity. The development of genotypes with increased osmotic tolerance provides a more reliable means to minimize crop losses and diminish the use of energy-costly practices to modify the soil environment. Thus, osmotic stress responsive genes are used to modulate plant growth and development.

III.E.9. Disease Responsive Genes, Gene Components and Products

[0399] Often growth and yield are limited by the ability of a plant to tolerate stress conditions, including pathogen attack. To combat such conditions, plant cells deploy a battery of inducible defense responses, including the triggering of an oxidative burst and the transcription of pathogenesis-related protein (PR protein) genes. These responses depend on the recognition of a microbial avirulence gene product (avr) by a plant resistance gene product (R), and a series of downstream signaling events leading to transcription-independent and transcription-dependent disease resistance responses. Reactive oxygen species (ROS) such as H₂O₂ and NO from the oxidative burst play a signaling role, including initiation of the hypersensitive response (HR) and induction of systemic acquired resistance (SAR) to secondary infection by unrelated pathogens. PR proteins are able to degrade the cell walls of invading microorganisms, and phytoalexins are directly microbicidal.

[0400] Disease responsive genes and gene products are useful to modulate plant response to pathogen attack including bacteria, fungi, virus, insects and nematodes.

III.E.10. Shade Responsive Genes, Gene Components and Products

[0401] Plants sense the ratio of Red (R):Far Red (FR) light in their environment and respond differently to particular ratios. A low R:FR ratio, for example, enhances cell elongation and favors flowering over leaf production. The changes in R:FR ratios mimic and cause the shading response effects in plants. The response of a plant to shade in the canopy structures of agricultural crop fields influences crop yields significantly. Therefore manipulation of genes regulating the shade avoidance responses can improve crop yields.

[0402] While phytochromes mediate the shade avoidance response, the down-stream factors participating in this pathway are largely unknown. One potential downstream participant, ATHB-2, is a member of the HD-Zip class of transcription factors and shows a strong and rapid response to changes in the R:FR ratio. ATHB-2 overexpressors have a thinner root mass, smaller and fewer leaves and longer hypocotyls and petioles. This elongation arises from longer epidermal and cortical cells, and a decrease in secondary vascular tissues, paralleling the changes observed in wild-type seedlings grown under conditions simulating canopy shade.

[0403] On the other hand, plants with reduced ATHB-2 expression have a thick root mass and many larger leaves and shorter hypocotyls and petioles. Here, the changes in the hypocotyl result from shorter epidermal and cortical cells and increased proliferation of vascular tissue. Interestingly, application of Auxin is able to reverse the root phenotypic consequences of high ATHB-2 levels, restoring the wild-type phenotype. Consequently, given that ATHB-2 is tightly regulated by phytochrome, these data indicate that ATHB-2 links the Auxin and phytochrome pathways in the shade avoidance response pathway.

[0404] Shade responsive genes can be used to modulate plant growth and development.

III.E.11 Guard Cell Genes, Gene Components and Products

[0405] Scattered throughout the epidermis of the shoot are minute pores called stomata. Each stomal pore is surrounded by two guard cells. The guard cells control the size of the stomal pore, which is critical since the stomata control the exchange of carbon dioxide, oxygen, and water vapor between the interior of the plant and the outside atmosphere. Stomata open and close through turgor changes driven by ion fluxes, which occur mainly through the guard cell plasma membrane and tonoplast. Guard cells are known to respond to a number of external stimuli such as changes in light intensity, carbon dioxide and water vapor, for example. Guard cells can also sense and rapidly respond to internal stimuli including changes in ABA, auxin and calcium ion flux.

[0406] Thus, guard cell genes are useful to modulate ABA responses, drought tolerance, respiration, water potential, and water management. All of which in turn affect plant yield including seed yield, harvest index, fruit yield, etc.

IV. Enhanced Foods

[0407] Animals require external supplies of amino acids that they cannot synthesize themselves. Also, some amino acids are required in larger quantities. The nutritional values of plants for animals and humans are thus modified by regulating the amounts of the constituent amino acids that occur as free amino acids or in proteins. For instance, higher levels of lysine and/or methionine enhance the nutritional value of corn seed. Applicants herein provide several methods for modulating the amino acid content:
[0408] (1) expressing a naturally occurring protein that has a high percentage of the desired amino acid(s);
[0409] (2) expressing a modified or synthetic coding sequence that has an enhanced percentage of the desired amino acids; or
[0410] (3) expressing the protein(s) that are capable of synthesizing more of the desired amino acids.
   A specific example is expressing proteins with, for example, enhanced methionine content, preferentially in a corn or cereal seed used for animal nutrition or in the parts of plants used for nutritional purposes.

[0411] A protein is considered to have a high percentage of an amino acid if the amount of the desired amino acid is at least 1% of the total number of residues in a protein; more preferably 2% or greater. Amino acids of particular interest are tryptophan, lysine, methionine, phenylalanine, threonine leucine, valine, and isoleucine.

[0412] The sequence(s) encoding the selected protein(s) is operably linked to a promoter and other regulatory sequences and transformed into a plant as described below. The promoter is chosen for promoting the optimal desired level of expression of the protein in the selected organ e.g. a promoter highly functional in seeds. Modifications may be made to the sequence encoding the protein to ensure protein transport into, for example, organelles or storage bodies or its accumulation in the organ. Such modifications may include addition of signal sequences at or near the N terminus and amino acid residues to modify protein stability or appropriate glycosylation. Other modifications may be made to the transcribed nucleic acid sequence to enhance the stability or translatability of the mRNA, in order to ensure accumulation of more of the desired protein. Suitable versions of the gene construct and transgenic plants are selected on the basis of, for example, the improved amino acid content and nutritional value measured by standard biochemical tests and animal feeding trials.

V. Use of Novel Genes to Facilitate Exploitation of Plants as Factories for the Synthesis of Valuble Molecules

[0413] Plants and their constituent cells, tissues, and organs are factories that manufacture small organic molecules such as sugars, amino acids, fatty acids, vitamins, etc., as well as macromolecules such as proteins, nucleic acids, oils/fats and carbohydrates. Plants have long been a source of pharmaceutically beneficial chemical, particularly the secondary metabolites and hormone-related molecules synthesized by plants. Plants can also be used as factories to produce carbohydrates or lipids that comprises a carbon backbone useful as the precursor of plastics, fiber, fuel, paper, pulp, rubber, solvents, lubricants, construction materials, detergents, and other cleaning materials. Plants can also generate other compounds that are of economic value, such as dyes, flavors and fragrances. Both the intermediates as well as the end-products of plant bio-synthetic pathways have been found useful.

[0414] With the polynucleotides and polypeptides of the instant invention, modification of both in-vitro and in-vivo synthesis of such products is possible. One method of increasing the amount of either the intermediates or the end-products synthesized in a cell is to increase the expression of one or more proteins in the synthesis pathway as discussed below. Another method of increasing production of an intermediate is to inhibit expression of protein(s) that synthesize the end-product from the intermediate. Levels of end-products and intermediates are also modified by changing the levels of enzymes that specifically change or degrade them. The kinds of molecules made are also modified by changing the genes encoding specific enzymes performing reactions at specific steps of the biosynthetic pathway. These genes are from the same or a different organism. The molecular structures in the biosynthetic pathways is thus modified or diverted into different branches of a pathway to make novel end-products.

[0415] The modifications are made by designing one or more novel genes per application comprising promoters, to ensure production of the enzyme(s) in the relevant cells, in the right amount, and polynucleotides encoding the relevant enzyme. The promoters and polynucleotides are the subject of this application. The novel genes are transformed into the relevant species using standard procedures. Their effects are measured by standard assays for the specific chemical/biochemical products.

[0416] The polynucleotides and proteins of the invention that participate in the relevant pathways and are useful for changing production of the above chemicals and biochemicals are identified in the Reference tables by their enzyme function. More specifically, proteins of the invention that have the enzymatic activity of one of the entries in the following table entitled “Enzymes Effecting Modulation of Biological Pathways” are of interest to modulate the corresponding pathways to produce precursors or final products noted above that are of industrial use. Biological activities of particular interest are listed below.

[0417] Other polynucleotides and proteins that regulate where, when and to what extent a pathway is active in a plant are extremely useful for modulating the synthesis and accumulation of valuable chemicals. These elements include transcription factors, proteins involved in signal transduction and other proteins in the control of gene expression and are described elsewhere in this application.

| Pathway Name | Enzyme Description | Comments |
|---|---|---|
| Alkaloid biosynthesis I | Morphine 6- | Also acts on other alkaloids, including |
| | dehydrogenase | codeine, normorphine and ethylmorphine, |
| | | but only very slowly on 7,8-saturated |
| | | derivatives such as dihydromorphine and |
| | | dihydrocodeine In the reverse direction, |
| | | also reduces naloxone to the 6-alpha- |
| | | hydroxy analog Activated by 2- |
| | | mercaptoethanol |
| | Codeinone reductase | Stereospecifically catalyses the reversible |
| | (NADPH) | reduction of codeinone to codeine, which |
| | | is a direct precursor of morphine in the |
| | | opium poppy plant, Papaver somniferum |
| | Salutaridine reductase | Stereospecifically catalyses the reversible |
| | (NADPH) | reduction of salutaridine to salutaridinol, |
| | | which is a direct precursor of morphinan |
| | | alkaloids in the poppy plant, Papaver |
| | | somniferum |
| | (S)-stylopine synthase | Catalyses an oxidative reaction that does |
| | | not incorporate oxygen into the product |
| | | Forms the second methylenedioxy bridge |
| | | of the protoberberine alkaloid stylopine |
| | | from oxidative ring closure of adjacent |
| | | phenolic and methoxy groups of |
| | | cheilanthifoline |
| | (S)-cheilanthifoline | Catalyses an oxidative reaction that does |
| | synthase | not incorporate oxygen into the product |
| | | Forms the methylenedioxy bridge of the |
| | | protoberberine alkaloid cheilanthifoline |
| | | from oxidative ring closure of adjacent |
| | | phenolic and methoxy groups of |
| | | scoulerine |
| | Salutaridine synthase | Forms the morphinan alkaloid salutaridine |
| | | by intramolecular phenol oxidation of |
| | | reticuline without the incorporation of |
| | | oxygen into the product |
| | (S)-canadine synthase | Catalyses an oxidative reaction that does |
| | | not incorporate oxygen into the product |
| | | Oxidation of the methoxyphenol group of |
| | | the alkaloid tetrahydrocolumbamine |
| | | results in the formation of the |
| | | methylenedioxy bridge of canadine |
| | Protopine 6- | Involved in benzophenanthridine alkaloid |
| | monooxygenase | synthesis in higher plants |
| | Dihydrosanguinarine | Involved in benzophenanthridine alkaloid |
| | 10-monooxygenase | synthesis in higher plants |
| | Monophenol | A group of copper proteins that also |
| | monooxygenase | catalyse the reaction of EC 1.10.3.1, if |
| | | only 1,2-benzenediols are available as |
| | | substrate |
| | L-amino acid oxidase | |
| | 1,2- | Stereospecifically reduces the 1,2- |
| | dehydroreticulinium | dehydroreticulinium ion to (R)-reticuline, |
| | reductase (NADPH) | which is a direct precursor of morphinan |
| | | alkaloids in the poppy plant, papaver |
| | | somniferum The enzyme does not |
| | | catalyse the reverse reaction to any |
| | | significant extent under physiological |
| | | conditions |
| | Dihydrobenzo- | Also catalyzes: dihydrochelirubine + O(2) = chelirubine + H(2)O(2) |
| | phenanthridine oxidase | Also catalyzes: |
| | | dihydromacarpine + O(2) = macarpine + H(2)O(2) |
| | | Found in higher plants Produces |
| | | oxidized forms of the |
| | | benzophenanthridine alkaloids |
| | Reticuline oxidase | The product of the reaction, (S)- |
| | | scoulerine, is a precursor of protopine, |
| | | protoberberine and benzophenanthridine |
| | | alkaloid biosynthesis in plants Acts on |
| | | (S)-reticuline and related compounds, |
| | | converting the N-methyl group into the |
| | | methylene bridge (′berberine |
| | | bridge[PRIME]) of (S)- |
| | | tetrahydroprotoberberines |
| | 3[PRIME]-hydroxy-N- | Involved in isoquinoline alkaloid |
| | methyl-(S)-coclaurine | metabolism in plants Has also been shown |
| | 4[PRIME]-O- | to catalyse the methylation of (R,S)- |
| | methyltransferase | laudanosoline, (S)-3[PRIME]- |
| | | hydroxycoclaurine and (R,S)-7-O- |
| | | methylnoraudanosoline |
| | (S)-scoulerine 9-O- | The product of this reaction is a precursor |
| | methyltransferase | for protoberberine alkaloids in plants |
| | Columbamine O- | The product of this reaction is a |
| | methyltransferase | protoberberine alkaloid that is widely |
| | | distributed in the plant kingdom Distinct |
| | | in specificity from EC 2.1.1.88 |
| | 10-hydroxydihydrosanguinarine | Part of the pathway for synthesis of |
| | 10-O- | benzophenanthridine alkaloids in plants |
| | methyltransferase | |
| | 12-hydroxydihydrochelirubine | Part of the pathway for synthesis of |
| | 12-O- | benzophenanthridine alkaloid macarpine |
| | methyltransferase | in plants |
| | (R,S)-norcoclaurine 6- | Norcoclaurine is 6,7-dihydroxy-1-[(4- |
| | O-methyltransferase | hydroxyphenyl)methyl]-1,2,3,4- |
| | | tetrahydroisoquinoline The enzyme will |
| | | also catalyse the 6-O-methylation of |
| | | (R,S)-norlaudanosoline to form 6-O- |
| | | methyl-norlaudanosoline, but this alkaloid |
| | | has not been found to occur in plants |
| | Salutaridinol 7-O- | At higher pH values the product, 7-O- |
| | acetyltransferase | acetylsalutaridinol, spontaneously closes |
| | | the 4->5 oxide bridge by allylic |
| | | elimination to form the morphine |
| | | precursor thebaine From the opium poppy |
| | | plant, Papaver somniferum |
| | Aspartate | Also acts on L-tyrosine, L-phenylalanine |
| | aminotransferase | and L-tryptophan. This activity can be |
| | | formed from EC 2.6.1.57 by controlled |
| | | proteolysis |
| | Tyrosine | L-phenylalanine can act instead of L- |
| | aminotransferase | tyrosine The mitochondrial enzyme may |
| | | be identical with EC 2.6.1.1 The three |
| | | isoenzymic forms are interconverted by |
| | | EC 3.4.22.4 |
| | Aromatic amino acid | L-methionine can also act as donor, more |
| | transferase | slowly Oxaloacetate can act as acceptor |
| | | Controlled proteolysis converts the |
| | | enzyme to EC 2.6.1.1 |
| | Tyrosine decarboxylase | The bacterial enzyme also acts on 3- |
| | | hydroxytyrosine and, more slowly, on 3- |
| | | hydroxyphenylalanine |
| | Aromatic-L-amino-acid | Also acts on L-tryptophan, 5-hydroxy-L- |
| | decarboxylase | tryptophan and dihydroxy-L- |
| | | phenylalanine (DOPA) |
| Alkaloid biosynthesis II | Tropine dehydrogenase | Oxidizes other tropan-3-alpha-ols, but not |
| | | the corresponding beta-derivatives |
| | Tropinone reductase | |
| | Hyoscyamine (6S)- | |
| | dioxygenase | |
| | 6-beta- | |
| | hydroxyhyoscyamine | |
| | epoxidase | |
| | Amine oxidase (copper- | A group of enzymes including those |
| | containing) | oxidizing primary amines, diamines and |
| | | histamine One form of EC 1.3.1.15 from |
| | | rat kidney also catalyses this reaction |
| | Putrescine N- | |
| | methyltransferase | |
| | Ornithine | |
| | decarboxylase | |
| | Oxalyl-CoA | |
| | decarboxylase | |
| | Phenylalanine | May also act on L-tyrosine |
| | ammonia-lyase | |
| Androgen and estrogen | 3-beta-hydroxy- | Acts on 3-beta-hydroxyandrost-5-en-17- |
| metabolism | delta(5)-steroid | one to form androst-4-ene-3,17-dione and |
| | dehydrogenase | on 3-beta-hydroxypregn-5-en-20-one to |
| | | form progesterone |
| | 11-beta-hydroxysteroid | |
| | dehydrogenase | |
| | Estradiol 17-alpha- | |
| | dehydrogenase | |
| | 3-alpha-hydroxy-5- | |
| | beta-androstane-17-one | |
| | 3-alpha-dehydrogenase | |
| | 3-alpha (17-beta)- | Also acts on other 17-beta- |
| | hydroxysteroid | hydroxysteroids, on the 3-alpha-hydroxy |
| | dehydrogenase (NAD+) | group of pregnanes and bile acids, and on |
| | | benzene dihydrodiol Different from EC |
| | | 1.1.1.50 or EC 1.1.1.213 |
| | 3-alpha-hydroxysteroid | Acts on other 3-alpha-hydroxysteroids |
| | dehydrogenase (B- | and on 9-, 11- and 15- |
| | specific) | hydroxyprostaglandin B-specific with |
| | | respect to NAD(+) or NADP(+) (cf. EC |
| | | 1.1.1.213) |
| | 3(or 17)beta- | Also acts on other 3-beta- or 17-beta- |
| | hydroxysteroid | hydroxysteroids (cf EC 1.1.1.209) |
| | dehydrogenase | |
| | Estradiol 17 beta- | Also acts on (S)-20-hydroxypregn-4-en-3- |
| | dehydrogenase | one and related compounds, oxidizing the |
| | | (S)-20-group B-specific with respect to |
| | | NAD(P)(+) |
| | Testosterone 17-beta- | |
| | dehydrogenase | |
| | Testosterone 17-beta- | Also oxidizes 3-hydroxyhexobarbital to 3- |
| | dehydrogenase | oxohexobarbital |
| | (NADP+) | |
| | Steroid 11-beta- | Also hydroxylates steroids at the 18- |
| | monooxygenase | position, and converts 18- |
| | | hydroxycorticosterone into aldosterone |
| | Estradiol 6-beta- | |
| | monooxygenase | |
| | Androst-4-ene-3,17- | Has a wide specificity A single enzyme |
| | dione monooxygenase | from Cylindrocarpon radicicola (EC |
| | | 1.14.13.54) catalyses both this reaction |
| | | and that catalysed by EC 1.14.99.4 |
| | 3-oxo-5-alpha-steroid | |
| | 4-dehydrogenase | |
| | 3-oxo-5-beta-steroid 4- | |
| | dehydrogenase | |
| | UDP- | Family of enzymes accepting a wide |
| | glucuronosyltransferase | range of substrates, including phenols, |
| | | alcohols, amines and fatty acids Some of |
| | | the activities catalysed were previously |
| | | listed separately as EC 2.4.1.42, EC |
| | | 2.4.1.59, EC 2.4.1.61, EC 2.4.1.76, EC |
| | | 2.4.1.77, EC 2.4.1.84, EC 2.4.1.107 and |
| | | EC 2.4.1.108 A temporary nomenclature |
| | | for the various forms whose delineation is |
| | | in a state of flux |
| | Steroid sulfotransferase | Broad specificity resembling EC 2.8.2.2, |
| | | but also acts on estrone |
| | Alcohol | Primary and secondary alcohols, |
| | sulfotransferase | including aliphatic alcohols, ascorbate, |
| | | chloramphenicol, ephedrine and |
| | | hydroxysteroids, but not phenolic |
| | | steroids, can act as acceptors (cf. EC |
| | | 2.8.2.15) |
| | Estrone sulfotransferase | |
| | Arylsulfatase | A group of enzymes with rather similar |
| | | specificities |
| | Steryl-sulfatase | Also acts on some related steryl sulfates |
| | 17-alpha- | |
| | hydroxyprogesterone | |
| | aldolase | |
| | Steroid delta-isomerase | |
| C21-Steroid hormone | 3-beta-hydroxy- | Acts on 3-beta-hydroxyandrost-5-en-17- |
| metabolism | delta(5)-steroid | one to form androst-4-ene-3,17-dione and |
| | dehydrogenase | on 3-beta-hydroxypregn-5-en-20-one to |
| | | form progesterone |
| | 11-beta-hydroxysteroid | |
| | dehydrogenase | |
| | 20-alpha- | A-specific with respect to NAD(P)(+) |
| | hydroxysteroid | |
| | dehydrogenase | |
| | 3-alpha-hydroxysteroid | Acts on other 3-alpha-hydroxysteroids |
| | dehydrogenase (B- | and on 9-, 11- and 15- |
| | specific) | hydroxyprostaglandin B-specific with |
| | | respect to NAD(+) or NADP(+) (cf. EC |
| | | 1.1.1.213) |
| | 3-alpha(or 20-beta)- | The 3-alpha-hydroxyl group or 20-beta- |
| | hydroxysteroid | hydroxyl group of pregnane and |
| | dehydrogenase | androstane steroids can act as donors |
| | Steroid 11-beta- | Also hydroxylates steroids at the 18- |
| | monooxygenase | position, and converts 18- |
| | | hydroxycorticosterone into aldosterone |
| | Corticosterone 18- | |
| | monooxygenase | |
| | Cholesterol | The reaction proceeds in three stages, |
| | monooxygenase (side- | with hydroxylation at C-20 and C-22 |
| | chain cleaving) | preceding scission of the side-chain at C- |
| | | 20 |
| | Steroid 21- | |
| | monooxygenase | |
| | Progesterone 11-alpha- | |
| | monooxygenase | |
| | Steroid 17-alpha- | |
| | monooxygenase | |
| | Cholestenone 5-beta- | |
| | reductase | |
| | Cortisone beta- | |
| | reductase | |
| | Progesterone 5-alpha- | Testosterone and 20-alpha-hydroxy-4- |
| | reductase | pregnen-3-one can act in place of |
| | | progesterone |
| | 3-oxo-5-beta-steroid 4- | |
| | dehydrogenase | |
| | Steroid delta-isomerase | |
| Flavonoids, stilbene and | Coniferyl-alcohol | Specific for coniferyl alcohol; does not |
| lignin biosynthesis | dehydrogenase | act on cinnamyl alcohol, 4-coumaryl |
| | | alcohol or sinapyl alcohol |
| | Cinnamyl-alcohol | Acts on coniferyl alcohol, sinapyl alcohol, |
| | dehydrogenase | 4-coumaryl alcohol and cinnamyl alcohol |
| | | (cf. EC 1.1.1.194) |
| | Dihydrokaempferol 4- | Also acts, in the reverse direction, on (+)- |
| | reductase | dihydroquercetin and (+)- |
| | | dihydromyricetin Each dihydroflavonol is |
| | | reduced to the corresponding cis-flavon- |
| | | 3,4-diol NAD(+) can act instead of |
| | | NADP(+), more slowly Involved in the |
| | | biosynthesis of anthocyanidins in plants |
| | Flavonone 4-reductase | Involved in the biosynthesis of 3- |
| | | deoxyanthocyanidins from flavonones |
| | | such as naringenin or eriodictyol |
| | Peroxidase | |
| | Caffeate 3,4- | |
| | dioxygenase | |
| | Naringenin 3- | |
| | dioxygenase | |
| | Trans-cinnamate 4- | Also acts on NADH, more slowly |
| | monooxygenase | |
| | Trans-cinnamate 2- | |
| | monooxygenase | |
| | Flavonoid 3[PRIME]- | Acts on a number of flavonoids, including |
| | monooxygenase | naringenin and dihydrokaempferol Does |
| | | not act on 4-coumarate or 4-coumaroyl- |
| | | CoA |
| | Monophenol | A group of copper proteins that also |
| | monooxygenase | catalyse the reaction of EC 1.10.3.1, if |
| | | only 1,2-benzenediols are available as |
| | | substrate |
| | Cinnamoyl-CoA | Also acts on a number of substituted |
| | reductase | cinnamoyl esters of coenzyme A |
| | Caffeoyl-CoA O- | |
| | methyltransferase | |
| | Luteolin O- | Also acts on luteolin-7-O-beta-D- |
| | methyltransferase | glucoside |
| | Caffeate O- | 3,4-dihydroxybenzaldehyde and catechol |
| | methyltransferase | can act as acceptor, more slowly |
| | Apigenin 4[PRIME]-O- | Converts apigenin into acacetin |
| | methyltransferase | Naringenin (5,7,4[PRIME]- |
| | | trihydroxyflavonone) can also act as |
| | | acceptor, more slowly |
| | Quercetin 3-O- | Specific for quercetin. Related enzymes |
| | methyltransferase | bring about the 3-O-methylation of other |
| | | flavonols, such as galangin and |
| | | kaempferol |
| | Isoflavone-7-O-beta- | The 6-position of the glucose residue of |
| | glucoside | formononetin can also act as acceptor |
| | 6[PRIME][PRIME]-O- | Some other 7-O-glucosides of |
| | malonyltransferase | isoflavones, flavones and flavonols can |
| | | also act, more slowly |
| | Pinosylvin synthase | Not identical with EC 2.3.1.74 or EC |
| | | 2.3.1.95 |
| | Naringenin-chalcone | In the presence of NADH and a reductase, |
| | synthase | 6[PRIME]-deoxychalcone is produced |
| | Trihydroxystilbene | Not identical with EC 2.3.1.74 or EC |
| | synthase | 2.3.1.146 |
| | Quinate O- | Caffeoyl-CoA and 4-coumaroyl-CoA can |
| | hydroxycinnamoyltransferase | also act as donors, more slowly Involved |
| | | in the biosynthesis of chlorogenic acid in |
| | | sweet potato and, with EC 2.3.1.98 in the |
| | | formation of caffeoyl-CoA in tomato |
| | Coniferyl-alcohol | Sinapyl alcohol can also act as acceptor |
| | glucosyltransferase | |
| | 2-coumarate O-beta- | Coumarinate (cis-2-hydroxycinnamate) |
| | glucosyltransferase | does not act as acceptor |
| | Scopoletin | |
| | glucosyltransferase | |
| | Flavonol-3-O-glucoside | Converts flavonol 3-O-glucosides to 3-O- |
| | L-rhamnosyltransferase | rutinosides Also acts, more slowly, on |
| | | rutin, quercetin 3-O-galactoside and |
| | | flavonol O3-rhamnosides |
| | Flavone 7-O-beta- | A number of flavones, flavonones and |
| | glucosyltransferase | flavonols can function as acceptors |
| | | Different from EC 2.4.1.91 |
| | Flavonol 3-O- | Acts on a variety of flavonols, including |
| | glucosyltransferase | quercetin and quercetin 7-O-glucoside |
| | | Different from EC 2.4.1.81 |
| | Flavone | 7-O-beta-D-glucosides of a number of |
| | apiosyltransferase | flavonoids and of 4-substituted phenols |
| | | can act as acceptors |
| | Coniferin beta- | Also hydrolyzes syringin, 4-cinnamyl |
| | glucosidase | alcohol beta-glucoside, and, more slowly, |
| | | some other aryl beta-glycosides A plant |
| | | cell-wall enzyme involved in the |
| | | biosynthesis of lignin |
| | Beta-glucosidase | Wide specificity for beta-D-glucosides. |
| | | Some examples also hydrolyse one or |
| | | more of the following: beta-D- |
| | | galactosides, alpha-L-arabinosides, beta- |
| | | D-xylosides, and beta-D-fucosides |
| | Chalcone isomerase | |
| | 4-coumarate--CoA | |
| | ligase | |
| Ascorbate and aldarate | D-threo-aldose 1- | Acts on L-fucose, D-arabinose and L- |
| metabolism | dehydrogenase | xylose The animal enzyme was also |
| | | shown to act on L-arabinose, and the |
| | | enzyme from Pseudomonas caryophylli |
| | | on L-glucose |
| | L-threonate 3- | |
| | dehydrogenase | |
| | Glucuronate reductase | Also reduces D-galacturonate May be |
| | | identical with EC 1.1.1.2 |
| | Glucuronolactone | |
| | reductase | |
| | L-arabinose 1- | |
| | dehydrogenase | |
| | L-galactonolactone | Acts on the 1,4-lactones of L-galactonic, |
| | oxidase | D-altronic, L-fuconic, D-arabinic and D- |
| | | threonic acids Not identical with EC |
| | | 1.1.3.8 (cf. EC 1.3.2.3) |
| | L-gulonolactone | The product spontaneously isomerizes to |
| | oxidase | L-ascorbate |
| | L-ascorbate oxidase | |
| | L-ascorbate peroxidase | |
| | Ascorbate 2,3- | |
| | dioxygenase | |
| | 2,5-dioxovalerate | |
| | dehydrogenase | |
| | Aldehyde | Wide specificity, including oxidation of |
| | dehydrogenase (NAD+) | D-glucuronolactone to D-glucarate |
| | Galactonolactone | Cf. EC 1.1.3.24 |
| | dehydrogenase | |
| | Monodehydroascorbate | |
| | reductase (NADH) | |
| | Glutathione | |
| | dehydrogenase | |
| | (ascorbate) | |
| | L-arabinonolactonase | |
| | Gluconolactonase | Acts on a wide range of hexono-1,5- |
| | | lactones |
| | Uronolactonase | |
| | 1,4-lactonase | Specific for 1,4-lactones with 4-8 carbon |
| | | atoms Does not hydrolyse simple |
| | | aliphatic esters, acetylcholine, sugar |
| | | lactones or substituted aliphatic lactones, |
| | | e.g. 3-hydroxy-4-butyrolactone |
| | 2-dehydro-3- | |
| | deoxyglucarate aldolase | |
| | L-arabinonate | |
| | dehydratase | |
| | Glucarate dehydratase | |
| | 5-dehydro-4- | |
| | deoxyglucarate | |
| | dehydratase | |
| | Galactarate dehydratase | |
| | 2-dehydro-3-deoxy-L- | |
| | arabinonate | |
| | dehydratase | |
| Carbon fixation | Malate dehydrogenase | Also oxidizes some other 2- |
| | | hydroxydicarboxylic acids |
| | Malate dehydrogenase | Does not decarboxylates added |
| | (decarboxylating) | oxaloacetate |
| | Malate dehydrogenase | Also decarboxylates added oxaloacetate |
| | (oxaloacetate | |
| | decarboxylating) | |
| | (NADP+) | |
| | Malate dehydrogenase | Activated by light |
| | (NADP+) | |
| | Glyceraldehyde-3- | |
| | phosphate | |
| | dehydrogenase | |
| | (NADP+) | |
| | (phosphorylating) | |
| | Transketolase | Wide specificity for both reactants, e.g. |
| | | converts hydroxypyruvate and R—CHO |
| | | into CO(2) and R—CHOH—CO—CH(2)OH |
| | | Transketolase from Alcaligenes faecalis |
| | | shows high activity with D-erythrose as |
| | | acceptor |
| | Aspartate | Also acts on L-tyrosine, L-phenylalanine |
| | aminotransferase | and L-tryptophan. This activity can be |
| | | formed from EC 2.6.1.57 by controlled |
| | | proteolysis |
| | Alanine | 2-aminobutanoate acts slowly instead of |
| | aminotransferase | alanine |
| | Sedoheptulokinase | |
| | Phosphoribulokinase | |
| | Pyruvate kinase | UTP, GTP, CTP, ITP and dATP can also |
| | | act as donors Also phosphorylates |
| | | hydroxylamine and fluoride in the |
| | | presence of CO(2) |
| | Phosphoglycerate | |
| | kinase | |
| | Pyruvate, phosphate | |
| | dikinase | |
| | Fructose- | The animal enzyme also acts on |
| | bisphosphatase | sedoheptulose 1,7-bisphosphate |
| | Sedoheptulose- | |
| | bisphosphatase | |
| | Phosphoenolpyruvate | |
| | carboxylase | |
| | Ribulose-bisphosphate | Will utilize O(2) instead of CO(2), |
| | carboxylase | forming 3-phospho-D-glycerate and 2- |
| | | phosphoglycolate |
| | Phosphoenolpyruvate | |
| | carboxykinase (ATP) | |
| | Fructose-bisphosphate | Also acts on (3S,4R)-ketose 1-phosphates |
| | aldolase | The yeast and bacterial enzymes are zinc |
| | | proteins The enzymes increase electron- |
| | | attraction by the carbonyl group, some |
| | | (Class I) forming a protonated imine with |
| | | it, others (Class II), mainly of microbial |
| | | origin, polarizing it with a metal ion, e.g |
| | | zinc |
| | Phosphoketolase | |
| | Ribulose-phosphate 3- | Also converts D-erythrose 4-phosphate |
| | epimerase | into D-erythrulose 4-phosphate and D- |
| | | threose 4-phosphate |
| | Triosephosphate | |
| | isomerase | |
| | Ribose 5-phosphate | Also acts on D-ribose 5-diphosphate and |
| | epimerase | D-ribose 5-triphosphate |
| Phenylalanine | (R)-4- | Also acts, more slowly, on (R)-3- |
| metabolism | hydroxyphenyllactate | phenyllactate, (R)-3-(indole-3-yl)lactate |
| | dehydrogenase | and (R)-lactate |
| | Hydroxyphenyl- | Also acts on 3-(3,4- |
| | pyruvate reductase | dihydroxyphenyl)lactate Involved with |
| | | EC 2.3.1.140 in the biosynthesis of |
| | | rosmarinic acid |
| | Aryl-alcohol | A group of enzymes with broad |
| | dehydrogenase | specificity towards primary alcohols with |
| | | an aromatic or cyclohex-1-ene ring, but |
| | | with low or no activity towards short- |
| | | chain aliphatic alcohols |
| | Peroxidase | |
| | Catechol 1,2- | Involved in the metabolism of nitro- |
| | dioxygenase | aromatic compounds by a strain of |
| | | Pseudomonas putida |
| | 2,3-dihydroxybenzoate | |
| | 3,4-dioxygenase | |
| | 3-carboxyethylcatechol | |
| | 2,3-dioxygenase | |
| | Catechol 2,3- | The enzyme from Alcaligines sp. strain |
| | dioxygenase | O-1 has also been shown to catalyse the |
| | | reaction: 3-Sulfocatechol + O(2) + H(2)O = 2- |
| | | hydroxymuconate + bisulfite. It has |
| | | been referred to as 3-sulfocatechol 2,3- |
| | | dioxygenase. Further work will be |
| | | necessary to show whether or not this is a |
| | | distinct enzyme |
| | 4- | |
| | hydroxyphenylpyruvate | |
| | dioxygenase | |
| | Protocatechuate 3,4- | |
| | dioxygenase | |
| | Hydroxyquinol 1,2- | The product isomerizes to 2- |
| | dioxygenase | maleylacetate (cis-hex-2-enedioate) |
| | | Highly specific; catechol and pyrogallol |
| | | are acted on at less than 1% of the rate at |
| | | which benzene-1,2,4-triol is oxidized |
| | Protocatechuate 4,5- | |
| | dioxygenase | |
| | Phenylalanine 2- | Also catalyses a reaction similar to that |
| | monooxygenase | of EC 1.4.3.2, forming 3-phenylpyruvate, |
| | | NH(3) and H(2)O(2), but more slowly |
| | Anthranilate 1,2- | |
| | dioxygenase | |
| | (deaminating, | |
| | decarboxylating) | |
| | Benzoate 1,2- | A system, containing a reductase which |
| | dioxygenase | is an iron-sulfur flavoprotein (FAD), and |
| | | an iron-sulfur oxygenase |
| | Toluene dioxygenase | A system, containing a reductase which |
| | | is an iron-sulfur flavoprotein (FAD), an |
| | | iron-sulfur oxygenase, and a ferredoxin |
| | | Some other aromatic compounds, |
| | | including ethylbenzene, 4-xylene and |
| | | some halogenated toluenes, are converted |
| | | into the corresponding cis-dihydrodiols |
| | Naphthalene 1,2- | A system, containing a reductase which |
| | dioxygenase | is an iron-sulfur flavoprotein (FAD), an |
| | | iron-sulfur oxygenase, and ferredoxin |
| | Benzene 1,2- | A system, containing a reductase which |
| | dioxygenase | is an iron-sulfur flavoprotein, an iron- |
| | | sulfur oxygenase and ferredoxin |
| | Salicylate 1- | |
| | monooxygenase | |
| | Trans-cinnamate 4- | Also acts on NADH, more slowly |
| | monooxygenase | |
| | Benzoate 4- | |
| | monooxygenase | |
| | 4-hydroxybenzoate 3- | Most enzymes from Pseudomonas are |
| | monooxygenase | highly specific for NAD(P)H (cf EC |
| | | 1.14.13.33) |
| | 3-hydroxybenzoate 4- | Also acts on a number of analogs of 3- |
| | monooxygenase | hydroxybenzoate substituted in the 2, 4, 5 |
| | | and 6 positions |
| | 3-hydroxybenzoate 6- | Also acts on a number of analogs of 3- |
| | monooxygenase | hydroxybenzoate substituted in the 2, 4, 5 |
| | | and 6 positions NADPH can act instead |
| | | of NADH, more slowly |
| | 4-hydroxybenzoate 3- | The enzyme from Corynebacterium |
| | monooxygenase | cyclohexanicum is highly specific for 4- |
| | (NAD(P)H) | hydroxybenzoate, but uses NADH and |
| | | NADPH at approximately equal rates (cf. |
| | | EC 1.14.13.2). It is less specific for |
| | | NADPH than EC 1.14.13.2 |
| | Anthranilate 3- | The enzyme from Aspergillus niger is an |
| | monooxygenase | iron protein; that from the yeast |
| | (deaminating) | Trichosporon cutaneum is a flavoprotein |
| | | (FAD) |
| | Melilotate 3- | |
| | monooxygenase | |
| | Phenol 2- | Also active with resorcinol and O-cresol |
| | monooxygenase | |
| | Mandelate 4- | |
| | monooxygenase | |
| | 3-hydroxybenzoate 2- | |
| | monooxygenase | |
| | 4-cresol dehydrogenase | Phenazine methosulfate can act as |
| | (hydroxylating) | acceptor A quinone methide is probably |
| | | formed as intermediate The product is |
| | | oxidized further to 4-hydroxybenzoate |
| | Benzaldehyde | |
| | dehydrogenase (NAD+) | |
| | Aminomuconate- | Also acts on 2-hydroxymuconate |
| | semialdehyde | semialdehyde |
| | dehydrogenase | |
| | Phenylacetaldehyde | |
| | dehydrogenase | |
| | 4-carboxy-2- | Does not act on unsubstituted aliphatic or |
| | hydroxymuconate-6- | aromatic aldehydes or glucose NAD(+) |
| | semialdehyde | can replace NADP(+), but with lower |
| | dehydrogenase | affinity |
| | Aldehyde | |
| | dehydrogenase | |
| | (NAD(P)+) | |
| | Benzaldehyde | |
| | dehydrogenase | |
| | (NADP+) | |
| | Coumarate reductase | |
| | Cis-1,2- | |
| | dihydrobenzene-1,2- | |
| | diol dehydrogenase | |
| | Cis-1,2-dihydro-1,2- | Also acts, at half the rate, on cis- |
| | dihydroxynaphthalene | anthracene dihydrodiol and cis- |
| | dehydrogenase | phenanthrene dihydrodiol |
| | 2-enoate reductase | Acts, in the reverse direction, on a wide |
| | | range of alkyl and aryl alpha,beta- |
| | | unsaturated carboxylate ions 2-butenoate |
| | | was the best substrate tested |
| | Maleylacetate reductase | |
| | Phenylalanine | The enzyme from Bacillus badius and |
| | dehydrogenase | Sporosarcina ureae are highly specific for |
| | | L-phenylalanine, that from Bacillus |
| | | sphaericus also acts on L-tyrosine |
| | L-amino acid oxidase | |
| | Amine oxidase (flavin- | Acts on primary amines, and usually also |
| | containing) | on secondary and tertiary amines |
| | Amine oxidase (copper- | A group of enzymes including those |
| | containing) | oxidizing primary amines, diamines and |
| | | histamine One form of EC 1.3.1.15 from |
| | | rat kidney also catalyses this reaction |
| | D-amino-acid | Acts to some extent on all D-amino acids |
| | dehydrogenase | except D-aspartate and D-glutamate |
| | Aralkylamine | Phenazine methosulfate can act as |
| | dehydrogenase | acceptor Acts on aromatic amines and, |
| | | more slowly, on some long-chain |
| | | aliphatic amines, but not on methylamine |
| | | or ethylamine (cf EC 1.4.99.3) |
| | Glutamine N- | |
| | phenylacetyltransferase | |
| | Acetyl-CoA C- | |
| | acyltransferase | |
| | D-amino-acid N- | |
| | acetyltransferase | |
| | Phenylalanine N- | Also acts, more slowly, on L-histidine |
| | acetyltransferase | and L-alanine |
| | Glycine N- | Not identical with EC 2.3.1.13 or EC |
| | benzoyltransferase | 2.3.1.68 |
| | Aspartate | Also acts on L-tyrosine, L-phenylalanine |
| | aminotransferase | and L-tryptophan. This activity can be |
| | | formed from EC 2.6.1.57 by controlled |
| | | proteolysis |
| | D-alanine | Acts on the D-isomers of leucine, |
| | aminotransferase | aspartate, glutamate, aminobutyrate, |
| | | norvaline and asparagine |
| | Tyrosine | L-phenylalanine can act instead of L- |
| | aminotransferase | tyrosine The mitochondrial enzyme may |
| | | be identical with EC 2.6.1.1 The three |
| | | isoenzymic forms are interconverted by |
| | | EC 3.4.22.4 |
| | Aromatic amino acid | L-methionine can also act as donor, more |
| | transferase | slowly Oxaloacetate can act as acceptor |
| | | Controlled proteolysis converts the |
| | | enzyme to EC 2.6.1.1 |
| | Histidinol-phosphate | |
| | aminotransferase | |
| | 3-oxoadipate CoA- | |
| | transferase | |
| | 3-oxoadipate enol- | Acts on the product of EC 4.1.1.44 |
| | lactonase | |
| | Carboxymethylene- | |
| | butenolidase | |
| | 2-pyrone-4,6- | The product isomerizes to 4- |
| | dicarboxylate lactonase | oxalmesaconate |
| | Hippurate hydrolase | Acts on various N-benzoylamino acids |
| | Amidase | |
| | Acylphosphatase | |
| | 2-hydroxymuconate- | |
| | semialdehyde hydrolase | |
| | Aromatic-L-amino-acid | Also acts on L-tryptophan, 5-hydroxy-L- |
| | decarboxylase | tryptophan and dihydroxy-L- |
| | | phenylalanine (DOPA) |
| | Phenylpyruvate | Also acts on indole-3-pyruvate |
| | decarboxylase | |
| | 4-carboxymucono- | |
| | lactone decarboxylase | |
| | O-pyrocatechuate | |
| | decarboxylase | |
| | Phenylalanine | Also acts on tyrosine and other aromatic |
| | decarboxylase | amino acids |
| | 4-hydroxybenzoate | |
| | decarboxylase | |
| | Protocatechuate | |
| | decarboxylase | |
| | Benzoylformate | |
| | decarboxylase | |
| | 4-oxalocrotonate | Involved in the meta-cleavage pathway |
| | decarboxylase | for the degradation of phenols, cresols |
| | | and catechols |
| | 4-hydroxy-4-methyl-2- | Also acts on 4-hydroxy-4-methyl-2- |
| | oxoglutarate aldolase | oxoadipate and 4-carboxy-4-hydroxy-2- |
| | | oxohexadioate |
| | 2-oxopent-4-enoate | Also acts, more slowly, on cis-2-oxohex- |
| | hydratase | 4-enoate, but not on the trans-isomer |
| | Phenylalanine | May also act on L-tyrosine |
| | ammonia-lyase | |
| | Phenylalanine racemase | |
| | (ATP-hydrolysing) | |
| | Mandelate racemase | |
| | Phenylpyruvate | Also acts on other arylpyruvates |
| | tautomerase | |
| | 5-carboxymethyl-2- | |
| | hydroxymuconate | |
| | delta-isomerase | |
| | Muconolactone delta- | |
| | isomerase | |
| | Muconate | Also acts, in the reverse reaction, on 3- |
| | cycloisomerase | methyl-cis-cis-hexa-dienedioate and, |
| | | very slowly, on cis-trans-hexadienedioate |
| | | Not identical with EC 5.5.1.7 or EC |
| | | 5.5.1.11 |
| | 3-carboxy-cis,cis- | |
| | muconate | |
| | cycloisomerase | |
| | Carboxy-cis,cis- | |
| | muconate cyclase | |
| | Chloromuconate | Spontaneous elimination of HCl produces |
| | cycloisomerase | cis-4-carboxymethylenebut-2-en-4-olide |
| | | Also acts in reverse direction on 2- |
| | | chloro-cis,cis-muconate Not identical |
| | | with EC 5.5.1.1 or EC 5.5.1.11 |
| | Phenylacetate—CoA | Phenoxyacetate can replace phenylacetate |
| | ligase | |
| | Benzoate--CoA ligase | Also acts on 2-, 3- and 4-fluorobenzoate, |
| | | but only very slowly on the |
| | | corresponding chlorobenzoates |
| | 4-hydroxybenzoate-- | |
| | CoA ligase | |
| | Phenylacetate--CoA | Also acts, more slowly, on acetate, |
| | ligase | propanoate and butanoate, but not on |
| | | hydroxy derivatives of phenylacetate and |
| | | related compounds |
| Phenylalanine, tyrosine | Quinate 5- | |
| and tryptophan biosynthesis | dehydrogenase | |
| | Shikimate 5- | |
| | dehydrogenase | |
| | Quinate dehydrogenase | |
| | (pyrroloquinoline- | |
| | quinone) | |
| | Phenylalanine 4- | |
| | monooxygenase | |
| | Prephenate | This enzyme in the enteric bacteria also |
| | dehydrogenase | possesses chorismate mutase activity (EC |
| | | 5.4.99.5) and converts chorismate into |
| | | prephenate |
| | Prephenate | |
| | dehydrogenase | |
| | (NADP+) | |
| | Cyclohexadienyl | Also acts on prephenate and D- |
| | dehydrogenase | prephenyllactate (cf. EC 1.3.1.12) |
| | 2-methyl-branched- | From Ascaris suum The reaction |
| | chain-enoyl-CoA | proceeds only in the presence of another |
| | reductase | flavoprotein (ETF = [PRIME]Electron- |
| | | Transferring Flavoprotein[PRIME]) |
| | Phenylalanine | The enzyme from Bacillus badius and |
| | dehydrogenase | Sporosarcina ureae are highly specific for |
| | | L-phenylalanine, that from Bacillus |
| | | sphaericus also acts on L-tyrosine |
| | L-amino acid oxidase | |
| | Anthranilate | In some organisms, this enzyme is part of |
| | phosphoribosyl- | a multifunctional protein together with |
| | transferase | one or more components of the system |
| | | for biosynthesis of tryptophan (EC |
| | | 4.1.1.48, EC 4.1.3.27, EC 4.2.1.20, and |
| | | EC 5.3.1.24) |
| | 3-phosphoshikimate 1- | |
| | carboxyvinyl- | |
| | transferase | |
| | Aspartate | Also acts on L-tyrosine, L-phenylalanine |
| | aminotransferase | and L-tryptophan. This activity can be |
| | | formed from EC 2.6.1.57 by controlled |
| | | proteolysis |
| | Tyrosine | L-phenylalanine can act instead of L- |
| | aminotransferase | tyrosine The mitochondrial enzyme may |
| | | be identical with EC 2.6.1.1 The three |
| | | isoenzymic forms are interconverted by |
| | | EC 3.4.22.4 |
| | Aromatic amino acid | L-methionine can also act as donor, more |
| | transferase | slowly Oxaloacetate can act as acceptor |
| | | Controlled proteolysis converts the |
| | | enzyme to EC 2.6.1.1 |
| | Histidinol-phosphate | |
| | aminotransferase | |
| | Shikimate kinase | |
| | Indole-3-glycerol- | In some organisms, this enzyme is part of |
| | phosphate synthase | a multifunctional protein together with |
| | | one or more components of the system |
| | | for biosynthesis of tryptophan (EC |
| | | 2.4.2.18, EC 4.1.3.27, EC 4.2.1.20, and |
| | | EC 5.3.1.24) |
| | 2-dehydro-3- | |
| | deoxyphosphoheptonate | |
| | aldolase | |
| | Anthranilate synthase | In some organisms, this enzyme is part of |
| | | a multifunctional protein together with |
| | | one or more components of the system |
| | | for biosynthesis of tryptophan (EC |
| | | 2.4.2.18, EC 4.1.1.48, EC 4.2.1.20, and |
| | | EC 5.3.1.24) The native enzyme in the |
| | | complex with uses either glutamine or |
| | | (less efficiently) NH(3). The enzyme |
| | | separated from the complex uses NH(3) |
| | | only |
| | 3-dehydroquinate | |
| | dehydratase | |
| | Phosphopyruvate | Also acts on 3-phospho-D-erythronate |
| | hydratase | |
| | Tryptophan synthase | Also catalyses the conversion of serine |
| | | and indole into tryptophan and water and |
| | | of indoleglycerol phosphate into indole |
| | | and glyceraldehyde phosphate In some |
| | | organisms, this enzyme is part of a |
| | | multifunctional protein together with one |
| | | or more components of the system for |
| | | biosynthesis of tryptophan (EC 2.4.2.18, |
| | | EC 4.1.1.48, EC 4.1.3.27, and EC |
| | | 5.3.1.24) |
| | Prephenate dehydratase | This enzyme in the enteric bacteria also |
| | | possesses chorismate mutase activity and |
| | | converts chorismate into prephenate |
| | Carboxycyclohexadienyl | Also acts on prephenate and D- |
| | dehydratase | prephenyllactate Cf. EC 4.2.1.51 |
| | 3-dehydroquinate | The hydrogen atoms on C-7 of the |
| | synthase | substrate are retained on C-2 of the |
| | | products |
| | Chorismate synthase | Shikimate is numbered so that the |
| | | double-bond is between C-1 and C-2, but |
| | | some earlier papers numbered in the |
| | | reverse direction |
| | Phosphoribosylanthranilate | In some organisms, this enzyme is part of |
| | isomerase | a multifunctional protein together with |
| | | one or more components of the system |
| | | for biosynthesis of tryptophan (EC |
| | | 2.4.2.18, EC 4.1.1.48, EC 4.1.3.27, and |
| | | EC 4.2.1.20) |
| | Chorismate mutase | |
| | Tyrosine--tRNA ligase | |
| | Phenylalanine--tRNA | |
| | ligase | |
| Starch and sucrose | UDP-glucose 6- | Also acts on UDP-2-deoxyglucose |
| metabolism | dehydrogenase | |
| | Glucoside 3- | The enzyme acts on D-glucose, D- |
| | dehydrogenase | galactose, D-glucosides and D- |
| | | galactosides, but D-glucosides react more |
| | | rapidly than D-galactosides |
| | CDP-4-dehydro-6- | Two proteins are involved but no partial |
| | deoxyglucose reductase | reaction has been observed in the |
| | | presence of either alone |
| | Phosphorylase | The recommended name should be |
| | | qualified in each instance by adding the |
| | | name of the natural substance, e.g. |
| | | maltodextrin phosphorylase, starch |
| | | phosphorylase, glycogen phosphorylase |
| | Levansucrase | Some other sugars can act as D-fructosyl |
| | | acceptors |
| | Glycogen (starch) | The recommended name varies according |
| | synthase | to the source of the enzyme and the |
| | | nature of its synthetic product Glycogen |
| | | synthase from animal tissues is a |
| | | complex of a catalytic subunit and the |
| | | protein glycogenin The enzyme requires |
| | | glucosylated glycogenin as a primer; this |
| | | is the reaction product of EC 2.4.1.186 A |
| | | similar enzyme utilizes ADP-glucose (Cf. |
| | | EC 2.4.1.21) |
| | Cellulose synthase | Involved in the synthesis of cellulose A |
| | (UDP-forming) | similar enzyme utilizes GDP-glucose (Cf. |
| | | EC 2.4.1.29) |
| | Sucrose synthase | |
| | Sucrose-phosphate | |
| | synthase | |
| | Alpha, alpha-trehalose- | See also EC 2.4.1.36 |
| | phosphate synthase | |
| | (UDP-forming) | |
| | UDP- | Family of enzymes accepting a wide |
| | glucuronosyltransferase | range of substrates, including phenols, |
| | | alcohols, amines and fatty acids Some of |
| | | the activities catalysed were previously |
| | | listed separately as EC 2.4.1.42, EC |
| | | 2.4.1.59, EC 2.4.1.61, EC 2.4.1.76, EC |
| | | 2.4.1.77, EC 2.4.1.84, EC 2.4.1.107 and |
| | | EC 2.4.1.108 A temporary nomenclature |
| | | for the various forms whose delineation |
| | | is in a state of flux |
| | 1,4-alpha-glucan | Converts amylose into amylopectin The |
| | branching enzyme | recommended name requires a |
| | | qualification depending on the product, |
| | | glycogen or amylopectin, e.g. glycogen |
| | | branching enzyme, amylopectin |
| | | branching enzyme. The latter has |
| | | frequently been termed Q-enzyme |
| | Cellobiose | |
| | phosphorylase | |
| | Starch (bacterial | The recommended name various |
| | glycogen) synthase | according to the source of the enzyme |
| | | and the nature of its synthetic product, |
| | | e.g. starch synthase, bacterial glycogen |
| | | synthase A similar enzyme utilizes UDP- |
| | | glucose (Cf. EC 2.4.1.11) |
| | 4-alpha- | An enzymic activity of this nature forms |
| | glucanotransferase | part of the mammalian and Yeast |
| | | glycogen branching system (see EC |
| | | 3.2.1.33) |
| | Cellulose synthase | Involved in the synthesis of cellulose A |
| | (GDP-forming) | similar enzyme utilizes UDP-glucose (Cf. |
| | | EC 2.4.1.12) |
| | 1,3-beta-glucan | |
| | synthase | |
| | Phenol beta- | Acts on a wide range of phenols |
| | glucosyltransferase | |
| | Amylosucrase | |
| | Polygalacturonate 4- | |
| | alpha- | |
| | galacturonosyltransferase | |
| | Dextransucrase | |
| | Alpha,alpha-trehalose | |
| | phosphorylase | |
| | Sucrose phosphorylase | In the forward reaction, arsenate may |
| | | replace phosphate In the reverse reaction |
| | | various ketoses and L-arabinose may |
| | | replace D-fructose |
| | Maltose phosphorylase | |
| | 1,4-beta-D-xylan | |
| | synthase | |
| | Hexokinase | D-glucose, D-mannose, D-fructose, |
| | | sorbitol and D-glucosamine can act as |
| | | acceptors ITP and dATP can act as |
| | | donors The liver isoenzyme has |
| | | sometimes been called glucokinase |
| | Phosphoglucokinase | |
| | Glucose-1,6- | D-glucose 6-phosphate can act as |
| | bisphosphate synthase | acceptor, forming D-glucose 1,6- |
| | | bisphosphate |
| | Glucokinase | A group of enzymes found in |
| | | invertebrates and microorganisms highly |
| | | specific for glucose |
| | Fructokinase | |
| | Glucose-1-phosphate | |
| | phosphodismutase | |
| | Protein-N(PI)- | Comprises a group of related enzymes |
| | phosphohistidine-sugar | The protein substrate is a phosphocarrier |
| | phosphotransferase | protein of low molecular mass (9.5 Kd) A |
| | | phosphoenzyme intermediate is formed |
| | | The enzyme translocates the sugar it |
| | | phosphorylates into bacteria Aldohexoses |
| | | and their glycosides and alditols are |
| | | phosphorylated on O-6; fructose and |
| | | sorbose on O-1 Glycerol and |
| | | disaccharides are also substrates |
| | Glucose-1-phosphate | |
| | adenylyltransferase | |
| | Glucose-1-phosphate | |
| | cytidylyltransferase | |
| | Glucose-1-phosphate | Also acts, more slowly, on D-mannose 1- |
| | guanylyltransferase | phosphate |
| | UTP--glucose-1- | |
| | phosphate | |
| | uridylyltransferase | |
| | Pectinesterase | |
| | Trehalose-phosphatase | |
| | Sucrose-phosphatase | |
| | Glucose-6-phosphatase | Wide distribution in animal tissues Also |
| | | catalyses potent transphosphorylations |
| | | from carbamoyl phosphate, hexose |
| | | phosphates, pyrophosphate, |
| | | phosphoenolpyruvate and nucleoside di- |
| | | and triphosphates, to D-glucose, D- |
| | | mannose, 3-methyl-D-glucose, or 2- |
| | | deoxy-D-glucose (cf. EC 2.7.1.62, EC |
| | | 2.7.1.79, and EC 3.9.1.1) |
| | Alpha-amylase | Acts on starch, glycogen and related |
| | | polysaccharides and oligosaccharides in a |
| | | random manner; reducing groups are |
| | | liberated in the alpha-configuration |
| | Oligo-1,6-glucosidase | Also hydrolyses palatinose The enzyme |
| | | from intestinal mucosa is a single |
| | | polypeptide chain also catalysing the |
| | | reaction of EC 3.2.1.48 |
| | Maltose-6[PRIME]- | Hydrolyses a variety of 6-phospho-D- |
| | phosphate glucosidase | glucosides, including maltose 6- |
| | | phosphate, alpha[PRIME] alpha-trehalose |
| | | 6-phosphate, sucrose 6-phosphate and p- |
| | | nitrophenyl-alpha-D-glucopyranoside 6- |
| | | phosphate (as a chromogenic substrate) |
| | | The enzyme is activated by Fe(II), |
| | | Mn(II), Co(II) and Ni(II). It is rapidly |
| | | inactivated in air |
| | Polygalacturonase | |
| | Beta-amylase | Acts on starch, glycogen and related |
| | | polysaccharides and oligosaccharides |
| | | producing beta-maltose by an inversion |
| | Alpha-glucosidase | Group of enzymes whose specificity is |
| | | directed mainly towards the |
| | | exohydrolysis of 1,4-alpha-glucosidic |
| | | linkages, and that hydrolyse |
| | | oligosaccharides rapidly, relative to |
| | | polysaccharides, which are hydrolysed |
| | | relatively slowly, or not at all The |
| | | intestinal enzyme also hydrolyses |
| | | polysaccharides, catalysing the reactions |
| | | of EC 3.2.1.3, and, more slowly, |
| | | hydrolyses 1,6-alpha-D-glucose links |
| | Beta-glucosidase | Wide specificity for beta-D-glucosides. |
| | | Some examples also hydrolyse one or |
| | | more of the following: beta-D- |
| | | galactosides, alpha-L-arabinosides, beta- |
| | | D-xylosides, and beta-D-fucosides |
| | Beta-fructofuranosidase | Substrates include sucrose Also catalyses |
| | | fructotransferase reactions |
| | Alpha,alpha-trehalase | |
| | Glucan 1,4-alpha- | Most forms of the enzyme can rapidly |
| | glucosidase | hydrolyse 1,6-alpha-D-glucosidic bonds |
| | | when the next bond in sequence is 1,4, |
| | | and some preparations of this enzyme |
| | | hydrolyse 1,6- and 1,3-alpha-D- |
| | | glucosidic bonds in other polysaccharides |
| | | This entry covers all such enzymes acting |
| | | on polysaccharides more rapidly than on |
| | | oligosaccharides EC 3.2.1.20 from |
| | | mammalian intestine can catalyse similar |
| | | reactions |
| | Beta-glucuronidase | |
| | Amylo-1,6-glucosidase | In mammals and yeast this enzyme is |
| | | linked to a glycosyltransferase similar to |
| | | EC 2.4.1.25; together these two activities |
| | | constitute the glycogen debranching |
| | | system |
| | Xylan 1,4-beta- | Also hydrolyses xylobiose Some other |
| | xylosidase | exoglycosidase activities have been |
| | | found associated with this enzyme in |
| | | sheep liver |
| | Glucan endo-1,3-beta- | Very limited action on mixed-link (1,3- |
| | D-glucosidase | 1,4-)-beta-D-glucans Hydrolyses |
| | | laminarin, paramylon and pachyman |
| | | Different from EC 3.2.1.6 |
| | Cellulase | Will also hydrolyse 1,4-linkages in beta- |
| | | D-glucans also containing 1,3-linkages |
| | Sucrose alpha- | This enzyme is isolated from intestinal |
| | glucosidase | mucosa as a single polypeptide chain also |
| | | displaying activity towards isomaltose |
| | | (oligo-1,6-glucosidase, cf. EC 3.2.1.10) |
| | Cyclomaltodextrinase | Also hydrolyses linear maltodextrin |
| | Glucan 1,3-beta- | Acts on oligosaccharides but very slowly |
| | glucosidase | on laminaribiose |
| | Levanase | |
| | Galacturan 1,4-alpha- | |
| | galacturonidase | |
| | Glucan 1,4-beta- | Acts on 1,4-beta-D-glucans and related |
| | glucosidase | oligosaccharides Cellobiose is |
| | | hydrolysed, very slowly |
| | Cellulose 1,4-beta- | |
| | cellobiosidase | |
| | Alpha,alpha- | |
| | phosphotrehalase | |
| | ADP-sugar | Has a distinct specificity from the UDP- |
| | diphosphatase | sugar pyrophosphatase (EC 3.6.1.45) |
| | Nucleotide | Substrates include NAD(+), NADP(+), |
| | pyrophosphatase | FAD, CoA and also ATP and ADP |
| | UDP-glucuronate | |
| | decarboxylase | |
| | CDP-glucose 4,6- | |
| | dehydratase | |
| | CDP-abequose | |
| | epimerase | |
| | UDP-glucuronate 4- | |
| | epimerase | |
| | Glucose-6-phosphate | Also catalyses the anomerization of D- |
| | isomerase | glucose 6-phosphate |
| | Phosphoglucomutase | Maximum activity is only obtained in the |
| | | presence of alpha-D-glucose 1,6- |
| | | bisphosphate. This bisphosphate is an |
| | | intermediate in the reaction, being |
| | | formed by transfer of a phosphate residue |
| | | from the enzyme to the substrate, but the |
| | | dissociation of bisphosphate from the |
| | | enzyme complex is much slower than the |
| | | overall isomerization Also, more slowly, |
| | | catalyses the interconversion of 1- |
| | | phosphate and 6-phosphate isomers of |
| | | many other alpha-D-hexoses, and the |
| | | interconversion of alpha-D-ribose 1- |
| | | phosphate and 5-phosphate |
| | Beta- | |
| | phosphoglucomutase | |
| | Maltose alpha-D- | |
| | glucosyltransferase | |
| Tryptophan metabolism | Indole-3-lactate | |
| | dehydrogenase | |
| | lndole-3-acetaldehyde | |
| | reductase (NADH) | |
| | Indole-3-acetaldehyde | |
| | reductase (NADPH) | |
| | 3-hydroxyacyl-CoA | Also oxidizes S-3-hydroxyacyl-N- |
| | dehydrogenase | acylthioethanolamine and S-3- |
| | | hydroxyacylhydrolipoate Some enzymes |
| | | act, more slowly, with NADP(+) Broad |
| | | specificity to acyl chain-length (cf. EC |
| | | 1.1.1.211) |
| | O-aminophenol oxidase | Isophenoxazine may be formed by a |
| | | secondary condensation from the initial |
| | | oxidation product |
| | Catalase | This enzyme can also act as a peroxidase |
| | | (EC 1.11.1.7) for which several organic |
| | | substances, especially ethanol, can act as |
| | | a hydrogen donor A manganese protein |
| | | containing Mn(III) in the resting state, |
| | | which also belongs here, is often called |
| | | pseudocatalase Enzymes from some |
| | | microorganisms, such as Penicillium |
| | | simplicissimum, which exhibit both |
| | | catalase and peroxidase activity, have |
| | | sometimes been referred to as catalase- |
| | | peroxidase |
| | 7,8- | |
| | dihydroxykynurenate | |
| | 8,8A-dioxygenase | |
| | Tryptophan 2,3- | Broad specificity towards tryptamine and |
| | dioxygenase | derivatives including D- and L- |
| | | tryptophan, 5-hydroxytryptophan and |
| | | serotonin |
| | Indole 2,3-dioxygenase | The enzyme from jasminum is a |
| | | flavoprotein containing copper, and |
| | | forms anthranilate as the final product |
| | | One enzyme from Tecoma stans is also a |
| | | flavoprotein containing copper and uses |
| | | three atoms of oxygen per molecule of |
| | | Indole, to form anthranil (3,4- |
| | | benzisoxazole) A second enzyme from |
| | | Tecoma stans, which is not a |
| | | flavoprotein, uses four atoms of oxygen |
| | | and forms anthranilate as the final |
| | | product |
| | 2,3-dihydroxyindole | |
| | 2,3-dioxygenase | |
| | Indoleamine-pyrrole | Acts on many substituted and |
| | 2,3-dioxygenase | unsubstituted indoleamines, including |
| | | melatonin Involved in the degradation of |
| | | melatonin |
| | 3-hydroxyanthranilate | The product of the reaction |
| | 3,4-dioxygenase | spontaneously rearrange to quinolinic |
| | | acid (quin) |
| | Tryptophan 2- | |
| | monooxygenase | |
| | Tryptophan 2[PRIME]- | Acts on a number of indolyl-3-alkane |
| | dioxygenase | derivatives, oxidizing the 3-side-chain in |
| | | the 2[PRIME]-position. Best substrates |
| | | are L-tryptophan and 5-hydroxy-L- |
| | | tryptophan |
| | Kynurenine 3- | |
| | monooxygenase | |
| | Unspecific | Acts on a wide range of substrates |
| | monooxygenase | including many xenobiotics, steroids, |
| | | fatty acids, vitamins and prostaglandins |
| | | Reactions catalysed include |
| | | hydroxylation, epoxidation, N-oxidation, |
| | | sulfooxidation, N-, S- and O- |
| | | dealkylations, desulfation, deamination, |
| | | and reduction of azo, nitro, and N-oxide |
| | | groups |
| | Anthranilate 3- | |
| | monooxygenase | |
| | Tryptophan 5- | Activated by phosphorylation, catalysed |
| | monooxygenase | by a CA(2+)-activated protein kinase |
| | Kynurenine 7,8- | |
| | hydroxylase | |
| | Aldehyde | Wide specificity, including oxidation of |
| | dehydrogenase (NAD+) | D-glucuronolactone to D-glucarate |
| | Aminomuconate- | Also acts on 2-hydroxymuconate |
| | semialdehyde | semialdehyde |
| | dehydrogenase | |
| | Aldehyde oxidase | Also oxidizes quinoline and pyridine |
| | | derivatives May be identical with EC |
| | | 1.1.3.22 |
| | Indole-3-acetaldehyde | Also oxidizes indole-3-aldehyde and |
| | oxidase | acetaldehyde, more slowly |
| | Oxoglutarate | Component of the multienzyme 2- |
| | dehydrogenase | oxoglutarate dehydrogenase complex |
| | (lipoamide) | |
| | Kynurenate-7,8- | |
| | dihydrodiol | |
| | dehydrogenase | |
| | Glutaryl-CoA | |
| | dehydrogenase | |
| | L-amino acid oxidase | |
| | Amine oxidase (flavin- | Acts on primary amines, and usually also |
| | containing) | on secondary and tertiary amines |
| | Amine oxidase (copper- | A group of enzymes including those |
| | containing) | oxidizing primary amines, diamines and |
| | | histamine One form of EC 1.3.1.15 from |
| | | rat kidney also catalyses this reaction |
| | Acetylindoxyl oxidase | |
| | Acetylserotonin O- | Some other hydroxyindoles also act as |
| | methyltransferase | acceptor, more slowly |
| | Indole-3-pyruvate C- | |
| | methyltransferase | |
| | Amine N- | A wide range of primary, secondary, and |
| | methyltransferase | tertiary amines can act as acceptors, |
| | | including tryptamine, aniline, nicotine |
| | | and a variety of drugs and other |
| | | xenobiotics |
| | Aralkylamine N- | Narrow specificity towards |
| | acetyltransferase | aralkylamines, including serotonin Not |
| | | identical with EC 2.3.1.5 |
| | Acetyl-CoA C- | |
| | acetyltransferase | |
| | Tryptophan | Also acts on 5-hydroxytryptophan and, to |
| | aminotransferase | a lesser extent on the phenyl amino acids |
| | Kynurenine-- | Also acts on 3-hydroxykynurenine |
| | oxoglutarate | |
| | aminotransferase | |
| | Thioglucosidase | Has a wide specificity for thioglycosides |
| | Amidase | |
| | Formamidase | Also acts, more slowly, on acetamide, |
| | | propanamide and butanamide |
| | Arylformamidase | Also acts on other aromatic |
| | | formylamines |
| | Nitrilase | Acts on a wide range of aromatic nitriles |
| | | including (indole-3-yl)-acetonitrile and |
| | | also on some aliphatic nitriles, and on the |
| | | corresponding acid amides (cf. EC |
| | | 4.2.1.84) |
| | Kynureninase | Also acts on 3[PRIME]- |
| | | hydroxykynurenine and some other (3- |
| | | arylcarbonyl)-alanines |
| | Aromatic-L-amino-acid | Also acts on L-tryptophan, 5-hydroxy-L- |
| | decarboxylase | tryptophan and dihydroxy-L- |
| | | phenylalanine (DOPA) |
| | Phenylpyruvate | Also acts on indole-3-pyruvate |
| | decarboxylase | |
| | Aminocarboxymuconate- | The product rearranges non-enzymically |
| | semialdehyde | to picolinate |
| | decarboxylase | |
| | Tryptophanase | Also catalyses the synthesis of |
| | | tryptophan from indole and serine Also |
| | | catalyses 2,3-elimination and beta- |
| | | replacement reactions of some indole- |
| | | substituted tryptophan analogs of L- |
| | | cysteine, L-serine and other 3-substituted |
| | | amino acids |
| | Enoyl-CoA hydratase | Acts in the reverse direction With cis- |
| | | compounds, yields (3R)-3-hydroxyacyl- |
| | | CoA (cf. EC 4.2.1.74) |
| | Nitrile hydratase | Acts on short-chain aliphatic nitriles, |
| | | converting them into the corresponding |
| | | acid amides Does not act on these amides |
| | | or on aromatic nitriles (cf EC 3.5.5.1) |
| | Tryptophan--tRNA | |
| | ligase | |
| Tyrosine metabolism | Alcohol dehydrogenase | Acts on primary or secondary alcohols or |
| | | hemiacetals The animal, but not the |
| | | yeast, enzyme acts also on cyclic |
| | | secondary alcohols |
| | (R)-4- | Also acts, more slowly, on (R)-3- |
| | hydroxyphenyllactate | phenyllactate, (R)-3-(indole-3-yl)lactate |
| | dehydrogenase | and (R)-lactate |
| | Hydroxyphenylpyruvate | Also acts on 3-(3,4- |
| | reductase | dihydroxyphenyl)lactate Involved with |
| | | EC 2.3.1.140 in the biosynthesis of |
| | | rosmarinic acid |
| | Aryl-alcohol | A group of enzymes with broad |
| | dehydrogenase | specificity towards primary alcohols with |
| | | an aromatic or cyclohex-1-ene ring, but |
| | | with low or no activity towards short- |
| | | chain aliphatic alcohols |
| | Catechol oxidase | Also acts on a variety of substituted |
| | | catechols Many of these enzymes also |
| | | catalyse the reaction listed under EC |
| | | 1.14.18.1; this is especially true for the |
| | | classical tyrosinase |
| | Iodide peroxidase | |
| | 3,4- | |
| | dihydroxyphenylacetate | |
| | 2,3-dioxygenase | |
| | 4- | |
| | hydroxyphenylpyruvate | |
| | dioxygenase | |
| | Stizolobate synthase | The intermediate product undergoes ring |
| | | closure and oxidation, with NAD(P)(+) |
| | | as acceptor, to stizolobic acid |
| | Stizolobinate synthase | The intermediate product undergoes ring |
| | | closure and oxidation, with NAD(P)(+) |
| | | as acceptor, to stizolobinic acid |
| | Gentisate 1,2- | |
| | dioxygenase | |
| | Homogentisate 1,2- | |
| | dioxygenase | |
| | 4-hydroxyphenylacetate | Also acts on 4-hydroxyhydratropate |
| | 1-monooxygenase | forming 2-methylhomogentisate and on |
| | | 4-hydroxyphenoxyacetate forming |
| | | hydroquinone and glycolate |
| | 4-hydroxyphenylacetate | |
| | 3-monooxygenase | |
| | Tyrosine N- | |
| | monooxygenase | |
| | Hydroxyphenylacetonitrile | |
| | 2-monooxygenase | |
| | Tyrosine 3- | Activated by phosphorylation, catalysed |
| | monooxygenase | by EC 2.7.1.128 |
| | Dopamine-beta- | Stimulated by fumarate |
| | monooxygenase | |
| | Monophenol | A group of copper proteins that also |
| | monooxygenase | catalyse the reaction of EC 1.10.3.1, if |
| | | only 1,2-benzenediols are available as |
| | | substrate |
| | Succinate- | |
| | semialdehyde | |
| | dehydrogenase | |
| | (NAD(P)+) | |
| | Aryl-aldehyde | Oxidizes a number of aromatic |
| | dehydrogenase | aldehydes, but not aliphatic aldehydes |
| | Aldehyde | Wide specificity, including oxidation of |
| | dehydrogenase (NAD+) | D-glucuronolactone to D-glucarate |
| | 4-carboxy-2- | Does not act on unsubstituted aliphatic or |
| | hydroxymuconate-6- | aromatic aldehydes or glucose NAD(+) |
| | semialdehyde | can replace NADP(+), but with lower |
| | dehydrogenase | affinity |
| | Aldehyde | |
| | dehydrogenase | |
| | (NAD(P)+) | |
| | 4- | With EC 4.2.1.87, brings about the |
| | hydroxyphenylacetaldehyde | metabolism of octopamine in |
| | dehydrogenase | Pseudomonas |
| | Aldehyde oxidase | Also oxidizes quinoline and pyridine |
| | | derivatives May be identical with EC |
| | | 1.1.3.22 |
| | L-amino acid oxidase | |
| | Amine oxidase (flavin- | Acts on primary amines, and usually also |
| | containing) | on secondary and tertiary amines |
| | Amine oxidase (copper- | A group of enzymes including those |
| | containing) | oxidizing primary amines, diamines and |
| | | histamine One form of EC 1.3.1.15 from |
| | | rat kidney also catalyses this reaction |
| | Aralkylamine | Phenazine methosulfate can act as |
| | dehydrogenase | acceptor Acts on aromatic amines and, |
| | | more slowly, on some long-chain |
| | | aliphatic amines, but not on methylamine |
| | | or ethylamine (cf EC 1.4.99.3) |
| | Phenol O- | Acts on a wide variety of simple alkyl-, |
| | methyltransferase | methoxy- and halo-phenols |
| | Tyramine N- | Has some activity on phenylethylamine |
| | methyltransferase | analogs |
| | Phenylethanolamine N- | Acts on various phenylethanolamines; |
| | methyltransferase | converts noradrenalin into adrenalin |
| | Catechol O- | The mammalian enzymes act more |
| | methyltransferase | rapidly on catecholamines such as |
| | | adrenaline or noradrenaline than on |
| | | catechols |
| | Glutamine N- | |
| | phenylacetyltransferase | |
| | Rosmarinate synthase | Involved with EC 1.1.1.237 in the |
| | | biosynthesis of rosmarinic acid |
| | Hydroxymandelonitrile | 3,4-dihydroxymandelonitrile can also act |
| | glucosyltransferase | as acceptor |
| | Aspartate | Also acts on L-tyrosine, L-phenylalanine |
| | aminotransferase | and L-tryptophan. This activity can be |
| | | formed from EC 2.6.1.57 by controlled |
| | | proteolysis |
| | Dihydroxyphenylalanine | |
| | aminotransferase | |
| | Tyrosine | L-phenylalanine can act instead of L- |
| | aminotransferase | tyrosine The mitochondrial enzyme may |
| | | be identical with EC 2.6.1.1 The three |
| | | isoenzymic forms are interconverted by |
| | | EC 3.4.22.4 |
| | Aromatic amino acid | L-methionine can also act as donor, more |
| | transferase | slowly Oxaloacetate can act as acceptor |
| | | Controlled proteolysis converts the |
| | | enzyme to EC 2.6.1.1 |
| | Histidinol-phosphate | |
| | aminotransferase | |
| | Fumarylacetoacetase | Also acts on other 3,5- and 2,4-dioxo |
| | | acids |
| | Acylpyruvate hydrolase | Acts on formylpyruvate, 2,4- |
| | | dioxopentanoate, 2,4-dioxohexanoate and |
| | | 2,4-dioxoheptanoate |
| | Tyrosine decarboxylase | The bacterial enzyme also acts on 3- |
| | | hydroxytyrosine and, more slowly, on 3- |
| | | hydroxyphenylalanine |
| | Aromatic-L-amino-acid | Also acts on L-tryptophan, 5-hydroxy-L- |
| | decarboxylase | tryptophan and dihydroxy-L- |
| | | phenylalanine (DOPA) |
| | Gentisate | |
| | decarboxylase | |
| | 5-oxopent-3-ene-1,2,5- | |
| | tricarboxylate | |
| | decarboxylase | |
| | Tyrosine phenol-lyase | Also slowly catalyses pyruvate formation |
| | | from D-tyrosine, S-methyl-L-cysteine, |
| | | L-cysteine, L-serine and D-serine |
| | (S)-norcoclaurine | The reaction makes a 6-membered ring |
| | synthase | by forming a bond between C-6 of the |
| | | 3,4-dihydroxyphenyl group of the |
| | | dopamine and C-1 of the aldehyde in the |
| | | imine formed between the substrates The |
| | | product is the precursor of the |
| | | benzylisoquinoline alkaloids in plants |
| | | Will also catalyse the reaction of 4-(2- |
| | | aminoethyl)benzene-1,2-diol + (3,4- |
| | | dihydroxyphenyl)acetaldehyde to form |
| | | (S)-norlaudanosoline, but this alkaloid |
| | | has not been found to occur in plants |
| | Dihydroxyphenylalanine | |
| | ammonia-lyase | |
| | Phenylalanine | May also act on L-tyrosine |
| | ammonia-lyase | |
| | Maleylacetoacetate | Also acts on maleylpyruvate |
| | isomerase | |
| | Maleylpyruvate | |
| | isomerase | |
| | Phenylpyruvate | Also acts on other arylpyruvates |
| | tautomerase | |
| | 5-carboxymethyl-2- | |
| | hydroxymuconate | |
| | delta-isomerase | |
| | Tyrosine 2,3- | |
| | aminomutase | |
| | Phenylacetate--CoA | Also acts, more slowly, on acetate, |
| | ligase | propanoate and butanoate, but not on |
| | | hydroxy derivatives of phenylacetate and |
| | | related compounds |

VI. How to Make Different Embodiments of the Invention

[0418] The invention relates to (I) polynucleotides and methods of use thereof, such as
[0419] IA. Probes, Primers and Substrates;
[0420] IB. Methods of Detection and Isolation;
   [0421] B.1. Hybridization;
   [0422] B.2. Methods of Mapping;
   [0423] B.3. Southern Blotting;
   [0424] B.4. Isolating cDNA from Related Organisms;
   [0425] B.5. Isolating and/or Identifying Orthologous Genes
[0426] IC. Methods of Inhibiting Gene Expression
   [0427] C.1. Antisense
   [0428] C.2. Ribozyme Constructs;
   [0429] C.3. Chimeraplasts;
   [0430] C.4 Sense Suppression;
   [0431] C.5. Transcriptional Silencing
   [0432] C.6. Other Methods to Inhibit Gene Expression
[0433] ID. Methods of Functional Analysis;
[0434] IE. UTRs and Junctions
[0435] IF. Coding Sequences and Their Use.

[0436] The invention also relates to (II) polypeptides and proteins and methods of use thereof, such as
[0437] IIA. Native Polypeptides and Proteins
   [0438] A.1 Antibodies
   [0439] A.2 In Vitro Applications
[0440] IIB. Polypeptide Variants, Fragments and Fusions
   [0441] B.1 Variants
   [0442] B.2 Fragments
   [0443] B.3 Fusions

[0444] The invention also includes (III) methods of modulating polypeptide production, such as
[0445] IIIA. Suppression
   [0446] A.1 Antisense
   [0447] A.2 Ribozymes
   [0448] A.3 Sense Suppression
   [0449] A.4 Insertion of Sequences into the Gene to be Modulated
   [0450] A.5 Promoter Modulation
   [0451] A.6 Expression of Genes containing Dominant-Negative Mutations
[0452] IIIB. Enhanced Expression
   [0453] B.1 Insertion of an Exogenous Gene
   [0454] B.2 Promoter Modulation

[0455] The invention further concerns (IV) gene constructs and vector construction, such as
[0456] IVA. Coding Sequences
[0457] IVB. Promoters
[0458] IVC. Signal Peptides

[0459] The invention still further relates to
[0460] V. Transformation Techniques
   I. Polynucleotides

[0461] Exemplified SDFs of the invention represent fragments of the genome of corn, wheat, rice, soybean or Arabidopsis and/or represent mRNA expressed from that genome. The isolated nucleic acid of the invention also encompasses corresponding fragments of the genome and/or cDNA complement of other organisms as described in detail below.

[0462] Polynucleotides of the invention are isolated from polynucleotide libraries using primers comprising sequences similar to those described, in the attached Reference and Sequences Tables or complements thereof. See, for example, the methods described in Sambrook et al., supra.

[0463] Alternatively, the polynucleotides of the invention can be produced by chemical synthesis. Such synthesis methods are described below.

[0464] It is contemplated that the nucleotide sequences presented herein contain some small percentage of errors. These errors arise in the normal course of determination of nucleotide sequences. Sequence errors can be corrected by obtaining seeds deposited under the accession numbers cited above, propagating them, isolating genomic DNA or appropriate mRNA from the resulting plants or seeds thereof, amplifying the relevant fragment of the genomic DNA or mRNA using primers having a sequence that flanks the erroneous sequence and sequencing the amplification product.

[0465] I.A. Probes, Primers and Substrates

[0466] SDFs of the invention can be applied to substrates for use in array applications such as, but not limited to, assays of global gene expression, under varying conditions of development, and growth conditions. The arrays are also used in diagnostic or forensic methods (WO95/35505, U.S. Pat. No. 5,445,943 and U.S. Pat. No. 5,410,270).

[0467] Probes and primers of the instant invention hybridize to a polynucleotide comprising a sequence in or encoded by those in the Reference and Sequence Tables or fragments or complements thereof. Though many different nucleotide sequences can encode an amino acid sequence, the sequences of the Reference and Sequence Table are generally preferred for encoding polypeptides of the invention. However, the sequence of the probes and/or primers of the instant invention need not be identical to those in the Reference and Sequence Tables or the complements thereof. For example, some variation in probe or primer sequence and/or length allows detection of additional family members as well as orthologous genes and more taxonomically distant related sequences. Similarly, probes and/or primers of the invention include additional nucleotides that serve as a label for detecting the formed duplex or for subsequent cloning purposes.

[0468] Probe length varys depending on the application. For use as primers, probes are 12-40 nucleotides, preferably 18-30 nucleotides long. For use in mapping, probes are preferably 50 to 500 nucleotides, preferably 100-250 nucleotides long. For Southern hybridizations, probes as long as several kilobases are used as explained below.

[0469] The probes and/or primers are produced by synthetic procedures such as the triester method of Matteucci et al. J. Am. Chem. Soc. 103:3185(1981) or according to Urdea et al. Proc. Natl. Acad. 80:7461 (1981) or using commercially available automated oligonucleotide synthesizers.

[0470] I.B. Methods of Detection and Isolation

[0471] The polynucleotides of the invention can be utilized in a number of methods known to those skilled in the art as probes and/or primers to isolate and detect polynucleotides including, without limitation: Southerns, Northerns, Branched DNA hybridization assays, polymerase chain reaction microarray assays and variations thereof. Specific methods given by way of examples, and discussed below include:
[0472] Hybridization
[0473] Methods of Mapping
[0474] Southern Blotting
[0475] Isolating cDNA from Related Organisms
[0476] Isolating and/or Identifying Orthologous Genes.
   Also, the nucleic acid molecules of the invention can used in other methods, such as high density oligonucleotide hybridizing assays, described, for example, in U.S. Pat. Nos. 6,004,753; 5,945,306; 5,945,287; 5,945,308; 5,919,686; 5,919,661; 5,919,627; 5,874,248; 5,871,973; 5,871,971; 5,871,930; and PCT Pub. Nos. WO 9946380; WO 9933981; WO 9933870; WO 9931252; WO 9915658; WO 9906572; WO 9858052; WO 9958672; and WO 9810858.

[0477] B.1. Hybridization

[0478] The isolated SDFs of the Reference and Sequence tables or fragments thereof of the present invention can be used as probes and/or primers for detection and/or isolation of related polynucleotide sequences through hybridization. Hybridization of one nucleic acid to another constitutes a physical property that defines the subject SDF of the invention and the identified related sequences. Also, such hybridization imposes structural limitations on the pair. A good general discussion of the factors for determining hybridization conditions is provided by Sambrook et al. (“Molecular Cloning, a Laboratory Manual, 2nd ed., c. 1989 by Cold Spring Harbor Laboratory Press, Cold Spring Harbor, N.Y.; see esp., chapters 11 and 12). Additional considerations and details of the physical chemistry of hybridization are provided by G. H. Keller and M. M. Manak “DNA Probes”, 2nd Ed. pp. 1-25, c. 1993 by Stockton Press, New York, N.Y.

[0479] Depending on the stringency of the conditions under which these probes and/or primers are used, polynucleotides exhibiting a wide range of similarity to those in the Reference and Sequence or fragments thereof are detected or isolated. When the practitioner wishes to examine the result of membrane hybridizations under a variety of stringencies, an efficient way to do so is to perform the hybridization under a low stringency condition, then to wash the hybridization membrane under increasingly stringent conditions.

[0480] When using SDFs to identify orthologous genes in other species, the practitioner will preferably adjust the amount of target DNA of each species so that, as nearly as is practical, the same number of genome equivalents are present for each species examined. This prevents faint signals from species having large genomes, and thus small numbers of genome equivalents per mass of DNA, from erroneously being interpreted as absence of the corresponding gene in the genome.

[0481] The probes and/or primers of the instant invention can also be used to detect or isolate nucleotides that are “identical” to the probes or primers. Two nucleic acid sequences or polypeptides are said to be “identical” if the sequence of nucleotides or amino acid residues, respectively, in the two sequences is the same when aligned for maximum correspondence as described below.

[0482] Isolated polynucleotides within the scope of the invention also include allelic variants of the specific sequences presented in the Reference and Sequence tables. The probes and/or primers of the invention are also used to detect and/or isolate polynucleotides exhibiting at least 80% sequence identity with the sequences of the Reference and Sequence tables or fragments thereof.

[0483] With respect to nucleotide sequences, degeneracy of the genetic code provides the possibility to substitute at least one nucleotide of the nucleotide sequence of a gene with a different nucleotide without changing the amino acid sequence of the polypeptide. Hence, the DNA of the present invention also has any base sequence that has been changed from a sequence in the Reference and Sequence tables by substitution in accordance with degeneracy of genetic code. References describing codon usage include: Carels et al., J. Mol. Evol. 46: 45 (1998) and Fennoy et al., Nucl. Acids Res. 21(23): 5294 (1993).

[0484] B.2. Mapping

[0485] The isolated SDF DNA of the invention is used to create various types of genetic and physical maps of the genome of corn, Arabidopsis, soybean, rice, wheat, or other plants. Some SDFs are absolutely associated with particular phenotypic traits, allowing construction of gross genetic maps. While not all SDFs are immediately associated with a phenotype, all SDFs can be used as probes for identifying polymorphisms associated with phenotypes of interest. Briefly, one method of mapping involves total DNA isolation from individuals. The DNA is subsequently cleaved with one or more restriction enzymes, separated according to mass, transferred to a solid support, hybridized with SDF DNA and the pattern of fragments compared. Polymorphisms associated with a particular SDF are visualized as differences in the size of fragments produced between individual DNA samples after digestion with a particular restriction enzyme and hybridization with the SDF. After identification of polymorphic SDF sequences, linkage studies are conducted. By using the polymeric individuals as parents in crossing programs, F2 progeny recombinants or recombinant inbreds, for example, are then analyzed. The order of DNA polymorphisms along the chromosomes is determined based on the frequency with which they are inherited together versus independently. The closer the location of two polymorphisms on a chromosome, the higher the probability that they are inherited together. Integration of the relative positions of all the polymorphisms and associated marker SDFs produce a genetic map of the species where the distances between markers reflect the recombination frequencies in that chromosome segment.

[0486] The use of recombinant inbred lines for such genetic mapping is described for Arabidopsis by Alonso-Blanco et al. (Methods in Molecular Biology, vol. 82, “Arabidopsis Protocols”, pp. 137-146, J. M. Martinez-Zapater and J. Salinas, eds., c. 1998 by Humana Press, Totowa, N.J.) and for corn by Burr (“Mapping Genes with Recombinant Inbreds”, pp. 249-254. In Freeling, M. and V. Walbot (Ed.), The Maize Handbook, c. 1994 by Springer-Verlag New York, Inc.: New York, N.Y., USA; Berlin Germany; Burr et al. Genetics (1998) 118: 519; Gardiner, J. et al., (1993) Genetics 134: 917). This procedure, however, is not limited to plants and is used for other organisms (such as yeast) or for individual cells.

[0487] The SDFs of the present invention are also used for simple sequence repeat (SSR) mapping. Rice SSR mapping is described by Morgante et al. (The Plant Journal (1993) 3: 165), Panaud et al. (Genome (1995) 38: 1170); Senior et al. (Crop Science (1996) 36: 1676), Taramino et al. (Genome (1996) 39: 277) and Ahn et al. (Molecular and General Genetics (1993) 241: 483-90). SSR mapping is achieved using various methods. In one instance, polymorphisms are identified when sequence specific probes contained within an SDF flanking an SSR are made and used in polymerase chain reaction (PCR) assays with template DNA from two or more individuals of interest. Here, a change in the number of tandem repeats between the SSR-flanking sequences produces differently sized fragments (U.S. Pat. No. 5,766,847). Alternatively, polymorphisms are identified by using the PCR fragment produced from the SSR-flanking sequence specific primer reaction as a probe against Southern blots representing different individuals (U. H. Refseth et al., (1997) Electrophoresis 18: 1519).

[0488] Genetic and physical maps of crop species have many uses. For example, these maps are used to devise positional cloning strategies for isolating novel genes from the mapped crop species. In addition, because the genomes of closely related species are largely syntenic (i.e. they display the same ordering of genes within the genome), these maps are used to isolate novel alleles from relatives of crop species by positional cloning strategies.

[0489] The various types of maps discussed above are used with the SDFs of the invention to identify Quantitative Trait Loci (QTLs). Many important crop traits, such as the solids content of tomatoes, are quantitative traits and result from the combined interactions of several genes. These genes reside at different loci in the genome, often times on different chromosomes, and generally exhibit multiple alleles at each locus. The SDFs of the invention are used to identify QTLs and isolate specific alleles as described by de Vicente and Tanksley (Genetics 134:585 (1993)). In addition to isolating QTL alleles in present crop species, the SDFs of the invention are also used to isolate alleles from the corresponding QTL of wild relatives. Transgenic plants having various combinations of QTL alleles are then created and the effects of the combinations measured. Once a desired allele combination is identified, crop improvement is accomplished either through biotechnological means or by directed conventional breeding programs (for review see Tanksley and McCouch, Science 277:1063 (1997)).

[0490] In another embodiment, the SDFs are used to help create physical maps of the genome of corn, Arabidopsis and related species. Where SDFs are ordered on a genetic map, as described above, they are used as probes to discover which clones in large libraries of plant DNA fragments in YACs, BACs, etc. contain the same SDF or similar sequences, thereby facilitating the assignment of the large DNA fragments to chromosomal positions. Subsequently, the large BACs, YACs, etc. are ordered unambiguously by more detailed studies of their sequence composition (e.g. Marra et al. (1997) Genomic Research 7:1072-1084) and by using their end or other sequences to find the identical sequences in other cloned DNA fragments. The overlapping of DNA sequences in this way allows building large contigs of plant sequences to be built that, when sufficiently extended, provide a complete physical map of a chromosome. Sometimes the SDFs themselves provide the means of joining cloned sequences into a contig. All scientific and patent publications cited in this paragraph are hereby incorporated by reference.

[0491] The patent publication WO95/35505 and U.S. Pat. Nos. 5,445,943 and 5,410,270, both hereby incorporated by reference, describe scanning multiple alleles of a plurality of loci using hybridization to arrays of oligonucleotides. These techniques are useful for each of the types of mapping discussed above.

[0492] Following the procedures described above and using a plurality of the SDFs of the present invention, any individual is genotyped. These individual genotypes are used for the identification of particular cultivars, varieties, lines, ecotypes and genetically modified plants or can serve as tools for subsequent genetic studies involving multiple phenotypic traits.

[0493] B.3 Southern Blot Hybridization

[0494] The sequences from Reference and Sequence tables or fragments thereof can be used as probes for various hybridization techniques. These techniques are useful for detecting target polynucleotides in a sample or for determining whether transgenic plants, seeds or host cells harbor a gene or sequence of interest and thus are expected to exhibit a particular trait or phenotype.

[0495] In addition, the SDFs from the invention are used to isolate additional members of gene families from the same or different species and/or orthologous genes from the same or different species. This is accomplished by hybridizing an SDF to, for example, a Southern blot containing the appropriate genomic DNA or cDNA. Given the resulting hybridization data, one of ordinary skill in the art distinguishes and isolates the correct DNA fragments by size, restriction sites, sequence and stated hybridization conditions from a gel or from a library.

[0496] Identification and isolation of orthologous genes from closely related species and alleles within a species is particularly desirable because of their potential for crop improvement. Many important crop traits, such as the solid content of tomatoes, result from the combined interactions of the products of several genes residing at different loci in the genome. Generally, alleles at each of these loci make quantitative differences to the trait. By identifying and isolating numerous alleles for each locus from within or different species, transgenic plants with various combinations of alleles are created and the effects of the combinations measured. Once a more favorable allele combination is identified, crop improvement is accomplished either through biotechnological means or by directed conventional breeding programs (Tanksley et al. Science 277:1063(1997)). All scientific and patent publications cited in this paragraph are hereby incorporated by reference.

[0497] The results from hybridizations of the SDFs of the invention to, for example, Southern blots containing DNA from another species are also used to generate restriction fragment maps for the corresponding genomic regions. These maps provide additional information about the relative positions of restriction sites within fragments, further distinguishing mapped DNA from the remainder of the genome.

[0498] Physical maps are made by digesting genomic DNA with different combinations of restriction enzymes.

[0499] Probes for Southern blotting to distinguish individual restriction fragments can range in size from 15 to 20 nucleotides to several thousand nucleotides. More preferably, the probe is 100 to 1,000 nucleotides long for identifying members of a gene family when it is found that repetitive sequences would complicate the hybridization. For identifying an entire corresponding gene in another species, the probe is more preferably the length of the gene, typically 2,000 to 10,000 nucleotides, but probes 50-1,000 nucleotides long are also used. Some genes, however, require probes up to 1,500 nucleotides long or overlapping probes constituting the full-length sequence to span their lengths.

[0500] Also, while it is preferred that the probe be homogeneous with respect to its sequence, it is not necessary. For example, as described below, a probe representing members of a gene family having diverse sequences is generated using PCR to amplify genomic DNA or RNA templates using primers derived from SDFs that include sequences that define the gene family.

[0501] For identifying corresponding genes in another species, the next most preferable probe is a cDNA spanning the entire coding sequence, which allows all of the mRNA-coding fragment of the gene to be identified. Probes for Southern blotting are easily generated from SDFs by making primers having the sequence at the ends of the SDF and using corn or Arabidopsis genomic DNA as a template. In instances where the SDF includes sequence conserved among species, primers including the conserved sequence are used for PCR with genomic DNA from a species of interest to obtain a probe.

[0502] Similarly, if the SDF includes a domain of interest, that fragment of the SDF is used to make primers and, with appropriate template DNA, used to make a probe to identify genes containing the domain. Alternatively, the PCR products are resolved, for example by gel electrophoresis and cloned and/or sequenced. Using Southern hybridization, the variants of the domain among members of a gene family, both within and across species, are examined.

[0503] B.4.1 Isolating DNA from Related Organisms

[0504] The SDFs of the invention are used to isolate the corresponding DNA from other organisms. Either cDNA or genomic DNA is isolated. For isolating genomic DNA, a lambda, cosmid, BAC, YAC, or other large insert genomic library from the plant of interest is constructed using standard molecular biology techniques as described in detail by Sambrook et al. 1989 (Molecular Cloning: A Laboratory Manual, 2^{nd} ed. Cold Spring Harbor Laboratory Press, New York) and by Ausubel et al. 1992 (Current Protocols in Molecular Biology, Greene Publishing, New York).

[0505] To screen a phage library, for example, recombinant lambda clones are plated out on appropriate bacterial medium using an appropriate E. coli host strain. The resulting plaques are lifted from the plates using nylon or nitrocellulose filters. The plaque lifts are processed through denaturation, neutralization, and washing treatments following the standard protocols outlined by Ausubel et al. (1992). The plaque lifts are hybridized to either radioactively labeled or non-radioactively labeled SDF DNA at room temperature for about 16 hours, usually in the presence of 50% formamide and 5×SSC (sodium chloride and sodium citrate) buffer and blocking reagents. The plaque lifts are then washed at 42° C. with 1% Sodium Dodecyl Sulfate (SDS) and at a particular concentration of SSC. The SSC concentration used is dependent upon the stringency at which hybridization occurred in the initial Southern blot analysis performed. For example, if a fragment hybridized under medium stringency (e.g., Tm−20° C.), then this condition is maintained or preferably adjusted to a less stringent condition (e.g., Tm−30° C.) to wash the plaque lifts. Positive clones show detectable hybridization, e.g. by exposure to X-ray films or chromogen formation. The positive clones are then subsequently isolated for purification using the same general protocol outlined above. Once the clone is purified, restriction analysis is conducted to narrow the region corresponding to the gene of interest. The restriction analysis and succeeding subcloning steps are done using procedures described by, for example Sambrook et al. (1989) cited above.

[0506] The procedures outlined for the lambda library are essentially similar to those used for YAC library screening, except that the YAC clones are harbored in bacterial colonies. The YAC clones are plated out at reasonable density on nitrocellulose or nylon filters supported by appropriate bacterial medium in petri plates. Following the growth of the bacterial clones, the filters are processed through the denaturation, neutralization, and washing steps following the procedures of Ausubel et al. 1992. The same hybridization procedures for lambda library screening are followed.

[0507] To isolate cDNA, similar procedures using appropriately modified vectors are employed. For instance, the library is constructed in a lambda vector appropriate for cloning cDNA such as λgt11. Alternatively, the cDNA library is made in a plasmid vector. cDNA for cloning is prepared by any of the methods known in the art, but is preferably prepared as described above. Preferably, a cDNA library includes a high proportion of full-length clones.

[0508] B.5. Isolating and/or Identifying Orthologous Genes

[0509] Probes and primers of the invention are used to identify and/or isolate polynucleotides related to those in the Reference and Sequence tables. Related polynucleotides are those that are native to other plant organisms and exhibit either similar sequence or encode polypeptides with similar biological activity. One specific example is an orthologous gene. Orthologous genes have the same functional activity. As such, orthologous genes are distinguished from homologous genes. The percentage of identity is a function of evolutionary separation and, in closely related species, the percentage of identity can be 98% to 100%. The amino acid sequence of a protein encoded by an orthologous gene can be less than 75% identical, but tends to be at least 75% or at least 80% identical, more preferably at least 90%, most preferably at least 95% identical to the amino acid sequence of the reference protein.

[0510] To find orthologous genes, the probes are hybridized to nucleic acids from a species of interest under low stringency conditions, preferably one where sequences containing as much as 40-45% mismatches are able to hybridize. This condition is established by Tₘ−40° C. to Tm−48° C. (see below). Blots are then washed under conditions of increasing stringency. It is preferable that the wash stringency be such that sequences that are 85 to 100% identical will hybridize. More preferably, sequences 90 to 100% identical hybridize and most preferably only sequences greater than 95% identical hybridize. One of ordinary skill in the art will recognize that, due to degeneracy in the genetic code, amino acid sequences that are identical can be encoded by DNA sequences as little as 67% identity or less. Thus, it is preferable, for example, to make an overlapping series of shorter probes, on the order of 24 to 45 nucleotides, and individually hybridize them to the same arrayed library to avoid the problem of degeneracy introducing large numbers of mismatches.

[0511] As evolutionary divergence increases, genome sequences also tend to diverge. Thus, one of skill will recognize that searches for orthologous genes between more divergent species require the use of lower stringency conditions compared to searches between closely related species. Also, degeneracy of the genetic code is more of a problem for searches in the genome of a species more evolutionarily distant from the species that is the source of the SDF probe sequence(s).

[0512] Therefore the method described in Bouckaert et al., U.S. Ser. No. 60/121,700 Atty. Dkt. No. 2750-117P, Client Dkt. No. 00010.001, filed Feb. 25, 1999, hereby incorporated in its entirety by reference, is applied to the SDFs of the present invention to isolate related genes from plant species which do not hybridize to the corn, Arabidopsis, soybean, rice, wheat, and other plant sequences of the Reference and Sequence tables.

[0513] The SDFs of the invention are also used as probes to search for genes that are related to the SDF within a species. Such related genes are typically considered to be members of a gene family. In such a case, the sequence similarity is often concentrated into one or a few fragments of the sequence. The fragments of similar sequence that define the gene family typically encode a fragment of a protein or RNA that has an enzymatic or structural function. The percentage of identity in the amino acid sequence of the domain that defines the gene family is preferably at least 70%, more preferably at least 80 to 95%, most preferably at least 85 to 99%. To search for members of a gene family within a species, a low stringency hybridization is usually performed, but this will depend upon the size, distribution and degree of sequence divergence of domains that define the gene family. SDFs encompassing regulatory regions are used to identify coordinately expressed genes by using the regulatory region sequence of the SDF as a probe.

[0514] In the instances where the SDFs are identified as being expressed from genes that confer a particular phenotype, then the SDFs are also used as probes to assay plants of different species for those phenotypes.

[0515] I.C. Methods to Inhibit Gene Expression

[0516] The nucleic acid molecules of the present invention are used to inhibit gene transcription and/or translation. Example of such methods include, without limitation:
[0517] Antisense Constructs;
[0518] Ribozyme Constructs;
[0519] Chimeraplast Constructs;
[0520] Co-Suppression;
[0521] Transcriptional Silencing; and
[0522] Other Methods of Gene Expression.

[0523] C.1 Antisense

[0524] In some instances it is desirable to suppress expression of an endogenous or exogenous gene. A well-known instance is the FLAVOR-SAVOR™ tomato, in which the gene encoding ACC synthase is inactivated by an antisense approach, thus delaying softening of the fruit after ripening. See for example, U.S. Pat. No. 5,859,330; U.S. Pat. No. 5,723,766; Oeller, et al, Science, 254:437-439(1991); and Hamilton et al, Nature, 346:284-287 (1990). As another example, timing of flowering is controlled by suppression of the FLOWERING LOCUS C (FLC). High levels of this transcript are associated with late flowering, while absence of FLC is associated with early flowering (S. D. Michaels et al., Plant Cell 11:949 (1999). Other examples include the transition of apical meristem from leaf and shoot production to flowering which is regulated by TERMINAL FLOWER1, APETALA1 and LEAFY. Suppressing TFL1 expression induce a transition from shoot production to flowering (S. J. Liljegren, Plant Cell 11:1007 (1999)). In yet another example, arrested ovule development and female sterility result from suppression of the ethylene forming enzyme, but can be reversed by application of ethylene (D. De Martinis et al., Plant Cell 11:1061 (1999)). The ability to manipulate female fertility of plants is useful in increasing fruit production and creating hybrids.

[0525] Some polynucleotide SDFs in the Reference and Sequence tables represent sequences that are expressed in corn, wheat, rice, soybean Arabidopsis and/or other plants. Thus the invention includes using these sequences to generate antisense constructs to inhibit translation and/or degradation of transcripts of said SDFs, typically in a plant cell.

[0526] To accomplish this, a polynucleotide segment from the desired gene that hybridizes to the mRNA expressed from the desired gene (the “antisense segment”) is operably linked to a promoter such that the antisense strand of RNA is transcribed when the construct is present in a host cell. A regulated promoter is used in the construct to control transcription of the antisense segment so that transcription occurs only under desired circumstances.

[0527] The antisense segment introduced is typically substantially identical to at least a fragment of the endogenous gene or genes to be repressed. The sequence, however, need not be perfectly identical to inhibit expression. Further, the antisense product may hybridize to the untranslated region instead of or in addition to the coding sequence of the gene. The vectors of the present invention designed such that the inhibitory effect applies to other proteins within a family of genes exhibiting homology or substantial homology to the target gene.

[0528] For antisense suppression, the introduced antisense segment sequence also need not be full length relative to either the primary transcription product or the fully processed mRNA. Generally, a higher percentage of sequence identity is used to compensate for the use of a shorter sequence. Furthermore, the introduced sequence need not have the same intron or exon pattern, and homology of non-coding segments are equally effective. Normally, a sequence of between about 30 or 40 nucleotides and the full length of the transcript can be used, although a sequence of at least about 100 nucleotides is preferred, a sequence of at least about 200 nucleotides is more preferred, and a sequence of at least about 500 nucleotides is especially preferred.

[0529] C.2. Ribozymes

[0530] It is also contemplated that gene constructs representing ribozymes and based on the SDFs in the Reference and Sequence tables tables and fragment thereof are an object of the invention. Ribozymes are also used to inhibit expression of genes by suppressing the translation of the mRNA into a polypeptide. It is possible to design ribozymes that specifically pair with virtually any target RNA and cleave the phosphodiester backbone at a specific location, thereby functionally inactivating the target RNA. In carrying out this cleavage, the ribozyme is not itself altered, and is thus capable of recycling and cleaving other molecules, making it a true enzyme. The inclusion of ribozyme sequences within antisense RNAs confers RNA-cleaving activity upon them, thereby increasing the activity of the constructs.

[0531] A number of classes of ribozymes are known. One class of ribozymes is derived from a number of small circular RNAs, which are capable of self-cleavage and replication in plants. The RNAs replicate either alone (viroid RNAs) or with a helper virus (satellite RNAs). Examples include RNAs from avocado sunblotch viroid and the satellite RNAs from tobacco ringspot virus, lucerne transient streak virus, velvet tobacco mottle virus, solanum nodiflorum mottle virus and subterranean clover mottle virus. The design and use of target RNA-specific ribozymes is described in Haseloff et al. Nature, 334:585 (1988).

[0532] Like the antisense constructs above, the ribozyme sequence fragment necessary for pairing need not be identical to the target nucleotides to be cleaved, nor identical to the sequences in the Reference and Sequence tables or fragments thereof. Ribozymes are constructed by combining the ribozyme sequence and some fragment of the target gene which allows recognition of the target gene mRNA by the resulting ribozyme molecule. Generally, the sequence in the ribozyme capable of binding to the target sequence exhibits a percentage of sequence identity with at least 80%, preferably with at least 85%, more preferably with at least 90% and most preferably with at least 95%, even more preferably, with at least 96%, 97%, 98% or 99% sequence identity to some fragment of a sequence in the Reference and Sequence tables or the complements thereof. The ribozyme is equally effective in inhibiting mRNA translation by cleaving either in the untranslated or coding regions. Generally, a higher percentage of sequence identity is used to compensate for the use of a shorter sequence. Furthermore, the introduced sequence need not have the same intron or exon pattern, and homology of non-coding segments are equally effective.

[0533] C.3. Chimeraplasts

[0534] The SDFs of the invention, such as those described by Reference and Sequence tables are also used to construct chimeraplasts that introduced into a cell to produce at least one specific nucleotide change in a sequence corresponding to the SDF of the invention. A chimeraplast is an oligonucleotide comprising DNA and/or RNA that specifically hybridizes to a target region in a manner which creates a mismatched base-pair. This mismatched base-pair signals the cell's repair enzyme machinery which acts on the mismatched region and results in the replacement, insertion or deletion of designated nucleotide(s). The altered sequence is then expressed by the cell's normal cellular mechanisms. Chimeraplasts are designed to repair mutant genes, modify genes, introduce site-specific mutations, and/or act to interrupt or alter normal gene function (U.S. Pat. Nos. 6,010,907 and 6,004,804; and PCT Pub. No. WO99/58723 and WO99/07865).

[0535] C.4. Sense Suppression

[0536] The SDFs of the Reference and Sequence tables of the present invention are also useful to modulate gene expression by sense suppression. Sense suppression represents another method of gene suppression that introduces at least one exogenous copy or fragment of the endogenous sequence to be suppressed.

[0537] Introduction of expression cassettes in which a nucleic acid is configured in the sense orientation with respect to the promoter into the chromosome of a plant or by a self-replicating virus is an effective means by which to induce degradation of mRNAs of target genes. For an example of the use of this method to modulate expression of endogenous genes see, Napoli et al., The Plant Cell 2:279 (1990), and U.S. Pat. Nos. 5,034,323, 5,231,020, and 5,283,184. Inhibition of expression requires some transcription of the introduced sequence.

[0538] For sense suppression, the introduced sequence generally is substantially identical to the endogenous sequence intended to be inactivated. The minimal percentage of sequence identity is typically greater than about 65%, but a higher percentage of sequence identity might exert a more effective reduction in the level of normal gene products. Sequence identity of more than about 80% is preferred, though about 95% to absolute identity is most preferred. As with antisense regulation, the effect applys to any other proteins within a similar family of genes exhibiting homology or substantial homology to the suppressing sequence.

[0539] C.5. Other Methods to Inhibit Gene Expression

[0540] Yet another means of suppressing gene expression is to insert a polynucleotide into the gene of interest to disrupt transcription or translation of the gene.

[0541] Low frequency homologous recombination is used to target a polynucleotide insert to a gene by flanking the polynucleotide insert with sequences that are substantially similar to the gene to be disrupted. Sequences from the Reference and Sequence tables, fragments thereof and substantially similar sequences thereto are used for homologous recombination.

[0542] In addition, random insertion of polynucleotides into a host cell genome is used to disrupt the gene of interest (Azpiroz-Leehan et al., Trends in Genetics 13:152 (1997). In this method, screening for clones from a library containing random insertions is preferred to identifying those that have polynucleotides inserted into the gene of interest. Such screening is performed using probes and/or primers described above based on sequences from Reference and Sequence tables, fragments thereof, and substantially similar sequence thereto. The screening is also performed by selecting clones or R₁ plants having a desired phenotype.

[0543] I.D. Methods of Functional Analysis

[0544] The constructs described in the methods under I.C. above are used to determine the function of the polypeptide encoded by the gene that is targeted by the constructs.

[0545] Down-regulating the transcription and translation of the targeted gene in the host cell or organisms, such as a plant, produces phenotypic changes as compared to a wild-type cell or organism. In addition, in vitro assays are used to determine if any biological activity, such as calcium flux, DNA transcription, nucleotide incorporation, etc., are being modulated by the down-regulation of the targeted gene.

[0546] Coordinated regulation of sets of genes, e.g. those contributing to a desired polygenic trait, is sometimes necessary to obtain a desired phenotype. SDFs of the invention representing transcription activation and DNA binding domains are assembled into hybrid transcriptional activators. These hybrid transcriptional activators are used with their corresponding DNA elements (i.e. those bound by the DNA-binding SDFs) to effect coordinated expression of desired genes (J. J. Schwarz et al., Mol. Cell. Biol. 12:266 (1992), A. Martinez et al., Mol. Gen. Genet. 261:546 (1999)).

[0547] The SDFs of the invention are also used in the two-hybrid genetic systems to identify networks of protein-protein interactions (L. McAlister-Henn et al., Methods 19:330 (1999), J. C. Hu et al., Methods 20:80 (2000), M. Golovkin et al., J. Biol. Chem. 274:36428 (1999), K. Ichimura et al., Biochem. Biophys. Res. Comm. 253:532 (1998)). The SDFs of the invention also are used in various expression display methods to identify important protein-DNA interactions (e.g. B. Luo et al., J. Mol. Biol. 266:479 (1997)).

[0548] I.E. UTRs and Junctions

[0549] Polynucleotides comprising untranslated (UTR) sequences and intron/exon junctions are also within the scope of the invention. UTR sequences include introns and 5′ or 3′ untranslated regions (−5′ UTRs or 3′ UTRs). Fragments of the sequences shown in the Reference and Sequence tables comprise UTRs and intron/exon junctions.

[0550] Some of these fragments of SDFs, especially UTRs, have regulatory functions related to, for example, translation rate and mRNA stability. Thus, these fragments of SDFs are isolated for use as elements of gene constructs for regulated production of polynucleotides encoding desired polypeptides.

[0551] Some introns of genomic DNA segments also have regulatory functions. Sometimes regulatory elements, especially transcription enhancer or suppressor elements, are found within introns. Also, elements related to stability of heteronuclear RNA and efficiency of splicing and of transport to the cytoplasm for translation are found in intron elements. Thus, these segments also find use as elements of expression vectors intended for use to transform plants.

[0552] Just as with promoters UTR sequences and intron/exon junctions vary from those shown in the Reference and Sequence tables. Such changes from those sequences preferably do not affect the regulatory activity of the UTRs or intron/exon junction sequences on expression, transcription, or translation unless selected to do so. However, in some instances, down- or up-regulation of such activity may be desired to modulate traits or phenotypic or in vitro activity.

[0553] I.F Coding Sequences

[0554] Isolated polynucleotides of the invention include coding sequences that encode polypeptides comprising an amino acid sequence encoded by sequences described in the Reference and Sequence tables.

[0555] A nucleotide sequence encodes a polypeptide if a cell (or a cell free in vitro system) expressing that nucleotide sequence produces a polypeptide having the recited amino acid sequence when the nucleotide sequence is transcribed and the primary transcript is subsequently processed and translated by a host cell (or a cell free in vitro system) harboring the nucleic acid. Thus, an isolated nucleic acid that encodes a particular amino acid sequence is a genomic sequence comprising exons and introns or a cDNA sequence that represents the product of splicing thereof. An isolated nucleic acid encoding an amino acid sequence also encompasses heteronuclear RNA, which contains sequences that are spliced out during expression, and mRNA, which lacks those sequences.

[0556] Coding sequences are constructed using chemical synthesis techniques or by isolating coding sequences or by modifying such synthesized or isolated coding sequences as described above.

[0557] In addition to coding sequences encoding the polypeptide sequences of the Reference and Sequence tables, which are native to corn, Arabidopsis, soybean, rice, wheat, and other plants, the isolated polynucleotides are polynucleotides that encode variants, fragments, and fusions of those native proteins. Such polypeptides are described below in part II.

[0558] In variant polynucleotides generally, the number of substitutions, deletions or insertions is preferably less than 20%, more preferably less than 15%; even more preferably less than 10%, 5%, 3% or 1% of the number of nucleotides comprising a particularly exemplified sequence. It is generally expected that non-degenerate nucleotide sequence changes that result in 1 to 10, more preferably 1 to 5 and most preferably 1 to 3 amino acid insertions, deletions or substitutions do not greatly affect the function of an encoded polypeptide. The most preferred embodiments are those wherein 1 to 20, preferably 1 to 10, most preferably 1 to 5 nucleotides are added to, or deleted from and/or substituted in the sequences specifically disclosed in the Reference and Sequence tables or fragments thereof.

[0559] Insertions or deletions in polynucleotides intended to be used for encoding a polypeptide preferably preserve the reading frame. This consideration is not so important in instances when the polynucleotide is intended to be used as a hybridization probe.

II. Polypeptides and Proteins

[0560] IIA. Native Polypeptides and Proteins

[0561] Polypeptides within the scope of the invention include both native proteins as well as variants, fragments, and fusions thereof. Polypeptides of the invention are those encoded by any of the six reading frames of sequences shown in the Reference and Sequence tables, preferably encoded by the three frames reading in the 5′ to 3′ direction of the sequences as shown.

[0562] Native polypeptides include the proteins encoded by the sequences shown in the Reference and Sequence tables. Such native polypeptides include those encoded by allelic variants.

[0563] Polypeptide and protein variants will exhibit at least 75% sequence identity to those native polypeptides of the Reference and Sequence tables. More preferably, the polypeptide variants will exhibit at least 85% sequence identity; even more preferably, at least 90% sequence identity; more preferably at least 95%, 96%, 97%, 98%, or 99% sequence identity. Fragments of polypeptide or fragments of polypeptides exhibit similar percentages of sequence identity to the relevant fragments of the native polypeptide. Fusions exhibit a similar percentage of sequence identity in that fragment of the fusion represented by the variant of the native peptide.

[0564] Furthermore, polypeptide variants exhibit at least one of the functional properties of the native protein. Such properties include, without limitation, protein interaction, DNA interaction, biological activity, immunological activity, receptor binding, signal transduction, transcription activity, growth factor activity, secondary structure, three-dimensional structure, etc. As to properties related to in vitro or in vivo activities, the variants preferably exhibit at least 60% of the activity of the native protein; more preferably at least 70%, even more preferably at least 80%, 85%, 90% or 95% of at least one activity of the native protein.

[0565] One type of variant of native polypeptides comprises amino acid substitutions, deletions and/or insertions. Conservative substitutions are preferred to maintain the function or activity of the polypeptide.

[0566] Within the scope of percentage of sequence identity described above, a polypeptide of the invention may have additional individual amino acids or amino acid sequences inserted into the polypeptide in the middle thereof and/or at the N-terminal and/or C-terminal ends thereof. Likewise, some of the amino acids or amino acid sequences may be deleted from the polypeptide.

[0567] A.1 Antibodies

[0568] Isolated polypeptides are utilized to produce antibodies. Polypeptides of the invention are generally used, for example, as antigens for raising antibodies by known techniques. The resulting antibodies are useful as reagents for determining the distribution of the antigen protein within the tissues of a plant or within a cell of a plant. The antibodies are also useful for examining the production level of proteins in various tissues, for example in a wild-type plant or following genetic manipulation of a plant, by methods such as Western blotting.

[0569] Antibodies of the present invention, both polyclonal and monoclonal, are prepared by conventional methods. In general, the polypeptides of the invention are first used to immunize a suitable animal, such as a mouse, rat, rabbit, or goat. Rabbits and goats are preferred for the preparation of polyclonal sera due to the volume of serum obtainable and the availability of labeled anti-rabbit and anti-goat antibodies as detection reagents. Immunization is generally performed by mixing or emulsifying the protein in saline, preferably in an adjuvant such as Freund's complete adjuvant, and injecting the mixture or emulsion parenterally (generally subcutaneously or intramuscularly). A dose of 50-200 μg/injection is typically sufficient. Immunization is generally boosted 2-6 weeks later with one or more injections of the protein in saline, preferably using Freund's incomplete adjuvant. One may alternatively generate antibodies by in vitro immunization using methods known in the art, which for the purposes of this invention is considered equivalent to in vivo immunization.

[0570] Polyclonal antisera is obtained by bleeding the immunized animal into a glass or plastic container, incubating the blood at 25° C. for one hour, followed by incubating the blood at 4° C. for 2-18 hours. The serum is recovered by centrifugation (e.g., 1,000×g for 10 minutes). About 20-50 ml per bleed may be obtained from rabbits.

[0571] Monoclonal antibodies are prepared using the method of Kohler and Milstein, Nature 256: 495 (1975), or modification thereof. Typically, a mouse or rat is immunized as described above. However, rather than bleeding the animal to extract serum, the spleen (and optionally several large lymph nodes) is removed and dissociated into single cells. If desired, the spleen cells can be screened (after removal of nonspecifically adherent cells) by applying a cell suspension to a plate or well coated with the protein antigen. B-cells producing membrane-bound immunoglobulin specific for the antigen bind to the plate and are not rinsed away with the rest of the suspension. Resulting B-cells, or all dissociated spleen cells, are then induced to fuse with myeloma cells to form hybridomas and are cultured in a selective medium (e.g., hypoxanthine, aminopterin, thymidine medium, “HAT”). The resulting hybridomas are plated by limiting dilution, and are assayed for the production of antibodies which bind specifically to the immunizing antigen (and which do not bind to unrelated antigens). The selected Mab-secreting hybridomas are then cultured either in vitro (e.g., in tissue culture bottles or hollow fiber reactors) or in vivo (as ascites in mice).

[0572] Other methods for sustaining antibody-producing B-cell clones, such as by EBV transformation, are known.

[0573] If desired, the antibodies (whether polyclonal or monoclonal) may be labeled using conventional techniques. Suitable labels include fluorophores, chromophores, radioactive atoms (particularly ³²P and ¹²⁵I), electron-dense reagents, enzymes and ligands having specific binding partners. Enzymes are typically detected by their activity. For example, horseradish peroxidase is usually detected by its ability to convert 3,3′,5,5′-tetramethylbenzidine (TNB) to a blue pigment, quantifiable with a spectrophotometer.

[0574] A.2 In Vitro Applications of Polypeptides

[0575] Some polypeptides of the invention will have enzymatic activities that are useful in vitro. For example, the soybean trypsin inhibitor (Kunitz) family is one of the numerous families of proteinase inhibitors. It comprises plant proteins which have inhibitory activity against serine proteinases from the trypsin and subtilisin families, thiol proteinases and aspartic proteinases. Thus, these peptides find in vitro use in protein purification protocols and in therapeutic settings requiring topical application of protease inhibitors.

[0576] Delta-aminolevulinic acid dehydratase (EC 4.2.1.24) (ALAD) catalyzes the second step in the biosynthesis of heme, the condensation of two molecules of 5-aminolevulinate to form porphobilinogen and is also involved in chlorophyll biosynthesis (Kaczor et al. (1994) Plant Physiol. 1-4: 1411-7; Smith (1988) Biochem. J. 249: 423-8; Schneider (1976) Z. naturforsch. [C] 31: 55-63). Thus, ALAD proteins can be used as catalysts in synthesis of heme derivatives. Enzymes of biosynthetic pathways generally can be used as catalysts for in vitro synthesis of the compounds representing products of the pathway.

[0577] Polypeptides encoded by SDFs of the invention are engineered to provide purification reagents to identify and purify additional polypeptides that bind to them. This allows one to identify proteins that function as multimers or elucidate signal transduction or metabolic pathways. In the case of DNA binding proteins, the polypeptide are used in a similar manner to identify the DNA determinants of specific binding (S. Pierrou et al., Anal. Biochem. 229:99 (1995), S. Chusacultanachai et al., J. Biol. Chem. 274:23591 (1999), Q. Lin et al., J. Biol. Chem. 272:27274 (1997)).

[0578] II.B. Polypeptide Variants, Fragments, and Fusions

[0579] Generally, variants, fragments, or fusions of the polypeptides encoded by the maximum length sequence (MLS) can exhibit at least one of the activities of the identified domains and/or related polypeptides described in Sections (C) and (D) of The Reference tables corresponding to the MLS of interest.

[0580] II.B 1 Variants

[0581] A type of variant of the native polypeptides comprises amino acid substitutions. Conservative substitutions, described above (see II.), are preferred to maintain the function or activity of the polypeptide. Such substitutions include conservation of charge, polarity, hydrophobicity, size, etc. For example, one or more amino acid residues within the sequence is substituted with another amino acid of similar polarity that acts as a functional equivalent, for example providing a hydrogen bond in an enzymatic catalysis. Substitutes for an amino acid within an exemplified sequence are preferably made among the members of the class to which the amino acid belongs. For example, the nonpolar (hydrophobic) amino acids include alanine, leucine, isoleucine, valine, proline, phenylalanine, tryptophan and methionine. The polar neutral amino acids include glycine, serine, threonine, cysteine, tyrosine, asparagine, and glutamine. The positively charged (basic) amino acids include arginine, lysine and histidine. The negatively charged (acidic) amino acids include aspartic acid and glutamic acid.

[0582] Within the scope of percentage of sequence identity described above, a polypeptide of the invention may have additional individual amino acids or amino acid sequences inserted into the polypeptide in the middle thereof and/or at the N-terminal and/or C-terminal ends thereof. Likewise, some of the amino acids or amino acid sequences may be deleted from the polypeptide. Amino acid substitutions may also be made in the sequences; conservative substitutions being preferred.

[0583] One preferred class of variants are those that comprise (1) the domain of an encoded polypeptide and/or (2) residues conserved between the encoded polypeptide and related polypeptides. For this class of variants, the encoded polypeptide sequence is changed by insertion, deletion, or substitution at positions flanking the domain and/or conserved residues.

[0584] Another class of variants includes those that comprise an encoded polypeptide sequence that is changed in the domain or conserved residues by a conservative substitution.

[0585] Yet another class of variants includes those that lack one of the in vitro activities, or structural features of the encoded polypeptides. One example is polypeptides or proteins produced from genes comprising dominant negative mutations. Such a variant may comprise an encoded polypeptide sequence with non-conservative changes in a particular domain or group of conserved residues.

[0586] II.A.2 Fragments

[0587] Fragments of particular interest are those that comprise a domain identified for a polypeptide encoded by an MLS of the instant invention and variants thereof. Also, fragments that comprise at least one region of residues conserved between an MLS encoded polypeptide and its related polypeptides are of great interest. Fragments are sometimes useful as polypeptides corresponding to genes comprising dominant negative mutations.

[0588] II.A.3 Fusions

[0589] Of interest are chimeras comprising (1) a fragment of the MLS encoded polypeptide or variants thereof of interest and (2) a fragment of a polypeptide comprising the same domain. For example, an AP2 helix encoded by a MLS of the invention fused to second AP2 helix from ANT protein, which comprises two AP2 helices. The present invention also encompasses fusions of MLS encoded polypeptides, variants, or fragments thereof fused with related proteins or fragments thereof.

Definition of Domains

[0590] The polypeptides of the invention possess identifying domains as shown in The Reference tables, which indicate specific domains within the MLS encoded polypeptides. In addition, the domains within the MLS encoded polypeptide are defined by the region that exhibits at least 70% sequence identity with the consensus sequences listed in the detailed description below of each of the domains.

[0591] The majority of the protein domain descriptions given in the protein domain table are obtained from the Prosite and the Pfam websites available on the internet.

[0592] A. Activities of Polypeptides Comprising Signal Peptides

[0593] Polypeptides comprising signal peptides are a family of proteins that are typically targeted to (1) a particular organelle or intracellular compartment, (2) interact with a particular molecule or (3) for secretion outside of a host cell. Example of polypeptides comprising signal peptides include, without limitation, secreted proteins, soluble proteins, receptors, proteins retained in the ER, etc.

[0594] These proteins comprising signal peptides are useful to modulate ligand-receptor interactions, cell-to-cell communication, signal transduction, intracellular communication, and activities and/or chemical cascades that take part in an organism outside or within of any particular cell.

[0595] One class of such proteins are soluble proteins which are transported out of the cell. These proteins act as ligands that bind to receptor to trigger signal transduction or to permit communication between cells.

[0596] Another class is receptor proteins which also comprise a retention domain that lodges the receptor protein in the membrane when the cell transports the receptor to the surface of the cell. Like the soluble ligands, receptors also modulate signal transduction and communication between cells.

[0597] In addition the signal peptide itself can serve as a ligand for some receptors. An example is the interaction of the ER targeting signal peptide with the signal recognition particle (SRP). Here, the SRP binds to the signal peptide, halting translation, and the resulting SRP complex then binds to docking proteins located on the surface of the ER, prompting transfer of the protein into the ER.

[0598] A description of signal peptide residue composition is described below in Subsection IV.C.1.

III. Methods of Modulating Polypeptide Production

[0599] It is contemplated that polynucleotides of the invention are incorporated into a host cell or in-vitro system to modulate polypeptide production. For instance, the SDFs prepared as described herein are used to prepare expression cassettes useful in a number of techniques for suppressing or enhancing expression.

[0600] An example are polynucleotides comprising sequences to be transcribed, such as coding sequences, of the present invention are inserted into nucleic acid constructs to modulate polypeptide production. Typically, such sequences to be transcribed are heterologous to at least one element of the nucleic acid construct to generate a chimeric gene or construct.

[0601] Another example of useful polynucleotides are nucleic acid molecules comprising regulatory sequences of the present invention. Chimeric genes or constructs are generated when the regulatory sequences of the invention linked to heterologous sequences in a vector construct. Within the scope of the invention are such chimeric gene and/or constructs.

[0602] Also within the scope of the invention are nucleic acid molecules, whereof at least a part or fragment of these DNA molecules are presented in the Reference and Sequence tables of the present application, and wherein the coding sequence is under the control of its own promoter and/or its own regulatory elements. Such molecules are useful for transforming the genome of a host cell or an organism regenerated from said host cell for modulating polypeptide production.

[0603] Additionally, a vector capable of producing the oligonucleotide can be inserted into the host cell to deliver the oligonucleotide.

[0604] More detailed description of components to be included in vector constructs are described both above and below.

[0605] Whether the chimeric vectors or native nucleic acids are utilized, such polynucleotides are incorporated into a host cell to modulate polypeptide production. Native genes and/or nucleic acid molecules are effective when exogenous to the host cell.

[0606] Methods of modulating polypeptide expression includes, without limitation:
[0607] Suppression methods, such as
   [0608] Antisense
   [0609] Ribozymes
   [0610] Co-suppression
   [0611] Insertion of Sequences into the Gene to be Modulated
   [0612] Regulatory Sequence Modulation.
[0613] as well as Methods for Enhancing Production, such as
   [0614] Insertion of Exogenous Sequences; and
   [0615] Regulatory Sequence Modulation.

[0616] III.A. Suppression

[0617] Expression cassettes of the invention are used to suppress expression of endogenous genes which comprise the SDF sequence. Inhibiting expression is useful, for instance, to tailor the ripening characteristics of a fruit (Oeller et al., Science 254:437 (1991)) or to influence seed size (WO98/07842) or to provoke cell ablation (Mariani et al., Nature 357: 384-387 (1992).

[0618] As described above, a number of methods are used to inhibit gene expression in plants, such as antisense, ribozyme, introduction of exogenous genes into a host cell, insertion of a polynucleotide sequence into the coding sequence and/or the promoter of the endogenous gene of interest and the like.

[0619] III.A.1. Antisense

[0620] An expression cassette as described above transformed into host cell or plant to produce an antisense strand of RNA. For plant cells, antisense RNA inhibits gene expression by preventing the accumulation of mRNA which encodes the enzyme of interest, see, e.g., Sheehy et al., Proc. Nat. Acad. Sci. USA, 85:8805 (1988), and Hiatt et al., U.S. Pat. No. 4,801,340.

[0621] III.A.2. Ribozymes

[0622] Similarly, ribozyme constructs are transformed into a plant to cleave mRNA and down-regulate translation.

[0623] III.A.3. Co-Suppression

[0624] Another method of suppression occurs by introducing an exogenous copy of the gene to be suppressed. Introduction of expression cassettes in which a nucleic acid is configured in the sense orientation with respect to the promoter prevents the accumulation of mRNA. A detailed description of this method is described above.

[0625] III.A.4. Insertion of Sequences into the Gene to be Modulated

[0626] Yet another means of suppressing gene expression is to insert a polynucleotide into the gene of interest to disrupt transcription or translation of the gene.

[0627] Homologous recombination could be used to target a polynucleotide insert to a gene using the Cre-Lox system (A. C. Vergunst et al., Nucleic Acids Res. 26:2729 (1998), A. C. Vergunst et al., Plant Mol. Biol. 38:393 (1998), H. Albert et al., Plant J. 7:649 (1995)).

[0628] In addition, random insertion of polynucleotides into a host cell genome are also used to disrupt the gene of interest (Azpiroz-Leehan et al., Trends in Genetics 13:152 (1997)). In this method, screening for clones from a library containing random insertions is preferred for identifying those that have polynucleotides inserted into the gene of interest. Such screening is performed using probes and/or primers described above based on sequences from the Reference and Sequence tables, fragments thereof, and substantially similar sequence thereto. The screening is also performed by selecting clones or any transgenic plants having a desired phenotype.

[0629] III.A.5. Regulatory Sequence Modulation

[0630] The SDFs described in the Reference and Sequence tables or polynucleotides encoding polypeptides of the Protein Group or Protein Group Matrix tables, and fragments thereof are examples of nucleotides of the invention that contain regulatory sequences that can be used to suppress or inactivate transcription and/or translation from a gene of interest as discussed in I.C.5.

[0631] III.A.6. Genes Comprising Dominant-Negative Mutations

[0632] When suppression of production of the endogenous, native protein is desired it is often helpful to express a gene comprising a dominant negative mutation. Genes comprising dominant negative mutations produce a variant polypeptide that is capable of competing with the native polypeptide, but which does not produce the native result. Consequently, over-expression of genes comprising these mutations titrate out an undesired activity of the native protein. For example, the product from a gene comprising a dominant negative mutation of a receptor is used to constitutively activate or suppress a signal transduction cascade, allowing examination of the phenotype and thus the trait(s) controlled by that receptor and pathway. Alternatively, the protein arising from the gene comprising a dominant-negative mutation is an inactive enzyme still capable of binding to the same substrate as the native protein and therefore competes with such native proteins.

[0633] Products from genes comprising dominant-negative mutations also act upon the native protein itself to prevent activity. For example, the native protein may be active only as a homo-multimer or as one subunit of a hetero-multimer. Incorporation of an inactive subunit into the multimer with native subunit(s) inhibits activity.

[0634] Thus, gene function is modulated in host cells of interest by insertion into these cells vector constructs comprising a gene comprising a dominant-negative mutation.

[0635] III.B. Enhanced Expression

[0636] Enhanced expression of a gene of interest in a host cell is accomplished by either (1) insertion of an exogenous gene; or (2) promoter modulation.

[0637] III.B.1. Insertion of an Exogenous Gene

[0638] Insertion of an expression construct encoding an exogenous gene boosts the number of gene copies expressed in a host cell.

[0639] Such expression constructs comprise genes that either encode the native protein that is of interest or that encode a variant that exhibits enhanced activity as compared to the native protein. Such genes encoding proteins of interest are constructed from the sequences from the Reference and Sequence tables, fragments thereof, and substantially similar sequence thereto.

[0640] Such an exogenous gene includes a constitutive promoter permitting expression in any cell in a host organism or a promoter that directs transcription only in particular cells or times during a host cell life cycle or in response to environmental stimuli.

[0641] III.B.2. Regulatory Sequence Modulation

[0642] The SDFs of the Reference and Sequence tables, and fragments thereof, contain regulatory sequences that are used to enhance expression of a gene of interest. For example, some of these sequences contain useful enhancer elements. In some cases, duplication of enhancer elements or insertion of exogenous enhancer elements increases expression of a desired gene from a particular promoter. As other examples, all 11 promoters require binding of a regulatory protein to be activated, while some promoters may need a protein that signals a promoter binding protein to expose a polymerase binding site. In either case, over-production of such proteins are used to enhance expression of a gene of interest by increasing the activation time of the promoter.

[0643] Such regulatory proteins are encoded by some of the sequences in the Reference and Sequence tables, fragments thereof, and substantially similar sequences thereto.

[0644] Coding sequences for these proteins are constructed as described above.

[0645] IV. Gene Constructs and Vector Construction

[0646] To use isolated SDFs of the present invention or a combination of them or parts and/or mutants and/or fusions of said SDFs in the above techniques, recombinant DNA vectors that comprise said SDFs and are suitable for transformation of cells, such as plant cells, are usually prepared. The SDF construct are made using standard recombinant DNA techniques (Sambrook et al. 1989) and is introduced to the species of interest by Agrobacterium mediated transformation or by other means of transformation (e.g. particle gun bombardment) as referenced below.

[0647] The vector backbone can be any of those typical in the art such as plasmids, viruses, artificial chromosomes, BACs, YACs, PACs and vectors of the sort described by
[0648] (a) BAC: Shizuya et al., Proc. Natl. Acad. Sci. USA 89: 8794-8797 (1992); Hamilton et al., Proc. Natl. Acad. Sci. USA 93: 9975-9979 (1996);
[0649] (b) YAC: Burke et al., Science 236:806-812 (1987);
[0650] (c) PAC: Sternberg N. et al., Proc Natl Acad Sci USA. January; 87(1):103-7 (1990);
[0651] (d) Bacteria-Yeast Shuttle Vectors: Bradshaw et al., Nucl Acids Res 23: 4850-4856 (1995);
[0652] (e) Lambda Phage Vectors: Replacement Vector, e.g., Frischauf et al., J. Mol. Biol. 170: 827-842 (1983); or Insertion vector, e.g., Huynh et al., In: Glover N M (ed) DNA Cloning: A practical Approach, Vol. 1 Oxford: IRL Press (1985);
[0653] (f) T-DNA gene fusion vectors: Walden et al., Mol Cell Biol 1: 175-194 (1990); and
[0654] (g) Plasmid vectors: Sambrook et al., infra.

[0655] Typically, a vector comprises the exogenous gene, which in its turn comprises an SDF of the present invention to be introduced into the genome of a host cell, and which gene may be an antisense construct, a ribozyme construct chimeraplast, or a coding sequence with any desired transcriptional and/or translational regulatory sequences, such as promoters, UTRs, and 3′ end termination sequences. Vectors of the invention also include origins of replication, scaffold attachment regions (SARs), markers, homologous sequences, introns, etc.

[0656] A DNA sequence coding for the desired polypeptide, for example a cDNA sequence encoding a full length protein, are preferably combined with transcriptional and translational initiation regulatory sequences which direct the transcription of the sequence from the gene in the intended tissues of the transformed plant. For example, for over-expression, a plant promoter fragment is employed that direct transcription of the gene in all tissues of a regenerated plant. Alternatively, the plant promoter directs transcription of an SDF of the invention in a specific tissue (tissue-specific promoters) or is otherwise under more precise environmental control (inducible promoters).

[0657] If proper polypeptide production is desired, a polyadenylation region at the 3′-end of the coding region is typically included. The polyadenylation region is derived from the natural gene, from a variety of other plant genes, or from T-DNA.

[0658] The vector comprising the sequences from genes or SDF or the invention comprises a marker gene that confers a selectable phenotype on plant cells. The vector includes promoter and coding sequence, for instance. For example, the marker may encode biocide resistance, particularly antibiotic resistance, such as resistance to kanamycin, G418, bleomycin, hygromycin, or herbicide resistance, (e.g. resistance to chlorosulfuron or phosphinotricin).

[0659] IV.A. Coding Sequences

[0660] Generally, the sequence in the transformation vector and to be introduced into the genome of the host cell does not need to be absolutely identical to an SDF of the present invention. Also, it is not necessary for it to be full length, relative to either the primary transcription product or fully processed mRNA. Furthermore, the introduced sequence need not have the same intron or exon pattern as a native gene. Also, heterologous non-coding segments can be incorporated into the coding sequence without changing the desired amino acid sequence of the polypeptide to be produced.

[0661] IV.B. Promoters

[0662] As explained above, introducing an exogenous SDF from the same species or an orthologous SDF from another species is useful to modulate the expression of a native gene corresponding to that SDF of interest. Such an SDF construct is under the control of either a constitutive promoter or a highly regulated inducible promoter (e.g., a copper inducible promoter). The promoter of interest is initially either endogenous or heterologous to the species in question. When re-introduced into the genome of said species, such promoter becomes exogenous to said species. Over-expression of an SDF transgene leads to co-suppression of the homologous endogeneous sequence thereby creating some alterations in the phenotypes of the transformed species as demonstrated by similar analysis of the chalcone synthase gene (Napoli et al., Plant Cell 2:279 (1990) and van der Krol et al., Plant Cell 2:291 (1990)). If an SDF is found to encode a protein with desirable characteristics, its over-production is controlled so that its accumulation is manipulated in an organ- or tissue-specific manner utilizing a promoter having such specificity.

[0663] Likewise, if the promoter of an SDF (or an SDF that includes a promoter) is found to be tissue-specific or developmentally regulated, such a promoter is utilized to drive or facilitate the transcription of a specific gene of interest (e.g., seed storage protein or root-specific protein). Thus, the level of accumulation of a particular protein is manipulated or its spatial localization in an organ- or tissue-specific manner is altered.

IV.C Signal Peptides

[0664] SDFs of the present invention containing signal peptides are indicated in the Reference and Sequence tables. In some cases it may be desirable for the protein encoded by an introduced exogenous or orthologous SDF to be targeted (1) to a particular organelle intracellular compartment, (2) to interact with a particular molecule such as a membrane molecule or (3) for secretion outside of the cell harboring the introduced SDF. This is accomplished using a signal peptide.

[0665] Signal peptides direct protein targeting, are involved in ligand-receptor interactions and act in cell to cell communication. Many proteins, especially soluble proteins, contain a signal peptide that targets the protein to one of several different intracellular compartments. In plants, these compartments include, but are not limited to, the endoplasmic reticulum (ER), mitochondria, plastids (such as chloroplasts), the vacuole, the Golgi apparatus, protein storage vessicles (PSV) and, in general, membranes. Some signal peptide sequences are conserved, such as the Asn-Pro-Ile-Arg amino acid motif found in the N-terminal propeptide signal that targets proteins to the vacuole (Marty (1999) The Plant Cell 11: 587-599). Other signal peptides do not have a consensus sequence per se, but are largely composed of hydrophobic amino acids, such as those signal peptides targeting proteins to the ER (Vitale and Denecke (1999) The Plant Cell 11: 615-628). Still others do not appear to contain either a consensus sequence or an identified common secondary sequence, for instance the chloroplast stromal targeting signal peptides (Keegstra and Cline (1999) The Plant Cell 11: 557-570). Furthermore, some targeting peptides are bipartite, directing proteins first to an organelle and then to a membrane within the organelle (e.g. within the thylakoid lumen of the chloroplast; see Keegstra and Cline (1999) The Plant Cell 11: 557-570). In addition to the diversity in sequence and secondary structure, placement of the signal peptide is also varied. Proteins destined for the vacuole, for example, have targeting signal peptides found at the N-terminus, at the C-terminus and at a surface location in mature, folded proteins. Signal peptides also serve as ligands for some receptors.

[0666] These characteristics of signal proteins are used to more tightly control the phenotypic expression of introduced SDFs. In particular, associating the appropriate signal sequence with a specific SDF allows sequestering of the protein in specific organelles (plastids, as an example), secretion outside of the cell, targeting interaction with particular receptors, etc. Hence, the inclusion of signal proteins in constructs involving the SDFs of the invention increases the range of manipulation of SDF phenotypic expression. The nucleotide sequence of the signal peptide is isolated from characterized genes using common molecular biological techniques or is synthesized in vitro.

[0667] In addition, the native signal peptide sequences, both amino acid and nucleotide, described in the Reference and Sequence tables is used to modulate polypeptide transport. Further variants of the native signal peptides described in the Reference and Sequence tables are contemplated. Insertions, deletions, or substitutions can be made. Such variants retain at least one of the functions of the native signal peptide as well as exhibiting some degree of sequence identity to the native sequence.

[0668] Also, fragments of the signal peptides of the invention are useful and are fused with other signal peptides of interest to modulate transport of a polypeptide.

V. Transformation Techniques

[0669] A wide range of techniques for inserting exogenous polynucleotides are known for a number of host cells, including, without limitation, bacterial, yeast, mammalian, insect and plant cells. Techniques for transforming a wide variety of higher plant species are well known and described in the technical and scientific literature. See, e.g. Weising et al., Ann. Rev. Genet. 22:421 (1988); and Christou, Euphytica, v. 85, n. 1-3:13-27, (1995).

[0670] DNA constructs of the invention are introduced into the genome of the desired plant host by a variety of conventional techniques. For example, the DNA construct is introduced directly into the genomic DNA of the plant cell using techniques such as electroporation and microinjection of plant cell protoplasts, or the DNA constructs are introduced directly to plant tissue using ballistic methods, such as DNA particle bombardment. Alternatively, the DNA constructs are combined with suitable T-DNA flanking regions and introduced into a conventional Agrobacterium tumefaciens host vector. The virulence functions of the Agrobacterium tumefaciens host will direct the insertion of the construct and adjacent marker into the plant cell DNA when the cell is infected by the bacteria (McCormac et al., Mol. Biotechnol. 8:199 (1997); Hamilton, Gene 200:107 (1997); Salomon et al. EMBO J. 3:141 (1984); Herrera-Estrella et al. EMBO J. 2:987 (1983)).

[0671] Microinjection techniques are known in the art and are described in the scientific and patent literature. The introduction of DNA constructs using polyethylene glycol precipitation is described in Paszkowski et al. EMBO J. 3:2717 (1984). Electroporation techniques are described in Fromm et al. Proc. Natl. Acad. Sci. USA 82:5824 (1985). Ballistic transformation techniques are described in Klein et al. Nature 327:773 (1987). Agrobacterium tumefaciens-mediated transformation techniques, including disarming and use of binary or co-integrate vectors, are well described in the scientific literature. See, for example Hamilton, C M., Gene 200:107 (1997); Müller et al. Mol. Gen. Genet. 207:171 (1987); Komari et al. Plant J. 10: 165 (1996); Venkateswarlu et al. Biotechnology 2:1103 (1991) and Gleave, A P., Plant Mol. Biol. 20:1203 (1992); Graves and Goldman, Plant Mol. Biol. 7:34 (1986) and Gould et al., Plant Physiology 95:426 (1991).

[0672] Transformed plant cells which are derived by any of the above transformation techniques are cultured to regenerate a whole plant that possesses the transformed genotype and thus the desired phenotype, for example seedlessness. Such regeneration techniques rely on manipulation of certain phytohormones in a tissue culture growth medium, typically relying on a biocide and/or herbicide marker which has been introduced together with the desired nucleotide sequences. Plant regeneration from cultured protoplasts is described in Evans et al., Protoplasts Isolation and Culture in “Handbook of Plant Cell Culture,” pp. 124-176, MacMillan Publishing Company, New York, 1983; and Binding, Regeneration of Plants, Plant Protoplasts, pp. 21-73, CRC Press, Boca Raton, 1988. Regeneration is also obtained from plant callus, explants, organs, or parts thereof. Such regeneration techniques are described generally in Klee et al. Ann. Rev. of Plant Phys. 38:467 (1987). Regeneration of monocots (rice) is described by Hosoyama et al. (Biosci. Biotechnol. Biochem. 58:1500 (1994)) and by Ghosh et al. (J. Biotechnol. 32:1 (1994)). The nucleic acids of the invention are used to confer desired traits on essentially any plant.

[0673] Thus, the invention has use over a broad range of plants, including species from the genera Anacardium, Arachis, Asparagus, Atropa, Avena, Brassica, Citrus, Citrullus, Capsicum, Carthamus, Cocos, Coffea, Cucumis, Cucurbita, Daucus, Elaeis, Fragaria, Glycine, Gossypium, Helianthus, Heterocallis, Hordeum, Hyoscyamus, Lactuca, Linum, Lolium, Lupinus, Lycopersicon, Malus, Manihot, Majorana, Medicago, Nicotiana, Olea, Oryza, Panieum, Pannesetum, Persea, Phaseolus, Pistachia, Pisum, Pyrus, Prunus, Raphanus, Ricinus, Secale, Senecio, Sinapis, Solanum, Sorghum, Theobromus, Trigonella, Triticum, Vicia, Vitis, Vigna, and, Zea.

[0674] One of skill recognizes that after the expression cassette is stably incorporated in transgenic plants and confirmed to be operable, it can be introduced into other plants by sexual crossing. Any of a number of standard breeding techniques are used, depending upon the species to be crossed.

[0675] The particular sequences of SDFs identified are provided in the attached Reference and Sequence tables.

VIII. Definitions

[0676] The following terms are utilized throughout this application:

[0677] Allelic variant: An “allelic variant” is an alternative form of the same SDF, which resides at the same chromosomal locus in the organism. Allelic variations can occur in any portion of the gene sequence, including regulatory regions. Allelic variants can arise by normal genetic variation in a population. Allelic variants can also be produced by genetic engineering methods. An allelic variant can be one that is found in a naturally occurring plant, including a cultivar or ecotype. An allelic variant may or may not give rise to a phenotypic change, and may or may not be expressed. An allele can result in a detectable change in the phenotype of the trait represented by the locus. A phenotypically silent allele can give rise to a product.

[0678] Alternatively spliced messages: Within the context of the current invention, “alternatively spliced messages” refers to mature mRNAs originating from a single gene with variations in the number and/or identity of exons, introns and/or intron-exon junctions.

[0679] Chimeric: The term “chimeric” is used to describe genes, as defined supra, or contructs wherein at least two of the elements of the gene or construct, such as the promoter and the coding sequence and/or other regulatory sequences and/or filler sequences and/or complements thereof, are heterologous to each other.

[0680] Constitutive Promoter: Promoters referred to herein as “constitutive promoters” actively promote transcription under most, but not necessarily all, environmental conditions and states of development or cell differentiation. Examples of constitutive promoters include the cauliflower mosaic virus (CaMV) 35S transcript initiation region and the 1′ or 2′ promoter derived from T-DNA of Agrobacterium tumefaciens, and other transcription initiation regions from various plant genes, such as the maize ubiquitin-1 promoter, known to those of skill.

[0681] Coordinately Expressed: The term “coordinately expressed,” as used in the current invention, refers to genes that are expressed at the same or a similar time and/or stage and/or under the same or similar environmental conditions.

[0682] Domain: Domains are fingerprints or signatures that can be used to characterize protein families and/or parts of proteins. Such fingerprints or signatures can comprise conserved (1) primary sequence, (2) secondary structure, and/or (3) three-dimensional conformation. Generally, each domain has been associated with either a family of proteins or motifs. Typically, these families and/or motifs have been correlated with specific in-vitro and/or in-vivo activities. A domain can be any length, including the entirety of the sequence of a protein. Detailed descriptions of the domains, associated families and motifs, and correlated activities of the polypeptides of the instant invention are described below. Usually, the polypeptides with designated domain(s) can exhibit at least one activity that is exhibited by any polypeptide that comprises the same domain(s).

[0683] Endogenous: The term “endogenous,” within the context of the current invention refers to any polynucleotide, polypeptide or protein sequence which is a natural part of a cell or organisms regenerated from said cell.

[0684] Exogenous: “Exogenous,” as referred to within, is any polynucleotide, polypeptide or protein sequence, whether chimeric or not, that is initially or subsequently introduced into the genome of an individual host cell or the organism regenerated from said host cell by any means other than by a sexual cross. Examples of means by which this can be accomplished are described below, and include Agrobacterium-mediated transformation (of dicots—e.g. Salomon et al. EMBO J. 3:141 (1984); Herrera-Estrella et al. EMBO J. 2:987 (1983); of monocots, representative papers are those by Escudero et al., Plant J. 10:355 (1996), Ishida et al., Nature Biotechnology 14:745 (1996), May et al., Bio/Technology 13:486 (1995)), biolistic methods (Armaleo et al., Current Genetics 17:97 1990)), electroporation, in planta techniques, and the like. Such a plant containing the exogenous nucleic acid is referred to here as a T₀ for the primary transgenic plant and T₁ for the first generation. The term “exogenous” as used herein is also intended to encompass inserting a naturally found element into a non-naturally found location.

[0685] Filler sequence: As used herein, “filler sequence” refers to any nucleotide sequence that is inserted into DNA construct to evoke a particular spacing between particular components such as a promoter and a coding region and may provide an additional attribute such as a restriction enzyme site.

[0686] Gene: The term “gene,” as used in the context of the current invention, encompasses all regulatory and coding sequence contiguously associated with a single hereditary unit with a genetic function (see SCHEMATIC 1). Genes can include non-coding sequences that modulate the genetic function that include, but are not limited to, those that specify polyadenylation, transcriptional regulation, DNA conformation, chromatin conformation, extent and position of base methylation and binding sites of proteins that control all of these. Genes comprised of “exons” (coding sequences), which may be interrupted by “introns” (non-coding sequences), encode proteins. A gene's genetic function may require only RNA expression or protein production, or may only require binding of proteins and/or nucleic acids without associated expression. In certain cases, genes adjacent to one another may share sequence in such a way that one gene will overlap the other. A gene can be found within the genome of an organism, artificial chromosome, plasmid, vector, etc., or as a separate isolated entity.

[0687] Gene Family: “Gene family” is used in the current invention to describe a group of functionally related genes, each of which encodes a separate protein.

[0688] Heterologous sequences: “Heterologous sequences” are those that are not operatively linked or are not contiguous to each other in nature. For example, a promoter from corn is considered heterologous to an Arabidopsis coding region sequence. Also, a promoter from a gene encoding a growth factor from corn is considered heterologous to a sequence encoding the corn receptor for the growth factor. Regulatory element sequences, such as UTRs or 3′ end termination sequences that do not originate in nature from the same gene as the coding sequence originates from, are considered heterologous to said coding sequence. Elements operatively linked in nature and contiguous to each other are not heterologous to each other. On the other hand, these same elements remain operatively linked but become heterologous if other filler sequence is placed between them. Thus, the promoter and coding sequences of a corn gene expressing an amino acid transporter are not heterologous to each other, but the promoter and coding sequence of a corn gene operatively linked in a novel manner are heterologous.

[0689] Homologous gene: In the current invention, “homologous gene” refers to a gene that shares sequence similarity with the gene of interest. This similarity may be in only a fragment of the sequence and often represents a functional domain such as, examples including without limitation a DNA binding domain, a domain with tyrosine kinase activity, or the like. The functional activities of homologous genes are not necessarily the same.

[0690] Inducible Promoter: An “inducible promoter” in the context of the current invention refers to a promoter which is regulated under certain conditions, such as light, chemical concentration, protein concentration, conditions in an organism, cell, or organelle, etc. A typical example of an inducible promoter, which can be utilized with the polynucleotides of the present invention, is PARSK1, the promoter from the Arabidopsis gene encoding a serine-threonine kinase enzyme, and which promoter is induced by dehydration, abscissic acid and sodium chloride (Wang and Goodman, Plant J. 8:37 (1995)) Examples of environmental conditions that may affect transcription by inducible promoters include anaerobic conditions, elevated temperature, or the presence of light.

[0691] Intergenic region: “Intergenic region,” as used in the current invention, refers to nucleotide sequence occurring in the genome that separates adjacent genes.

[0692] Mutant gene: In the current invention, “mutant” refers to a heritable change in DNA sequence at a specific location. Mutants of the current invention may or may not have an associated identifiable function when the mutant gene is transcribed.

[0693] Orthologous Gene: In the current invention “orthologous gene” refers to a second gene that encodes a gene product that performs a similar function as the product of a first gene. The orthologous gene may also have a degree of sequence similarity to the first gene. The orthologous gene may encode a polypeptide that exhibits a degree of sequence similarity to a polypeptide corresponding to a first gene. The sequence similarity can be found within a functional domain or along the entire length of the coding sequence of the genes and/or their corresponding polypeptides.

[0694] Percentage of sequence identity: “Percentage of sequence identity,” as used herein, is determined by comparing two optimally aligned sequences over a comparison window, where the fragment of the polynucleotide or amino acid sequence in the comparison window may comprise additions or deletions (e.g., gaps or overhangs) as compared to the reference sequence (which does not comprise additions or deletions) for optimal alignment of the two sequences. The percentage is calculated by determining the number of positions at which the identical nucleic acid base or amino acid residue occurs in both sequences to yield the number of matched positions, dividing the number of matched positions by the total number of positions in the window of comparison and multiplying the result by 100 to yield the percentage of sequence identity. Optimal alignment of sequences for comparison may be conducted by the local homology algorithm of Smith and Waterman Add. APL. Math. 2:482 (1981), by the homology alignment algorithm of Needleman and Wunsch J. Mol. Biol. 48:443 (1970), by the search for similarity method of Pearson and Lipman Proc. Natl. Acad. Sci. (USA) 85: 2444 (1988), by computerized implementations of these algorithms (GAP, BESTFIT, BLAST, PASTA, and TFASTA in the Wisconsin Genetics Software Package, Genetics Computer Group (GCG), 575 Science Dr., Madison, Wis.), or by inspection. Given that two sequences have been identified for comparison, GAP and BESTFIT are preferably employed to determine their optimal alignment. Typically, the default values of 5.00 for gap weight and 0.30 for gap weight length are used. The term “substantial sequence identity” between polynucleotide or polypeptide sequences refers to polynucleotide or polypeptide comprising a sequence that has at least 80% sequence identity, preferably at least 85%, more preferably at least 90% and most preferably at least 95%, even more preferably, at least 96%, 97%, 98% or 99% sequence identity compared to a reference sequence using the programs.

[0695] Plant Promoter: A “plant promoter” is a promoter capable of initiating transcription in plant cells and can drive or facilitate transcription of a fragment of the SDF of the instant invention or a coding sequence of the SDF of the instant invention. Such promoters need not be of plant origin. For example, promoters derived from plant viruses, such as the CaMV35S promoter or from Agrobacterium tumefaciens such as the T-DNA promoters, can be plant promoters. A typical example of a plant promoter of plant origin is the maize ubiquitin-1 (ubi-1) promoter known to those of skill.

[0696] Promoter: The term “promoter,” as used herein, refers to a region of sequence determinants located upstream from the start of transcription of a gene and which are involved in recognition and binding of RNA polymerase and other proteins to initiate and modulate transcription. A basal promoter is the minimal sequence necessary for assembly of a transcription complex required for transcription initiation. Basal promoters frequently include a “TATA box” element usually located between 15 and 35 nucleotides upstream from the site of initiation of transcription. Basal promoters also sometimes include a “CCAAT box” element (typically a sequence CCAAT) and/or a GGGCG sequence, usually located between 40 and 200 nucleotides, preferably 60 to 120 nucleotides, upstream from the start site of transcription.

[0697] Public sequence: The term “public sequence,” as used in the context of the instant application, refers to any sequence that has been deposited in a publicly accessible database. This term encompasses both amino acid and nucleotide sequences. Such sequences are publicly accessible, for example, on the BLAST databases on the NCBI FTP web site (accessible via the internet). The database at the NCBI GTP site utilizes “gi” numbers assigned by NCBI as a unique identifier for each sequence in the databases, thereby providing a non-redundant database for sequence from various databases, including GenBank, EMBL, DBBJ, (DNA Database of Japan) and PDB (Brookhaven Protein Data Bank).

[0698] Regulatory Sequence: The term “regulatory sequence,” as used in the current invention, refers to any nucleotide sequence that influences transcription or translation initiation and rate, and stability and/or mobility of the transcript or polypeptide product. Regulatory sequences include, but are not limited to, promoters, promoter control elements, protein binding sequences, 5′ and 3′ UTRs, transcriptional start site, termination sequence, polyadenylation sequence, introns, certain sequences within a coding sequence, etc.

[0699] Related Sequences: “Related sequences” refer to either a polypeptide or a nucleotide sequence that exhibits some degree of sequence similarity with a sequence described by The Reference tables and The Sequence tables.

[0700] Scaffold Attachment Region (SAR): As used herein, “scaffold attachment region” is a DNA sequence that anchors chromatin to the nuclear matrix or scaffold to generate loop domains that can have either a transcriptionally active or inactive structure (Spiker and Thompson (1996) Plant Physiol. 110: 15-21).

[0701] Sequence-determined DNA fragments (SDFs): “Sequence-determined DNA fragments” as used in the current invention are isolated sequences of genes, fragments of genes, intergenic regions or contiguous DNA from plant genomic DNA or cDNA or RNA the sequence of which has been determined.

[0702] Signal Peptide: A “signal peptide” as used in the current invention is an amino acid sequence that targets the protein for secretion, for transport to an intracellular compartment or organelle or for incorporation into a membrane. Signal peptides are indicated in the tables and a more detailed description located below.

[0703] Specific Promoter: In the context of the current invention, “specific promoters” refers to a subset of inducible promoters that have a high preference for being induced in a specific tissue or cell and/or at a specific time during development of an organism. By “high preference” is meant at least 3-fold, preferably at least 5-fold, more preferably at least 10-fold still more preferably at least 20-fold, 50-fold or 100-fold increase in transcription in the desired tissue over the transcription in any other tissue. Typical examples of temporal and/or tissue specific promoters of plant origin that can be used with the polynucleotides of the present invention, are: PTA29, a promoter which is capable of driving gene transcription specifically in tapetum and only during anther development (Koltonow et al., Plant Cell 2:1201 (1990); RCc2 and RCc3, promoters that direct root-specific gene transcription in rice (Xu et al., Plant Mol. Biol. 27:237 (1995); TobRB27, a root-specific promoter from tobacco (Yamamoto et al., Plant Cell 3:371 (1991)). Examples of tissue-specific promoters under developmental control include promoters that initiate transcription only in certain tissues or organs, such as root, ovule, fruit, seeds, or flowers. Other suitable promoters include those from genes encoding storage proteins or the lipid body membrane protein, oleosin. A few root-specific promoters are noted above.

[0704] Stringency: “Stringency” as used herein is a function of probe length, probe composition (G+C content), and salt concentration, organic solvent concentration, and temperature of hybridization or wash conditions. Stringency is typically compared by the parameter Tₘ, which is the temperature at which 50% of the complementary molecules in the hybridization are hybridized, in terms of a temperature differential from Tₘ. High stringency conditions are those providing a condition of Tₘ−5° C. to Tₘ−10° C. Medium or moderate stringency conditions are those providing Tₘ−20° C. to Tₘ−29° C. Low stringency conditions are those providing a condition of Tₘ−40° C. to Tₘ−48° C. The relationship of hybridization conditions to Tₘ (in ° C.) is expressed in the mathematical equation
Tₘ=81.5−16.6(log₁₀[Na⁺])+0.41(% G+C)−(600/N) (1)
where N is the length of the probe. This equation works well for probes 14 to 70 nucleotides in length that are identical to the target sequence. The equation below for Tₘ of DNA-DNA hybrids is useful for probes in the range of 50 to greater than 500 nucleotides, and for conditions that include an organic solvent (formamide).
Tₘ=81.5+16.6 log {[Na⁺]/(1+0.7[Na⁺])}+0.41(% G+C)−500/L 0.63(% formamide) (2)
where L is the length of the probe in the hybrid. (P. Tijessen, “Hybridization with Nucleic Acid Probes” in Laboratory Techniques in Biochemistry and Molecular Biology, P. C. vand der Vliet, ed., c. 1993 by Elsevier, Amsterdam.) The Tₘ of equation (2) is affected by the nature of the hybrid; for DNA-RNA hybrids Tₘ is 10-15° C. higher than calculated, for RNA-RNA hybrids Tₘ is 20-25° C. higher. Because the Tₘ decreases about 1° C. for each 1% decrease in homology when a long probe is used (Bonner et al., J. Mol. Biol. 81:123 (1973)), stringency conditions can be adjusted to favor detection of identical genes or related family members.

[0705] Equation (2) is derived assuming equilibrium and therefore, hybridizations according to the present invention are most preferably performed under conditions of probe excess and for sufficient time to achieve equilibrium. The time required to reach equilibrium can be shortened by inclusion of a hybridization accelerator such as dextran sulfate or another high volume polymer in the hybridization buffer.

[0706] Stringency can be controlled during the hybridization reaction or after hybridization has occurred by altering the salt and temperature conditions of the wash solutions used. The formulas shown above are equally valid when used to compute the stringency of a wash solution. Preferred wash solution stringencies lie within the ranges stated above; high stringency is 5-8° C. below Tₘ, medium or moderate stringency is 26-29° C. below Tₘ and low stringency is 45-48° C. below Tₘ.

[0707] Substantially free of: A composition containing A is “substantially free of” B when at least 85% by weight of the total A+B in the composition is A. Preferably, A comprises at least about 90% by weight of the total of A+B in the composition, more preferably at least about 95% or even 99% by weight. For example, a plant gene or DNA sequence can be considered substantially free of other plant genes or DNA sequences.

[0708] Translational start site: In the context of the current invention, a “translational start site” is usually an ATG in the cDNA transcript, more usually the first ATG. A single cDNA, however, may have multiple translational start sites.

[0709] Transcription start site: “Transcription start site” is used in the current invention to describe the point at which transcription is initiated. This point is typically located about 25 nucleotides downstream from a TFIID binding site, such as a TATA box. Transcription can initiate at one or more sites within the gene, and a single gene may have multiple transcriptional start sites, some of which may be specific for transcription in a particular cell-type or tissue.

[0710] Untranslated region (UTR): A “UTR” is any contiguous series of nucleotide bases that is transcribed, but is not translated. These untranslated regions may be associated with particular functions such as increasing mRNA message stability. Examples of UTRs include, but are not limited to polyadenylation signals, terminations sequences, sequences located between the transcriptional start site and the first exon (5′ UTR) and sequences located between the last exon and the end of the mRNA (3′ UTR).

[0711] Variant: The term “variant” is used herein to denote a polypeptide or protein or polynucleotide molecule that differs from others of its kind in some way. For example, polypeptide and protein variants can consist of changes in amino acid sequence and/or charge and/or post-translational modifications (such as glycosylation, etc).

### IX. EXAMPLES

[0712] The invention is illustrated by way of the following examples. The invention is not limited by these examples as the scope of the invention is defined solely by the claims following.

### Example 1

### cDNA Preparation

[0713] A number of the nucleotide sequences disclosed in the Reference and Sequence tables herein as representative of the SDFs of the invention are obtained by sequencing genomic DNA (gDNA) and/or cDNA from corn plants grown from HYBRID SEED # 35A19, purchased from Pioneer Hi-Bred International, Inc., Supply Management, P.O. Box 256, Johnston, Iowa 50131-0256.

[0714] A number of the nucleotide sequences disclosed in the Reference and Sequence tables herein as representative of the SDFs of the invention are also obtained by sequencing genomic DNA from Arabidopsis thaliana, Wassilewskija ecotype or by sequencing cDNA obtained from mRNA from such plants as described below. A. thaliana Wassilewskija is a true breeding strain. Seeds of the plant are available from the Arabidopsis Biological Resource Center at the Ohio State University, under the accession number CS2360. Seeds of this plant were deposited under the terms and conditions of the Budapest Treaty at the American Type Culture Collection, Manassas, Va. on Aug. 31, 1999, and were assigned ATCC No. PTA-595.

[0715] Other methods for cloning full-length cDNA are described, for example, by Seki et al., Plant Journal 15:707-720 (1998) “High-efficiency cloning of Arabidopsis full-length cDNA by biotinylated Cap trapper”; Maruyama et al., Gene 138:171 (1994) “Oligo-capping a simple method to replace the cap structure of eukaryotic mRNAs with oligoribonucleotides”; and WO 96/34981.

[0716] Tissues are, or each organ is, individually pulverized and frozen in liquid nitrogen. Next, the samples are homogenized in the presence of detergents and then centrifuged. The debris and nuclei are removed from the sample and more detergents were added to the sample. The sample is centrifuged and the debris is removed. Then the sample is applied to a 2M sucrose cushion to isolate polysomes. The RNA is isolated by treatment with detergents and proteinase K followed by ethanol precipitation and centrifugation. The polysomal RNA from the different tissues are pooled according to the following mass ratios: 15/15/1 for male inflorescences, female inflorescences and root, respectively. The pooled material is then used for cDNA synthesis by the methods described below.

[0717] Starting material for cDNA synthesis for the exemplary corn cDNA clones with sequences presented in the Reference and Sequence tables is poly(A)-containing polysomal mRNAs from inflorescences and root tissues of corn plants grown from HYBRID SEED # 35A19. Male inflorescences and female (pre- and post-fertilization) inflorescences are isolated at various stages of development. Selection for poly(A) containing polysomal RNA is done using oligo d(T) cellulose columns, as described by Cox and Goldberg, “Plant Molecular Biology: A Practical Approach”, pp. 1-35, Shaw ed., c. 1988 by IRL, Oxford. The quality and the integrity of the polyA+ RNAs are evaluated.

[0718] Starting material for cDNA synthesis for the exemplary Arabidopsis cDNA clones with sequences presented in the Reference and Sequence tables is polysomal RNA isolated from the top-most inflorescence tissues of Arabidopsis thaliana Wassilewskija (Ws.) and from roots of Arabidopsis thaliana Landsberg erecta (L. er.), also obtained from the Arabidopsis Biological Resource Center. Nine parts inflorescence to every part root is used, as measured by wet mass. Tissue is pulverized and exposed to liquid nitrogen. Next, the sample is homogenized in the presence of detergents and then centrifuged. The debris and nuclei are removed from the sample and more detergents are added to the sample. The sample is centrifuged and the debris removed and the sample applied to a 2M sucrose cushion to isolate polysomal RNA. Cox et al., “Plant Molecular Biology: A Practical Approach”, pp. 1-35, Shaw ed., c. 1988 by IRL, Oxford. The polysomal RNA is used for cDNA synthesis by the methods described below. Polysomal mRNA is then isolated as described above for corn cDNA. The quality of the RNA is assessed electrophoretically.

[0719] Following preparation of the mRNAs from various tissues as described above, selection of mRNA with intact 5′ ends and specific attachment of an oligonucleotide tag to the 5′ end of such mRNA is performed using either a chemical or enzymatic approach. Both techniques take advantage of the presence of the “cap” structure, which characterizes the 5′ end of most intact mRNAs and which comprises a guanosine generally methylated once, at the 7 position.

[0720] The chemical modification approach involves the optional elimination of the 2′,3′-cis diol of the 3′ terminal ribose, the oxidation of the 2′,3′-cis diol of the ribose linked to the cap of the 5′ ends of the mRNAs into a dialdehyde, and the coupling of the such obtained dialdehyde to a derivatized oligonucleotide tag. Further detail regarding the chemical approaches for obtaining mRNAs having intact 5′ ends is disclosed in International Application No. WO96/34981 published Nov. 7, 1996.

[0721] The enzymatic approach for ligating the oligonucleotide tag to the intact 5′ ends of mRNAs involves the removal of the phosphate groups present on the 5′ ends of uncapped incomplete mRNAs, the subsequent decapping of mRNAs having intact 5′ ends and the ligation of the phosphate present at the 5′ end of the decapped mRNA to an oligonucleotide tag. Further detail regarding the enzymatic approaches for obtaining mRNAs having intact 5′ ends is disclosed in Dumas Milne Edwards J. B. (Doctoral Thesis of Paris VI University, Le clonage des ADNc complets: difficultés et perspectives nouvelles. Apports pour l'étude de la régulation de l'expression de la tryptophane hydroxylase de rat, 20 Dec. 1993), EPO 625572 and Kato et al., Gene 150:243-250 (1994).

[0722] In both the chemical and the enzymatic approach, the oligonucleotide tag has a restriction enzyme site (e.g. an EcoRI site) therein to facilitate later cloning procedures. Following attachment of the oligonucleotide tag to the mRNA, the integrity of the mRNA is examined by performing a Northern blot using a probe complementary to the oligonucleotide tag.

[0723] For the mRNAs joined to oligonucleotide tags using either the chemical or the enzymatic method, first strand cDNA synthesis is performed using an oligo-dT primer with reverse transcriptase. This oligo-dT primer contains an internal tag of at least 4 nucleotides, which can be different from one mRNA preparation to another. Methylated dCTP is used for cDNA first strand synthesis to protect the internal EcoRI sites from digestion during subsequent steps. The first strand cDNA is precipitated using isopropanol after removal of RNA by alkaline hydrolysis to eliminate residual primers.

[0724] Second strand cDNA synthesis is conducted using a DNA polymerase, such as Klenow fragment and a primer corresponding to the 5′ end of the ligated oligonucleotide. The primer is typically 20-25 bases in length. Methylated dCTP is used for second strand synthesis in order to protect internal EcoRI sites in the cDNA from digestion during the cloning process.

[0725] Following second strand synthesis, the full-length cDNAs are cloned into a phagemid vector, such as pBlueScript™ (Stratagene). The ends of the full-length cDNAs are blunted with T4 DNA polymerase (Biolabs) and the cDNA is digested with EcoRI. Since methylated dCTP is used during cDNA synthesis, the EcoRI site present in the tag is the only hemi-methylated site; hence the only site susceptible to EcoRI digestion. In some instances, to facilitate subcloning, an Hind III adapter is added to the 3′ end of full-length cDNAs.

[0726] The full-length cDNAs are then size fractionated using either exclusion chromatography (AcA, Biosepra) or electrophoretic separation which yields 3 to 6 different fractions. The full-length cDNAs are then directionally cloned either into pBlueScript™ using either the EcoRI and SmaI restriction sites or, when the Hind III adapter is present in the full-length cDNAs, the EcoRI and Hind III restriction sites. The ligation mixture is transformed, preferably by electroporation, into bacteria, which are then propagated under appropriate antibiotic selection.

[0727] Clones containing the oligonucleotide tag attached to full-length cDNAs are selected as follows.

[0728] The plasmid cDNA libraries made as described above are purified (e.g. by a column available from Qiagen). A positive selection of the tagged clones is performed as follows. Briefly, in this selection procedure, the plasmid DNA is converted to single stranded DNA using phage F1 gene II endonuclease in combination with an exonuclease (Chang et al., Gene 127:95 (1993)) such as exonuclease III or T7 gene 6 exonuclease. The resulting single stranded DNA is then purified using paramagnetic beads as described by Fry et al., Biotechniques 13: 124 (1992). Here the single stranded DNA is hybridized with a biotinylated oligonucleotide having a sequence corresponding to the 3′ end of the oligonucleotide tag. Preferably, the primer has a length of 20-25 bases. Clones including a sequence complementary to the biotinylated oligonucleotide are selected by incubation with streptavidin coated magnetic beads followed by magnetic capture. After capture of the positive clones, the plasmid DNA is released from the magnetic beads and converted into double stranded DNA using a DNA polymerase such as ThermoSequenase™ (obtained from Amersham Pharmacia Biotech). Alternatively, protocols such as the Gene Trapper™ kit (Gibco BRL) can be used. The double stranded DNA is then transformed, preferably by electroporation, into bacteria. The percentage of positive clones having the 5′ tag oligonucleotide is typically estimated to be between 90 and 98% from dot blot analysis.

[0729] Following transformation, the libraries are ordered in microtiter plates and sequenced. The Arabidopsis library was deposited at the American Type Culture Collection on Jan. 7, 2000 as “E-coli liba 010600” under the accession number PTA-1161.

### A. Example 2

### Southern Hybridizations

[0730] The SDFs of the invention are used in Southern hybridizations as described above. The following describes extraction of DNA from nuclei of plant cells, digestion of the nuclear DNA and separation by length, transfer of the separated fragments to membranes, preparation of probes for hybridization, hybridization and detection of the hybridized probe.

[0731] The procedures described herein are used to isolate related polynucleotides or for diagnostic purposes. Moderate stringency hybridization conditions, as defined above, are described in the present example. These conditions result in detection of hybridization between sequences having at least 70% sequence identity. As described above, the hybridization and wash conditions can be changed to reflect the desired percenatge of sequence identity between probe and target sequences that can be detected.

[0732] In the following procedure, a probe for hybridization is produced from two PCR reactions using two primers from genomic sequence of Arabidopsis thaliana. As described above, the particular template for generating the probe can be any desired template.

[0733] The first PCR product is assessed to validate the size of the primer to assure it is of the expected size. Then the product of the first PCR is used as a template, with the same pair of primers used in the first PCR, in a second PCR that produces a labeled product used as the probe.

[0734] Fragments detected by hybridization, or other bands of interest, are isolated from gels used to separate genomic DNA fragments by known methods for further purification and/or characterization.

Buffers for Nuclear DNA Extraction

[0735] 1. 10×HB

| | 1000 ml | |
|---|---|---|
| 40 mM spermidine | 10.2 g | Spermine (Sigma S-2876) and |
| | | spermidine (Sigma S-2501) |
| 10 mM spermine | 3.5 g | Stabilize chromatin and the |
| | | nuclear membrane |
| 0.1 M EDTA | 37.2 g | EDTA inhibits nuclease |
| (disodium) | | |
| 0.1 M Tris | 12.1 g | Buffer |
| 0.8 M KCl | 59.6 g | Adjusts ionic strength for |
| | | stability of nuclei |

[0736] Adjust pH to 9.5 with 10 N NaOH. It appears that there is a nuclease present in leaves. Use of pH 9.5 appears to inactivate this nuclease.
[0737] 2. 2 M sucrose (684 g per 1000 ml)
   [0738] Heat about half the final volume of water to about 50° C. Add the sucrose slowly then bring the mixture to close to final volume; stir constantly until it has dissolved. Bring the solution to volume.

[0739] 3. Sarkosyl solution (lyses nuclear membranes)

| | 1000 ml |
|---|---|
| N-lauroyl sarcosine (Sarkosyl) | 20.0 g |
| 0.1 M Tris | 12.1 g |
| 0.04 M EDTA (Disodium) | 14.9 g |

[0740] Adjust the pH to 9.5 after all the components are dissolved and bring up to the proper volume.
[0741] 4.20% Triton X-100
   [0742] 80 ml Triton X-100
   [0743] 320 ml 1×HB (w/o β-ME and PMSF)
   [0744] Prepare in advance; Triton takes some time to dissolve
      A. Procedure

[0745] 1. Prepare 1×“H” buffer (keep ice-cold during use)

| | 1000 ml |
|---|---|
| 10X HB | 100 ml |
| 2 M sucrose | 250 ml |
| | a non-ionic osmoticum |
| Water | 634 ml |

[0746] Added just before use:

| | |
|---|---|
| 100 mM PMSF* | 10 ml a protease inhibitor; protects nuclear |
| | membrane proteins |
| β-mercaptoethanol | 1 ml inactivates nuclease by reducing |
| | disulfide bonds |

*100 mM PMSF (phenyl methyl sulfonyl fluoride, Sigma P-7626) (add 0.0875 g to 5 ml 100% ethanol)

[0747] 2. Homogenize the tissue in a blender (use 300-400 ml of 1×HB per blender). Be sure that you use 5-10 ml of HB buffer per gram of tissue. Blenders generate heat so be sure to keep the homogenate cold. It is necessary to put the blenders in ice periodically.

[0748] 3. Add the 20% Triton X-100 (25 ml per liter of homogenate) and gently stir on ice for 20 min. This lyses plastid, but not nuclear, membranes.

[0749] 4. Filter the tissue suspension through several nylon filters into an ice-cold beaker. The first filtration is through a 250-micron membrane; the second is through an 85-micron membrane; the third is through a 50-micron membrane; and the fourth is through a 20-micron membrane. Use a large funnel to hold the filters. Filtration can be sped up by gently squeezing the liquid through the filters.

[0750] 5. Centrifuge the filtrate at 1200×g for 20 min. at 4° C. to pellet the nuclei.

[0751] 6. Discard the dark green supernatant. The pellet will have several layers to it. One is starch; it is white and gritty. The nuclei are gray and soft. In the early steps, there may be a dark green and somewhat viscous layer of chloroplasts.
[0752] Wash the pellets in about 25 ml cold H buffer (with Triton X-100) and resuspend by swirling gently and pipetting. After the pellets are resuspended pellet the nuclei again at 1200-1300×g. Discard the supernatant.
[0753] Repeat the wash 3-4 times until the supernatant has changed from a dark green to a pale green. This usually happens after 3 or 4 resuspensions. At this point, the pellet is typically grayish white and very slippery. The Triton X-100 in these repeated steps helps to destroy the chloroplasts and mitochondria that contaminate the prep.
[0754] Resuspend the nuclei for a final time in a total of 15 ml of H buffer and transfer the suspension to a sterile 125 ml Erlenmeyer flask.

[0755] 7. Add 15 ml, dropwise, cold 2% Sarkosyl, 0.1 M Tris, 0.04 M EDTA solution (pH 9.5) while swirling gently. This lyses the nuclei. The solution will become very viscous.

[0756] 8. Add 30 grams of CsCl and gently swirl at room temperature until the CsCl is in solution. The mixture will be gray, white and viscous.

[0757] 9. Centrifuge the solution at 11,400×g at 4° C. for at least 30 min. The longer this spin is, the firmer the protein pellicle.

[0758] 10. The result is typically a clear green supernatant over a white pellet, and (perhaps) under a protein pellicle. Carefully remove the solution under the protein pellicle and above the pellet. Determine the density of the solution by weighing 1 ml of solution and add CsCl if necessary to bring to 1.57 g/ml. The solution contains dissolved solids (sucrose etc) and the refractive index alone will not be an accurate guide to CsCl concentration.

[0759] 11. Add 20 μl of 10 mg/ml EtBr per ml of solution.

[0760] 12. Centrifuge at 184,000×g for 16 to 20 hours in a fixed-angle rotor.

[0761] 13. Remove the dark red supernatant that is at the top of the tube with a plastic transfer pipette and discard. Carefully remove the DNA band with another transfer pipette. The DNA band is usually visible in room light; otherwise, use a long wave UV light to locate the band.

[0762] 14. Extract the ethidium bromide (EtBr) with isopropanol saturated with water and salt. Once the solution is clear, extract at least two more times to ensure that all of the EtBr is gone. Be very gentle, as it is very easy to shear the DNA at this step. This extraction may take a while because the DNA solution tends to be very viscous. If the solution is too viscous, dilute it with TE.

[0763] 15. Dialyze the DNA for at least two days against several changes (at least three times) of TE (10 mM Tris, 1 mM EDTA, pH 8) to remove the cesium chloride.

[0764] 16. Remove the dialyzed DNA from the tubing. If the dialyzed DNA solution contains a lot of debris, centrifuge the DNA solution at least at 2500×g for 10 min. and carefully transfer the clear supernatant to a new tube. Read the A260 concentration of the DNA.
[0765] 17. Assess the quality of the DNA by agarose gel electrophoresis (1% agarose gel) of the DNA. Load 50 ng and 100 ng (based on the OD reading) and compare it with known and good quality DNA. Undigested lambda DNA and a lambda-HindIII-digested DNA are good molecular weight makers.
   Protocol for Digestion of Genomic DNA
   Protocol:

[0766] 1. The relative amounts of DNA for different crop plants that provide approximately a balanced number of genome equivalent is given in Table 3 below. Note that due to the size of the wheat genome, wheat DNA will be underrepresented. Lambda DNA provides a useful control for complete digestion.

[0767] 2. Precipitate the DNA by adding 3 volumes of 100% ethanol. Incubate at −20° C. for at least two hours. Yeast DNA can be purchased and made up at the necessary concentration, therefore no precipitation is necessary for yeast DNA.

[0768] 3. Centrifuge the solution at 11,400×g for 20 min. Decant the ethanol carefully (be careful not to disturb the pellet). Be sure that the residual ethanol is completely removed either by vacuum desiccation or by carefully wiping the sides of the tubes with a clean tissue.

[0769] 4. Resuspend the pellet in an appropriate volume of water. Be sure the pellet is fully resuspended before proceeding to the next step. This may take about 30 min.

[0770] 5. Add the appropriate volume of 10× reaction buffer provided by the manufacturer of the restriction enzyme to the resuspended DNA followed by the appropriate volume of enzymes. Be sure to mix it properly by slowly swirling the tubes.

[0771] 6. Set-up the lambda digestion-control for each DNA that you are digesting.

[0772] 7. Incubate both the experimental and lambda digests overnight at 37° C. Spin down condensation in a microfuge before proceeding.

[0773] 8. After digestion, add 2 μl of loading dye (typically 0.25% bromophenol blue, 0.25% xylene cyanol in 15% Ficoll or 30% glycerol) to the lambda-control digests and load in 1% TPE-agarose gel (TPE is 90 mM Tris-phosphate, 2 mM EDTA, pH 8). If the lambda DNA in the lambda control digests are completely digested, proceed with the precipitation of the genomic DNA in the digests.

[0774] 9. Precipitate the digested DNA by adding 3 volumes of 100% ethanol and incubating in −20° C. for at least 2 hours (preferably overnight).
[0775] EXCEPTION: Arabidopsis and yeast DNA are digested in an appropriate volume; they don't have to be precipitated.

[0776] 10. Resuspend the DNA in an appropriate volume of TE (e.g., 22 μl×50 blots=1100 μl) and an appropriate volume of 10× loading dye (e.g., 2.4 μl×50 blots=120 μl). Be careful in pipetting the loading dye—it is viscous. Be sure you are pipetting the correct volume.

TABLE 3
Some guide points in digesting genomic DNA.

| | | | Genome | |
|---|---|---|---|---|
| | | | Equivalent | |
| | | | to 2 μg | Amount |
| | | Size Relative to | Arabidopsis | of DNA |
| Species | Genome Size | Arabidopsis | DNA | per blot |
| Arabidopsis | 120 Mb | 1X | 1X | 2 μg |
| Brassica | 1,100 Mb | 9.2X | 0.54X | 10 μg |
| Corn | 2,800 Mb | 23.3X | 0.43X | 20 μg |
| Cotton | 2,300 Mb | 19.2X | 0.52X | 20 μg |
| Oat | 11,300 Mb | 94X | 0.11X | 20 μg |
| Rice | 400 Mb | 3.3X | 0.75X | 5 μg |
| Soybean | 1,100 Mb | 9.2X | 0.54X | 10 μg |
| Sugarbeet | 758 Mb | 6.3X | 0.8X | 10 μg |
| Sweetclover | 1,100 Mb | 9.2X | 0.54X | 10 μg |
| Wheat | 16,000 Mb | 133X | 0.08X | 20 μg |
| Yeast | 15 Mb | 0.12X | 1X | 0.25 μg |

Protocol for Southern Blot Analysis

[0777] The digested DNA samples are electrophoresed in 1% agarose gels in 1×TPE buffer. Low voltage, overnight separations are preferred. The gels are stained with EtBr and photographed.

[0778] 1. For blotting the gels, first incubate the gel in 0.25 N HCl (with gentle shaking) for about 15 min.

[0779] 2. Then briefly rinse with water. The DNA is denatured by 2 incubations. Incubate (with shaking) in 0.5 M NaOH in 1.5 M NaCl for 15 min.

[0780] 3. The gel is then briefly rinsed in water and neutralized by incubating twice (with shaking) in 1.5 M Tris pH 7.5 in 1.5 M NaCl for 15 min.

[0781] 4. A nylon membrane is prepared by soaking it in water for at least 5 min, then in 6×SSC for at least 15 min. before use. (20×SSC is 175.3 g NaCl, 88.2 g sodium citrate per liter, adjusted to pH 7.0.)

[0782] 5. The nylon membrane is placed on top of the gel and all bubbles in between are removed. The DNA is blotted from the gel to the membrane using an absorbent medium, such as paper toweling and 6×SCC buffer. After the transfer, the membrane may be lightly brushed with a gloved hand to remove any agarose sticking to the surface.

[0783] 6. The DNA is then fixed to the membrane by UV crosslinking and baking at 80° C. The membrane is stored at 4° C. until use.

B. Protocol for PCR Amplification of Genomic Fragments in Arabidopsis

[0784] Amplification Procedures:

[0785] 1. Mix the following in a 0.20 ml PCR tube or 96-well PCR plate:

| Volume | | Stock | Final Amount or Conc. | |
|---|---|---|---|---|
| 0.5 | μl | ˜10 ng/μl genomic DNA¹ | 5 | ng |
| 2.5 | μl | 10X PCR buffer | 20 | mM Tris, |
| | | | 50 | mM KCl |
| 0.75 | μl | 50 mM MgCl₂ | 1.5 | mM |
| 1 | μl | 10 pmol/μl Primer 1 (Forward) | 10 | pmol |
| 1 | μl | 10 pmol/μl Primer 2 (Reverse) | 10 | pmol |
| 0.5 | μl | 5 mM dNTPs | 0.1 | mM |
| 0.1 | μl | 5 units/μl Platinum Taq ™ (Life | 1 | units |
| | | Technologies, Gaithersburg, MD) | | |
| | | DNA Polymerase | | |
| (to 25 | μl) | Water | | |

¹Arabidopsis DNA is used in the present experiment, but the procedure is a general one.

[0786] 1) 94° C. for 10 min. followed by

| 2) | 3) | 4) |
|---|---|---|
| 5 cycles: | 5 cycles: | 25 cycles: |
| 94° C. - 30 sec | 94° C. - 30 sec | 94° C. - 30 sec |
| 62° C. - 30 sec | 58° C. - 30 sec | 53° C. - 30 sec |
| 72° C. - 3 min | 72° C. - 3 min | 72° C. - 3 min |

[0787] 5) 72° C. for 7 min. Then the reactions are stopped by chilling to 4° C.

[0788] The procedure can be adapted to a multi-well format if necessary.

Quantification and Dilution of PCR Products:

[0789] 1. The product of the PCR is analyzed by electrophoresis in a 1% agarose gel. A linearized plasmid DNA can be used as a quantification standard (usually at 50, 100, 200, and 400 ng). These will be used as references to approximate the amount of PCR products. HindIII-digested Lambda DNA is useful as a molecular weight marker. The gel can be run fairly quickly; e.g., at 100 volts. The standard gel is examined to determine that the size of the PCR products is consistent with the expected size and if there are significant extra bands or smeary products in the PCR reactions.

[0790] 2. The amounts of PCR products are estimated on the basis of the plasmid standard.

[0791] 3. For the small number of reactions that produce extraneous bands, a small amount of DNA from bands with the correct size can be isolated by dipping a sterile 10-μl tip into the band while viewing though a UV Transilluminator. The small amount of agarose gel (with the DNA fragment) is used in the labeling reaction.

C. Protocol For PCR-DIG-Labeling of DNA

Solutions:

[0792] Reagents in PCR reactions (diluted PCR products, 10×PCR Buffer, 50 mM MgCl₂, 5 U/μl Platinum Taq Polymerase, and the primers)

[0793] 10× dNTP+DIG-1 l-dUTP [1:5]: (2 mM dATP, 2 mM dCTP, 2 mM dGTP, 1.65 mM dTTP, 0.35 mM DIG-1 l-dUTP)

[0794] 10× dNTP+DIG-11-dUTP [1:10]: (2 mM dATP, 2 mM dCTP, 2 mM dGTP, 1.81 mM dTTP, 0.19 mM DIG-11-dUTP)

[0795] 10× dNTP+DIG-11-dUTP [1:15]: (2 mM dATP, 2 mM dCTP, 2 mM dGTP, 1.875 mM dTTP, 0.125 mM DIG-11-dUTP)

[0796] TE buffer (10 mM Tris, 1 mM EDTA, pH 8)

[0797] Maleate buffer: In 700 ml of deionized distilled water, dissolve 11.61 g maleic acid and 8.77 g NaCl. Add NaOH to adjust the pH to 7.5. Bring the volume to 1 L. Stir for 15 min. and sterilize.

[0798] 10% blocking solution: In 80 ml deionized distilled water, dissolve 1.16 g maleic acid. Next, add NaOH to adjust the pH to 7.5. Add 10 g of the blocking reagent powder (Boehringer Mannheim, Indianapolis, Ind., Cat. no. 1096176). Heat to 60° C. while stirring to dissolve the powder. Adjust the volume to 100 ml with water. Stir and sterilize.

[0799] 1% blocking solution: Dilute the 10% stock to 1% using the maleate buffer.

[0800] Buffer 3 (100 mM Tris, 100 mM NaCl, 50 mM MgCl₂, pH9.5). Prepared from autoclaved solutions of 1M Tris pH 9.5, 5 M NaCl, and 1 M MgCl₂ in autoclaved distilled water.

Procedure:

[0801] 1. PCR reactions are performed in 25 μl volumes containing:

| | |
|---|---|
| PCR buffer | 1X |
| MgCl₂ | 1.5 mM |
| 10X dNTP + DIG-11-dUTP | 1X (please see the note below) |
| Platinum Taq ™ Polymerase | 1 unit |
| 10 pg probe DNA | |
| 10 pmol primer 1 | |

| | |
|---|---|
| Note: | |
| | Use for: |
| 10X dNTP + DIG-11-dUTP (1:5) | <1 kb |
| 10X dNTP + DIG-11-dUTP (1:10) | 1 kb to 1.8 kb |
| 10X dNTP + DIG-11-dUTP (1:15) | >1.8 kb |

[0802] 2. The PCR reaction uses the following amplification cycles:

[0803] 1) 94° C. for 10 min.

| 2) | 3) | 4) |
|---|---|---|
| 5 cycles: | 5 cycles: | 25 cycles: |
| 95° C. - 30 sec | 95° C. - 30 sec | 95° C. - 30 sec |
| 61° C. - 1 min | 59° C. - 1 min | 51° C. - 1 min |
| 73° C. - 5 min | 75° C. - 5 min | 73° C. - 5 min |

[0804] 5) 72° C. for 8 min. The reactions are terminated by chilling to 4° C. (hold).

[0805] 3. The products are analyzed by electrophoresis- in a 1% agarose gel, comparing to an aliquot of the unlabelled probe starting material.

[0806] 4. The amount of DIG-labeled probe is determined as follows:

[0807] Make serial dilutions of the diluted control DNA in dilution buffer (TE: 10 mM Tris and 1 mM EDTA, pH 8) as shown in the following table:

| DIG-labeled control | | | Final Conc. (Dilution | |
|---|---|---|---|---|
| DNA starting conc. | | Stepwise Dilution | Name) | |
| 5 | ng/μl | 1 μl in 49 μl TE | 100 | pg/μl (A) |
| 100 | pg/μl (A) | 25 μl in 25 μl TE | 50 | pg/μl (B) |
| 50 | pg/μl (B) | 25 μl in 25 μl TE | 25 | pg/μl (C) |
| 25 | pg/μl (C) | 20 μl in 30 μl TE | 10 | pg/μl (D) |

[0808] a. Serial deletions of a DIG-labeled standard DNA ranging from 100 pg to 10 pg are spotted onto a positively charged nylon membrane, marking the membrane lightly with a pencil to identify each dilution.
[0809] b. Serial dilutions (e.g., 1:50, 1:2500, 1:10,000) of the newly labeled DNA probe are spotted.
[0810] c. The membrane is fixed by UV crosslinking.
[0811] d. The membrane is wetted with a small amount of maleate buffer and then incubated in 1% blocking solution for 15 min at room temp.
[0812] e. The labeled DNA is then detected using alkaline phosphatase conjugated anti-DIG antibody (Boehringer Mannheim, Indianapolis, Ind., cat. no. 1093274) and an NBT substrate according to the manufacture's instruction.
[0813] f. Spot intensities of the control and experimental dilutions are then compared to estimate the concentration of the PCR-DIG-labeled probe.
   D. Prehybridization and Hybridization of Southern Blots

[0814] Solutions:

| | |
|---|---|
| 100% Formamide | purchased from Gibco |
| 20× SSC | (1× = 0.15 M NaCl, |
| | 0.015 M Na₃citrate) |
| per L: | 175 g NaCl |
| | 87.5 g Na₃citrate.2H₂O |
| 20% Sarkosyl (N- | |
| lauroyl-sarcosine) | |
| 20% SDS (sodium | |
| dodecyl sulphate) | |
| 10% Blocking Reagent: | In 80 ml deionized |
| | distilled water, dissolve 1.16 g maleic acid. |
| | Next, add NaOH toadjust the pH to 7.5. Add |
| | 10 g of the blocking reagent powder. |
| | Heat to 60° C. while stirring to dissolve the |
| | powder. Adjust the volume to 100 ml |
| | with water. Stir and sterilize. |

[0815] Prehybridization Mix:

| Final | | Volume | |
|---|---|---|---|
| Concentration | Components | (per 100 ml) | Stock |
| 50% | Formamide | 50 ml | 100% |
| 5× | SSC | 25 ml | 20× |
| 0.1% | Sarkosyl | 0.5 ml | 20% |
| 0.02% | SDS | 0.1 ml | 20% |
| 2% | Blocking Reagent | 20 ml | 10% |
| | Water | 4.4 ml | |

General Procedures:

[0816] 1. Place the blot in a heat-sealable plastic bag and add an appropriate volume of prehybridization solution (30 ml/100 cm²) at room temperature. Seal the bag with a heat sealer, avoiding bubbles as much as possible. Lay down the bags in a large plastic tray (one tray can accommodate at least 4-5 bags). Ensure that the bags are lying flat in the tray so that the prehybridization solution is evenly distributed throughout the bag. Incubate the blot for at least 2 hours with gentle agitation using a waver shaker.

[0817] 2. Denature DIG-labeled DNA probe by incubating for 10 min. at 98° C. using the PCR machine and immediately cool it to 4° C.

[0818] 3. Add probe to prehybridization solution (25 ng/ml; 30 ml=750 ng total probe) and mix well but avoid foaming. Bubbles may lead to background.

[0819] 4. Pour off the prehybridization solution from the hybridization bags and add new prehybridization and probe solution mixture to the bags containing the membrane.

[0820] 5. Incubate with gentle agitation for at least 16 hours.

[0821] 6. Proceed to medium stringency post-hybridization wash:
[0822] Three times for 20 min. each with gentle agitation using 1×SSC, 1% SDS at 60° C.
[0823] All wash solutions must be prewarmed to 60° C. Use about 100 ml of wash solution per membrane.
[0824] To avoid background keep the membranes fully submerged to avoid drying in spots;
[0825] agitate sufficiently to avoid having membranes stick to one another.

[0826] 7. After the wash, proceed to immunological detection and CSPD development.

E. Procedure for Immunological Detection With CSPD

Solutions:

[0827] Buffer 1: Maleic acid buffer (0.1 M maleic acid, 0.15 M NaCl; adjusted to pH 7.5 with NaoH)

[0828] Washing buffer: Maleic acid buffer with 0.3% (v/v) Tween 20.

| | |
|---|---|
| Buffer 1: | Maleic acid buffer (0.1 M maleic acid, 0.15 M |
| | NaCl; adjusted to pH 7.5 with NaoH) |
| Washing buffer: | Maleic acid buffer with 0.3% (v/v) Tween 20. |
| Blocking stock solution | 10% blocking reagent in buffer 1. Dissolve |
| | (10× concentration): blocking reagent powder |
| | (Boehringer Mannheim, Indianapolis, IN, cat. |
| | no. 1096176) by constantly stirring on a 65° C. |
| | heating block or heat in a |
| | microwave, autoclave and store at 4° C. |
| Buffer 2 | Dilute the stock solution 1:10 in Buffer 1. |
| (1× blocking solution): | |
| Detection buffer: | 0.1 M Tris, 0.1 M NaCl, pH 9.5 |

Procedure:

[0829] 1. After the post-hybridization wash the blots are briefly rinsed (1-5 min.) in the maleate washing buffer with gentle shaking.

[0830] 2. Then the membranes are incubated for 30 min. in Buffer 2 with gentle shaking.

[0831] 3. Anti-DIG-AP conjugate (Boehringer Mannheim, Indianapolis, Ind., cat. no. 1093274) at 75 mU/ml (1:10,000) in Buffer 2 is used for detection. 75 ml of solution can be used for 3 blots.

[0832] 4. The membrane is incubated for 30 min. in the antibody solution with gentle shaking.

[0833] 5. The membrane are washed twice in washing buffer with gentle shaking. About 250 mls is used per wash for 3 blots.

[0834] 6. The blots are equilibrated for 2-5 min in 60 ml detection buffer.

[0835] 7. Dilute CSPD (1:200) in detection buffer. (This can be prepared ahead of time and stored in the dark at 4° C.).
[0836] The following steps must be done individually. Bags (one for detection and one for exposure) are generally cut and ready before doing the following steps.

[0837] 8. The blot is carefully removed from the detection buffer and excess liquid removed without drying the membrane. The blot is immediately placed in a bag and 1.5 ml of CSPD solution is added. The CSPD solution can be spread over the membrane. Bubbles present at the edge and on the surface of the blot are typically removed by gentle rubbing. The membrane is incubated for 5 min. in CSPD solution.

[0838] 9. Excess liquid is removed and the membrane is blotted briefly (DNA side up) on Whatman 3MM paper. Do not let the membrane dry completely.

[0839] 10. Seal the damp membrane in a hybridization bag and incubate for 10 min at 37° C. to enhance the luminescent reaction.

[0840] 11. Expose for 2 hours at room temperature to X-ray film. Multiple exposures can be taken. Luminescence continues for at least 24 hours and signal intensity increases during the first hours.

### Example 3

### Microarray Experiments and Results

1. Sample Tissue Preparation

(a) Abscissic Acid (ABA)

[0841] Seeds of Arabidopsis thaliana (ecotype Wassilewskija) are sown in trays and left at 4° C. for 4 days to vernalize. They are then transferred to a growth chamber having grown 16 hr light/8 hr dark, 13,000 LUX, 70% humidity, and 20° C. and watered twice a week with 1 L of 1× Hoagland's solution. Approximately 1,000 14 day old plants are sprayed with 200-250 mls of 100 μM ABA in a 0.02% solution of the detergent Silwet L-77. Whole seedlings, including roots, are harvested within a 15 to 20 minute time period at 1 hr and 6 hr after treatment, flash-frozen in liquid nitrogen and stored at −80° C.

[0842] Seeds of maize hybrid 35A (Pioneer) are sown in water-moistened sand in flats (10 rows, 5-6 seed/row) and covered with clear, plastic lids before being placed in a growth chamber having 16 hr light (25° C.)/8 hr dark (20° C.), 75% relative humidity and 13,000-14,000 LUX. Covered flats are watered every three days for 7 days. Seedlings are carefully removed from the sand and placed in 1-liter beakers with 100 μM ABA for treatment. Control plants are treated with water. After 6 hr and 24 hr, aerial and root tissues are separated and flash frozen in liquid nitrogen prior to storage at −80° C.

(b) Ap2

[0843] Seeds of Arabidopsis thaliana (ecotype Landesberg erecta) and floral mutant apetala2 (Jofuku et al., 1994, Plant Cell 6:1211-1225) are sown in pots and left at 4° C. for two to three days to vernalize. They are then transferred to a growth chamber. Plants are grown under long-day (16 hr light, 8 hr dark) conditions 7000-8000 LUX light intensity, 70% humidity and 22° C. temperature. Inflorescences containing immature floral buds (stages 1-7; Bowman, 1994) as wel as the inflorescence meristem are harvested and flashfrozen. Polysomal polyA+ RNA is isolated from tissue according to Cox and Goldberg, 1988).

(c) Ovules(Ler-pi)

[0844] Seeds of Arabidopsis thaliana heterozygous for pistillata (pi) (ecotype Landsberg erecta (Ler)) are sown in pots and left at 4° C. for two to three days to vernalize. They are then transferred to a growth chamber. Plants are grown under long-day (16 hr light: 8 hr dark) conditions, 7000-8000 LUX light intensity, 76% humidity, and 24° C. temperature. Inflorescences are harvested from seedlings about 40 days old. The inflorescences are cut into small pieces and incubated in the following enzyme solution (pH 5) at room temperature for 0.5-1 hr.: 0.2% pectolyase Y-23, 0.04% pectinase, 5 mM MES, 3% Sucrose and MS salts (1900 mg/l KNO₃, 1650 mg/l NH₄NO₃, 370 mg/l MgSO₄.7H₂O, 170 mg/l KH₂PO₄, 440 mg/l CaCl₂.2H₂O, 6.2 mg/l H₂BO₃, 15.6 mg/l MnSO₄.4H₂O, 8.6 mg/l ZnSO₄.7H₂O, 0.25 mg/l NaMoO₄.2H₂O, 0.025 mg/l CuCO₄.5H₂O, 0.025 mg/l CoCl₂.6H₂O, 0.83 mg/l KI, 27.8 mg/l FeSO₄.7H₂O, 37.3 mg/l Disodium EDTA, pH 5.8). At the end of the incubation the mixture of inflorescence material and enzyme solution is passed through a size 60 sieve and then through a sieve with a pore size of 125 μm. Ovules greater than 125 μm in diameter are collected, rinsed twice in B5 liquid medium (2500 mg/l KNO₃, 250 mg/l MgSO₄.7H₂O, 150 mg/l NaH2PO4. H₂O, 150 mg/l CaCl₂.2H₂O, 134 mg/i (NH4)2 CaCl₂.SO₄, 3 mg/i H₂BO₃, 10 mg/l MnSO₄.4H₂O, 2ZnSO₄.7H₂O, 0.25 mg/l NaMoO₄.2H₂O, 0.025 mg/l CuCO₄.5H₂O, 0.025 mg/l CoCl₂.6H₂O, 0.75 mg/l KI, 40 mg/l EDTA sodium ferric salt, 20 g/l sucrose, 10 mg/l Thiamine hydrochloride, 1 mg/l Pyridoxine hydrochloride, 1 mg/l Nicotinic acid, 100 mg/l myo-inositol, pH 5.5)), rinsed once in deionized water and flash frozen in liquid nitrogen. The supernatant from the 125 μm sieving is passed through subsequent sieves of 50 μm and 32 μm. The tissue retained in the 32 μm sieve is collected and mRNA prepared for use as a control.

(d) Brassinosteroid Responsive (Br, Bz)

[0845] Two separate experiments are performed, one with epi-brassinolide and one with the brassinosteroid biosynthetic inhibitor brassinazole.

[0846] In the epi-brassinolide experiments, seeds of wild-type Arabidopsis thaliana (ecotype Wassilewskija) and the brassinosteroid biosynthetic mutant dwf4-1 are sown in trays and left at 4° C. for 4 days to vernalize. They are then transferred to a growth chamber having 16 hr light/8 hr dark, 11,000 LUX, 70% humidity and 22° C. temperature. Four week old plants are spayed with a 1 μM solution of epi-brassinolide and shoot parts (unopened floral primordia and shoot apical meristems) harvested three hours later. Tissue is flash-frozen in liquid nitrogen and stored at −80° C.

[0847] In the brassinazole experiments, seeds of wild-type Arabidopsis thaliana (ecotype Wassilewskija) are grown as described above. Four week old plants are sprayed with a 1 μM solution of brassinazole and shoot parts (unopened floral primordia and shoot apical meristems) harvested three hours later. Tissue is flash-frozen in liquid nitrogen and stored at −80° C.

[0848] In addition to the spray experiments, tissue is prepared from two different mutants; (1) a dwf4-1 knock out mutant and (2) a mutant overexpressing the dwf4-1 gene

[0849] Seeds of wild-type Arabidopsis thaliana (ecotype Wassilewskija) and of the dwf4-1 knock out and overexpressor mutants are sown in trays and left at 4° C. for 4 days to vernalize. They are then transferred to a growth chamber having 16 hr light/8 hr dark, 11,000 LUX, 70% humidity and 22° C. temperature. Tissue from shoot parts (unopened floral primordia and shoot apical meristems) is flash-frozen in liquid nitrogen and stored at −80° C.

[0850] Another experiment is completed with seeds of Arabidopsis thaliana (ecotype Wassilewskija) that are sown in trays and left at 4° C. for 4 days to vernalize. They are then transferred to a growth chamber. Plants are grown under long-day (16 hr light: 8 hr. dark) conditions, 13,000 LUX light intensity, 70% humidity, 20° C. temperature and watered twice a week with 1 L 1× Hoagland's solution (recipe recited in Feldmann et al., (1987) Mol. Gen. Genet. 208: 1-9 and described as complete nutrient solution). Approximately 1,000 14 day old plants are spayed with 200-250 mls of 0.1 μM Epi-Brassinolite in 0.02% solution of the detergent Silwet L-77. At 1 hr. and 6 hrs. after treatment aerial tissues are harvested within a 15 to 20 minute time period and flash-frozen in liquid nitrogen.

[0851] Seeds of maize hybrid 35A (Pioneer) are sown in water-moistened sand in flats (10 rows, 5-6 seed/row) and covered with clear, plastic lids before being placed in a growth chamber having 16 hr light (25° C.)/8 hr dark (20° C.), 75% relative humidity and 13,000-14,000 LUX. Covered flats are watered every three days for 7 days. Seedlings are carefully removed from the sand and placed in 1-liter beakers with 0.1 μM epi-brassinolide for treatment. Control plants are treated with distilled deionized water. After 24 hr, aerial and root tissues are separated and flash frozen in liquid nitrogen prior to storage at −80° C.

(e) CS6630

[0852] Arabidopsis thaliana (ecotype Wassilewskija) seeds are vernalized at 4° C. for 3 days before sowing on MS media (1%) sucrose on bactor-agar. Roots and shoots are separated 14 days after germination, flash frozen in liquid nitrogen and stored at −80° C.

(f) CS6632 Shoots-Roots

[0853] Seedlings are grown on regular MS (1% sucrose) bacto-agar. 14 day old seedlings (days after germination) roots and shoots were separated nand flash frozen in liquid N₂.

(g) Cold (8 deg)

[0854] Sterilized Arabidopsis thaliana (ecotype Wassilewskija) seeds are kept at 4° C. in dark for three days and carefully spread on 0.5×MS plates by dispersing ˜300-500 seeds on agar surface. Plates are left to dry in the hood for 15-20 min. and then sealed with micropore tape. Plates are placed in a Percival growth chamber set at 22 C, 16 h light/8 h dark. By day 7 (9 AM), half of plates are moved into another Percival growth chamber whose setting is identical to the previous one except that the temperature is set to 8° C. Plants are gently pulled out from plates and harvested/frozen at 2 hrs, 4 hrs, 8 hrs, 2 days, 4 days, 7 days, 9 days and 11 days after transfer. Samples kept in the 22° C. chamber are harvested at the same time as the cold-treated samples.

(h) Cold Shock Treatment (4 deg)

[0855] Seeds of Arabidopsis thaliana (ecotype Wassilewskija) are sown in trays and left at 4° C. for three days to vernalize before being transferred to a growth chamber having 16 hr light/8 hr dark, 12,000-14,000 LUX, 20° C. and 70% humidity. Fourteen day old plants are transferred to a 4° C. dark growth chamber and aerial tissues are harvested 1 hour and 6 hours later. Control plants are maintained at 20° C. and covered with foil to avoid exposure to light. Tissues are flash-frozen in liquid nitrogen and stored at −80° C.

[0856] Seeds of maize hybrid 35A (Pioneer) are sown in water-moistened sand in flats (10 rows, 5-6 seed/row) and covered with clear, plastic lids before being placed in a growth chamber having 16 hr light (25° C.)/8 hr dark (20° C.), 75% relative humidity and 13,000-14,000 LUX. Covered flats are watered every three days for 7 days. Seedlings are carefully removed from the sand and placed in 1-liter beakers containing 4° C. water for treatment. Control plants are treated with water at 25° C. After 1 hr and 6 hr aerial and root tissues are separated and flash frozen in liquid nitrogen prior to storage at −80° C.

(i) Cytokinin (BA)

[0857] Seeds of Arabidopsis thaliana (ecotype Wassilewskija) are sown in trays and left at 4° C. for 4 days to vernalize. They are then transferred to a growth chamber having 16 hr light/8 hr dark, 13,000 LUX, 70% humidity, 20° C. temperature and watered twice a week with 1 L of 1× Hoagland's solution. Approximately 1,000 14 day old plants are spayed with 200-250 mls of 100 μM BA in a 0.02% solution of the detergent Silwet L-77. Aerial tissues (everything above the soil line) are harvested within a 15 to 20 minute time period 1 hr and 6 hrs after treatment, flash-frozen in liquid nitrogen and stored at −80° C.

[0858] Seeds of maize hybrid 35A (Pioneer) are sown in water-moistened sand in flats (10 rows, 5-6 seed/row) and covered with clear, plastic lids before being placed in a growth chamber having 16 hr light (25° C.)/8 hr dark (20° C.), 75% relative humidity and 13,000-14,000 LUX. Covered flats were watered every three days for 7 days. Seedlings are carefully removed from the sand and placed in 1-liter beakers with 100 μM BA for treatment. Control plants are treated with water. After 6 hr, aerial and root tissues are separated and flash frozen in liquid nitrogen prior to storage at −80° C.

(i) Diversity Expt

[0859] Sterilized and wild-type Arabidopsis thaliana seeds (ecotype Wassilewskija) and wild-type Arabis holboellii seeds are sown in MS boxes (0.5% sucrose, 1.5% agar) after 3 day-cold treatment. The boxes are placed horizontally in a Percival growth chamber (16:8 light cycles, 22° C.) so that hypocotyls grow upward. The hypocotyls are harvested after 7 d in the chamber, flash-frozen in liquid nitrogen and stored at −80° C.

(j) Drought Reproduction

[0860] Arabidopsis thaliana (ecotype Wassilewskija) seeds are kept at 4° C. in dark for three days and then sown in soil mix (Metromix 200) with a regular watering schedule (1.5-2 L per flat per week). Drought treatment by withholding water starts when plants are 30-days-old. The control samples are watered as before. Rosettes, flowers (with siliques less than 5 mm) and siliques (>5 mm) are harvested separately on day 5, 7 and 10 post-drought-treatment (PDT). By day 10 PDT, the majority of drought plants are wilted and unable to recover after re-watering and the experiment is terminated. The samples are harvested between 2-5 PM. Plants are grown in a walk-in growth chamber under these conditions: 16 h light/8 hr dark, 70% relative humidity, 20° C. light/18° C. dark for the first 10 days, and under 22° C. light/20° C. dark for the following days.

(i) Drought Stress

[0861] Seeds of Arabidopsis thaliana (ecotype Wassilewskija) are sown in pots and left at 4° C. for three days to vernalize before being transferred to a growth chamber having 16 hr light/8 hr dark, 150,000-160,000 LUX, 20° C. and 70% humidity. After 14 days, aerial tissues are cut and left to dry on 3MM Whatman paper in a petri-plate for 1 hour and 6 hours. Aerial tissues exposed for 1 hour and 6 hours to 3 MM Whatman paper wetted with 1× Hoagland's solution serve as controls. Tissues are harvested, flash-frozen in liquid nitrogen and stored at −80° C.

[0862] Alternatively, Arabidopsis thaliana (ecotype Wassilewskija) seed is vernalized at 4° C. for 3 days before sowing in Metromix soil type 350. Flats are placed in a growth chamber with 23° C., 16 hr light/8 hr. dark, 80% relative humidity, ˜13,000 LUX for germination and growth. Plants are watered with 1-1.5 L of water every four days. Watering is stopped 16 days after germination for the treated samples, but continues for the control samples. Rosette leaves and stems, flowers and siliques are harvested 2 d, 3 d, 4 d, 5 d, 6 d and 7 d after watering is stopped. Tissue is flash frozen in liquid nitrogen and kept at −80° C. until RNA is isolated. Flowers and siliques are also harvested on day 8 from plants that had undergone a 7 d drought treatment followed by 1 day of watering. Control plants (whole plants) are harvested after 5 weeks, flash frozen in liquid nitrogen and stored as above.

[0863] Seeds of maize hybrid 35A (Pioneer) are sown in water-moistened sand in flats (10 rows, 5-6 seed/row) and covered with clear, plastic lids before being placed in a growth chamber having 16 hr light (25° C.)/8 hr dark (20° C.), 75% relative humidity and 13,000-14,000 LUX. Covered flats are watered every three days for 7 days. Seedlings are carefully removed from the sand and placed in empty 1-liter beakers at room temperature for treatment. Control plants are placed in water. After 1 hr, 6 hr, 12 hr and 24 hr aerial and root tissues are separated and flash frozen in liquid nitrogen prior to storage at −80° C.

(k) Far-Red-Enriched-Adult

[0864] Wildtype Arabidopsis thaliana (ecotype Columbia) seeds are planted on soil and vernalized for 4 days at 4° C. Soil sown plants are grown in a growth room (16 h light/8 h dark, 22° C.; 4 bulbs total alternating Gro-Lux and cool whites); light measurements are as follows: Red=330.9 μW/cm², Blue=267 μW/cm², Far Red=56.1 μW/cm². At 4 weeks after germination, the soil pots are transferred to shade environment (16 h light/8 h dark; Red=376 μW/cm², Blue=266 μW/cm², Far Red=552 μW/cm²) for various durations of exposure time (1, 4, 8, 16, 24, 48, and 72 hrs). After timed exposure, above ground tissue is flash frozen with liquid nitrogen and stored at −80° C. Control seedlings are not transferred, but are collected at the same time as corresponding shade-exposed experimental samples.

(l) Far-Red-Induction

[0865] Seeds from wildtype Arabidopsis thaliana (ecotype Columbia) are vernalized in sterile water for 4 days at 4° C. prior to planting. Seeds are then sterilized and evenly planted on 0.5% sucrose MS media plates. Plates are sealed with Scotch micropore tape to allow for gas exchange and prevent contamination. Plates are grown in a growth room (16 h light/8 h dark, 22° C.; 6 bulbs total Gro-Lux); light measurements are as follows: Red=646.4 μW/cm², Blue=387 μW/cm², Far Red=158.7 μW/cm². At 7 days after germination, the plates containing the seedlings are transferred to Far Red light only (Far Red=525 μW/cm²) for various durations of exposure time (1, 4, 8, and 24 hrs). After timed exposure, tissue is flash frozen with liquid nitrogen and stored at −80° C. Control seedlings are not transferred, but are collected at same time as the corresponding far-red exposed experimental samples.

(m) Flowers (Green, White or Buds)

[0866] Approximately 10 μl of Arabidopsis thaliana seeds (ecotype Wassilewskija) are sown on 350 soil (containing 0.03% marathon) and vernalized at 4 C for 3 days. Plants are then grown at room temperature under fluorescent lighting until flowering. Flowers are harvested after 28 days in three different categories. Buds that had not opened at all and are completely green are categorized as “flower buds” (also referred to as green buds by the investigator). Buds that had started to open, with white petals emerging slightly are categorized as “green flowers” (also referred to as white buds by the investigator). Flowers that are mostly opened (with no silique elongation) with white petals completely visible are categorized as “white flowers” (also referred to as open flowers by the investigator). Buds and flowers are harvested with forceps, flash frozen in liquid nitrogen and stored at −80° C. until RNA is isolated.

(n) Germination

[0867] Arabidopsis thaliana seeds (ecotype Wassilewskija) is sterilized in bleach and rinsed with sterile water. The seeds are placed in 100 mm petri plates containing soaked autoclaved filter paper. Plates are foil-wrapped and left at 4° C. for 3 nights to vernalize. After cold treatment, the foil is removed and plates are placed into a growth chamber having 16 hr light/8 hr dark cycles, 23° C., 70% relative humidity and ˜11,000 lux. Seeds are collected 1 d, 2 d, 3 d and 4 d later, flash frozen in liquid nitrogen and stored at −80° C. until RNA is isolated.

(o) Guard Cells

[0868] Arabidopsis thaliana (ecotype Wassilewskija) seeds are vernalized at 4° C. for 3 days before sowing. Leaves are harvested, homogenized and centrifuged to isolate the guard cell containing fraction. Homogenate from leaves served as the control. Samples are flash frozen in liquid nitrogen and stored at −80° C. Identical experiments using leaf tissue from canola are performed.

(p) Heat Shock Treatment

[0869] Seeds of Arabidopsis thaliana (ecotype Wassilewskija) are sown in trays and left at 4° C. for three days to vernalize before being transferred to a growth chamber with 16 hr light/8 hr dark, 12,000-14,000 LUX, 70% humidity and 20° C., fourteen day old plants are transferred to a 42° C. growth chamber and aerial tissues are harvested 1 hr and 6 hr after transfer. Control plants are left at 20° C. and aerial tissues are harvested. Tissues are flash-frozen in liquid nitrogen and stored at −80° C.

[0870] Seeds of maize hybrid 35A (Pioneer) are sown in water-moistened sand in flats (10 rows, 5-6 seed/row) and covered with clear, plastic lids before being placed in a growth chamber having 16 hr light (25° C.)/8 hr dark (20° C.), 75% relative humidity and 13,000-14,000 LUX. Covered flats are watered every three days for 7 days. Seedlings are carefully removed from the sand and placed in 1-liter beakers containing 42° C. water for treatment. Control plants are treated with water at 25° C. After 1 hr and 6 hr aerial and root tissues are separated and flash frozen in liquid nitrogen prior to storage at −80° C.

(q) Herbicide Treatment

[0871] Arabidopsis thaliana (ecotype Wassilewskija) seeds are sterilized for 5 min. with 30% bleach, 50 μl Triton in a total volume of 50 ml. Seeds are vernalized at 4° C. for 3 days before being plated onto GM agar plates at a density of about 144 seeds per plate. Plates are incubated in a Percival growth chamber having 16 hr light/8 hr dark, 80% relative humidity, 22° C. and 11,000 LUX for 14 days.

[0872] Plates are sprayed (˜0.5 mls/plate) with water, Finale (1.128 g/L), Glean (1.88 g/L), RoundUp (0.01 g/L) or Trimec (0.08 g/L). Tissue is collected and flash frozen in liquid nitrogen at the following time points: 0, 1, 2, 4, 8, 12, and 24 hours. Frozen tissue is stored at −80° C. prior to RNA isolation.

(r) Imbibed Seed

[0873] Seeds of maize hybrid 35A (Pioneer) are sown in water-moistened sand in covered flats (10 rows, 5-6 seed/row) and covered with clear, plastic lids before being placed in a growth chamber having 16 hr light (25° C.)/8 hr dark (20° C.), 75% relative humidity and 13,000-14,000 LUX. One day after sowing, whole seeds are flash frozen in liquid nitrogen prior to storage at −80° C. Two days after sowing, embryos and endosperm are isolated and flash frozen in liquid nitrogen prior to storage at −80° C. On days 3-6, aerial tissues, roots and endosperm are isolated and flash frozen in liquid nitrogen prior to storage at −80° C.

(s) Interploidy Crosses

[0874] Interploidy crosses involving a 6× parent are lethal. Crosses involving a 4× parent are complete and analyzed. The imbalance in the maternal/paternal ratio produced from the cross can lead to big seeds. Arabidopsis thaliana (ecotype Wassilewskija) seeds are vernalized at 4° C. for 3 days before sowing. Small siliques are harvested at 5 days after pollination, flash frozen in liquid nitrogen and stored at −80° C.

(t) Line Comparisons

[0875] Alkaloid 35S over-expressing lines are used to monitor the expression levels of terpenoid/alkaloid biosynthetic and P450 genes to identify the transcriptional regulatory points in the biosynthesis pathway and the related P450 genes. Arabidopsis thaliana (ecotype Wassilewskija) seeds are vernalized at 4° C. for 3 days before sowing in vermiculite soil (Zonolite) supplemented by Hoagland solution. Flats are placed in Conviron growth chambers under long day conditions (16 hr light, 23° C./8 hr dark, 20° C.). Basta spray and selection of the overexpressing lines is conducted about 2 weeks after germination. Approximately 2-3 weeks after bolting (approximately 5-6 weeks after germination), aerial portions (e.g. stem and siliques) from the over-expressing lines and from wild-type plants are harvested, flash frozen in liquid nitrogen and stored at −80° C.

(u) Methyl Jasmonate (MeJ)

[0876] Seeds of Arabidopsis thaliana (ecotype Wassilewskija) are sown in trays and left at 4° C. for 4 days to vernalize before being transferred to a growth chamber having 16 hr light/8 hr. dark, 13,000 LUX, 70% humidity, 20° C. temperature and watered twice a week with 1 L of a 1× Hoagland's solution. Approximately 1,000 14 day old plants are sprayed with 200-250 mls of 0.001% methyl jasmonate in a 0.02% solution of the detergent Silwet L-77. At 1 hr and 6 hrs after treatment, whole seedlings, including roots, are harvested within a 15 to 20 minute time period, flash-frozen in liquid nitrogen and stored at −80° C.

[0877] Seeds of maize hybrid 35A (Pioneer) are sown in water-moistened sand in flats (10 rows, 5-6 seed/row) and covered with clear, plastic lids before being placed in a growth chamber having 16 hr light (25° C.)/8 hr dark (20° C.), 75% relative humidity and 13,000-14,000 LUX. Covered flats are watered every three days for 7 days. Seedlings are carefully removed from the sand and placed in 1-liter beakers with 0.001% methyl jasmonate for treatment. Control plants are treated with water. After 24 hr, aerial and root tissues are separated and flash frozen in liquid nitrogen prior to storage at −80° C.

(v) Nitric Oxide Treatment (Nanp)

[0878] Seeds of Arabidopsis thaliana (ecotype Wassilewskija) are sown in trays and left at 4° C. for three days to vernalize before being transferred to a growth chamber having 16 hr light/8 hr dark, 12,000-14,000 LUX, 20° C. and 70% humidity. Fourteen day old plants are sprayed with 5 mM sodium nitroprusside in a 0.02% Silwett L-77 solution. Control plants are sprayed with a 0.02% Silwett L-77 solution. Aerial tissues are harvested 1 hour and 6 hours after spraying, flash-frozen in liquid nitrogen and stored at −80° C.

[0879] Seeds of maize hybrid 35A (Pioneer) are sown in water-moistened sand in flats (10 rows, 5-6 seed/row) and covered with clear, plastic lids before being placed in a growth chamber having 16 hr light (25° C.)/8 hr dark (20° C.), 75% relative humidity and 13,000-14,000 LUX. Covered flats are watered every three days for 7 days. Seedlings are carefully removed from the sand and placed in 1-liter beakers with 5 mM nitroprusside for treatment. Control plants are treated with water. After 1 hr, 6 hr and 12 hr, aerial and root tissues are separated and flash frozen in liquid nitrogen prior to storage at −80° C.

(w) Nitrogen: Low to High

[0880] Arabidopsis thaliana (ecotype Wassilewskija) seeds are sown on flats containing 4 L of a 1:2 mixture of Grace Zonolite vermiculite and soil. Flats are watered with 3 L of water and vernalized at 4° C. for five days. Flats are placed in a Conviron growth chamber having 16 hr light/8 hr dark at 20° C., 80% humidity and 17,450 LUX. Flats are watered with approximately 1.5 L of water every four days. Mature, bolting plants (24 days after germination) are bottom treated with 2 L of either a control (100 mM mannitol pH 5.5) or an experimental (50 mM ammonium nitrate, pH 5.5) solution. Roots, leaves and siliques are harvested separately 30, 120 and 240 minutes after treatment, flash frozen in liquid nitrogen and stored at −80° C.

[0881] Hybrid maize seed (Pioneer hybrid 35A19) are aerated overnight in deionized water. Thirty seeds are plated in each flat, which contained 4 liters of Grace zonolite vermiculite. Two liters of water are bottom fed and flats were kept in a Conviron growth chamber with 16 hr light/8 hr dark at 20° C. and 80% humidity. Flats are watered with 1 L of tap water every three days. Five day old seedlings are treated as described above with 2 L of either a control (100 mM mannitol pH 6.5) solution or 1 L of an experimental (50 mM ammonium nitrate, pH 6.8) solution. Fifteen shoots per time point per treatment are harvested 10, 90 and 180 minutes after treatment, flash frozen in liquid nitrogen and stored at −80° C.

[0882] Alternatively, seeds of Arabidopsis thaliana (ecotype Wassilewskija) are left at 4° C. for 3 days to vernalize. They are then sown on vermiculite in a growth chamber having 16 hours light/8 hours dark, 12,000-14,000 LUX, 70% humidity, and 20° C. They are bottom-watered with tap water, twice weekly. Twenty-four days old plants are sprayed with either water (control) or 0.6% ammonium nitrate at 4 μL/cm² of tray surface. Total shoots and some primary roots are cleaned of vermiculite, flash-frozen in liquid nitrogen and stored at −80° C.

(x) Nitrogen High to Low

[0883] Wild type Arabidopsis thaliana seeds (ecotype Wassilewskija) are surface sterilized with 30% Clorox, 0.1% Triton X-100 for 5 minutes. Seeds are then rinsed with 4-5 exchanges of sterile double distilled deionized water. Seeds are vernalized at 4° C. for 2-4 days in darkness. After cold treatment, seeds are plated on modified 1×MS media (without NH₄NO₃ or KNO₃), 0.5% sucrose, 0.5 g/L MES pH5.7, 1% phytagar and supplemented with KNO₃ to a final concentration of 60 mM (high nitrate modified 1×MS media). Plates are then grown for 7 days in a Percival growth chamber at 22° C. with 16 hr. light/8 hr dark.

[0884] Germinated seedlings are then transferred to a sterile flask containing 50 mL of high nitrate modified 1×MS liquid media. Seedlings are grown with mild shaking for 3 additional days at 22° C. in 16 hr. light/8 hr dark (in a Percival growth chamber) on the high nitrate modified 1×MS liquid media.

[0885] After three days of growth on high nitrate modified 1×MS liquid media, seedlings are transferred either to a new sterile flask containing 50 mL of high nitrate modified 1×MS liquid media or to low nitrate modified 1×MS liquid media (containing 20 μM KNO₃). Seedlings are grown in these media conditions with mild shaking at 22° C. in 16 hr light/8 hr dark for the appropriate time points and whole seedlings harvested for total RNA isolation via the Trizol method (LifeTech.). The time points used for the microarray experiments are 10 min. and 1 hour time points for both the high and low nitrate modified 1×MS media.

[0886] Alternatively, seeds that are surface sterilized in 30% bleach containing 0.1% Triton X-100 and further rinsed in sterile water, are planted on MS agar, (0.5% sucrose) plates containing 50 mM KNO₃ (potassium nitrate). The seedlings are grown under constant light (3500 LUX) at 22° C. After 12 days, seedlings are transferred to MS agar plates containing either 1 mM KNO₃ or 50 mM KNO₃. Seedlings transferred to agar plates containing 50 mM KNO₃ are treated as controls in the experiment. Seedlings transferred to plates with 1 mM KNO₃ are rinsed thoroughly with sterile MS solution containing 1 mM KNO₃. There are ten plates per transfer. Root tissue was collected and frozen in 15 mL Falcon tubes at various time points which included 1 hour, 2 hours, 3 hours, 4 hours, 6 hours, 9 hours, 12 hours, 16 hours, and 24 hours.

[0887] Maize 35A19 Pioneer hybrid seeds are sown on flats containing sand and grown in a Conviron growth chamber at 25° C., 16 hr light/8 hr dark, ˜13,000 LUX and 80% relative humidity. Plants are watered every three days with double distilled deionized water. Germinated seedlings are allowed to grow for 10 days and are watered with high nitrate modified 1×MS liquid media (see above). On day 1, young corn seedlings are removed from the sand (with their roots intact) and rinsed briefly in high nitrate modified 1×MS liquid media. The equivalent of half a flat of seedlings is then submerged (up to their roots) in a beaker containing either 500 mL of high or low nitrate modified 1×MS liquid media (see above for details).

[0888] At appropriate time points, seedlings are removed from their respective liquid media, the roots separated from the shoots and each tissue type flash frozen in liquid nitrogen and stored at −80° C. This is repeated for each time point. Total RNA is isolated using the Trizol method (see above) with root tissues only.

[0889] Corn root tissues isolated at the 4 hr and 16 hr time points are used for the microarray experiments. Both the high and low nitrate modified 1×MS media are used.

(y) Osmotic Stress (PEG)

[0890] Seeds of Arabidopsis thaliana (ecotype Wassilewskija) are sown in trays and left at 4° C. for three days to vernalize before being transferred to a growth chamber having 16 hr light/8 hr dark, 12,000-14,000 LUX, 20° C., and 70% humidity. After 14 days, the aerial tissues are cut and placed on 3 MM Whatman paper in a petri-plate wetted with 20% PEG (polyethylene glycol-Mᵣ 8,000) in 1× Hoagland's solution. Aerial tissues on 3 MM Whatman paper containing 1× Hoagland's solution alone serve as the control. Aerial tissues are harvested at 1 hour and 6 hours after treatment, flash-frozen in liquid nitrogen and stored at −80° C.

[0891] Seeds of maize hybrid 35A (Pioneer) are sown in water-moistened sand in flats (10 rows, 5-6 seed/row) and covered with clear, plastic lids before being placed in a growth chamber having 16 hr light (25° C.)/8 hr dark (20° C.), 75% relative humidity and 13,000-14,000 LUX. Covered flats are watered every three days for 7 days. Seedlings are carefully removed from the sand and placed in 1-liter beakers with 20% PEG (polyethylene glycol-Mᵣ 8,000) for treatment. Control plants are treated with water. After 1 hr and 6 hr aerial and root tissues are separated and flash frozen in liquid nitrogen prior to storage at −80° C.

[0892] Seeds of maize hybrid 35A (Pioneer) are sown in water-moistened sand in flats (10 rows, 5-6 seed/row) and covered with clear, plastic lids before being placed in a growth chamber having 16 hr light (25° C.)/8 hr dark (20° C.), 75% relative humidity and 13,000-14,000 LUX. Covered flats are watered every three days for 7 days. Seedlings are carefully removed from the sand and placed in 1-liter beakers with 150 mM NaCl for treatment. Control plants were treated with water. After 1 hr, 6 hr, and 24 hr aerial and root tissues are separated and flash frozen in liquid nitrogen prior to storage at −80° C.

(z) Petals

[0893] Arabidopsis thaliana (ecotype Wassilewskija) seeds are vernalized at 4° C. for 3 days before sowing in flats containing vermiculite soil. Flats are watered placed at 20° C. in a Conviron growth chamber having 16 hr light/8 hr dark. Whole plants (used as the control) and petals from inflorescences 23-25 days after germination are harvested, flash frozen in liquid nitrogen and stored at −80° C.

(aa) Roots

[0894] Seeds of Arabidopsis thaliana (ecotype Wassilewskija) are sterilized in full strength bleach for less than 5 min., washed more than 3 times in sterile distilled deionized water and plated on MS agar plates. The plates are placed at 4° C. for 3 nights and then placed vertically into a growth chamber having 16 hr light/8 hr dark cycles, 23° C., 70% relative humidity and ˜11,000 LUX. After 2 weeks, the roots are cut from the agar, flash frozen in liquid nitrogen and stored at −80° C.

(bb) Root Hairless Mutants

[0895] Plants mutant at the rhl gene locus lack root hairs. This mutation is maintained as a heterozygote.

[0896] Seeds of Arabidopsis thaliana (ecotype Landsberg erecta) mutated at the rhl gene locus are sterilized using 30% bleach with 1 ul/ml 20% Triton-X 100 and then vernalized at 4° C. for 3 days before being plated onto GM agar plates. Plates are placed in growth chamber with 16 hr light/8 hr. dark, 23° C., 14,500-15,900 LUX, and 70% relative humidity for germination and growth.

[0897] After 7 days, seedlings are inspected for root hairs using a dissecting microscope. Mutants are harvested and the cotyledons removed so that only root tissue remained. Tissue is then flash frozen in liquid nitrogen and stored at −80 C.

[0898] Arabidopsis thaliana (Landsberg erecta) seedlings grown and prepared as above are used as controls.

[0899] Alternatively, seeds of Arabidopsis thaliana (ecotype Landsberg erecta), heterozygous for the rhl1 (root hairless) mutation, are surface-sterilized in 30% bleach containing 0.1% Triton X-100 and further rinsed in sterile water. They are then vernalized at 4° C. for 4 days before being plated onto MS agar plates. The plates are maintained in a growth chamber at 24° C. with 16 hr light/8 hr dark for germination and growth. After 10 days, seedling roots that expressed the phenotype (i.e. lacking root hairs) are cut below the hypocotyl junction, frozen in liquid nitrogen and stored at −80° C. Those seedlings with the normal root phenotype (heterozygous or wt) are collected as described for the mutant and used as controls.

(cc) Root Tips

[0900] Seeds of Arabidopsis thaliana (ecotype Wassilewskija) are placed on MS plates and vernalized at 4° C. for 3 days before being placed in a 25° C. growth chamber having 16 hr light/8 hr dark, 70% relative humidty and about 3 W/m². After 6 days, young seedlings are transferred to flasks containing B5 liquid medium, 1% sucrose and 0.05 mg/l indole-3-butyric acid. Flasks are incubated at room temperature with 100 rpm agitation. Media is replaced weekly. After three weeks, roots are harvested and incubated for 1 hr with 2% pectinase, 0.2% cellulase, pH 7 before straining through a #80 (Sigma) sieve. The root body material remaining on the sieve (used as the control) is flash frozen and stored at −80° C. until use. The material that passes through the #80 sieve is strained through a #200 (Sigma) sieve and the material remaining on the sieve (root tips) is flash frozen and stored at −80° C. until use. Approximately 10 mg of root tips are collected from one flask of root culture.

[0901] Seeds of maize hybrid 35A (Pioneer) are sown in water-moistened sand in flats (10 rows, 5-6 seed/row) and covered with clear, plastic lids before being placed in a growth chamber having 16 hr light (25° C.)/8 hr dark (20° C.), 75% relative humidity and 13,000-14,000 LUX. Covered flats are watered every three days for 8 days. Seedlings are carefully removed from the sand and the root tips (˜2 mm long) are removed and flash frozen in liquid nitrogen prior to storage at −80° C. The tissues above the root tips (˜1 cm long) are cut, treated as above and used as control tissue.

(dd) Rosette Leaves, Stems, and Siliques

[0902] Arabidopsis thaliana (ecotype Wassilewskija) seed was vernalized at 4° C. for 3 days before sowing in Metro-mix soil type 350. Flats are placed in a growth chamber having 16 hr light/8 hr dark, 80% relative humidity, 23° C. and 13,000 LUX for germination and growth. After 3 weeks, rosette leaves, stems, and siliques are harvested, flash frozen in liquid nitrogen and stored at −80° C. until use. After 4 weeks, siliques (<5 mm, 5-10 mm and >10 mm) are harvested, flash frozen in liquid nitrogen and stored at −80° C. until use. Five week old whole plants (used as controls) are harvested, flash frozen in liquid nitrogen and kept at −80° C. until RNA is isolated.

(ee) Salicylic Acid (Sa)

[0903] Seeds of Arabidopsis thaliana (ecotype Wassilewskija) are sown in trays and left at 4° C. for 4 days to vernalize before being transferred to a growth chamber having 16 hr light/8 hr. dark, 13,000 LUX, 70% humidity, 20° C. temperature and watered twice a week with 1 L of a 1× Hoagland's solution. Approximately 1,000 14 day old plants are sprayed with 200-250 mls of 5 mM salicylic acid (solubilized in 70% ethanol) in a 0.02% solution of the detergent Silwet L-77. At 1 hr and 6 hrs after treatment, whole seedlings, including roots, are harvested within a 15 to 20 minute time period flash-frozen in liquid nitrogen and stored at −80° C.

[0904] Alternatively, seeds of wild-type Arabidopsis thaliana (ecotype Columbia) and mutant CS3726 are sown in soil type 200 mixed with osmocote fertilizer and Marathon insecticide and left at 4° C. for 3 days to vernalize. Flats are incubated at room temperature with continuous light. Sixteen days post germination plants are sprayed with 2 mM SA, 0.02% SilwettL-77 or control solution (0.02% SilwettL-77. Aerial parts or flowers were harvested 1 hr, 4 hr, 6 hr, 24 hr and 3 weeks post-treatment flash frozen and stored at −80° C.

[0905] Seeds of maize hybrid 35A (Pioneer) are sown in water-moistened sand in flats (10 rows, 5-6 seed/row) and covered with clear, plastic lids before being placed in a growth chamber having 16 hr light (25° C.)/8 hr dark (20° C.), 75% relative humidity and 13,000-14,000 LUX. Covered flats are watered every three days for 7 days. Seedlings are carefully removed from the sand and placed in 1-liter beakers with 2 mM SA for treatment. Control plants are treated with water. After 12 hr and 24 hr, aerial and root tissues are separated and flash frozen in liquid nitrogen prior to storage at −80° C.

(ff) Shoots

[0906] Sterilized wild-type Arabidopsis thaliana seeds (ecotype Wassilewskija) are sown on MS plates (0.5% sucrose, 1.5% agar) after 3 day-cold treatment. The plates are placed vertically in a Percival growth chamber (16:8 light cycles, 22° C.) so that roots grow vertically on the agar surface. The shoots or aerials, harvested after 7 d- and 14 d-growth in the chamber, are used as the experimental samples. The control sample is derived from tissues harvested from 3 week-old plants that are grown in soil in a Conviron chamber (16:8 light cycles, 22° C.), including rosettes, roots, stems, flowers, and siliques.

(gg) Shoot Apical Meristem (stm)

[0907] Arabidopsis thaliana (ecotype Landsberg erecta) plants mutant at the stm gene locus lack shoot meristems, produce aerial rosettes, have a reduced number of flowers per inflorescence, as well as a reduced number of petals, stamens and carpels, and is female sterile. This mutation is maintained as a heterozygote.

[0908] Seeds of Arabidopsis thaliana (ecotype Landsberg erecta) mutated at the stm locus are sterilized using 30% bleach with 1 ul/ml 20% Triton-X100. The seeds are vernalized at 4° C. for 3 days before being plated onto GM agar plates. Half are then put into a 22° C., 24 hr light growth chamber and half in a 24° C. 16 hr light/8 hr dark growth chamber having 14,500-15,900 LUX, and 70% relative humidity for germination and growth.

[0909] After 7 days, seedlings are examined for leaf primordia using a dissecting microscope. Presence of leaf primordia indicated a wild type phenotype. Mutants are selected based on lack of leaf primordia. Mutants are then harvested and hypocotyls removed leaving only tissue in the shoot region. Tissue is then flash frozen in liquid nitrogen and stored at −80° C.

[0910] Control tissue is isolated from 5 day old Landsberg erecta seedlings grown in the same manner as above. Tissue from the shoot region is harvested in the same manner as the stm tissue, but only contains material from the 24° C., 16 hr light/8 hr dark long day cycle growth chamber.

[0911] Seeds of maize hybrid 35A (Pioneer) are sown in water-moistened sand in flats (10 rows, 5-6 seed/row) and covered with clear, plastic lids before being placed in a growth chamber having 16 hr light (25° C.)/8 hr dark (20° C.), 75% relative humidity and 13,000-14,000 LUX. Covered flats are watered every three days for 8 days. Seedlings are carefully removed from the sand and the outer layers of leaf shealth removed. About 2 mm sections are cut and flash frozen in liquid nitrogen prior to storage at −80° C. The tissues above the shoot apices (˜1 cm long) are cut, treated as above and used as control tissue.

(hh) Siliques

[0912] Wild type Arabidopsis thaliana (ecotype Wassilewskija) seeds are sown in moistened soil mix, metromix 200 with osmocote, and stratified at 4° C. for 3 days in dark. Flats are placed in a Conviron growth chamber maintained at 16 h light (22° C.), 8 h dark (20° C.) and 70% humidity. After 3 weeks, siliques (<5 mm long) are collected in liquid nitrogen. The control samples are 3-week old whole plants (including all tissue types) grown in the same Conviron growth chamber.

(ii) Wounding

[0913] Seeds of Arabidopsis thaliana (Wassilewskija) are sown in trays and left at 4° C. for three days to vernalize before being transferred to a growth chamber having 16 hr light/8 hr dark, 12,000-14,000 LUX, 70% humidity and 20° C. After 14 days, the leaves are wounded with forceps. Aerial tissues are harvested 1 hour and 6 hours after wounding. Aerial tissues from unwounded plants serve as controls. Tissues are flash-frozen in liquid nitrogen and stored at −80° C.

[0914] Seeds of maize hybrid 35A (Pioneer) are sown in water-moistened sand in flats (10 rows, 5-6 seed/row) and covered with clear, plastic lids before being placed in a growth chamber having 16 hr light (25° C.)/8 hr dark (20° C.), 75% relative humidity and 13,000-14,000 LUX. Covered flats are watered every three days for 7 days. Seedlings are wounded (one leaf nicked by scissors) and placed in 1-liter beakers of water for treatment. Control plants are treated not wounded. After 1 hr and 6 hr aerial and root tissues are separated and flash frozen in liquid nitrogen prior to storage at −80° C.

2. Microarray Hybridization Procedures

[0915] Microarray technology provides the ability to monitor mRNA transcript levels of thousands of genes in a single experiment. These experiments simultaneously hybridize two differentially labeled fluorescent cDNA pools to glass slides that have been previously spotted with cDNA clones of the same species. Each arrayed cDNA spot will have a corresponding ratio of fluorescence that represents the level of disparity between the respective mRNA species in the two sample pools. Thousands of polynucleotides can be spotted on one slide, and each experiment generates a global expression pattern.

[0916] The microarray consists of a chemically coated microscope slide, referred herein as a “chip” with numerous polynucleotide samples arrayed at a high density. The poly-L-lysine coating allows for this spotting at high density by providing a hydrophobic surface, reducing the spreading of spots of DNA solution arrayed on the slides. Glass microscope slides (Gold Seal #3010 manufactured by Gold Seal Products, Portsmouth, N.H., USA) are coated with a 0.1% W/V solution of Poly-L-lysine (Sigma, St. Louis, Mo.).

[0917] Polynucleotides are amplified from Arabidopsis cDNA clones using insert specific probes. The resulting 100 uL PCR reactions are purified and PCR products from cDNA clones are spotted onto the poly-L-Lysine coated glass slides using an arrangement of quill-tip pins (ChipMaker 3 spotting pins; Telechem, International, Inc., Sunnyvale, Calif., USA) and a robotic arrayer (PixSys 3500, Cartesian Technologies, Irvine, Calif., USA). Slides containing maize sequences are purchased from Agilent Technology (Palo Alto, Calif. 94304).

[0918] After arraying, slides are processed through a series of steps—rehydration, UV cross-linking, blocking and denaturation—required prior to hybridization. Slides are rehydrated by placing them over a beaker of warm water (DNA face down), for 2-3 sec, to distribute the DNA more evenly within the spots, and then snap dried on a hot plate (DNA side, face up). The DNA is then cross-linked to the slides by UV irradiation (60-65 mJ; 2400 Stratalinker, Stratagene, La Jolla, Calif., USA).

[0919] The Hybridization process begins with the isolation of mRNA from the two tissues (see “Isolation of total RNA” and “Isolation of mRNA”, below) in question followed by their conversion to single stranded cDNA (see “Generation of probes for hybridization”, below). The cDNA from each tissue is independently labeled with a different fluorescent dye and then both samples are pooled together. This final differentially labeled cDNA pool is then placed on a processed microarray and allowed to hybridize (see “Hybridization and ish conditions”, below).

[0920] mRNA is isolated using the Qiagen Oligotex mRNA Spin-Column protocol (Qiagen, Valencia, Calif.) or using the Stratagene Poly(A) Quik mRNA Isolation Kit (Startagene, La Jolla, Calif.).

[0921] Plasmid DNA is isolated from the following yeast clones using Qiagen filtered maxiprep kits (Qiagen, Valencia, Calif.): YAL022c(Fun26), YAL031c(Fun21), YBR032w, YDL131w, YDL182w, YDL194w, YDL196w, YDR050c and YDR116c. Plasmid DNA is linearized with either BsrBI (YAL022c(Fun26), YAL031c(Fun21), YDL131w, YDL182w, YDL194w, YDL196w, YDR050c) or AflIII (YBR032w, YDR116c) and isolated.

Generation of Probes for Hybridization

Generation of Labeled Probes for Hybridization from First-Strand cDNA

[0922] Hybridization probes are generated from isolated mRNA using an Atlas™ Glass Fluorescent Labeling Kit (Clontech Laboratories, Inc., Palo Alto, Calif., USA). This entails a two step labeling procedure that first incorporates primary aliphatic amino groups during cDNA synthesis and then couples fluorescent dye to the cDNA by reaction with the amino functional groups.

[0923] The probe is purified using a Qiagen PCR cleanup kit (Qiagen, Valencia, Calif., USA), and eluted with 100 ul EB (kit provided). The sample is loaded on a Microcon YM-30 (Millipore, Bedford, Mass., USA) spin column and concentrated to 4-5 ul in volume.

[0924] Probes for the maize microarrays are generated using the Fluorescent Linear Amplification Kit (cat. No. G2556A) from Agilent Technologies (Palo Alto, Calif.).

[0925] Maize microarrays are hybridized according to the instructions included Fluorescent Linear Amplification Kit (cat. No. G2556A) from Agilent Technologies (Palo Alto, Calif.).

[0926] The chips are scanned using a ScanArray 3000 or 5000 (General Scanning, Watertown, Mass., USA). The chips are scanned at 543 and 633 nm, at 10 um resolution to measure the intensity of the two fluorescent dyes incorporated into the samples hybridized to the chips.

[0927] The images generated by scanning slides consisted of two 16-bit TIFF images representing the fluorescent emissions of the two samples at each arrayed spot. These images are then quantified and processed for expression analysis using the data extraction software Imagene™ (Biodiscovery, Los Angeles, Calif., USA). Imagene output is subsequently analyzed using the analysis program Genespring™ (Silicon Genetics, San Carlos, Calif., USA). In Genespring, the data is imported using median pixel intensity measurements derived from Imagene output. Background subtraction, ratio calculation and normalization are all conducted in Genespring. Normalization is achieved by breaking the data in to 32 groups, each of which represented one of the 32 pin printing regions on the microarray. Groups consist of 360 to 550 spots. Each group is independently normalized by setting the median of ratios to one and multiplying ratios by the appropriate factor.

[0928] An additional deposit of an E. coli Library, E. coliLibA021800, was made at the American Type Culture Collection in Manassas, Va., USA on Feb. 22, 2000 to meet the requirements of Budapest Treaty for the international recognition of the deposit of microorganisms. This deposit was assigned ATCC accession no. PTA-1411. Additionaly, ATCC Library deposits; PTA-1161, PTA-1411 and PTA-2007 were made at the American Type Culture Collection in Manassas, Va., USA on; Jan. 7, 2000, Feb. 23, 2000 and Jun. 8, 2000 respectively, to meet the requirements of Budapest Treaty for the international recognition of the deposit of microorganisms.

[0929] The invention being thus described, it will be apparent to one of ordinary skill in the art that various modifications of the materials and methods for practicing the invention can be made. Such modifications are to be considered within the scope of the invention as defined by the following claims.

[0930] The scientific periodical and patent publications that follow are discussed in the Specification and are hereby incorporated by reference in their entirety:
[0931] Ahn et al. (1993) Molecular and General Genetics 241: 483-90
[0932] Albert et al. (1995) Plant J. 7:649
[0933] Alonso-Blanco et al. (c. 1998) Methods in Molecular Biology, vol. 82, “Arabidopsis Protocols”, pp. 137-146, J. M. Martinez-Zapater and J. Salinas, eds., Humana Press, Totowa, N.J.
[0934] Armaleo et al. (1990) Current Genetics 17:97
[0935] Ausubel et al. (1992) Current Protocols in Molecular Biology, Greene Publishing, New York).
[0936] Azpiroz-Leehan et al. (1997) Trends in Genetics 13:152
[0937] Binding (1988) Regeneration of Plants, Plant Protoplasts, pp. 21-73, CRC Press, Boca Raton,
[0938] Bonner et al. (1973) J. Mol. Biol. 81:123
[0939] Bradshaw et al. (1995) Nucl Acids Res 23: 4850-4856
[0940] Buchanan, Gruissem, and Russel (eds) 2000, Biochemistry and Molecular Biology of Plants, Amer. Soc. of Plant Physiologists, Rockville, Md.
[0941] Burke et al. (1987) Science 236:806-812
[0942] Burr (c. 1994) “Mapping Genes with Recombinant Inbreds”, pp. 249-254. In Freeling, M. and V. Walbot (Ed.), The Maize Handbook Springer-Verlag New York, Inc.: New York, N.Y., USA; Berlin Germany
[0943] Burr et al. (1998) Genetics 118: 519
[0944] Carels et al. (1998) J. Mol. Evol. 46: 45
[0945] Chang et al. (1993) Gene 127:95
[0946] Christou, (1995) Euphytica 85 (1-3):13-27
[0947] Chusacultanachai et al. (1999) J. Biol. Chem. 274:23591
[0948] Cox and Goldberg (c. 1988) “Plant Molecular Biology: A Practical Approach”, pp. 1-35, Shaw ed., IRL, Oxford
[0949] De Martinis et al. (1999) Plant Cell 11:1061
[0950] de Vicente and Tanksley (1993) Genetics 134:585
[0951] Dumas Milne Edwards J. B. (20 Dec. 1993) Doctoral Thesis of Paris VI University, Le clonage des ADNc complets: difficultés et perspectives nouvelles. Apports pour l'étude de la régulation de l'expression de la tryptophane hydroxylase de rat.
[0952] Escudero et al. (1996) Plant J. 10:355
[0953] Evans et al., (1983) Protoplasts Isolation and Culture in “Handbook of Plant Cell Culture,” pp. 124-176, MacMillan Publishing Company, New York
[0954] Fennoy et al. (1993) Nucl. Acids Res. 21(23): 5294
[0955] Frischauf et al. (1983) J. Mol. Biol. 170: 827-842
[0956] Fromm et al. (1985) Proc. Natl. Acad. Sci. USA 82:5824
[0957] Fry et al. (1992) Biotechniques 13: 124
[0958] Gardiner, J. et al. (1993) Genetics 134: 917
[0959] Ghosh et al. (1994) J. Biotechnol. 32:1
[0960] Gleave (1992) Plant Mol. Biol. 20:1203
[0961] Golovkin et al. (1999) J. Biol. Chem. 274:36428
[0962] Gould et al. (1991) Plant Physiology 95:426
[0963] Graves and Goldman (1986) Plant Mol. Biol. 7:34 (scientific periodical and patent publications incorporated by reference continued)
[0964] Hamilton et al (1990) Nature 346:284-287
[0965] Hamilton et al. (1996) Proc. Natl. Acad. Sci. USA 93: 9975-9979
[0966] Hamilton (1997) Gene 200:107
[0967] Haseloff et al. (1988) Nature, 334:585
[0968] Herrera-Estrella et al. (1983) EMBO J. 2:987
[0969] Hochstrasser (2000) Science 289: 563
[0970] Hosoyama et al. (1994) Biosci. Biotechnol. Biochem. 58:1500
[0971] Hu et al. (2000) Methods 20:80 Huynh et al., In: Glover N M (ed) DNA Cloning: A practical Approach, Vol. 1 Oxford: IRL Press (1985
[0972] Ichimura et al. (1998) Biochem. Biophys. Res. Comm. 253:532
[0973] Ishida et al. (1996) Nature Biotechnology 14:745
[0974] Joazeiro and Hunter (2001) Science 289: 2061;
[0975] Kaczor et al. (1994) Plant Physiol. 1-4: 1411-7
[0976] Kato et al. (1994) Gene 150:243-250
[0977] Keegstra and Cline (1999) The Plant Cell 11: 557-570
[0978] Keller and M. M. Manak (c. 1993) “DNA Probes”, 2^{nd} Ed. pp. 1-25, by Stockton Press, New York, N.Y.
[0979] Klee et al. (1987) Ann. Rev. of Plant Phys. 38:467
[0980] Klein et al. (1987) Nature 327:773
[0981] Kohler and Milstein (1975) Nature 256: 495
[0982] Koltonow et al. (1990) Plant Cell 2:1201
[0983] Komari et al. (1996) Plant J. 10:165
[0984] Liljegren (1999) Plant Cell 11:1007
[0985] Lin et al. (1997) J. Biol. Chem. 272:27274
[0986] Luo et al. (1997) J. Mol. Biol. 266:479
[0987] Marra et al. (1997) Genomic Research 7:1072-1084
[0988] Mariani et al. (1992) Nature 357: 384-387
[0989] Martinez et al. (1999) Mol. Gen. Genet. 261:546
[0990] Maruyama et al. (1994) Gene 138:171
[0991] Marty (1999) The Plant Cell 11: 587-599
[0992] Matteucci et al. (1981) J. Am. Chem. Soc. 103:3185
[0993] May et al. (1995) Bio/Technology 13:486
[0994] McAlister-Henn et al. (1999) Methods 19:330
[0995] McCormac et al. (1997) Mol. Biotechnol. 8:199
[0996] Michaels et al. (1999) Plant Cell 11:949
[0997] Morgante et al. (1993) The Plant Journal 3: 165
[0998] Müller et al. (1987) Mol Gen. Genet. 207:171
[0999] Napoli et al. (1990) The Plant Cell 2:279
[1000] Oeller, et al (1991) Science 254:437-439
[1001] Panaud et al. (1995) Genome 38: 1170
[1002] Paszkowski et al. (1984) EMBO J. 3:2717
[1003] Pearson and Lipman (1988) Proc. Natl. Acad. Sci. (USA) 85: 2444
[1004] Pierrou et al., (1995) Anal. Biochem. 229:99
[1005] Refseth et al. (1997) Electrophoresis 18: 1519
[1006] (scientific periodical and patent publications incorporated by reference continued)
[1007] Sakamoto et al. (2001) PNAS Online 141230798
[1008] Salomon et al. (1984) EMBO J. 3:141
[1009] Sambrook et al. (1989) Molecular Cloning: A Laboratory Manual, 2^{nd} ed. Cold Spring Harbor Laboratory Press, New York)
[1010] Schneider (1976) Z. naturforsch. [C] 31: 55-63
[1011] Schwarz et al. (1992) Mol. Cell. Biol. 12:266
[1012] Seki et al. (1998) Plant Journal 15:707-720
[1013] Senior et al. (1996) Crop Science 36: 1676
[1014] Sheehy et al. (1988) Proc. Nat. Acad. Sci. USA, 85:8805
[1015] Shizuya et al. (1992) Proc. Natl. Acad. Sci. USA 89: 8794-8797
[1016] Smith (1988) Biochem. J. 249: 423-8
[1017] Smith and Waterman (1981) Add. APL. Math. 2:482
[1018] Spiker and Thompson (1996) Plant Physiol. 110: 15-21
[1019] Sternberg N. et al. (1990) Proc Natl Acad Sci USA. 87(1):103-7
[1020] Tanksley et al. (1997) Science 277:1063
[1021] Tanksley and McCouch (1997) Science 277:1063
[1022] Taramino et al. (1996) Genome 39: 277
[1023] Tijessen (c. 1993) “Hybridization with Nucleic Acid Probes” in Laboratory Techniques in Biochemistry and Molecular Biology, P. C. vand der Vliet, ed., Elsevier, Amsterdam.
[1024] Urdea et al. (1981) Proc. Natl. Acad. 80:7461
[1025] van der Krol et al. (1990) Plant Cell 2:291
[1026] Venkateswarlu et al. (1991) Biotechnology 9:1103
[1027] Vergunst et al. (1998) Nucleic Acids Res. 26:2729
[1028] Vergunst et al. (1998) Plant Mol. Biol. 38:393
[1029] Vitale and Denecke (1999) The Plant Cell 11: 615-628
[1030] Walden et al. (1990) Mol Cell Biol 1: 175-194
[1031] Weigel and Meyerowitz, (1993) In Molecular Basis of Morphogenesis (ed. M. Bernfield). 51 st Annual Symposium of the Society for Developmental Biology, pp. 93-107, New York
[1032] Weising et al. (1988) Ann. Rev. Genet. 22:421
[1033] Wunsch (1970) J. Mol. Biol. 48:443
[1034] Xu et al. (1995) Plant Mol. Biol. 27:237
[1035] Yamamoto et al. (1991) Plant Cell 3:371
[1036] Bouckaert et al., U.S. Ser. No. 60/121,700 Atty. Dkt. No. 2750-117P, Client Dkt. No. 00010.001 EPO 625572
[1037] U.S. Pat. No. 4,801,340
[1038] U.S. Pat. No. 5,034,323
[1039] U.S. Pat. No. 5,231,020
[1040] U.S. Pat. No. 5,283,184
[1041] U.S. Pat. No. 5,410,270
[1042] U.S. Pat. No. 5,445,943
[1043] U.S. Pat. No. 5,766,847
[1044] U.S. Pat. No. 5,945,306
[1045] U.S. Pat. No. 5,945,287
[1046] U.S. Pat. No. 5,945,308
[1047] (scientific periodical and patent publications incorporated by reference continued)
[1048] U.S. Pat. No. 5,919,686
[1049] U.S. Pat. No. 5,919,661
[1050] U.S. Pat. No. 5,919,627
[1051] U.S. Pat. No. 5,723,766
[1052] U.S. Pat. No. 5,859,330
[1053] U.S. Pat. No. 5,874,248
[1054] U.S. Pat. No. 5,871,973
[1055] U.S. Pat. No. 5,871,971
[1056] U.S. Pat. No. 5,871,930
[1057] U.S. Pat. No. 6,004,753
[1058] U.S. Pat. No. 6,004,804
[1059] U.S. Pat. No. 6,010,907
[1060] WO 95/35505
[1061] WO 96/34981
[1062] WO 98/07842
[1063] WO 98/10858
[1064] WO 98/58052
[1065] WO 99/06572
[1066] WO 99/07865
[1067] WO 99/15658
[1068] WO 99/31252
[1069] WO 99/33870
[1070] WO 99/33981
[1071] WO 99/46380
[1072] WO 99/58672

[1073] WO 99/58723

SCHEMATIC 5
SCHEMATIC OF A GENE

[chemical structure]

1. An isolated nucleic acid molecule comprising:
a) a full length cDNA nucleic acid having a nucleotide sequence which encodes an amino acid sequence exhibiting at least 40% sequence identity to an amino acid sequence encoded by
(1) a full length cDNA nucleotide sequence described in the Sequence Listing or the Sequence Listing-Miscellaneous Feature documents, or a fragment thereof; or
(2) a complement of a full-length cDNA nucleotide sequence shown in the Sequence Listing or the Sequence Listing-Miscellaneous Feature documents, or a fragment thereof;
b) a nucleic acid which is the reverse of the nucleotide sequence according to subparagraph (a), such that the reverse nucleotide sequence has a sequence order which is the reverse of the sequence order of the nucleotide sequence according to subparagraph (a);
c) a nucleic acid capable of hybridizing to a nucleic acid having a sequence selected from the group consisting of:
(1) a full-length cDNA nucleotide sequence which is shown in the Sequence Listing or the Sequence Listing-Miscellaneous Feature documents; and a nucleotide sequence which is complementary to a full-length cDNA nucleotide sequence shown in the Sequence Listing or the Sequence Listing-Miscellaneous Feature documents, under conditions that permit formation of a nucleic acid duplex at a temperature from about 40° C. and 48° C. below the melting temperature of the nucleic acid duplex, with the proviso that said nucleotide sequence is not any of the sequences described in the Tables of any of Patent Publication Nos. WO 200040695, CA 2300692 A1, EP 1033405 A2, CA 2302828 A1 and EP 1059354 A2 and any proteins listed in the application that are identified by gi number or otherwise as being from the non-redundant GenBank CDS translations or Protein Database (PDB) or (PIR-International) Database (PIR).

2. An isolated nucleic acid molecule comprising a nucleic acid having a nucleotide sequence which exhibits at least 65% sequence identity to
a) a full-length cDNA nucleotide sequence shown in the Sequence Listing or the Sequence Listing-Miscellaneous Feature documents, or a fragment thereof; or
b) a complement of a full-length cDNA nucleotide sequence described in the Sequence Listing or the Sequence Listing-Miscellaneous Feature documents, or a fragment thereof, with the proviso that said nucleotide sequence is not any of the sequences described in the Tables of any of Patent Publication Nos. WO 200040695, CA 2300692 A1, EP 1033405 A2, CA 2302828 A1 and EP 1059354 A2 and any proteins listed in the application that are identified by gi number or otherwise as being from the non-redundant GenBank CDS translations or Protein Database (PDB) or (PIR-International) Database (PIR).

3. The nucleic acid molecule according to claim 1, wherein said nucleic acid comprises an open reading frame.

4. A vector construct comprising:
a) a first nucleic acid having a regulatory sequence capable of causing transcription and/or translation; and
b) a second nucleic acid having the sequence of the isolated nucleic acid molecule according to claim 1;
wherein said first and second nucleic acids are operably linked and wherein said second nucleic acid is heterologous to any element in said vector construct.

5. The vector construct according to claim 4, wherein said first nucleic acid is native to said second nucleic acid.

6. The vector construct according to claim 4, wherein said first nucleic acid is heterologous to said second nucleic acid.

7. A host cell comprising an isolated nucleic acid molecule according to claim 1, wherein said nucleic acid molecule is flanked by exogenous sequence

8. A host cell comprising a vector construct of claim 4.

9. An isolated polypeptide comprising an amino acid sequence
a) exhibiting at least 40%, or 75%, or 85%, or 90% sequence identity of an amino acid sequence encoded by a sequence shown in the Sequence Listing or the Sequence Listing-Miscellaneous Feature documents, or a fragment thereof; and
b) capable of exhibiting at least one of the biological activities of the polypeptide encoded by said nucleotide sequence shown in the Sequence Listing or the Sequence Listing-Miscellaneous Feature documents, or a fragment thereof, with the proviso that said nucleotide sequence is not any of the sequences described in the Tables of any of Patent Publication Nos. WO 200040695, CA 2300692 A1, EP 1033405 A2, CA 2302828 A1 and EP 1059354 A2 and any proteins listed in the application that are identified by gi number or otherwise as being from the non-redundant GenBank CDS translations or Protein Database (PDB) or (PIR-International) Database (PIR.

10. An antibody capable of binding the isolated polypeptide of claim 9.

11. A method of introducing an isolated nucleic acid into a host cell comprising:
a) providing an isolated nucleic acid molecule according to claim 1; and
b) contacting said isolated nucleic with said host cell under conditions that permit insertion of said nucleic acid into said host cell.
c) A method of transforming a host cell which comprises contacting a host cell with a vector construct according to claim 4.
d) A method of modulating transcription and/or translation of a nucleic acid in a host cell comprising:
e) providing the host cell of claim 7; and
f) culturing said host cell under conditions that permit transcription or translation.

12. A method of transforming a host cell which comprises contacting a host cell with a vector construct according to claim 4.

13. A method of modulating transcription and/or translation of nucleic acid in a host cell comprising:
a) providing the host cell of claim 7; and
b) culturing said host cell under conditions that permit transcription or translation.

14. A method for detecting a nucleic acid in a sample which comprises:
a) providing an isolated nucleic acid molecule according to claim 1;
b) contacting said isolated nucleic acid molecule with a sample under conditions which permit a comparison of the sequence of said isolated nucleic acid molecule with the sequence of DNA in said sample; and
c) analyzing the result of said comparison.

15. A plant or cell of a plant which comprises a nucleic acid molecule according to claim 1 which is exogenous or heterologous to said plant or plant cell.

16. A plant or cell of a plant which comprises a vector construct according to claim 6.

17. A plant which has been regenerated from a plant cell according to claim 17.

18. A plant which has been regenerated from a plant cell according to claim.

The application's sequence listing, which the Patent Office published only in electronic form, follows.

SEQUENCE LISTING (34471 sequences)

SEQ ID NO: 1 - DNA, 658 bp, Zea mays subsp. mays
  misc_feature (1)..(658): Ceres Seq. ID no. 12589712
agagcatcctaatcgaaaaagggatgtatgaaagatctagcaagcagtattcttcgttacatgtatacaagacatggcaaatgatgcatcggtgatggcaaatcatgccagtgtcgtgtcgtcgctgagctagctagctgcgtgctgatcatatgcaccgatctgacgtctcccttttccttttctttttttctgctggctctccctcgggggccgggtggaatgcgactgcagggacgaaatccaacgcatcaaggctggcaatcccgacatctcgcacagggaggccttcagcgcggcggccaagaactgggcgcactttccacacatccactttggactcatgccagatcaccaggggcccaagaagacaagcctgctacctcaggatcaccagagaagcgacggcggcgggctactaaaggaagggctgtacgctgcggcagccaacatgggggttgctccatactaatataataataatcactcctacgtacgtactcaagcttataatattagagtagcaaagctgctacgtactgttagggctctatggactactacgaagctatatgtatctagctagctagggctgttacgttaagttagacaaggccgggcttagcgtgacctcataaattggcttgttaaacgttgc

SEQ ID NO: 2 - protein, 89 aa, Zea mays subsp. mays
  misc_feature (1)..(89): Ceres Seq. ID no. 12589713
MHRSDVSLFLFFFSAGSPSGAGWNATAGTKSNASRLAIPTSRTGRPSARRPRTGRTFHTSTLDSCQITRGPRRQACYLRITREATAAGY

SEQ ID NO: 3 - protein, 84 aa, Zea mays subsp. mays
  misc_feature (1)..(84): Ceres Seq. ID no. 12589714
MRLQGRNPTHQGWQSRHLAQGGLQRGGQELGALSTHPLWTHARSPGAQEDKPATSGSPEKRRRRATKGRAVRCGSQHGGCSILI

SEQ ID NO: 4 - DNA, 1276 bp, Zea mays subsp. mays
  misc_feature (1)..(1276): Ceres Seq. ID no. 12590542
ctcatatttccctattattatataatgatacatgcgcactttttacatagacttccggctgaccaactcccacctcgataaaagagctataccaacgtagggtgacaaagtaggcatgtacatgtacatatctcaaaagagatctgacatctcaaaacagacccaaaaaaaaactgctcgcttcattctctctcactaatctaactttgacccctaagcatcccaggctgctcctcagcactgggtggtggtggtgctcatctgcttcctgttggccagagaagagaagaccctggcagtcttcaccttcttcaccagaagcccccatttgtcgccatcatcgccgcccttggcagccgccttatcctgctcctgctgcttaaacctcatgcagagcggggtgttgcagcggtcggtacggtcgcagagcgcggagtggaggcggagcagctgccacatgcgctggcaccgcgcgcagctcttgcggtggcactgggagaagtggcggatgagcagctgcaggccccggcacgtggcgtagcgcgcgcacggcgccggcgccggcgcccgccccgccgggccgacctccgtgcatccctccgtgcagatgtggtccaggcagtccatggcctcgctcagctccatgtacacgcgctgctccgcgcgcttccgccgccacttgcgccgccgcatgtcggcctcgtgcaggcgctgcaggacgtggagctcctgccaggggtcgttctcctgcaggaagcgccaggcctcggtgcgctccacggccgcgaactccttggccagcagcctggcgcagcgcaggtgcaggcgcggcgcgtcgcagaggccggccagctgcagcacgtccaccaccgagtccgcggtgaggcgcgcgccgatggcgccctcgcacgcccgcttcagccacggcacctggtacgcgtgcgccagcaccagcacctgcaccgcgtgctcctccatgtcgtcatcctcatcctcgccgcaccaggacagaggaatgcgcggggatcctccggcgcccgcccgtcgtgacgacgtcgacgtcggcggcggccgggtcgccggcgccggcgcggttgccgagccgcggtgcctcgcacatctcgttgtctggcgagaggtggtggaatggaagggaacgagccgggggcgtggggggataaaaaaaatatctgcggaaaaggtccggggcgcggcgggggcgggagacgtcgcagttgcttgcgttgcgtgctcttgtctgggtagccaggccaat

SEQ ID NO: 5 - protein, 223 aa, Zea mays subsp. mays
  misc_feature (1)..(223): Ceres Seq. ID no. 12590543
MWSRQSMASLSSMYTRCSARFRRHLRRRMSASCRRCRTWSSCQGSFSCRKRQASVRSTAANSLASSLAQRRCRRGASQRPASCSTSTTESAVRRAPMAPSHARFSHGTWYACASTSTCTACSSMSSSSSSPHQDRGMRGDPPAPARRDDVDVGGGRVAGAGAVAEPRCLAHLVVWREVVEWKGTSRGRGGIKKISAEKVRGAAGAGDVAVACVACSCLGSQAN

SEQ ID NO: 6 - protein, 217 aa, Zea mays subsp. mays
  misc_feature (1)..(217): Ceres Seq. ID no. 12590544
MASLSSMYTRCSARFRRHLRRRMSASCRRCRTWSSCQGSFSCRKRQASVRSTAANSLASSLAQRRCRRGASQRPASCSTSTTESAVRRAPMAPSHARFSHGTWYACASTSTCTACSSMSSSSSSPHQDRGMRGDPPAPARRDDVDVGGGRVAGAGAVAEPRCLAHLVVWREVVEWKGTSRGRGGIKKISAEKVRGAAGAGDVAVACVACSCLGSQAN

SEQ ID NO: 7 - protein, 211 aa, Zea mays subsp. mays
  misc_feature (1)..(211): Ceres Seq. ID no. 12590545
MYTRCSARFRRHLRRRMSASCRRCRTWSSCQGSFSCRKRQASVRSTAANSLASSLAQRRCRRGASQRPASCSTSTTESAVRRAPMAPSHARFSHGTWYACASTSTCTACSSMSSSSSSPHQDRGMRGDPPAPARRDDVDVGGGRVAGAGAVAEPRCLAHLVVWREVVEWKGTSRGRGGIKKISAEKVRGAAGAGDVAVACVACSCLGSQAN

SEQ ID NO: 8 - DNA, 958 bp, Zea mays subsp. mays
  misc_feature (1)..(958): Ceres Seq. ID no. 12635812
aggagggcacatagagtatattattgtccgaacatcactgtcagagcaaaatgtaaataatatacagacatgagcgattgacaggcccccggtttcaccataattagtactcgtactagcataggtgtactgcagcgtgactgtagtcctctcgtgggggcacaactggagctggattggaacatactaggttcccttctgggatttcttttcttttcttttccgttgcctaacaatggtggtagcagggggagtactaataatggatgacggggaaaagggaaggaaattaaaggaatgaaagcgatagatgatgtgcctgttgtttcagctgcttgttcgtctccttgagcgtgaggtactgttccagcaccttgtccttctccttcttcatgttctcgttctgcgacgctaaatccgcgactttcctcgccagttcgtcccggatcgcctggcggcggaggatggtttgccgggcggactcccggttcgcgagcacgcgccgcagccgcttcgcctccttctccgcctcggtgagcatgtgccgcggtctgctgaggccgtatcccgtcacggccgccgacgactgcggcggttgctgcccggcgccgctggagctgctggagcaaggggaggactggatgccgacgttgcccagctcaaggctcagcctcgtgctcgccagctcctcgtcctcctgctccatcgccgcctgggccgctggggcggcggcgtggcgcaggcgctgcgccgggagcgcgtggtcggcggccgccccggccccggcccccgccatgtcggccagcgccatggcggcgcggagctcgacgtcgacgctggcgcccctccgccggcattgcgcctggtggccgccgtcgctgctgctgccgtgatcagtcggcatgggtggggggcggtgaggatcggatgagatctcgagcgcaagccggagagcggt

SEQ ID NO: 9 - protein, 166 aa, Zea mays subsp. mays
  misc_feature (1)..(166): Ceres Seq. ID no. 12635813
MFSFCDAKSATFLASSSRIAWRRRMVCRADSRFASTRRSRFASFSASVSMCRGLLRPYPVTAADDCGGCCPAPLELLEQGEDWMPTLPSSRLSLVLASSSSSCSIAAWAAGAAAWRRRCAGSAWSAAAPAPAPAMSASAMAARSSTSTLAPLRRHCAWWPPSLLLP

SEQ ID NO: 10 - protein, 142 aa, Zea mays subsp. mays
  misc_feature (1)..(142): Ceres Seq. ID no. 12635814
MVCRADSRFASTRRSRFASFSASVSMCRGLLRPYPVTAADDCGGCCPAPLELLEQGEDWMPTLPSSRLSLVLASSSSSCSIAAWAAGAAAWRRRCAGSAWSAAAPAPAPAMSASAMAARSSTSTLAPLRRHCAWWPPSLLLP

SEQ ID NO: 11 - protein, 117 aa, Zea mays subsp. mays
  misc_feature (1)..(117): Ceres Seq. ID no. 12635815
MCRGLLRPYPVTAADDCGGCCPAPLELLEQGEDWMPTLPSSRLSLVLASSSSSCSIAAWAAGAAAWRRRCAGSAWSAAAPAPAPAMSASAMAARSSTSTLAPLRRHCAWWPPSLLLP

SEQ ID NO: 12 - DNA, 603 bp, Zea mays subsp. mays
  misc_feature (1)..(603): Ceres Seq. ID no. 13586357
ccgcaattaaccctcactaaagggaacaaaagctggagctccaccgcggtggcggccgctctagaactagtggatcccccgggctgcaggaattcgcacgagaccattacctagaacatcctaatcgaaaactgatttgtcataactgtttttgtgtatttacaattcacagattctccttcaatcccagcgccataaatctcttccctgtggagattcaccttgaagatgcaccggccggtgaacaaaaggtttaggaagaatggtccgaaccagagttctgacaaggaacataaaggcatatttttgttccattgtggcaaagagcataatgtaaataggcggcatataccaggtagtagtcgaatgtactcattcttttgtattaaaatagttctgttgtttcataatatgtgtaagagggggaagagggtggacgaattgtgcaagggttcagagattgtgctattataggtggtagattactatgtaggctatacacaattctttcataagttattgttgtattgtacccttaagctgcaaggccttgtggccacgctggccactcttatgcagttgtaaactctgcgatcttgtctc

SEQ ID NO: 13 - protein, 81 aa, Zea mays subsp. mays
  misc_feature (1)..(81): Ceres Seq. ID no. 13586358
MHRPVNKRFRKNGPNQSSDKEHKGIFLFHCGKEHNVNRRHIPGSSRMYSFFCIKIVLLFHNMCKRGKRVDELCKGSEIVLL

SEQ ID NO: 14 - DNA, 713 bp, Zea mays subsp. mays
  misc_feature (1)..(713): Ceres Seq. ID no. 13586483
acctagaacatctaatcgaaaaattgagagagagatcaccgtcgaaaagcagtctcccaattccaccgaataactaataacatctcctcgagcgcgaggccggcttccttggaccaatccagcagcaagcgacccggccagcaccagcagccatggagatgaagaaggtcctctgcgccgcgctcgtcgccgccgcctccgccaccgccgtgctggccgaggtcgcctccgagtcgccctccgaggcgcccgccggcgcggccgccggcgcggccggcggtgcggctggcccttccgccagcgccgccgccgccgccgcagtgcccgccgccgcggcgctcgtcgtctccttcctcgcctccttcctccactgagcgacgtaccgcgcggagtgcgggaaacctgggatggagcatcgtgtttggttcacccgattaataattaattaatcgttgttttatttatttatttattgcttgcggttgcctaattatgtgatcgtctgttgttccttccttcgttccttccttggtgatgtgtgggtcgccaagggggtttcgtttctgtaatcctgcctgatcgatgctaatactatgatcccaatttggtttttgcgaaaaaaaaaaaaaaaaaaaaaaaaaaaacaaaaaaaaaaaaaaaaaagcttatcaataccgtcaacctcaagggggggcccggaacccaattcgccc

SEQ ID NO: 15 - protein, 73 aa, Zea mays subsp. mays
  misc_feature (1)..(73): Ceres Seq. ID no. 13586484
MEMKKVLCAALVAAASATAVLAEVASESPSEAPAGAAAGAAGGAAGPSASAAAAAAVPAAAALVVSFLASFLH

SEQ ID NO: 16 - protein, 71 aa, Zea mays subsp. mays
  misc_feature (1)..(71): Ceres Seq. ID no. 13586485
MKKVLCAALVAAASATAVLAEVASESPSEAPAGAAAGAAGGAAGPSASAAAAAAVPAAAALVVSFLASFLH

SEQ ID NO: 17 - protein, 40 aa, Zea mays subsp. mays
  misc_feature (1)..(40): Ceres Seq. ID no. 13586486
MIPIWFLRKKKKKKKKKQKKKKKSLSIPSTSRGGPEPNSP

SEQ ID NO: 18 - DNA, 1079 bp, Zea mays subsp. mays
  misc_feature (1)..(1079): Ceres Seq. ID no. 13586524
gatttctcgatacacaccgaaattcgaatcgcccgcctgccgagccctcgcccccacaccgccgatgccctccaagcggccttccccgcacgccatggacgaagccgtctccgcctccgctgccgccgcgcgcctccgcgcctccaccccgcgctccaagaaacgcacctcccgctccaagtcccgcggccgctcccaggatcgccgccgctccccgaaccctaaccctagctcccgtcgcgagcgcgccgcggaccacggctccgccgcgccctcgcgcaagagcgaccgcaagcagaaccgctccttcccggattctgccacgctcgccacggccatggcctcggtcgccgccgcctcggccccgtcgtccgaggccatggcctgggtttcgtggtcatctgcttgcttttcgccaggagcctggtcaagaagaaggatggtgattactgatgggagggagagcacggaaggagaatgtggacaaaggcattgtgggggcatggtatggcattttgatggtagggttgtgtattttgtttcttcaaggtggtgagtggaatacagagggggtgttttttggctcttcttcctctggccatgtgagggtgccatcccccccatgatggcagagagaggaaaagaggtggcaagctgctgttcaggaaagaagctgtccacttctggggctattttgattctcagctgaaattggtagacgagctcggggctgtcgtcttagcctctcctgcttagggttctaggagtacattgattctcttgtatttttttgacccccgccaaatgaaaaatacctgttaggtctaggctgaacgtacttagtctcttgtttaaggttgcaggagcgggttgggtgtctatttggttggtctgttatggaaaacgaacttccagatgctctggaaccagattttaactctagggtttggtagtagttggtgctaccgccattggttaactggtcgctagcctttctgtatggacattgctgacctggtaaccacacagctgtgctgtgcagctgttctcttcgtttgacctgttgcagctattcgtcg

SEQ ID NO: 19 - protein, 184 aa, Zea mays subsp. mays
  misc_feature (1)..(184): Ceres Seq. ID no. 13586525
ISRYTPKFESPACRALAPTPPMPSKRPSPHAMDEAVSASAAAARLRASTPRSKKRTSRSKSRGRSQDRRRSPNPNPSSRRERAADHGSAAPSRKSDRKQNRSFPDSATLATAMASVAAASAPSSEAMAWVSWSSACFSPGAWSRRRMVITDGRESTEGECGQRHCGGMVWHFDGRVVYFVSSRW

SEQ ID NO: 20 - protein, 163 aa, Zea mays subsp. mays
  misc_feature (1)..(163): Ceres Seq. ID no. 13586526
MPSKRPSPHAMDEAVSASAAAARLRASTPRSKKRTSRSKSRGRSQDRRRSPNPNPSSRRERAADHGSAAPSRKSDRKQNRSFPDSATLATAMASVAAASAPSSEAMAWVSWSSACFSPGAWSRRRMVITDGRESTEGECGQRHCGGMVWHFDGRVVYFVSSRW

SEQ ID NO: 21 - protein, 153 aa, Zea mays subsp. mays
  misc_feature (1)..(153): Ceres Seq. ID no. 13586527
MDEAVSASAAAARLRASTPRSKKRTSRSKSRGRSQDRRRSPNPNPSSRRERAADHGSAAPSRKSDRKQNRSFPDSATLATAMASVAAASAPSSEAMAWVSWSSACFSPGAWSRRRMVITDGRESTEGECGQRHCGGMVWHFDGRVVYFVSSRW

SEQ ID NO: 22 - DNA, 937 bp, Zea mays subsp. mays
  misc_feature (1)..(937): Ceres Seq. ID no. 13587014
gctcttcgttccggccatcctgacctctagtctgtcgctacccatgcccctgtgacctgcctgttaattcctgtcctttccctgatgctgcgccaccagccgcctaattgccgcgcgctgcttgctactgtgccgccggtggcagaggtccgcatcctcgtaatcccttcctaacacgacatgagaggaatttaatgaactgttccttgaattgcgccaagtgggttgtggagtatatctcaaagtcttggaaccactgcgttggcattagtgggcatgcttacgaatcttcagttagatgcctatcagcggcaccttggtcaaagctgctaaactttgataatatttgattatgtgaagaaaattgagcttgattccaaaacctgaatattggggtggctacaaattgacaccgacactttttgagttctggcaaggacaacagtctcgactgcatgaccggttacaatactcgcagagagaagtagatgggagcacagtgtggcacatcgagaggttgtccccttgactgttagcctgtcaacacttcggtaatagcgttgaggttatcaccagcaaccaaatcttctccagctgcaagatgtgcgaactgccccaagatgttaccgtggtgattagatcccgtgtttgagtaccgcagcccagaagctcagttctgtgcggacacccttttcagtttccacttgggccttccattgtagcggtgggtgaggagagagtgaagtgctttgcaaagtcatcagatctcttttaggcccttgcgtttctcttccgtaaatggtatccatcgaaccaggtttctaaatcctgccgattgtgaacttgtgccgtgatacactagtactgcgggaataatgatcttgggatggcattgtcagcaccgtgctagtaaataaagatgcaatttgatttattc

SEQ ID NO: 23 - protein, 51 aa, Zea mays subsp. mays
  misc_feature (1)..(51): Ceres Seq. ID no. 13587015
MNCSLNCAKWVVEYISKSWNHCVGISGHAYESSVRCLSAAPWSKLLNFDNI

SEQ ID NO: 24 - DNA, 700 bp, Zea mays subsp. mays
  misc_feature (1)..(700): Ceres Seq. ID no. 13587227
gccactctttcatagatatataaagatacattaaaaacagataacacacacgcatatatattaagcttaatatcaagttgttacatacgataatatatagagaaatcatagagatcgcgaaatatcatattcatatgatcatttccactttcttcgtccgaacatgccatgcttgcctcgtttgcctccaaacatgccgtgcttgccacgcttatgcttccctccaaacatgctgtgctttcctcgcttgtactttcctccaccgaaaaaccctttcttgtacttaccaccgtgatggtggccataaccaccatgatggcccgcgtggtgacttcccattgcagccgccgcagctgttgccgctccagctatcaatcccccgactcctcctccaagacctggacggtgaggaccagggtaaccggcgggaggataagcaccaggaggaggtggataagctgcaggtggatagccctgcggagggtaaccctgtggagggtacccttgctgagggtaaccatgcggtggtggataagctcccggcggaggaggaggataagctcccggtggatacccatggccgggatgattatgatgtgaaaagaatcctttgtcttgttcgtgatgcttgtctttacccattctgatttgaaatcaagaggcagaaagataagaagatttatatgaaaaacttttcgat

SEQ ID NO: 25 - protein, 170 aa, Zea mays subsp. mays
  misc_feature (1)..(170): Ceres Seq. ID no. 13587228
MIISTFFVRTCHACLVCLQTCRACHAYASLQTCCAFLACTFLHRKTLSCTYHRDGGHNHHDGPRGDFPLQPPQLLPLQLSIPRLLLQDLDGEDQGNRREDKHQEEVDKLQVDSPAEGNPVEGTLAEGNHAVVDKLPAEEEDKLPVDTHGRDDYDVKRILCLVRDACLYPF

SEQ ID NO: 26 - protein, 143 aa, Zea mays subsp. mays
  misc_feature (1)..(143): Ceres Seq. ID no. 13587229
MLASFASKHAVLATLMLPSKHAVLSSLVLSSTEKPFLVLTTVMVAITTMMARVVTSHCSRRSCCRSSYQSPDSSSKTWTVRTRVTGGRISTRRRWISCRWIALRRVTLWRVPLLRVTMRWWISSRRRRRISSRWIPMAGMIMM

SEQ ID NO: 27 - protein, 128 aa, Zea mays subsp. mays
  misc_feature (1)..(128): Ceres Seq. ID no. 13587230
MLPSKHAVLSSLVLSSTEKPFLVLTTVMVAITTMMARVVTSHCSRRSCCRSSYQSPDSSSKTWTVRTRVTGGRISTRRRWISCRWIALRRVTLWRVPLLRVTMRWWISSRRRRRISSRWIPMAGMIMM

SEQ ID NO: 28 - DNA, 983 bp, Zea mays subsp. mays
  misc_feature (1)..(983): Ceres Seq. ID no. 13587275
gcggcggtgttgacccacccacccgttcctcccccaccccatcagcgctggaggcggcggtgcgtaagtcccccggacccttcggcggcggcggcggcgcgcggttatgccgagaggctcccaggtttcatcatcgtgctctgctggagttatagcattttcagcaaggatatggagtacaccccctgcacagcaagttcctctgtatcccacatctcgctgctcgaggaagttcttggctggaggttttgtctttacggagacttcctggtcatctcttttgtcaactgcacttgaggatcaacccacgcttagtgactgccttgcctggtcccatgctgtcagacattagagttgcccagtgattacactattacagtgcagctgtagcacatttatttgagcatggtggatctgtttctctggcaacattccagtaatctttgtcttggtgctaatcagccagcagaagttaccatcaagacatctttggacacttggatctaacgcttagagctttgccttcgcatataggctctaggtttgggttttcgttttctgctagctttcttctactctaccactgtaagttttcagtctgatcggtccaaagtttggtgtgtattggttacgctgtccttcaccagccttcactttgcatggcgtgaccttagagaagacgtgttcaagattttgttgtcgcaaaagcatgggaatagcatacatagctttgagaggagtctccagtgactttggtgttgtaacatccaaagacactcctgttatacatatatgagtcctgttttttactatacaactgttctgaaataagggcagttctgtgcaccaccagcgaataaaatggagagatatacaattatcaacgaagttggtgatggaacatttgggagtgtttggcgtgcaaccaataaggaaagcggtgaagtggttgcgatcaagaagatgaagaaaaagtattattc

SEQ ID NO: 29 - protein, 98 aa, Zea mays subsp. mays
  misc_feature (1)..(98): Ceres Seq. ID no. 13587276
AAVLTHPPVPPPPHQRWRRRCVSPPDPSAAAAARGYAERLPGFIIVLCWSYSIFSKDMEYTPCTASSSVSHISLLEEVLGWRFCLYGDFLVISFVNCT

SEQ ID NO: 30 - protein, 81 aa, Zea mays subsp. mays
  misc_feature (1)..(81): Ceres Seq. ID no. 13587277
MPRGSQVSSSCSAGVIAFSARIWSTPPAQQVPLYPTSRCSRKFLAGGFVFTETSWSSLLSTALEDQPTLSDCLAWSHAVRH

SEQ ID NO: 31 - protein, 50 aa, Zea mays subsp. mays
  misc_feature (1)..(50): Ceres Seq. ID no. 13587278
GGVDPPTRSSPTPSALEAAVRKSPGPFGGGGGARLCREAPRFHHRALLEL

SEQ ID NO: 32 - DNA, 670 bp, Zea mays subsp. mays
  misc_feature (1)..(670): Ceres Seq. ID no. 13598909
gagcttgatacaaacaagttcattccacgtatgacgcgccgatcgagagtatcattctttcgtagtgtgctacaaccttcgtccttcatgtcgatggcctatatagctatacgactagctagttgtcgtagatgcggcactcctcggagtccgggttgtccttgcagtacttctcgagcgggtcgttggcgttggtctccttgaggctgtcgcgggcgtggctggccgtggcgctgagctcctccacctcgtcccacgccgccgcgcactcggcgtcgcccttctggtcgtccgcgcacgtctcctccgcctgcttgatgctctccgacaccttgtcggagatctccggcggcgtggccggcccgctggaccgcacggcgaccaaccgcccgccgccgcggcgcgccgccgcggggaaccagacgacgcgcttggcgcccgccctcctcgggacgacgatcagcacgtcgccgccgcccgccgccgcgaaggtcgtcgtcgtcaccgggacagagaggctcgccaccgtcgacgccgccattattattcctgtcttggctagcttatagcttcctgcgtcacggtcacgatcgaacgaactcgatcttctgcgtgtgtgatcgtcgtcgggtgggtgtggtgtagtgtagtgtagtgcttcgcggttggc

SEQ ID NO: 33 - protein, 145 aa, Zea mays subsp. mays
  misc_feature (1)..(145): Ceres Seq. ID no. 13598910
MRHSSESGLSLQYFSSGSLALVSLRLSRAWLAVALSSSTSSHAAAHSASPFWSSAHVSSACLMLSDTLSEISGGVAGPLDRTATNRPPPRRAAAGNQTTRLAPALLGTTISTSPPPAAAKVVVVTGTERLATVDAAIIIPVLASL

SEQ ID NO: 34 - protein, 83 aa, Zea mays subsp. mays
  misc_feature (1)..(83): Ceres Seq. ID no. 13598911
MLSDTLSEISGGVAGPLDRTATNRPPPRRAAAGNQTTRLAPALLGTTISTSPPPAAAKVVVVTGTERLATVDAAIIIPVLASL

SEQ ID NO: 35 - DNA, 723 bp, Zea mays subsp. mays
  misc_feature (1)..(723): Ceres Seq. ID no. 13599149
gaaccaaaactaagtttatggataaaaatacattttaagatttttaaaacctatatgacaccacctctcatattacacagtacgacattttatccaacaaagctgctacagctgcggctcgttatctttacaccgcgttcttgttagctgtttccgccgcggcaccagtagtcacggcaccaccacggccgctctggctctcgcttccgccgccaccgtcgccgtcgcttcgctgcttgagatcacggaagacccgcgagctctcctcgaagatgtgcgcgcggcggtcgtagtcggtgggccggcgcccctcgtcctcccccatgatggccgcctcctccagcacctccagctcttcgggcgccagcccggcctcctccgcctgatcgaccgccgacgccggcccgtccttgcgcggctcgacgggctccgtcgtcccgcctccgcgcggcgtgtttgcgcgcaagcgccgcgcgggagccgcgcgccagacgcagacgcggctcgtcgtggtggcccgggcctggcacgccgtggccgcgcgcgcgcggggtacctccggctgtggccgcgcgggggccaagcacgagcggcaaacgggttgcatgtctcgggagtcgggacagggccagcgggcgccgggggatcggtgaggtgatgcggcaggttcgtcgggaacggtgaacacacgatttgggttcggactttgggtgcagagccggt

SEQ ID NO: 36 - protein, 48 aa, Zea mays subsp. mays
  misc_feature (1)..(48): Ceres Seq. ID no. 13599150
EPKLSLWIKIHFKIFKTYMTPPLILHSTTFYPTKLLQLRLVIFTPRSC

SEQ ID NO: 37 - protein, 30 aa, Zea mays subsp. mays
  misc_feature (1)..(30): Ceres Seq. ID no. 13599151
MTPPLILHSTTFYPTKLLQLRLVIFTPRSC

SEQ ID NO: 38 - DNA, 851 bp, Zea mays subsp. mays
  misc_feature (1)..(851): Ceres Seq. ID no. 14305060
agtacctcgaagcggacggtggaggaggggtcgatcttcccggacggcggcgacagggtggtccgcgcggcggggcccgcggcggcgtggagcatgcagagcagcgactcgtactggttgagcgccagcgagtcgccgacgaacatggccgtcttgccgcgccacatccggagcagcgcggccccgtcgaaggcgggctgcgcgcacggcgcgtccagccgccaccggtaccggaggtacgccgtgtcggggcggccgaagcgcgcgcacgcgaactcgtcgcggacgaaggggcagcgcgccgagtcgtagagcgggtacgacccgtcctccacccacgcgcccgccgccgcgaaggggtcgcaggaccgcgccgccgacgccgacgccccgccggggtggtgccgctgccgctgcttccgcgacacggtcacggcggccgccgccgccgtgcacgccgccagcagcagcagcactagcagcgccgctagcacggctcgccgcttcgccttcgccatcgtccccctgccggaacgccgacaaagcgcggagaggtgaggtgactgagagtaggtgcgtgtggtgccggtgagaggccggaggaagaggtggatggaaggtttggtgtgacgggcggcggggccgcgggggagggaggaggactcgactgactactgtcctactgacaaggaagcgcgtggcgtggtgggtatatgtagcgctctgctgcccagcccgtggccgtgtcatgcgatctctctctctctctctctgtctgctgctgctgcttcttcttttaatggtgggcggttactgccgtctgccggttctgccatggacgacggatgggc

SEQ ID NO: 39 - protein, 158 aa, Zea mays subsp. mays
  misc_feature (1)..(158): Ceres Seq. ID no. 14305061
YLEADGGGGVDLPGRRRQGGPRGGARGGVEHAEQRLVLVERQRVADEHGRLAAPHPEQRGPVEGGLRARRVQPPPVPEVRRVGAAEARARELVADEGAARRVVERVRPVLHPRARRREGVAGPRRRRRRPAGVVPLPLLPRHGHGGRRRRARRQQQQH

SEQ ID NO: 40 - protein, 103 aa, Zea mays subsp. mays
  misc_feature (1)..(103): Ceres Seq. ID no. 14305062
STSKRTVEEGSIFPDGGDRVVRAAGPAAAWSMQSSDSYWLSASESPTNMAVLPRHIRSSAAPSKAGCAHGASSRHRYRRYAVSGRPKRAHANSSRTKGQRAES

SEQ ID NO: 41 - DNA, 710 bp, Zea mays subsp. mays
  misc_feature (1)..(710): Ceres Seq. ID no. 14305234
gaaccttctcgacggggagcgtgaagagcgcgacgacgacggcggcgagcaggacggcggcgacggcgaggcggacggccgagggccacgagagcgccatggacgcgagcagcctcctgcgccagggcctgagcctgccgcagtcctcccctccctccccgccctccgcgccgtccgcccagccccccgccctcccccgcgcccgcagccccaccgcggcgcctgccagatttgccgcccaccggatccgccctcccgcctccgccgccctcgcgcaccgctcgctgctaccgctagcacgcccgcccggcgcggcggcttatctcgcgcgagcgacagagagagagattcgggcgctggatctggaggcaggcgagtgggtggaggtggagccgtcccgtcgcgacgcgttgcgtgtgggttcgatttctctactctcgttgccccttttcccgctggggagcaccgagcacgggaggaaacagcagggggagggttcgcttcgccttgctcgcacgcctcgcctcgccttgcttccagttccagttccagtcccacctaccgtccgtgtccgtcctcggcggggagcgcccagcaccgacagatgtggacgcgcatgatccggtcgcctctgctctgagtctgactgtgggcggtcgagagtcgagaaaggtttaatcgaaccggttgctgccaggattggcaccgat

SEQ ID NO: 42 - protein, 212 aa, Zea mays subsp. mays
  misc_feature (1)..(212): Ceres Seq. ID no. 14305235
NLLDGEREERDDDGGEQDGGDGEADGRGPRERHGREQPPAPGPEPAAVLPSLPALRAVRPAPRPPPRPQPHRGACQICRPPDPPSRLRRPRAPLAATASTPARRGGLSRASDRERDSGAGSGGRRVGGGGAVPSRRVACGFDFSTLVAPFPAGEHRAREETAGGGFASPCSHASPRLASSSSSSPTYRPCPSSAGSAQHRQMWTRMIRSPLL

SEQ ID NO: 43 - protein, 205 aa, Zea mays subsp. mays
  misc_feature (1)..(205): Ceres Seq. ID no. 14305236
TFSTGSVKSATTTAASRTAATARRTAEGHESAMDASSLLRQGLSLPQSSPPSPPSAPSAQPPALPRARSPTAAPARFAAHRIRPPASAALAHRSLLPLARPPGAAAYLARATEREIRALDLEAGEWVEVEPSRRDALRVGSISLLSLPLFPLGSTEHGRKQQGEGSLRLARTPRLALLPVPVPVPPTVRVRPRRGAPSTDRCGRA

SEQ ID NO: 44 - protein, 173 aa, Zea mays subsp. mays
  misc_feature (1)..(173): Ceres Seq. ID no. 14305237
MDASSLLRQGLSLPQSSPPSPPSAPSAQPPALPRARSPTAAPARFAAHRIRPPASAALAHRSLLPLARPPGAAAYLARATEREIRALDLEAGEWVEVEPSRRDALRVGSISLLSLPLFPLGSTEHGRKQQGEGSLRLARTPRLALLPVPVPVPPTVRVRPRRGAPSTDRCGRA

SEQ ID NO: 45 - DNA, 699 bp, Zea mays subsp. mays
  misc_feature (1)..(699): Ceres Seq. ID no. 14305573
aaatttatatcagtgaggcaaaatgttgtcaaatttaagatcaagccaggttcagattctggtgcttctgacagcagaataaaaagaatctcgtctttcttgtttcacccatttttcccgcttgcactttcgattcagcagacttatatgcagccaactgttctcaacatccatttcaggagatagaaaaggtataacggttgccctaggtgtatctatgtcattagtgaacttgcagcattgctcgcggcaaaattttggccatatgtactctctagtagataagctgacagatgttacagtaggggataagatccattgtctggcggtgagaatggctagtttgatttctcttccaaaacaaagtacaaaatgcaaatgggctcaatattcatctattgatgtggcttcatgggctcatcagtcatcattgcggcttcacagtgttgatctatgctttcatatgcctagctcggagtgtcagatgtgcttgttattggatttgaggcataaggacacgtatattggatggcatggagttggtatattggatgcttcatgcttgaggcgagggtgatctaagctgcgaatttgttttcgaggatatataggaaatatagcattacaaatagttttgagttgtcatattatgatgaagtaactactatttactgaaactgttatgcaaagataataatc

SEQ ID NO: 46 - protein, 119 aa, Zea mays subsp. mays
  misc_feature (1)..(119): Ceres Seq. ID no. 14305574
MSLVNLQHCSRQNFGHMYSLVDKLTDVTVGDKIHCLAVRMASLISLPKQSTKCKWAQYSSIDVASWAHQSSLRLHSVDLCFHMPSSECQMCLLLDLRHKDTYIGWHGVGILDASCLRRG

SEQ ID NO: 47 - protein, 103 aa, Zea mays subsp. mays
  misc_feature (1)..(103): Ceres Seq. ID no. 14305575
MYSLVDKLTDVTVGDKIHCLAVRMASLISLPKQSTKCKWAQYSSIDVASWAHQSSLRLHSVDLCFHMPSSECQMCLLLDLRHKDTYIGWHGVGILDASCLRRG

SEQ ID NO: 48 - protein, 80 aa, Zea mays subsp. mays
  misc_feature (1)..(80): Ceres Seq. ID no. 14305576
MASLISLPKQSTKCKWAQYSSIDVASWAHQSSLRLHSVDLCFHMPSSECQMCLLLDLRHKDTYIGWHGVGILDASCLRRG

SEQ ID NO: 49 - DNA, 1132 bp, Zea mays subsp. mays
  misc_feature (1)..(1132): Ceres Seq. ID no. 14305754
acccaccctcgttttgctccgtctctcttcctcctcacttcccacccaccctcgctcgttttgttctgtctctctttctcctcactccctccgtcgatcctctgcagcttgcatcggtcgaccagtagtcttccactgtaatcgcctctcattattctttctgccacgctcctcttcgtccttactccctccgtcttgtctatctgtagccacttcgtcttcctacgtttttgccaggatttgaggctgtcatagtatgctctctgaccgtgctggcgggaggaaggaggtgtgtatatagttttcttgcattattttcctgtgactattctcatccctcctatatgttctttcagatgatttaagttctctgcgtttataaccagaaagaggaggataatccaatcatggtaactaaatagtaggtagtaatgtttcacggtaaatcacagtgctcgaatgcgatatgatctttgactcggagtattgaagactaatttagtttgagtttgagattagttgtttttgtcattaataaactcacattggcatctggttacgagctcactactagattttagatctccagttttggtgtacttttgctgcatgtgtctcccagagttgcagatttgcaggtagcacctgattcttttttatttttggattgagatacagtgaaatttatatttgcctgttcccaccatactgtaatatgaatacaaggatggcttgatctggcaagtgctcgccattctatgggcccatcatgcttttcgagtacactgtttgatcacaaggagcggtctgctgccactaaacttcaagttgttgatcatgatggcctgaaaaattatcggggatatgctcatatgccttggccttaatttaaactacttgtatgagatggagaaatgtcacaaaacacaggatgaagacgactccaggaatccacccatgcctctcagtgactcagtggcacaaacgacagcctagtcaggtaacacaataacatatcagccatatgctatacatgcatatactatgttatggaaataactccgaagagtatatcacattctaactagttatgtatgcaaacactaatgcaagacaaccatcttgctcgtcg

SEQ ID NO: 50 - protein, 80 aa, Zea mays subsp. mays
  misc_feature (1)..(80): Ceres Seq. ID no. 14305755
PTLVLLRLSSSSLPTHPRSFCSVSLSPHSLRRSSAACIGRPVVFHCNRLSLFFLPRSSSSLLPPSCLSVATSSSYVFARI

SEQ ID NO: 51 - protein, 46 aa, Zea mays subsp. mays
  misc_feature (1)..(46): Ceres Seq. ID no. 14305756
THPRFAPSLFLLTSHPPSLVLFCLSFSSLPPSILCSLHRSTSSLPL

SEQ ID NO: 52 - protein, 43 aa, Zea mays subsp. mays
  misc_feature (1)..(43): Ceres Seq. ID no. 14305757
MLICLGLNLNYLYEMEKCHKTQDEDDSRNPPMPLSDSVAQTTA

SEQ ID NO: 53 - DNA, 1014 bp, Zea mays subsp. mays
  misc_feature (1)..(1014): Ceres Seq. ID no. 14305836
acaaattttccagctcactcagcgtttctctctgctcgcctcggcctccaactccggccgtggtggccaccggaagcgcgtctcccggccccggctcagcggtctgcgttctccctgctctcccaagctatgcgcccctgtcctgttccctgtgcgcgctgttcctgctcgctttggcgtccacgccatgaagccctgcgctcgtcgcggcagactccagtcctcctctgccgagcagcttgcccagccttcttctccctacacgccggagctcgcccagccgaccgaagctctaagctccagccatggcgcgtcctcgctccctcttccctgctcgccggttctccttgccgagctcccctacgtgctgagctctctgctgcggctttcctttccccaagctcctccagccgcgcagtccagctgcttcttcctcctcctggcgttcttcctgtgccatgcgccctgcccatctcccagttccagctgccgcatgcgcagctgctccttctgcccagccgccccggatcttgctcggccatagcaagttcctccctatcctctgctcgcgggctgctccagtcggtcgcgcgtccagcttgcccagtctgcacgccacgctctcttgtcgtggctttctgcttcctcgtcgctcgtagcgttctgttgttcctgcgcgtgctgccgcgaagctccctgttcagttcgcctccgtcacgttatcgtgctcgcgaaactgctcgcagtcaatatcaagtccgtgacgcccacgttggacacggtaaaacgctgtgtgtgctggtgtccgaactcgccctggtcatggcgtttggtaccgtgccgtgctttttctctacgcacgtcctcctgttagctgtcgcgactgccgtcaaatcatcggagtcgttcaacttgccgatcacatcttggtcggtcgtcgatttcctattcgtcatggtacaacactgttattaaatccggtctccaacccgccatggcgtttgtcacaaaaag

SEQ ID NO: 54 - protein, 324 aa, Zea mays subsp. mays
  misc_feature (1)..(324): Ceres Seq. ID no. 14305837
TNFPAHSAFLSARLGLQLRPWWPPEARLPAPAQRSAFSLLSQAMRPCPVPCARCSCSLWRPRHEALRSSRQTPVLLCRAACPAFFSLHAGARPADRSSKLQPWRVLAPSSLLAGSPCRAPLRAELSAAAFLSPSSSSRAVQLLLPPPGVLPVPCALPISQFQLPHAQLLLLPSRPGSCSAIASSSLSSARGLLQSVARPACPVCTPRSLVVAFCFLVARSVLLFLRVLPRSSLFSSPPSRYRARETARSQYQVRDAHVGHGKTLCVLVSELALVMAFGTVPCFFSTHVLLLAVATAVKSSESFNLPITSWSVVDFLFVMVQHCY

SEQ ID NO: 55 - protein, 281 aa, Zea mays subsp. mays
  misc_feature (1)..(281): Ceres Seq. ID no. 14305838
MRPCPVPCARCSCSLWRPRHEALRSSRQTPVLLCRAACPAFFSLHAGARPADRSSKLQPWRVLAPSSLLAGSPCRAPLRAELSAAAFLSPSSSSRAVQLLLPPPGVLPVPCALPISQFQLPHAQLLLLPSRPGSCSAIASSSLSSARGLLQSVARPACPVCTPRSLVVAFCFLVARSVLLFLRVLPRSSLFSSPPSRYRARETARSQYQVRDAHVGHGKTLCVLVSELALVMAFGTVPCFFSTHVLLLAVATAVKSSESFNLPITSWSVVDFLFVMVQHCY

SEQ ID NO: 56 - protein, 180 aa, Zea mays subsp. mays
  misc_feature (1)..(180): Ceres Seq. ID no. 14305839
QIFQLTQRFSLLASASNSGRGGHRKRVSRPRLSGLRSPCSPKLCAPVLFPVRAVPARFGVHAMKPCARRGRLQSSSAEQLAQPSSPYTPELAQPTEALSSSHGASSLPLPCSPVLLAELPYVLSSLLRLSFPQAPPAAQSSCFFLLLAFFLCHAPCPSPSSSCRMRSCSFCPAAPDLARP

SEQ ID NO: 57 - DNA, 2492 bp, Zea mays subsp. mays
  misc_feature (1)..(2492): Ceres Seq. ID no. 14308929
atgcaaaaccatggggtcggctgtgcgaggtgccagacggtttgtgataggtcaccaaaccgttcacgtgtaggtcaccatgaaacagataattatgatcttctctacgggtccatggaccgtccgcgtgtagatggcaaactgtctgcactggcgcagagggctttccgtagaacctagaccttgcctcctaggaggaaccccatcatggagaagagatcatagggttgcttcgagatcagtacgccacccaaagtgcctctagacgatgtagagtagaagagatgtgaagatggagattgcgaaactacaactaaagttatgctacttctactcctaaggcatgataatatagatagataagttcgattggattacatacatacatacgtacatacatacacacacacacgcacgcacgcacgcacacacacacacatacatatatacatacctacatacagtttgtatatttggagccttgacttccaataactagaggaagccctggctcaacggtgccatccggttcagatgcaccaggttcggaaggctataaaaacacccctaggacgtcaaggattaggttttagcaggggtggcagttccctcaggcgagcgagcggcagcgacaatcctaagggccagtggtggtggcgccccaaggagggcgatcgacgatgacgctccagaaggatcgagcgacggtggcgctcccctaggatcaagcgacggcagcgctcccccaggaccgagcgatgaccgatggcggtggtcccccaggaccaagtggtgaccgacggtggcgctccccaggatcgaggatctaggaggcgcacatgcggcgatggatctgggagacacacacgcagcgatggatctgggaggcacgcgcgacatcggctcctcggaggcgcatgccccggagtggcgcccgctggcatctcacctccggcgatgacactggcattccctaggcgcgagcggtggtggatcgacggccctgtttttatgcgattatgtatacatatttatgcaacatcaataggtttttatgatacatttttgattcatggctctccttccatcttatgtatgtttatgatatttctattcacattttatgtaaacgtttgttgttttttacgtagtgtaccgcaatgcatgaataacttccacatgtagcataattagtattagtatatatcataaactatttctaacgagcctaactgcatggctgttggagagatcctatattcatgtacgaaataaagcattgaaaatcatatttttgtttcatgcatgccaacccattttctttcaactcacattcttgtcatcctaattttgtgcgcatgcaacagaaaatatattttgtacacagtgtaccgcagtgcataaataccttcaccgtgtattataattagtctcagtatatatcataaactagttctaacgagtctagatgtatggctgttgaagagatcctatactttcaacgcactattactctttcttgctagagttagagacagaccggaggaatgaaaggtgttaatgaaaggagagagttgcagagagagactaagggagagaggagacaactagatagggttttgtaggggacgatgaaaaattcaccatgttgtatagagaccaagggagaggagagagagaccaaggaagcatgttctagtagagaaagaccattttccatagctctatctagagaggtggacgatgaaactgtagatgttgtcattagaaataatatcacatgaaggatcgtgttcaatttctcatgtggctgaataagaacagtaaggataaagttacattcatagatgaatctgtatttagacttgccaactgataattagtggattgattatgttgttactgtttatttgaccaattttttatagaaatttcatataaataggagaaaaggtattaaagttgctaatggtctcgaaatttacattgaaggtattgtagacattgcgtaagaactagatggtggctccattctacaaatgagtgatattttatttatgacttccatgataaggaatctaatttctatatcatgttcagatgataataatattcattgtcattttagaaacatatattgccattacataagacaagctctatttactttcctattatgcctcttcttttatgaatatatgtaatgtaatcgttaagcatagaatcaatcatcattgaaattgtggtactatagtttatgccatatttcaaggaggagaatttaatgattattaaaagaagaatttttcagtcatgatattttttagattttgacaattgcatggactgcattaagaaaaagtatgtgaaacaaattaagaaagatattaaacaaagcgctagagttttagaaattcacacatatatttatagtcctttccttgcaaaaaatatgtagatgatttagtttttattatatttactgatgattt

SEQ ID NO: 58 - protein, 139 aa, Zea mays subsp. mays
  misc_feature (1)..(139): Ceres Seq. ID no. 14308930
MAVVPQDQVVTDGGAPQDRGSRRRTCGDGSGRHTRSDGSGRHARHRLLGGACPGVAPAGISPPAMTLAFPRRERWWIDGPVFMRLCIHIYATSIGFYDTFLIHGSPSILCMFMIFLFTFYVNVCCFLRSVPQCMNNFHM

SEQ ID NO: 59 - protein, 75 aa, Zea mays subsp. mays
  misc_feature (1)..(75): Ceres Seq. ID no. 14308931
MTLAFPRRERWWIDGPVFMRLCIHIYATSIGFYDTFLIHGSPSILCMFMIFLFTFYVNVCCFLRSVPQCMNNFHM

SEQ ID NO: 60 - DNA, 662 bp, Zea mays subsp. mays
  misc_feature (1)..(662): Ceres Seq. ID no. 14312519
aatgagcatcttgagctgcgcgtggatgtccccgcgcaggccgcgctccatctcggcgaccatggcgtccgcgatgccccgcagcagcgccgtgggcgtggcgaggctgcgctccacctcctcgatcacggcggccgcgcgccgcctcctctccgcctccgcggaccccaggagcgcggcgtcgcgcctgcgccggcggtgcaccagcaccgccgccacccccaccgccgcgcacgccacgaccgccgcgcccaccaccacggacttccccatcgccgccgccgccgccgccgatcctgatccctagcctcgcgcccgcggccgtcgagcgagcgggtcgatccggacgcgcgcacgggtttccgcgctctggatccgaggacgaggccaactcctccagcgaactactactacttcttccttggcttccccgcccgcgtaggagaggaggaagacgggggccactggcacgggcgttttaaccggtagccaactacccctcgtccttcccggaattcacgggtccacccctcggattcggacggctacgatccgcttcgcgtcgaactggacgggctggatcggagcgtgggggtggacggatctgggggcccggggggcttgtctagtaaatatggatatatatatattcgctaattacc

SEQ ID NO: 61 - protein, 101 aa, Zea mays subsp. mays
  misc_feature (1)..(101): Ceres Seq. ID no. 14312520
MSILSCAWMSPRRPRSISATMASAMPRSSAVGVARLRSTSSITAAARRLLSASADPRSAASRLRRRCTSTAATPTAAHATTAAPTTTDFPIAAAAAADPDP

SEQ ID NO: 62 - protein, 99 aa, Zea mays subsp. mays
  misc_feature (1)..(99): Ceres Seq. ID no. 14312521
NEHLELRVDVPAQAALHLGDHGVRDAPQQRRGRGEAALHLLDHGGRAPPPLRLRGPQERGVAPAPAVHQHRRHPHRRARHDRRAHHHGLPHRRRRRRRS

SEQ ID NO: 63 - protein, 93 aa, Zea mays subsp. mays
  misc_feature (1)..(93): Ceres Seq. ID no. 14312522
MSPRRPRSISATMASAMPRSSAVGVARLRSTSSITAAARRLLSASADPRSAASRLRRRCTSTAATPTAAHATTAAPTTTDFPIAAAAAADPDP

SEQ ID NO: 64 - protein, 81 aa, Zea mays subsp. mays
  misc_feature (1)..(81): Ceres Seq. ID no. 14312523
MASAMPRSSAVGVARLRSTSSITAAARRLLSASADPRSAASRLRRRCTSTAATPTAAHATTAAPTTTDFPIAAAAAADPDP

SEQ ID NO: 65 - DNA, 2109 bp, Zea mays subsp. mays
  misc_feature (1)..(2109): Ceres Seq. ID no. 14313467
ccccccccccccccccccccctcttggaaggaattccagtcttccatcaggctatggataagcaagagcaccctgaatcctcccaagatcccccgccggagttgtttgagcccctcaccatgaagaagattccagcaccatcccttgaagtcaaggaagaagctgcaagcaccctgccagcaccgtcgccctctgaggagctacaagagccagtccagcttgaagaagagttcaaccccgtcttgccatctcagttgccgctagaagaagtcatcaacattagctccctcttaacccatccaggagatgtctcagattgaagttgtgtgcaagccttgccagaagagaagctgcctggtctaaagttagttatgcccagtcctctgcatgcgttgggtagtgaagtttttcttcactttggctagagccctgcatgtatgagagttaatcatgtagactcgtgttttgaaaaactctatttgtgtggccccctagggcatttcaaaatgaacttcgcttgatgttttctccccttttgagtgcatatgtgatgctttaacgttagtgctcataagttgcatttaacatagttctcaattcaggagccaagcaatagtagttatgcttagcccccgaatctgagtagaccgtgctttggaaaaactctattcttcccttattcaaaacatttgatttgtctgtgcttatcattgctgagcttgtgtgttttctttcgttttaagaaaggttttctctaaaaacatagatcacaaattagagctaatcctcaccttatgcttccattctcatcttaacccttctcaagagaaaagcaccttacccaagaagatactaggaagcttacccttgaagcctggaataagctacagaggaacctatccagtcactcagtcaaaaggaccgaccgtgaaaatcaaagcaccgcccctgagtcaaattaaacagaaaaagaggacagaaggagttattaccatacagagaggcaaagattcttggaactagggaccacaaacatcagggtcattgaccccaccactcacccgtgccccccgcacgcgtgtcccatctccaaccaccacccacaccccttttttgcagcgcactaccgccccacccccacccctttgcagcgcacccactgccaccattactgccagcaacaccatcccccctccatcgcacttgttgccttgtgtcacctgctccatcaccaccactccgcaaccgagcacccccactcgcctataaattcccccaccagttccctcaatccccacctcactcaaagcaaaacagtcccgataaaatcccctctgccaaatcgcaagtaactccattttccactccctcgcccctgaaatcacaatgcttggtgattcttgggttgaagactgttgtacatggttcatagtcttcggtttcctcttctgtatgatggtaatactctttgatagaatcctctagtgggaagagcaaagagaaataaagggtcagtgagaagagaaaagaagacagcgaagagaagatgagaagaaggttgtcccaaagtcaaccctgtgtcagtcatctctccgtagcctgctcaagcagcaacagcagaagaaggccccgtaacacccttgttatgaggtacttcaaggagttcaaatccccaagattcaagagttctaccctcattctttttaagtggggtagtgttctagcaaggttcctgctatggagaaaaagaagaaggcctatagcaagcttgtggaggaccagatcatcaaagcttataagtttctggatgagaagtggtcacccaagttctgttgatgaagcaccagaagaccaatcaaggaaggaatccatgtgggagttcgcaagagaagtttgagtgttggcatcgatgcttcttcaataagctagttgccaagtgaaagctagaagcctgaagatgatcttgagtagccagaatcagcgtttgcaatcagcagccggatgctccgcaagggccagaatttgttgaagttccatctcctcgaagagttgcaaagtgaagatatgtagctgaagtaaagctatacccataacccttctaagccgaat

SEQ ID NO: 66 - protein, 88 aa, Zea mays subsp. mays
  misc_feature (1)..(88): Ceres Seq. ID no. 14313468
MDKQEHPESSQDPPPELFEPLTMKKIPAPSLEVKEEAASTLPAPSPSEELQEPVQLEEEFNPVLPSQLPLEEVINISSLLTHPGDVSD

SEQ ID NO: 67 - protein, 116 aa, Zea mays subsp. mays
  misc_feature (1)..(116): Ceres Seq. ID no. 14313469
MRRRLSQSQPCVSHLSVACSSSNSRRRPRNTLVMRYFKEFKSPRFKSSTLILFKWGSVLARFLLWRKRRRPIASLWRTRSSKLISFWMRSGHPSSVDEAPEDQSRKESMWEFAREV

SEQ ID NO: 68 - protein, 105 aa, Zea mays subsp. mays
  misc_feature (1)..(105): Ceres Seq. ID no. 14313470
PPPPPPLLEGIPVFHQAMDKQEHPESSQDPPPELFEPLTMKKIPAPSLEVKEEAASTLPAPSPSEELQEPVQLEEEFNPVLPSQLPLEEVINISSLLTHPGDVSD

SEQ ID NO: 69 - DNA, 426 bp, Zea mays subsp. mays
  misc_feature (1)..(426): Ceres Seq. ID no. 15170030
tcatggtggacacggtactttgtccagaccggcttgacagagaacgaagggccgctgaagaaattcgaagaggctacatccaagaacaaatacaaaccaggttgtcagatcttccacctgagttcgccaaggtgatgcgcatccatagcaccttgaattgttgtcacaccccctgccctcctccggttggcttgctcattgttcgtgtggaggaaatcgtcgcaaaaaaagccatcaggaataggttagcttatgtaaagaggctccgacacttgttgctagaaattcactctggaaattaaattgtgtccccaatgattgcaaactggagccccgctgggatatatatgttagaactttcacgctgttgtaccgctgtgctatccatgtattgagcagtttgaaatgtaaagctcttgatgatcc

SEQ ID NO: 70 - protein, 99 aa, Zea mays subsp. mays
  misc_feature (1)..(99): Ceres Seq. ID no. 15170031
MVDTVLCPDRLDRERRAAEEIRRGYIQEQIQTRLSDLPPEFAKVMRIHSTLNCCHTPCPPPVGLLIVRVEEIVAKKAIRNRLAYVKRLRHLLLEIHSGN

SEQ ID NO: 71 - protein, 55 aa, Zea mays subsp. mays
  misc_feature (1)..(55): Ceres Seq. ID no. 15170032
MRIHSTLNCCHTPCPPPVGLLIVRVEEIVAKKAIRNRLAYVKRLRHLLLEIHSGN

SEQ ID NO: 72 - DNA, 1744 bp, Zea mays subsp. mays
  misc_feature (1)..(1744): Ceres Seq. ID no. 15179131
tgaaggaaaagggtaggttaaacaaaattagtccaaaattatgattccagtacttataagaatgcagttataatttccaatgtattaggagttataattttgcataaaatgggtgctcttcatgatgccacaaacaaaacagacaccaataatcaggcaataccgtaaaataaacagtagtagacttaccctctttgtggcctctgcttggcattctcgttcatattactgtttaaggtattttattctttgtgatttgtagtgatgacaacattaatgagttcttgatgaacatgggcactttgtgttgtgcatatgccatcttcggatagcagatgaacttctgatgaagatgtgcctgaacatatctgttcttcctgccatgcattttaccataatatgtttctttgaaatatgttaataagtgcaatgaaaagattttatggctgctttgctccttaaaatggtgcctctgccatgaacgattgtttttaaaataaatgctacgattaactaccttcttgtcatcatctttaaagattgtcagattcccgtataagcatctgttgcagcagctgcaacgaacaagccatatactgcttgttatcaagttttttgtttctccaaaatattccatgcgatcattcttgcaatggtttatgtttagtattttgttgccttaatcttggatttcctgcaaacttacaatggcggttcttttgtacatgttgaacaagtattcctaaactgtactgtatataaggtaagattgaatgttagtattctgttttcttcatggtatctagtatttttgtattataattgattatctatatgtttgctaaaacatgagttgttgggagttctgtacaaaggaatctggtctatatttatggtcgtctacatgccacttccagtccattctaataatattttttatttgagtttttgagtgatttctttcatggcttggagtaagaaatacagtttattacaaaaatcatcttcaggatgaagatatcgaataccttgtgtaaccaatcgctaagcctcaagccagtactattggaagtgaattagatggatctgaccctgatgatattgatgaagacatagaataagtcgacgatgatgatgaggggaccatagattagccttcatcctcgcacggaaccaagcggaagagagatgatccctcgccagacccaactaccaatcaagaattacgaggatctccttcgttgtgttggtcgctgaccaggaggcaaaaacatagagggaataagcgacagacaggcacggcgaggcatacctgggacggtctggacacggacagcttgtggtgactcctgcggaggctgccagcaagactgaggaagagtaggcggagtgaagaaggaggcgtcgcggtgcgcggcggaggagctcatggcccgcgcgacgaggacggtggtggtggtgatggagaaccacacctgccccaggcccacatcgacggcctcacggaccgtgagtacaacaacctcgatgcctccgaccccaactccctagagatctttagtgccacagccatggcactcatggcacgcacattaacccagcgggaggagagtcggggctacacacgggttattgccggagggagcgcgctggcggcttgagcgaggccgccggcttccgcgcgacgccctgctcatccggtggaggcggctgcgagcggagaggttagggattagggcaaggt

SEQ ID NO: 73 - protein, 60 aa, Zea mays subsp. mays
  misc_feature (1)..(60): Ceres Seq. ID no. 15179132
MLRLTTFLSSSLKIVRFPYKHLLQQLQRTSHILLVIKFFVSPKYSMRSFLQWFMFSILLP

SEQ ID NO: 74 - protein, 46 aa, Zea mays subsp. mays
  misc_feature (1)..(46): Ceres Seq. ID no. 15179133
MMPQTKQTPIIRQYRKINSSRLTLFVASAWHSRSYYCLRYFILCDL

SEQ ID NO: 75 - protein, 45 aa, Zea mays subsp. mays
  misc_feature (1)..(45): Ceres Seq. ID no. 15179134
MPQTKQTPIIRQYRKINSSRLTLFVASAWHSRSYYCLRYFILCDL

SEQ ID NO: 76 - DNA, 711 bp, Zea mays subsp. mays
  misc_feature (1)..(711): Ceres Seq. ID no. 15180324
gcatgtgtttatgtagatcgatagcttgtgcgaggacgggcaggtggtgttcgccgatggctcctcggtggtcgccgacgccatcgtctactgcaccgggtacgtctactcgttcccgttcctggacacgggaggcctggtcaccgtggacgacagctgcgtcggcccgctgttcgagcacacgttcccgccggcgctgtccttcgtgggcgtaccaaagaaggtggtggtgccgcggttcttcgaggcgcaggcgaggtgggttgcgcaggtgctgtctggccgaaggtcgctgccgccggaggccgagatgctgcgctccgcggaggagaacaaccgcgcgagggggaagcacctggcgcacgacatcctcgacgactatgactactgcgacgacttcggggagaagcactgtgggttcccgcggctggagggctggaagaaggagctccgttggtcgtccctcgcgaggagacacgacagcacggagagcttccgtgacgtctaccacgacgacagcaacttgattcgggagggctttcaagcataggggtaggggctcaggctcgcagcacaaaattcttattccctccgttcttttttttgaagttttagtttaaaataaactgtccgacaacaaatattcgagaacgaagatattatttcttaaatctataatggagcgagaaaaataaaatggactttaagacc

SEQ ID NO: 77 - protein, 174 aa, Zea mays subsp. mays
  misc_feature (1)..(174): Ceres Seq. ID no. 15180325
MCLCRSIACARTGRWCSPMAPRWSPTPSSTAPGTSTRSRSWTREAWSPWTTAASARCSSTRSRRRCPSWAYQRRWWCRGSSRRRRGGLRRCCLAEGRCRRRPRCCAPRRRTTARGGSTWRTTSSTTMTTATTSGRSTVGSRGWRAGRRSSVGRPSRGDTTARRASVTSTTTTAT

SEQ ID NO: 78 - protein, 156 aa, Zea mays subsp. mays
  misc_feature (1)..(156): Ceres Seq. ID no. 15180326
MAPRWSPTPSSTAPGTSTRSRSWTREAWSPWTTAASARCSSTRSRRRCPSWAYQRRWWCRGSSRRRRGGLRRCCLAEGRCRRRPRCCAPRRRTTARGGSTWRTTSSTTMTTATTSGRSTVGSRGWRAGRRSSVGRPSRGDTTARRASVTSTTTTAT

SEQ ID NO: 79 - DNA, 1221 bp, Zea mays subsp. mays
  misc_feature (1)..(1221): Ceres Seq. ID no. 15180346
aatcccacgggacaacaaaccctaaatcctcacatcctctcctcactccctcccatctagcggcggccgggcggcgcctccgcacgctgccggcgttgtgcctcgcctctacgcggctccatcagtcctgcgtggccgtcgagcagatctccgtcacaggcgcgagctcctcaccgtccaggcacgcgcgctctagctcccaagccgcgcgctctagctcccaagccgcgcgctccaggccgcacgtcatccaggtgtcgagctccaggtcgcgccacgccgcgcgccgtctaggcgtcgagctccaggccgcgccacgcctcgcgctccaggccgtgcgctgtccaggcgtccagctccctaggccgcgcgctccagcgtccagccacgccacgcgctccaggccgcgcgccgtccaggcgtcgagttccaggccgcgcgctccagcggtccagccatatcgccctcagcgtctcagccacatcacgtcgaggcgtccagtggctccagcgtctcagcgtatgataagccatgggatatttgttctcataatgaaggaaacaactcagaaggggttgattggttggaagataaatcgggtggtgatgtcggcaagaacaaatcagattacactgaaggcggaggtagtggtagtagaccttggtgccagtgcgtttgctcctgctagggctgcgcctataggtgtacatttgtgctgtgcctaatagaccggcccaaagcacacaatttatcttccaaccaatcaaccccttctgagttgtttccttcattatgagaacaaatatcccacggcttcgtgctgctgcacgtcaagagcctgcagtggaagttccggggcaacgagacgctgctcgtcgaccaggcgccggtgcaggtgatctgggacgttcacgactggctcttcgccggaccaggtgcgcaggcagtctttgtcttcaagcctggtgcgccgccggagataaaagaggacagtggagggaatagcatcgaggatgacgggactgacttttgcttcttcctccaagcacggaggatggaatgagggagtcacatgcaggatagggttcaaatttgaagggcaaggcaatgatgttgtccttgcgccactggtatgttgatatgaatgacatcgaatgcttatccagctttacaaatttgtaatgaggaacacttcaactgaatcaaagtttttgttactag

SEQ ID NO: 80 - protein, 240 aa, Zea mays subsp. mays
  misc_feature (1)..(240): Ceres Seq. ID no. 15180347
SHGTTNPKSSHPLLTPSHLAAAGRRLRTLPALCLASTRLHQSCVAVEQISVTGASSSPSRHARSSSQAARSSSQAARSRPHVIQVSSSRSRHAARRLGVELQAAPRLALQAVRCPGVQLPRPRAPASSHATRSRPRAVQASSSRPRAPAVQPYRPQRLSHITSRRPVAPASQRMISHGIFVLIMKETTQKGLIGWKINRVVMSARTNQITLKAEVVVVDLGASAFAPARAAPIGVHLCCA

SEQ ID NO: 81 - DNA, 1450 bp, Zea mays subsp. mays
  misc_feature (1)..(1450): Ceres Seq. ID no. 15180836
gctgcgccgtagcgctagtgccgccgcccgctcaccctcatcccctaggcctccacttctctgattggggcgacttcatggcgagcgggcacaaatccgacatgggcgcctctgctccgacgaccgctctctcctctgcgcctccactgcccctctccctgttaggcggcgacagcaaggaggaggaggaggaagggttggctgggccaccgtcggcaccacgcgaggcacgagcgcaaccgcgcctatgagttccatagctccgagccgtcgacgctaggcggcagtgccctcgtctggacctgcccgcgcccaggcggagccgccgccgacccgagatctgcctaggtcgcccgcctgctctggatgaccaaggtcacctccgcggacgctgagcagctgagctcctcccgcgaaggcgtgaacccgcccccagccgaggcactgagctccgccctgccccgctcgggcgtgcccctgcacaggcccagccgcctcgctcctgtttgccgccacggttccagtaacgacgaggctgagcgacaactccagtgtcccgatgttgaataagtgaagtggatgagtcagatggtggaggagacagtgtgtaggagcagcctgtttatgtggccgtagtggatctcgcatgttccgaagagttcctggaactcatcaagagtgcacttcttacagccctagaagcctgtttgtgagcttggtattcctcctgaaaacatcactgcaaaccaattgttatttggcacattgagggagtacgccggatttgatcccacagagcccacttcacgcagtgggggtaaagcaaaagcagtgcagcaaataaaataggaccatggctacaagacaattgttacaattggtgatggcgcaactgatctggaggctcggcaacctggcggagcagactgtgtgccgccagagctagtggagggaggcgggtcattcgattcgccatgcttaggattggagaatcaatagagtaatagtatatacatggtggggagtgaaaccaacagaggaagaatccgttcttgatcaaaattagtcgactgcttggttcgtcgtctgcgtgttcgatcggaggttggcgacgccttggcgtgggcgctttccgcaagaaagcaaggaaattggtcggcttctacgctaccagtccggtccacttcgttcacctttccctttcggtgccaccaacatctaactgtacatgcatgcttgcttagtgctgaccgccgctaatgcgctggatatttctgggagtggaaacgaaagtgtactctgaatttcaagttcctgtcaaaagtaagatcctctgacgaaggtgtggttgtgatcatgcataaactaactgttgctgccacatggattggagagggagatcgatccacagaaaatggtatcatttgtcaagtgcatgttaggacttgat

SEQ ID NO: 82 - protein, 82 aa, Zea mays subsp. mays
  misc_feature (1)..(82): Ceres Seq. ID no. 15180837
CAVALVPPPAHPHPLGLHFSDWGDFMASGHKSDMGASAPTTALSSAPPLPLSLLGGDSKEEEEEGLAGPPSAPREARAQPRL

SEQ ID NO: 83 - protein, 67 aa, Zea mays subsp. mays
  misc_feature (1)..(67): Ceres Seq. ID no. 15180838
MTKVTSADAEQLSSSREGVNPPPAEALSSALPRSGVPLHRPSRLAPVCRHGSSNDEAERQLQCPDVE

SEQ ID NO: 84 - protein, 57 aa, Zea mays subsp. mays
  misc_feature (1)..(57): Ceres Seq. ID no. 15180839
MASGHKSDMGASAPTTALSSAPPLPLSLLGGDSKEEEEEGLAGPPSAPREARAQPRL

SEQ ID NO: 85 - DNA, 433 bp, Zea mays subsp. mays
  misc_feature (1)..(433): Ceres Seq. ID no. 15225457
gacaaacacgactgccagttcgactatcgaactgcagctagggacgctatcgccaaggccaatccagtggtgaaggcggagaagcttgacaagatctgaggcgggggcattgggtaacgaaaaatggttgcgatctgcaagaattcagcatgtctctttgctgctttatcattgaacttcccattcttgtcttgctgtcacgtcccctggggttcaatactatgatgcacacagcatcctggcagctgcaagaattcatccccagtcgagtcacgaaaatggtttgcgtgttggctatgtcgtgtaagcttattcagttattcttggtggtttgggtcggtaccgtgtcattccccgtttaggtagctctgtaatctactattctcatgtgtgttgccttccaatcagtaatagtaatcagcaattgtctgcc

SEQ ID NO: 86 - protein, 70 aa, Zea mays subsp. mays
  misc_feature (1)..(70): Ceres Seq. ID no. 15225458
MSLCCFIIELPILVLLSRPLGFNTMMHTASWQLQEFIPSRVTKMVCVLAMSCKLIQLFLVVWVGTVSFPV

SEQ ID NO: 87 - protein, 46 aa, Zea mays subsp. mays
  misc_feature (1)..(46): Ceres Seq. ID no. 15225459
MMHTASWQLQEFIPSRVTKMVCVLAMSCKLIQLFLVVWVGTVSFPV

SEQ ID NO: 88 - protein, 45 aa, Zea mays subsp. mays
  misc_feature (1)..(45): Ceres Seq. ID no. 15225460
MHTASWQLQEFIPSRVTKMVCVLAMSCKLIQLFLVVWVGTVSFPV

SEQ ID NO: 89 - DNA, 1284 bp, Zea mays subsp. mays
  misc_feature (1)..(1284): Ceres Seq. ID no. 15225752
gctgcaggcactagtcccccccccccacccactttgttcctgcctcgaggttgtgatgagctgatcatggctctgtcgtcgtgccattgatgtccacggtcacacccaccccacaactatgccatcgccatccacctccctcgagggcatcgaagctgcggtacccgctgtggtcggcgagcaaggggaaggcggcggtcgtttccctggcggctgatgctcctcccaccatctctgctccacgacgcttgtagggcctctggacttatgctgatcaacgcggcggagctcatgatggtcgtcccgctcagtgggaggacgcatcccagagacgtaatcgacatggaggagctggctagaggattcacaaaagattgaggaaactgatgaagcaaggaaaaaattctctaatgctaaggcaatttcgtcatctcagttttttggtactcaaaacagagaagagaaagaggctcagctatcccttcaaaaattcgcgggttcttcatccatttcaagctctgatctttttggtcgtaccaatgtggacgattctaacctggacctaagcgctgcagatctcatcaacagtttgtgaggttttaatttgagtggcaatctgtgaggttttgcaagggagatgagctcaccttggcaatggtagttaatcttattaatgcaaacaaagatgattaatttaatgtacttttctatgcctcatggtgcccattctcacaagaatgcatttgaggaatatgcaattaggccaaggcgtcccacatagacgaatgtagttgtcggaagctatggtggatacaacacaagatgggctcttttcttagtatgaacaggcctatcttcttgaacaatatggaaggaaggctccaatgaaagtgcataaatctgagagggagaaacgtaagaaggacaagtagaatgatctcttttgggagctgggaaacatgctaggttctttgattgggctgccatcattttctccgtcgacgaagcatcgtctacagttgtgtaccaaagacgaagtggagtttgcaaaatgaaagatggagagaaaatactccaaggatgagtgtcattgcttgctgacatgtgatttcaagatagtaatataatttgatggctcctattgcttaactgtacaaggatgactgttccatttgctgacatgtgattttacagtcaccattttatgctgctgattttcatgggttgcagtgatttgttcctgtgccacagttatttttaggatcgaattaccatcgtttttcc

SEQ ID NO: 90 - protein, 59 aa, Zea mays subsp. mays
  misc_feature (1)..(59): Ceres Seq. ID no. 15225753
MKQGKNSLMLRQFRHLSFLVLKTEKRKRLSYPFKNSRVLHPFQALIFLVVPMWTILTWT

SEQ ID NO: 91 - protein, 54 aa, Zea mays subsp. mays
  misc_feature (1)..(54): Ceres Seq. ID no. 15225754
MSTVTPTPQLCHRHPPPSRASKLRYPLWSASKGKAAVVSLAADAPPTISAPRRL

SEQ ID NO: 92 - protein, 53 aa, Zea mays subsp. mays
  misc_feature (1)..(53): Ceres Seq. ID no. 15225755
MLLPPSLLHDACRASGLMLINAAELMMVVPLSGRTHPRDVIDMEELARGFTKD

SEQ ID NO: 93 - DNA, 720 bp, Zea mays subsp. mays
  misc_feature (1)..(720): Ceres Seq. ID no. 15226033
acgagaccattrcctagamcatcctaatcsaaaacttccatcgccggccctttttccgtgcacaaaggcgtgtgtgtgcgtatatatatacacatacacacactgctccatgccaccgttgtagcaagttctcccatctagcaacaccataatcgcaggagaatcgctgctccaccagactcggtttcctcttgcttcagcgtcaaaatcatggccgcagctggcaagtcgtcgtcggccatggaggagacggttgcggcgacggccgccgcgcgggggcggcgcggcggccaccgtcgccctcgtcatcctytacctcgtcggctgcagcgcctacaagaacgcgcaggccgccgccatcttcggacgccgcaagtattagctagctagctgccatgttagtttttttttgcgcttttttttctttattgtcatgtgggttgtggattatggattgcgtatgtgtgtcccccctggtggagagaagcatttgtagcggtggcgtggtgtgtgtttccggacttggttcatcatggtagtgtgatacatgtgtaagattagttactttaattactaattgtgctgttttccaaaamaaaaaaaaaaaaaaaaaaaaaaaaaaaaaaaaaaaaaaaaaaaaaaaaaaaaaaaaaaaaaaaaaaamggaaaaaaaaaaaaaaaaaggtttatcgawaccgccaacctcaagggggggcccgg

SEQ ID NO: 94 - protein, 59 aa, Zea mays subsp. mays
  misc_feature (1)..(59): Ceres Seq. ID no. 15226034
  misc_feature (35)..(35): Xaa is any aa, unknown or other
MAAAGKSSSAMEETVAATAAARGRRGGHRRPRHPXPRRLQRLQERAGRRHLRTPQVLAS

SEQ ID NO: 95 - protein, 49 aa, Zea mays subsp. mays
  misc_feature (1)..(49): Ceres Seq. ID no. 15226035
  misc_feature (25)..(25): Xaa is any aa, unknown or other
MEETVAATAAARGRRGGHRRPRHPXPRRLQRLQERAGRRHLRTPQVLAS

SEQ ID NO: 96 - protein, 47 aa, Zea mays subsp. mays
  misc_feature (1)..(47): Ceres Seq. ID no. 15226036
MLVFFCAFFSLLSCGLWIMDCVCVSPLVERSICSGGVVCVSGLGSSW

SEQ ID NO: 97 - DNA, 627 bp, Zea mays subsp. mays
  misc_feature (1)..(627): Ceres Seq. ID no. 15226334
aaaaaaatcgaacggaaatattcctaggatcgtgaacgctaagaaatctccacctggtgccatgtagccgtacgagccggcgatgcggggctgcttgccggtgtcgagcttggagctcgcggcggccaggacgcgggcgaggccgaagtcagcgaggtacggctcgtaggacgcgccgagcagcacgttcatggacttgacgtcgccgtgcaggatggccggcacgcagtcgtggtgcaggtacgccacggcgtgggcgacgccgagcgcgatctcgtagcacgcgccccactcgtccgcgggcgagcccttggcggcgcggccgccgtgcaggaggccgctcaggctgccgttggggaggtagctgtagaagagcagcctcgtgccgccgttcgcggcccacccgaggaggcgcacgatgttgcggtggcggatggagcccagcgccgcgatctcgctgcggaacgccgccgacgtcacctcgtccgacgaccacatcttcttcacggcgagggtgtagccgttgggggtgtccaccttgtacacggcccctgagctgccggtgccgatcatgttcgcggacgtcagccctcggagcacgtcgtccatggtgatgtcgagcttcag

SEQ ID NO: 98 - protein, 33 aa, Zea mays subsp. mays
  misc_feature (1)..(33): Ceres Seq. ID no. 15226335
MLRWRMEPSAAISLRNAADVTSSDDHIFFTARV

SEQ ID NO: 99 - protein, 33 aa, Zea mays subsp. mays; identical to SEQ ID NO: 98
  misc_feature (1)..(33): Ceres Seq. ID no. 16625712

SEQ ID NO: 100 - DNA, 684 bp, Zea mays subsp. mays
  misc_feature (1)..(684): Ceres Seq. ID no. 12637435
atttatggagctgaccttgctgcttttctgcaaacacttgccaagataattgaggaccccaaggatcttactttctgaatgtcccaactgattgtttttccctgaggcaatcaaaaccgggtgcttcttacctatcagtagatgtgtagtttgtcttctgtttatgtgattaggtgttttaagctgtcaccaatgtcagcatcaggtgtatctaccatttttaccggaggtttcatggatagtggattttgttgagctcctcaatgtaccgtatccttgtgagatacaaagaatgaaatgtaccttgtaccaccctgtggttgatttcgcatgcctgtcaaacaaaaatatggctgatgctcttgcaagggtgccgacgcgatatcttcagggagatctgtaaaaacgggtcacatatctgtttgttttacatgtgaaggagacggatcagggcctgttcgtttccgtaggattacaccaagaattattcctgttgatcaaaacttatataaattagagaagcaatccgggctggaacagttccggccttctattccgtgtcaaccgaacaggccctcatggtttctccaaaccactccaatgatgccaaggctgtagagtatcggatgtcctgacctgacctgctgttttacattcctgggatagctcaagatagcgtcctcc

SEQ ID NO: 101 - protein, 37 aa, Zea mays subsp. mays
  misc_feature (1)..(37): Ceres Seq. ID no. 12637436
MCSLSSVYVIRCFKLSPMSASGVSTIFTGGFMDSGFC

SEQ ID NO: 102 - protein, 36 aa, Zea mays subsp. mays
  misc_feature (1)..(36): Ceres Seq. ID no. 12637437
MKCTLYHPVVDFACLSNKNMADALARVPTRYLQGDL

SEQ ID NO: 103 - DNA, 623 bp, Zea mays subsp. mays
  misc_feature (1)..(623): Ceres Seq. ID no. 13586233
gttcctccctcatgcttccccgttgcagcgattgctcccggtggctcggcgccaatagaggcgccgccacctgactcggccgacccccatctcgctcgacgagatcgtcgctggtatccgcggttggaagcatcactagcgcctgatttattcctaacgcccttctcgtgaacccccaggtatatcttagagaatgttcatgccaagagtggcaacatatcgagaagccatgccaccatgccttatgccaagagtggcaacagacctattgatcattcatgtgatgcacctgctgctattccaactgaggtgccaacaccagtgttttcttcagctgaagttggtttgttgatgtccaccccgaggaaaattaggagagctgtcaataagcttactcccaagaagaagatgcatgtcatgtagacagcttcaatggtgaatgtcgactgtattttgtttcagaatatctatggcatgaagacagcttcaacgcatgttaactgaatgtatctgtctttcctttcagttatgtgttgtttcagaaacaaatgtgcatgtgattatgtgaactgaatgtatctgtgaaccgaatgtgcctgtgcaatgaatgttcgtgttaatcg

SEQ ID NO: 104 - protein, 61 aa, Zea mays subsp. mays
  misc_feature (1)..(61): Ceres Seq. ID no. 13586234
MPYAKSGNRPIDHSCDAPAAIPTEVPTPVFSSAEVGLLMSTPRKIRRAVNKLTPKKKMHVM

SEQ ID NO: 105 - protein, 56 aa, Zea mays subsp. mays
  misc_feature (1)..(56): Ceres Seq. ID no. 13586235
VPPSCFPVAAIAPGGSAPIEAPPPDSADPHLARRDRRWYPRLEASLAPDLFLTPFS

SEQ ID NO: 106 - protein, 52 aa, Zea mays subsp. mays
  misc_feature (1)..(52): Ceres Seq. ID no. 13586236
MFMPRVATYREAMPPCLMPRVATDLLIIHVMHLLLFQLRCQHQCFLQLKLVC

SEQ ID NO: 107 - DNA, 981 bp, Zea mays subsp. mays
  misc_feature (1)..(981): Ceres Seq. ID no. 13587562
atcacaagggcaagtggcgagcagcggccgggcgcacgcaacccatgaaaccacaagcttgtcacgggagatcgatgccaaagcaaaccggagtgaaagcgaacggaaatctagcggacgacgagaccgcgattaggaggaattggaccgtccgcaacggcgacccgctcgtgcacctccatatccggcagccggcaccacggccacggccgcgaggaggcgaagaacgtcgtctggtcccgcaccggatcgctaagctgtcatgggcgtccgatcccgaggtgttctacatgctcaacgccgtggcccggcagaaagaggtgcgcttcttatcggcgccaccggttcaccatgccttgttcatcatcggcggtgctgttctgttgctgttcgatgcaaggcaagctgcgtctagatggtaatactgatgccgcgtttgtgctgcacgcaccatgctggacgcaccatgctggacgcatacagctgtgcgtggcgatcaacgtgtgctggggtgaccagagggagaaggtgtgcgacgcgacggaggacgggaggagctccatctcgagtcgctcgtcatggctagccgtggcctcggccagatccaaagatctgcaagctcatgaagtactgctactgatagctggtttccttcttagttatggggagtgctatatgcgattagataggaacagatatcagaacactaatagcgtgtttggtttgcaagatgaccggtctgaaataatccgattcaaacaccgaagctgctggaactgtttggttaacgtagtggagccaactcgtccgtcacaaacacgttcagcaacataccaaatctgcaggttgggtcggttcctccaatttcgccagacaagtatgacgagtgtatgctgaacgtactcaaccctacaaccaaacacgttgtaaaagatgcacatatttgcactagtcactctatgaatttcaaattgttgctgc

SEQ ID NO: 108 - protein, 181 aa, Zea mays subsp. mays
  misc_feature (1)..(181): Ceres Seq. ID no. 13587563
MPCSSSAVLFCCCSMQGKLRLDGNTDAAFVLHAPCWTHHAGRIQLCVAINVCWGDQREKVCDATEDGRSSISSRSSWLAVASARSKDLQAHEVLLLIAGFLLSYGECYMRLDRNRYQNTNSVFGLQDDRSEIIRFKHRSCWNCLVNVVEPTRPSQTRSATYQICRLGRFLQFRQTSMTSVC

SEQ ID NO: 109 - protein, 167 aa, Zea mays subsp. mays
  misc_feature (1)..(167): Ceres Seq. ID no. 13587564
MQGKLRLDGNTDAAFVLHAPCWTHHAGRIQLCVAINVCWGDQREKVCDATEDGRSSISSRSSWLAVASARSKDLQAHEVLLLIAGFLLSYGECYMRLDRNRYQNTNSVFGLQDDRSEIIRFKHRSCWNCLVNVVEPTRPSQTRSATYQICRLGRFLQFRQTSMTSVC

SEQ ID NO: 110 - protein, 139 aa, Zea mays subsp. mays
  misc_feature (1)..(139): Ceres Seq. ID no. 13587565
HKGKWRAAAGRTQPMKPQACHGRSMPKQTGVKANGNLADDETAIRRNWTVRNGDPLVHLHIRQPAPRPRPRGGEERRLVPHRIAKLSWASDPEVFYMLNAVARQKEVRFLSAPPVHHALFIIGGAVLLLFDARQAASRW

SEQ ID NO: 111 - DNA, 726 bp, Zea mays subsp. mays
  misc_feature (1)..(726): Ceres Seq. ID no. 15174447
acaaaactttcaactaccaatacgcaaagtattaaccttttcaggaccaacagcatcgaaaacgtaaacctgaccacggaacgagatcgttagctcattagctccttccatcggccgggaaccttgcaattcagagccctcggatcggtgaggaaccaagtgagagccatcggggatcaaatcggaggcagcgtagatggaatcgggatgagggatatcgtccatatcgtcgtaaggaatgtgaccggcggaggttgcggaggtagagacatggtcttcgccaacggtggcggagctgctaccgatctgattagggttaatctcgggttgggtatggtgaccaaacatcgcaagctgcctaaaagagaagagcttttcacattgattggaagcgagagatgggagtggagaataaaaccataaccctaattgcaaaagagagagagagagagaaaattggagaaaagagtagtacaaagagagatggtgatcgacgcgtgtggaggagagggattggccgtcgtggatcggtgactttagaggtaaataaatcgcagcaacttctgagatcaccctacgacttcactccactggacttttcacctgttggctattgggccgtttaattatgtttccaaagcccccatcaaggctcactttttttttgttatagttttaatatgttttacatttatatttgcattattaagttttaaatattttaac

SEQ ID NO: 112 - protein, 75 aa, Zea mays subsp. mays
  misc_feature (1)..(75): Ceres Seq. ID no. 15174448
MGVENKTITLIAKEREREKIGEKSSTKRDGDRRVWRRGIGRRGSVTLEVNKSQQLLRSPYDFTPLDFSPVGYWAV

SEQ ID NO: 113 - protein, 71 aa, Zea mays subsp. mays
  misc_feature (1)..(71): Ceres Seq. ID no. 15174449
MRDIVHIVVRNVTGGGCGGRDMVFANGGGAATDLIRVNLGLGMVTKHRKLPKREELFTLIGSERWEWRIKP

SEQ ID NO: 114 - protein, 50 aa, Zea mays subsp. mays
  misc_feature (1)..(50): Ceres Seq. ID no. 15174450
MVFANGGGAATDLIRVNLGLGMVTKHRKLPKREELFTLIGSERWEWRIKP

SEQ ID NO: 115 - DNA, 1436 bp, Zea mays subsp. mays
  misc_feature (1)..(1436): Ceres Seq. ID no. 15175535
aatcccctccccacatcgggaaccgccgccgacgccgcaggaggagacgcatcgaggttagcacgcgaagaagcgaccatgagggccaaggtattctccctgctttcctactcctcgcgcacactatctcgtcgattagatccgtgtggcgtagcaactccttcccacgagtagctagctcccaactcggtccgtccatgtcccggggctgtgattacaaagagagaggctcgagtggcgcgattctgggaggaatcgtttctgggacggtggatcacgccgtgcgtgcgtggcgcccctcggcgcagcagccgggtctggatcgtttgcgtggaacgcgaggtgccgccctgcgcgagccgagccagatcgtctcgcgcgggcttggtatctcgtgttccgtggctcggttccgcacggtccagccgctgcggactgtgaggcgtcgcgtgcttccggcgccaccgccgtctgctagggttcttccccggccacggtgaaggtttctttaacgcatacacttgatatgagccccgtggacgatggcttaagtcactgccgatgaaatctagccagcaactgatgaaatatgcaattgtcttcattcaatatgctttgctggttacggctagtaataccagtcagctagacgacgctcacatatccctcaaggtgttcgttatctcccgtttagctcctcttggcttgaagcacaaaacgtttccatgttgctagacacttgtgtaaacataatgttttgtagttagttgagacttttgaatcgtgcgagacaagatattttctcttgaattgtcgttattttgttgctctgttaactgaccattattctcgtacaagatagtcctcttctattgcacatctgttagatgtattcatgtctatgtttttctattattatttgaacttatctgtaagttgtatgacgagacgaactcttgtttttgcactctggttctgttgtcagtcaacttaagatattctcttataagaacggtcctgttttgcattttattgtgtaagtggttcttttatttttcctgttatctaaagcgatacgttctcctgtgtcaatcatcagtggaagaagaagcgcatgaggaggctcaagaggaagcgcagaaagatgaggcagagatccaagtaggcagatcgagatggattgtggacctgatgacatgcgtgggtacatacatttcttcggatgcgttggtgtgcctgtggagagatgtcaacctgccatggtgtcacggtccgccatcagttgaacgtcttgcctgcacttcagtaggccacttttcatggttctagttgtatttgaatccagcgtttgccactaagataaatcagacagtcgttttgtgaacctattatgatggagctttatttgctgataatatctagctacctatttgagc

SEQ ID NO: 116 - protein, 165 aa, Zea mays subsp. mays
  misc_feature (1)..(165): Ceres Seq. ID no. 15175536
SPPHIGNRRRRRRRRRIEVSTRRSDHEGQGILPAFLLLAHTISSIRSVWRSNSFPRVASSQLGPSMSRGCDYKERGSSGAILGGIVSGTVDHAVRAWRPSAQQPGLDRLRGTRGAALREPSQIVSRGLGISCSVARFRTVQPLRTVRRRVLPAPPPSARVLPRPR

SEQ ID NO: 117 - protein, 100 aa, Zea mays subsp. mays
  misc_feature (1)..(100): Ceres Seq. ID no. 15175537
MSRGCDYKERGSSGAILGGIVSGTVDHAVRAWRPSAQQPGLDRLRGTRGAALREPSQIVSRGLGISCSVARFRTVQPLRTVRRRVLPAPPPSARVLPRPR

SEQ ID NO: 118 - DNA, 461 bp, Zea mays subsp. mays
  misc_feature (1)..(461): Ceres Seq. ID no. 15178961
aacttcgctagcaggatggaatgtttcaggtgcaacgcgccacgggactccggtagcgctgccacgacgacctacgaaaactacttgcactgaggtgtaggtagagcaaagtttacagctatagcgcgcgtcgacgaagcaggagcagcagcagcagcatgaattgaagaggagtcctcatcatcacatcataagggagcagcagtagatttaattgcaaaattaaagacacccgcgatgcatgccctatcactagttttgttccaccggtacccctaccgcgcgtttcttttaagatttggttccccatttatctggggacagtagaccccagatgagacctatgtttgctgtttcattttcagttacgttcgtctccgcatgcatgtttgcgcttggatctgatgtaaccccaaaacgcttgcttcacaagtactattaactagttctgttgccttcct

SEQ ID NO: 119 - protein, 35 aa, Zea mays subsp. mays
  misc_feature (1)..(35): Ceres Seq. ID no. 15178962
MRPMFAVSFSVTFVSACMFALGSDVTPKRLLHKYY

SEQ ID NO: 120 - protein, 32 aa, Zea mays subsp. mays
  misc_feature (1)..(32): Ceres Seq. ID no. 15178963
MFAVSFSVTFVSACMFALGSDVTPKRLLHKYY

SEQ ID NO: 121 - protein, 32 aa, Zea mays subsp. mays
  misc_feature (1)..(32): Ceres Seq. ID no. 15178964
TSLAGWNVSGATRHGTPVALPRRPTKTTCTEV

SEQ ID NO: 122 - DNA, 1167 bp, Zea mays subsp. mays
  misc_feature (1)..(1167): Ceres Seq. ID no. 15180348
acacccgtgttctgcctctcgacgcctgtctgcccgcgccccccgcttgtgatgcccatctcgtctccccgctgtggcagccgccttcgcgtccgccgcgagatccctccgcgcacgggcgcgtcccccacaaaccgcgctccgtgaaatccgcactcccctcgccgcctccccagcccgcagcctctcctcaacctccctccccaaggagctggcggcggcgcgactgcgtcgggagaggacgcagaggacgccgcgcgggggctgcggcaggagctcgactccgagcaggcctccccggagatggcagccagatccggctattgagccccctaaccgagcggatccaagatagttttttttgtctccagttgctctacacagcaagtctatgaggaaggagcaaaagaagttgctctttcagttgtcagcggaattaatttaactcaagcatacttgcctatggcaaacaagcagtggacttacacaatgatcgaaatgacagactgttcgtgctatcggtttggaaagaacatgtggaaagctaatctcggatcttgcttccttcagaagacccaaaggaccttgaacagcaaaatctaaggtttcaacattgcagacacacaagagtccagcatgcgccaacgctcctgcagtttgtgacagattgctcaaagaaaagcaagacagctcgccaatcctagaagtggaaaaaaacaacatagaataattagccagctacagggagtaaaccattaagagaagaaacatcgtaatgccatgtttccaaatgggcacaaagaaacttcaagcacctctagacggaagctgtctgcactgaagatcaggacacgaatatcgcgagctttatcaaggctcgccttgtgcggaaggtgtatttctgtgagatctccaagatgaagcattagggggtcaatcgccccagattttacatgtagctaacttagtagggcacccataatccataatttattctctgtagttgtagcagcgacctagaggtgttattctgtagcacattgtgtaacatgtaggagagagataaacacatatccccattctttctactgaaacaccagaaatagttgctcttgctccataattcattaatgtgaacttctgaagccatgccaaggtcttatattg

SEQ ID NO: 123 - protein, 130 aa, Zea mays subsp. mays
  misc_feature (1)..(130): Ceres Seq. ID no. 15180349
TRVLPLDACLPAPPACDAHLVSPLWQPPSRPPRDPSAHGRVPHKPRSVKSALPSPPPQPAASPQPPSPRSWRRRDCVGRGRRGRRAGAAAGARLRAGLPGDGSQIRLLSPLTERIQDSFFCLQLLYTASL

SEQ ID NO: 124 - DNA, 2309 bp, Zea mays subsp. mays
  misc_feature (1)..(2309): Ceres Seq. ID no. 15227305
ggtcaaacagtccgagacaggagcagacgtctggctataatggtcgaacggtccggctataatggtcgaacagttcgcaaacggtcagaagcagcaacctcagaccatcggaccacaacgttccaaaacaagtgttaggaaacaaaacactactaagacgtctggacgactcagtagagtcggccctacttttgatcagttgtttgccaaatatatgaagaaggtcgttccacacaaccggccaataaaacaaacaaagtcaaaagggcgatctgtgcgaaagcaaaagccgactaaaccgactcaaacggtagcacaaccaagaccgccttgtcatcctcctccagggatagcgtggtgcttctcggtctatccatcgtcgatgtgttgtcctactcatgcgtggggtggtaagacgatgaatccgtattactggtccaattcatttgcttatttgggctggggggcaccacaagtttttgcctattgaaaggatgatcaggcaaacatggttgaagaggatgcaatctgaaacgacctctgtgcattaaagttccatcaagtatttatattatccgatcgcaagagccgatgacttgcatcaagcagagtccttacttcgggaacaaagtagctcatgaggtcaattgtttctgaagttttcgctggtgctttggttcgccaagctccaccaaaaggcaggggcatatgttgaccaccaaaatgagcggacggttcgacccttgggcccggacagtccgcgtgccccgagattagattaattcaggtgtttatccttatctcgtgcgtggttatccatctaatcatgtgagagttgttggctatctcttaggaataggtccagacctccccctctataaatataaaggggtacagtcgattgagaaccctagaacacattccaatcgaaccaattactttatttacctttcctgccttaggagtagatgtagtgtagttctagttgtagtcttccgcatatccacctccacccctattcaactctacgttgtctagatccgtcctgaggtggcctgccgaccccaggacaaccctatgatctttacccctcctgaggggcaagatctacttcgtctacttcaatcaagatctcttcctcgaattgatctcttaatttctaggcgactctacgtcatctggagacgccccggctgacctgctgacccagagcaccctaaggtatctcccccaggggacgagatctaggtcatacaaggagaagaagacgaccctgcgccatcgcggactgtccggactgcgcgcagtgaaggcgccgcttctaccgccaggttgcggactgtccgacctagagccgcggaccgtaagcacctcccgcggcgagcactgccaggcgacccgtcgcaggccgccgccactgttcacctcgtggagccgaacccaaggtattgctcatcacgaggtcctagggttcgttgctgtttggtcccaaatatgtggtgaccatcatagaggtgttgccccacatttaggataaccactttatttgatcctacatcatctaaaggtgccaagtaccaccaggcggttcattatagtgtttggtgaccaaaaagacaccaacagatacatgagcagaatagtcatattggtgctgcaactatatatagtccgagacattgattttgtccctcaacatttaaaatgggcacgttagtcctaaaaaatttcatttaggttcaattttatcgtacaacaatcaaagtgatcatgaatccttatcctgtgtactttggctcaaattcttattctaactaactgtatttttctactacttatgaaggctgcaagaatagcctgcctctaacttgttctgccacctgccatccgtgaatctggaccgttcgcctcaatcatgcgcgatccaaccgtcctccgccccgtccccgcaccctccccctccccttgcgatacggtagccgtcgtcccagcccgcggccttcgccaaccacccccaccctcgcgcccacccatcgccgcatgggcaccccttgaccccggcgagacaccgccccactcacccataggcggcagcatccacgtggccgatccacctggcgacgcgccctcctccgcccccgacatggtacgagacccagggttgatcctccgcaccgttgaccccaaccgcttcaccctttgtggcgagcagcatctcctcccccagtcaccgacaaaaagcgagtgggtgagcagctcctcctgcaaggcgaatatgtgggcgcagtccaccgccaaatctacgacgt

SEQ ID NO: 125 - protein, 142 aa, Zea mays subsp. mays
  misc_feature (1)..(142): Ceres Seq. ID no. 15227306
MVEQFANGQKQQPQTIGPQRSKTSVRKQNTTKTSGRLSRVGPTFDQLFAKYMKKVVPHNRPIKQTKSKGRSVRKQKPTKPTQTVAQPRPPCHPPPGIAWCFSVYPSSMCCPTHAWGGKTMNPYYWSNSFAYLGWGAPQVFAY

SEQ ID NO: 126 - protein, 131 aa, Zea mays subsp. mays
  misc_feature (1)..(131): Ceres Seq. ID no. 15227307
MRDPTVLRPVPAPSPSPCDTVAVVPARGLRQPPPPSRPPIAAWAPLDPGETPPHSPIGGSIHVADPPGDAPSSAPDMVRDPGLILRTVDPNRFTLCGEQHLLPQSPTKSEWVSSSSCKANMWAQSTAKSTT

SEQ ID NO: 127 - protein, 91 aa, Zea mays subsp. mays
  misc_feature (1)..(91): Ceres Seq. ID no. 15227308
MKKVVPHNRPIKQTKSKGRSVRKQKPTKPTQTVAQPRPPCHPPPGIAWCFSVYPSSMCCPTHAWGGKTMNPYYWSNSFAYLGWGAPQVFAY

SEQ ID NO: 128 - DNA, 1208 bp, Zea mays subsp. mays
  misc_feature (1)..(1208): Ceres Seq. ID no. 12356503
atctaccgtgcggagggggaagagggagaggccaggagaggaaagcctgcagccaccatggattccgacctctggatctcgcgtctcacggccgccaagcggcagtttgcgctgcagcgcgcgcagcgccagcacgccgccccggcatcccatcacgatcgatttgggtatgatgatatcgaacctgaggatgatttgcactcagacttcccatgcccttactgttatgaagatcatgatgttgcttctctctgcgcccatttggaggacgagcaccctttcgagtctaaaattgtgtcttgcccagtttgctcagctaggatttcgaaggacttggtggatcatataacccttcagcatggctacctatttaaattgcagaaacatcaaagagtacgcagagttactggtaatggcaaccacaatctctcctatgcagggagagatcttcaactgcaagagacctacttaaaggtgcttcttggaaatagcagtcgaagcagcagtaccaatgcatcaagtacagtcaccgattcactgctaccctcactagttttaaatttatcatcaccagaagtagaagacgcatcaaagttttcagctcctgctgtggtggaaaataattggtttaaacgatcactgccttcaaaaacttggaaattaagaactgttgattccacccttagtcatgaagagagggagcgtaggaggaggagagctgctgtgagatcagcttttgtccagcatctccttgtcaccaccatttttgaagactagcagatcaagcacagctcatgcaaaggaatcttgtgggcgggccttttgcccactcatttatctggatggataaggcactaattatcttggataccatcacgctgttcatccggtctgctgggtaaccatgacaggaaaaatgaagcagcgggcgtcttaccttatatatgctctctggaagcagctgacatttgttttctggatcatattcataattctatgtaggctgtgacaggaatctctatagtagagccatgatgttttttttgggttgggtttcatcctgcgttggagaatgtgcccaaatttttttttttggagaatatgccttatctggatggataaggcactaaacatttgaagattatatttcggaggttggagaatatgacaatttgatttatatcactaaacatttgaagattatgttg

SEQ ID NO: 129 - protein, 258 aa, Zea mays subsp. mays
  misc_feature (1)..(258): Ceres Seq. ID no. 12356504
IYRAEGEEGEARRGKPAATMDSDLWISRLTAAKRQFALQRAQRQHAAPASHHDRFGYDDIEPEDDLHSDFPCPYCYEDHDVASLCAHLEDEHPFESKIVSCPVCSARISKDLVDHITLQHGYLFKLQKHQRVRRVTGNGNHNLSYAGRDLQLQETYLKVLLGNSSRSSSTNASSTVTDSLLPSLVLNLSSPEVEDASKFSAPAVVENNWFKRSLPSKTWKLRTVDSTLSHEERERRRRRAAVRSAFVQHLLVTTIFED

SEQ ID NO: 130 - protein, 239 aa, Zea mays subsp. mays
  misc_feature (1)..(239): Ceres Seq. ID no. 12356505
MDSDLWISRLTAAKRQFALQRAQRQHAAPASHHDRFGYDDIEPEDDLHSDFPCPYCYEDHDVASLCAHLEDEHPFESKIVSCPVCSARISKDLVDHITLQHGYLFKLQKHQRVRRVTGNGNHNLSYAGRDLQLQETYLKVLLGNSSRSSSTNASSTVTDSLLPSLVLNLSSPEVEDASKFSAPAVVENNWFKRSLPSKTWKLRTVDSTLSHEERERRRRRAAVRSAFVQHLLVTTIFED

SEQ ID NO: 131 - protein, 239 aa, Zea mays subsp. mays; identical to SEQ ID NO: 130
  misc_feature (1)..(239): Ceres Seq. ID no. 16625328

SEQ ID NO: 132 - DNA, 802 bp, Zea mays subsp. mays
  misc_feature (1)..(802): Ceres Seq. ID no. 12556253
aagatcgagcagcgagagacggcaggggaggaaaaaaatctaaccctagcatccgcagcgctagggttcgggggttgcgatggcggcggcgccgaccctgcccctccctgcactcgacgcgcctggagccccgccagccgagtactgtgaagcgcgccaccgaccggcatccagacccgcgtcgagccccagcccgacaccccggcttccccgcgtctacgcagcagcgccctgctcatccgcaagaactggcagcgaagcttgtcgttaaggagatattaatcatgtggagatgcagaggattgacggagaggaagcaaaaaatgactgtatgggagaatatgcagaaagctgaagcagaagcagccatacaaaaccttgtgataaaacttgaaaagaaaaggccatactcgctagagaggattttcaacacccttaggtctggctctcggaagacacaggtggtacgcagtacatcaaccgcaaatcagaatcagcatatttccagaactatcaaaacggcgccaaacctcagcaagaacggtcaaatgagttcattgagtggatgcttcagacaagatctatagcatggatcataatctggattgtccttaagtttttattgtgctaggggaacataagaaagtatgtagagcaaaatgagaggagctgttgttaccctcaattctttgtgattattgtgctagagtgatgtagttgttggcttttgaacaatagctggagtgatatgaaacattagtgatctagttgtgaatgatattataattgtgatggttttgtg

SEQ ID NO: 133 - protein, 194 aa, Zea mays subsp. mays
  misc_feature (1)..(194): Ceres Seq. ID no. 12556254
DRAARDGRGGKKSNPSIRSARVRGLRWRRRRPCPSLHSTRLEPRQPSTVKRATDRHPDPRRAPARHPGFPASTQQRPAHPQELAAKLVVKEILIMWRCRGLTERKQKMTVWENMQKAEAEAAIQNLVIKLEKKRPYSLERIFNTLRSGSRKTQVVRSTSTANQNQHISRTIKTAPNLSKNGQMSSLSGCFRQDL

SEQ ID NO: 134 - protein, 100 aa, Zea mays subsp. mays
  misc_feature (1)..(100): Ceres Seq. ID no. 12556255
MWRCRGLTERKQKMTVWENMQKAEAEAAIQNLVIKLEKKRPYSLERIFNTLRSGSRKTQVVRSTSTANQNQHISRTIKTAPNLSKNGQMSSLSGCFRQDL

SEQ ID NO: 135 - protein, 100 aa, Zea mays subsp. mays; identical to SEQ ID NO: 134
  misc_feature (1)..(100): Ceres Seq. ID no. 16625334

SEQ ID NO: 136 - DNA, 480 bp, Zea mays subsp. mays
  misc_feature (1)..(480): Ceres Seq. ID no. 12594530
gtggcctgcggtccggctttgcctcccctactgtcgcgaatgtgaagcttgcggggtatggagatggcgatggccgtggggatgaaccctgtcacggcggacgttgtggaactctcgcggctgcaccggtatctgtcgccgcgtccggccgtggaggaggtggaggcagcggtggcgataccggcctcggcggaggcgaaggaggcgcgcctcactgaaatcaccagccgccagggaagagaaggcagctcgagcgttggcacagggcgtgctggtcgagctcttcgacgtggtgagctaggccggtcggctatcgtgtccctcttggcgtgcacgtggctgtcggtggcctcgacatggattgcgacagctgaggacaaggaagcactgaaggtagccatggtctgcaagacacaaaggagcaggacataagaaagggaaaggcggctcttgtttccactgaactgctgagggaggatc

SEQ ID NO: 137 - protein, 124 aa, Zea mays subsp. mays
  misc_feature (1)..(124): Ceres Seq. ID no. 12594531
MEMAMAVGMNPVTADVVELSRLHRYLSPRPAVEEVEAAVAIPASAEAKEARLTEITSRQGREGSSSVGTGRAGRALRRGELGRSAIVSLLACTWLSVASTWIATAEDKEALKVAMVCKTQRSRT

SEQ ID NO: 138 - protein, 122 aa, Zea mays subsp. mays
  misc_feature (1)..(122): Ceres Seq. ID no. 12594532
MAMAVGMNPVTADVVELSRLHRYLSPRPAVEEVEAAVAIPASAEAKEARLTEITSRQGREGSSSVGTGRAGRALRRGELGRSAIVSLLACTWLSVASTWIATAEDKEALKVAMVCKTQRSRT

SEQ ID NO: 139 - protein, 120 aa, Zea mays subsp. mays
  misc_feature (1)..(120): Ceres Seq. ID no. 12594533
MAVGMNPVTADVVELSRLHRYLSPRPAVEEVEAAVAIPASAEAKEARLTEITSRQGREGSSSVGTGRAGRALRRGELGRSAIVSLLACTWLSVASTWIATAEDKEALKVAMVCKTQRSRT

SEQ ID NO: 140 - protein, 124 aa, Zea mays subsp. mays; identical to SEQ ID NO: 137
  misc_feature (1)..(124): Ceres Seq. ID no. 16625354

SEQ ID NO: 141 - DNA, 728 bp, Zea mays subsp. mays
  misc_feature (1)..(728): Ceres Seq. ID no. 12635066
aagaaagaaacattacttgcgaccaaaaattacagattcttgaaactattagtgttgatacttgatagataccatgggcttactagatcatctctgggatgataccgtcgctggtcctaggccagagaacggccttggcaagcttcggagacaccataccttcagtttccggcctagctccggtaatgatcaatcggacggtggaagcgtgagatcgtacggtgaagaatcaccggaggaggccgtgaaagtgacacgtagcatcatgataataaaaccaccgggataccaaggcggttcagctccggtttcaccggccggttcaactccgccagtgtctcctttctctggaggaaaggaaccctttcggtttaggagaaggtcgacgtcggacgcgttcgataagggagcaggatcagagaatggaccaaggaactctcctcctacttacggcctgtgatctataactcaaatctcaatagggagagagaaaagaagaagagtagcccccaaaacgctttcgatcaagtggtccttgcatgcagagttcgtgttgcttccgttttgtaggccaaagaggttctctcttttgtgtgcgtgtatgagtttgttttgtgtgtttgtggttacgtctatgtttttgtttttgtatgtcatctcgttttgggaatgcttctacgtgtctgtacatattttgctgcaatgataataaaaatgtgtagatgcct

SEQ ID NO: 142 - protein, 128 aa, Zea mays subsp. mays
  misc_feature (1)..(128): Ceres Seq. ID no. 12635067
MGLLDHLWDDTVAGPRPENGLGKLRRHHTFSFRPSSGNDQSDGGSVRSYGEESPEEAVKVTRSIMIIKPPGYQGGSAPVSPAGSTPPVSPFSGGKEPFRFRRRSTSDAFDKGAGSENGPRNSPPTYGL

SEQ ID NO: 143 - protein, 64 aa, Zea mays subsp. mays
  misc_feature (1)..(64): Ceres Seq. ID no. 12635068
MIIKPPGYQGGSAPVSPAGSTPPVSPFSGGKEPFRFRRRSTSDAFDKGAGSENGPRNSPPTYGL

SEQ ID NO: 144 - protein, 128 aa, Zea mays subsp. mays; identical to SEQ ID NO: 142
  misc_feature (1)..(128): Ceres Seq. ID no. 16625384

SEQ ID NO: 145 - DNA, 1935 bp, Zea mays subsp. mays
  misc_feature (1)..(1935): Ceres Seq. ID no. 12637422
gaccgatgccgctgctgctgcgcggcgcctccctcctccgcctctgccagtgtaccagtgggctctcaagtgtgaaatttagttcaagagtaacggtactagtgaatctcaacgccatgagggacggaatgcgggccacatattcacgtagagctgcctctaagaacagtgaggtcaagaaagatgagcagccactcacagagaaggaagatgctgctgaaagtgatttggagatggagcgagggaggagcagcagccctagccagctccaatcaatgactgtcaaggagctcagggagctcacgaggaggaggggtatttctgtgaaaggtaccaagaaagatttagtatcagcactgatgaattctatggccgtggaagcaaatggtgaagagggaaagtcatccgttgagctggttagccccttggaagtacctttgaaaagaaaaggtggtgcttctgttgtggttgaacaaaaactagaaagttctgagattatttctgaaacacctaacaagaaaagaagtagaacaaaacaaaaatcaagcaagaacaccacttgtcaggaaatttcggtgactaatgtcaagctaagtaagactgttgtccagaaggaaacagttgacggattaagtcctgatgatgattcagagccttggactatactcgtgcataagaaaccagaagccagctggattccatacaaccctaggactatgaggcctccacctcttagcaaggatacacgggctctgaagattatgtcatggaatgtcaatggattgaaagcattgctcaaatcaagaggcttctctgtgcagcagttagcacagagggaggactttgatgtgctttgcttacaagaaacaaaaatgcaggagaaggatattgaagttattaaggacactttgcttgatggctacacaaatagtttctggacttgcagtgtgtcaaagcttggctattctggcactgcaataatttcaagagtcaaaccactgtcgatcaagtatgggcttggtataccagaccatgatactgaagggagggttgtgactgtagagtttgatgacttctacctgttaactgcttatgtaccaaactctggtgatggtctaaaaagattgacttacagggtcacagagtgggatccatcccttggtaactacatgaaagaattggagaaatcgaagcctgtcatactaaccggtgatcttaattgtgcgcatcaggagattgatatacatgaccctgctggaaatcgtagaagtgctggcttcacaaacgaggaaagagaatcatttgggaccaattttttgtccaaagggttcgttgatacgtttcggaaacagcatcctaatgttgttgcctatagttactgggggtacagacataatgcccggaagacaaacaaaggttggcgcctggattactttcttgtgtccgaatcaatcgcagaaaaagtgcatgattcatatattcttccggacatctctgccagtgatcacagtccccttggtctcgtgctgaagctgtaggctgtatcacaggctatgccaaacattcagtctgaagcttgtgccatatttctcagacagcgatgcttattcctgatggtttctggttcgttcagattcctggcaggaacaaggacttttgtcagactattagtgaaacaaggctttgtaatgcactgagcagatttgagactattagtggacaacttactgttagcaaagctgcacctttgtaatgtaaatatgcggccatatcttgtgctgcacttgtgcagctcaatatgagcagcaggggaagctcattacctggtcatggaattatgatactgaccttaacctgttgaggtctttaaactatcttgtcatgtgctgtgccgctgatggcgtcagaaaataactgtgccatgcaatttcacgc

SEQ ID NO: 146 - protein, 511 aa, Zea mays subsp. mays
  misc_feature (1)..(511): Ceres Seq. ID no. 12637423
PMPLLLRGASLLRLCQCTSGLSSVKFSSRVTVLVNLNAMRDGMRATYSRRAASKNSEVKKDEQPLTEKEDAAESDLEMERGRSSSPSQLQSMTVKELRELTRRRGISVKGTKKDLVSALMNSMAVEANGEEGKSSVELVSPLEVPLKRKGGASVVVEQKLESSEIISETPNKKRSRTKQKSSKNTTCQEISVTNVKLSKTVVQKETVDGLSPDDDSEPWTILVHKKPEASWIPYNPRTMRPPPLSKDTRALKIMSWNVNGLKALLKSRGFSVQQLAQREDFDVLCLQETKMQEKDIEVIKDTLLDGYTNSFWTCSVSKLGYSGTAIISRVKPLSIKYGLGIPDHDTEGRVVTVEFDDFYLLTAYVPNSGDGLKRLTYRVTEWDPSLGNYMKELEKSKPVILTGDLNCAHQEIDIHDPAGNRRSAGFTNEERESFGTNFLSKGFVDTFRKQHPNVVAYSYWGYRHNARKTNKGWRLDYFLVSESIAEKVHDSYILPDISASDHSPLGLVLKL

SEQ ID NO: 147 - protein, 510 aa, Zea mays subsp. mays
  misc_feature (1)..(510): Ceres Seq. ID no. 12637424
MPLLLRGASLLRLCQCTSGLSSVKFSSRVTVLVNLNAMRDGMRATYSRRAASKNSEVKKDEQPLTEKEDAAESDLEMERGRSSSPSQLQSMTVKELRELTRRRGISVKGTKKDLVSALMNSMAVEANGEEGKSSVELVSPLEVPLKRKGGASVVVEQKLESSEIISETPNKKRSRTKQKSSKNTTCQEISVTNVKLSKTVVQKETVDGLSPDDDSEPWTILVHKKPEASWIPYNPRTMRPPPLSKDTRALKIMSWNVNGLKALLKSRGFSVQQLAQREDFDVLCLQETKMQEKDIEVIKDTLLDGYTNSFWTCSVSKLGYSGTAIISRVKPLSIKYGLGIPDHDTEGRVVTVEFDDFYLLTAYVPNSGDGLKRLTYRVTEWDPSLGNYMKELEKSKPVILTGDLNCAHQEIDIHDPAGNRRSAGFTNEERESFGTNFLSKGFVDTFRKQHPNVVAYSYWGYRHNARKTNKGWRLDYFLVSESIAEKVHDSYILPDISASDHSPLGLVLKL

SEQ ID NO: 148 - protein, 473 aa, Zea mays subsp. mays
  misc_feature (1)..(473): Ceres Seq. ID no. 12637425
MRDGMRATYSRRAASKNSEVKKDEQPLTEKEDAAESDLEMERGRSSSPSQLQSMTVKELRELTRRRGISVKGTKKDLVSALMNSMAVEANGEEGKSSVELVSPLEVPLKRKGGASVVVEQKLESSEIISETPNKKRSRTKQKSSKNTTCQEISVTNVKLSKTVVQKETVDGLSPDDDSEPWTILVHKKPEASWIPYNPRTMRPPPLSKDTRALKIMSWNVNGLKALLKSRGFSVQQLAQREDFDVLCLQETKMQEKDIEVIKDTLLDGYTNSFWTCSVSKLGYSGTAIISRVKPLSIKYGLGIPDHDTEGRVVTVEFDDFYLLTAYVPNSGDGLKRLTYRVTEWDPSLGNYMKELEKSKPVILTGDLNCAHQEIDIHDPAGNRRSAGFTNEERESFGTNFLSKGFVDTFRKQHPNVVAYSYWGYRHNARKTNKGWRLDYFLVSESIAEKVHDSYILPDISASDHSPLGLVLKL

SEQ ID NO: 149 - protein, 258 aa, Zea mays subsp. mays
  misc_feature (1)..(258): Ceres Seq. ID no. 16611673
MSWNVNGLKALLKSRGFSVQQLAQREDFDVLCLQETKMQEKDIEVIKDTLLDGYTNSFWTCSVSKLGYSGTAIISRVKPLSIKYGLGIPDHDTEGRVVTVEFDDFYLLTAYVPNSGDGLKRLTYRVTEWDPSLGNYMKELEKSKPVILTGDLNCAHQEIDIHDPAGNRRSAGFTNEERESFGTNFLSKGFVDTFRKQHPNVVAYSYWGYRHNARKTNKGWRLDYFLVSESIAEKVHDSYILPDISASDHSPLGLVLKL

SEQ ID NO: 150 - DNA, 772 bp, Zea mays subsp. mays
  misc_feature (1)..(772): Ceres Seq. ID no. 13589208
acggcacacgtctcggcagccacaagaaaccacccccttccggcacacgggctcgaccacctgactccatcaccgtgcctgtctgtgttctagggacaagaagagcagagagatccaggagcgagcagaggcggggagaagaggatgagcaccacaacggcgtcgtcgctgaaccccaacgcgccgctcttcatcccggcggcgtaccggcaggtggaggacttctcgcccgagtggtgggagctcgtcaacaccaccgcctggttccgggaccactgcttccggcagcgccagctccacgaggccgcctgcgacgacgtcgccgcgctcctccccgacgacctcctcgacaccaacgacctcttctacgcgcccgacgtcgtccaccaccaaccagcgacggcgctgctgcccgggtacgatgtcctcgacgtgctcgcggcgctgagcctcagctcccccagggccatccgccagcctcgctaggagaagcctgctcatggcgcctggcgggccaccacctccaccacggctgctgtgcctagtgtaaccccaagcaaggctagtctgtttctgtgtatacaatacgactgaaaaactaggagaggggggattcggccaaggcggccggtgctctctcctctcctcgtagctagtttttcctcctgttccagctcagttcttgttcatccagccgtgttaggaaaacaaacccagccccgtgcccatgttgttgaaaaatatattagtctggtatttacaactcttcgcc

SEQ ID NO: 151 - protein, 180 aa, Zea mays subsp. mays
  misc_feature (1)..(180): Ceres Seq. ID no. 13589209
GTRLGSHKKPPPSGTRARPPDSITVPVCVLGTRRAERSRSEQRRGEEDEHHNGVVAEPQRAALHPGGVPAGGGLLARVVGARQHHRLVPGPLLPAAPAPRGRLRRRRRAPPRRPPRHQRPLLRARRRPPPTSDGAAARVRCPRRARGAEPQLPQGHPPASLGEACSWRLAGHHLHHGCCA

SEQ ID NO: 152 - protein, 113 aa, Zea mays subsp. mays
  misc_feature (1)..(113): Ceres Seq. ID no. 13589210
MSTTTASSLNPNAPLFIPAAYRQVEDFSPEWWELVNTTAWFRDHCFRQRQLHEAACDDVAALLPDDLLDTNDLFYAPDVVHHQPATALLPGYDVLDVLAALSLSSPRAIRQPR

SEQ ID NO: 153 - protein, 113 aa, Zea mays subsp. mays; identical to SEQ ID NO: 152
  misc_feature (1)..(113): Ceres Seq. ID no. 16625398

SEQ ID NO: 154 - DNA, 2036 bp, Zea mays subsp. mays
  misc_feature (1)..(2036): Ceres Seq. ID no. 13623250
ggggacaaattcgcagttggattcagcatatgcattttttatgctgacataggatgtgctcaaccatccgtggactccctctagttgcacaaaccacctcagtgctctctctttcttcgaatcgggctaataatgggcagtgcttgccaagctggcacagacgggccttcccgcaaggatgtgttagggatagggaatgccgccttagagaatggccaccatcaggctgaagctgacgcagatgaatggagggaaaaggaagaggacttggccaacgggcacagtgcgccaccgccaggcatgcagcaggtggatgagcataaggaggaacaaagacaaagcattcactgggagaggttcctacctgtgaagacactgagagtcttgctggtggagaatgatgactctactcgtcaggtggtcagtgccctgctccgtaagtgctgctatgaagttattcctgctgaaaatggtttgcatgcatggcgatatcttgaagatctgcagaacaacatcgaccttgtattgactgaggttttcatgacttgtctatctggtatcggtctgcttagcaaaatcacaagtcacaaaatttgcaaagacattcctgtgattatgatgtctacgaatgattctatgagtatggtgtttaagtgtttgtcgaagggagcagttgatttcttggtaaaaccactacgtaagaatgagcttaagaacctttggcagcatgtttggaggcgatgccacagttccagtggaagtgaaagtggcatccagacacagaagtgtgccaaactaaatactggcgacgagtatgagaacggcagtgacagcaatcatgatgatgaagaaaatgatgacggcgacgatgacgacttcagtgttggactcaatgctagggatggaagtgacaatggcagtggtactcaaagctcatggacaaagcgtgctgtggagattgacagcccacaacctatatctcccgatcaactagttgatccacctgatagtacatgtgcacaagtaattcaccctagatcagagatatgcagtaacaagtggttaccgacagcaaacaaaaggaatgtcaagaaacagaaggagaataaagatgaatctatgggaagatacttaggaataggtgctcctaggaactcaagtgcagaatatcaatcatctctcaatgatgtatctgttaatccaatagaaaaaggacatgagaatcacatgtccaaatgcaaatctaaaaaggaaacaatggcagaagatgattgtacaaacatgcctagtgcaacaaatgctgaaactgctgatttgattagctcaatagccagaaacacagaaggccaacaagcagtacaagccgttgacgcaccagatggcccttccaaaatggctaatggaaatgataagaatcatgattctcatatcgaagtgacaccccatgagttgggtttgaagagatcgagaacaaatggagctacagcggaaatccatgatgagcgaaatattctgaaaagatcagatcagtcagccttcaccaggtaccatacatctgtggcttccaatcaaggtggagcaagatatggggaaagctcttcaccacaagataacagttctgaggccatgaaaacggactctacatgcaagatgaagtcaaattcagatgctgctccaataaagcagggctccaatggcagtagcaataacgatgtgggatccagtacaaagaatgttgctgcaaggccttcgggtgacagggagagagtagcgtcaccattagccatcaaatctacccagcatgcctcagcatttcatactatacagaatcaaacgtcaccagctaatctgattggggaagacaaagctgatgaaggaatttccaatgcagtgaaaatgagccacccaacagaggttccacaagggtgcgtccagcatcatcatcatgtgcattattacctccatgttatgacacagaaacagccatcaacagcccgtggatgtttaaacacaataaagtgggaactggagggggg

SEQ ID NO: 155 - protein, 634 aa, Zea mays subsp. mays
  misc_feature (1)..(634): Ceres Seq. ID no. 13623251
MGSACQAGTDGPSRKDVLGIGNAALENGHHQAEADADEWREKEEDLANGHSAPPPGMQQVDEHKEEQRQSIHWERFLPVKTLRVLLVENDDSTRQVVSALLRKCCYEVIPAENGLHAWRYLEDLQNNIDLVLTEVFMTCLSGIGLLSKITSHKICKDIPVIMMSTNDSMSMVFKCLSKGAVDFLVKPLRKNELKNLWQHVWRRCHSSSGSESGIQTQKCAKLNTGDEYENGSDSNHDDEENDDGDDDDFSVGLNARDGSDNGSGTQSSWTKRAVEIDSPQPISPDQLVDPPDSTCAQVIHPRSEICSNKWLPTANKRNVKKQKENKDESMGRYLGIGAPRNSSAEYQSSLNDVSVNPIEKGHENHMSKCKSKKETMAEDDCTNMPSATNAETADLISSIARNTEGQQAVQAVDAPDGPSKMANGNDKNHDSHIEVTPHELGLKRSRTNGATAEIHDERNILKRSDQSAFTRYHTSVASNQGGARYGESSSPQDNSSEAMKTDSTCKMKSNSDAAPIKQGSNGSSNNDVGSSTKNVAARPSGDRERVASPLAIKSTQHASAFHTIQNQTSPANLIGEDKADEGISNAVKMSHPTEVPQGCVQHHHHVHYYLHVMTQKQPSTARGCLNTIKWELEG

SEQ ID NO: 156 - protein, 578 aa, Zea mays subsp. mays
  misc_feature (1)..(578): Ceres Seq. ID no. 13623252
MQQVDEHKEEQRQSIHWERFLPVKTLRVLLVENDDSTRQVVSALLRKCCYEVIPAENGLHAWRYLEDLQNNIDLVLTEVFMTCLSGIGLLSKITSHKICKDIPVIMMSTNDSMSMVFKCLSKGAVDFLVKPLRKNELKNLWQHVWRRCHSSSGSESGIQTQKCAKLNTGDEYENGSDSNHDDEENDDGDDDDFSVGLNARDGSDNGSGTQSSWTKRAVEIDSPQPISPDQLVDPPDSTCAQVIHPRSEICSNKWLPTANKRNVKKQKENKDESMGRYLGIGAPRNSSAEYQSSLNDVSVNPIEKGHENHMSKCKSKKETMAEDDCTNMPSATNAETADLISSIARNTEGQQAVQAVDAPDGPSKMANGNDKNHDSHIEVTPHELGLKRSRTNGATAEIHDERNILKRSDQSAFTRYHTSVASNQGGARYGESSSPQDNSSEAMKTDSTCKMKSNSDAAPIKQGSNGSSNNDVGSSTKNVAARPSGDRERVASPLAIKSTQHASAFHTIQNQTSPANLIGEDKADEGISNAVKMSHPTEVPQGCVQHHHHVHYYLHVMTQKQPSTARGCLNTIKWELEG

SEQ ID NO: 157 - protein, 498 aa, Zea mays subsp. mays
  misc_feature (1)..(498): Ceres Seq. ID no. 13623253
MTCLSGIGLLSKITSHKICKDIPVIMMSTNDSMSMVFKCLSKGAVDFLVKPLRKNELKNLWQHVWRRCHSSSGSESGIQTQKCAKLNTGDEYENGSDSNHDDEENDDGDDDDFSVGLNARDGSDNGSGTQSSWTKRAVEIDSPQPISPDQLVDPPDSTCAQVIHPRSEICSNKWLPTANKRNVKKQKENKDESMGRYLGIGAPRNSSAEYQSSLNDVSVNPIEKGHENHMSKCKSKKETMAEDDCTNMPSATNAETADLISSIARNTEGQQAVQAVDAPDGPSKMANGNDKNHDSHIEVTPHELGLKRSRTNGATAEIHDERNILKRSDQSAFTRYHTSVASNQGGARYGESSSPQDNSSEAMKTDSTCKMKSNSDAAPIKQGSNGSSNNDVGSSTKNVAARPSGDRERVASPLAIKSTQHASAFHTIQNQTSPANLIGEDKADEGISNAVKMSHPTEVPQGCVQHHHHVHYYLHVMTQKQPSTARGCLNTIKWELEG

SEQ ID NO: 158 - protein, 710 aa, Zea mays subsp. mays
  misc_feature (1)..(710): Ceres Seq. ID no. 16611723
MQQVDEHKEEQRQSIHWERFLPVKTLRVLLVENDDSTRQVVSALLRKCCYEVIPAENGLHAWRYLEDLQNNIDLVLTEVFMTCLSGIGLLSKITSHKICKDIPVIMMSTNDSMSMVFKCLSKGAVDFLVKPLRKNELKNLWQHVWRRCHSSSGSESGIQTQKCAKLNTGDEYENGSDSNHDDEENDDGDDDDFSVGLNARDGSDNGSGTQSSWTKRAVEIDSPQPISPDQLVDPPDSTCAQVIHPRSEICSNKWLPTANKRNVKKQKENKDESMGRYLGIGAPRNSSAEYQSSLNDVSVNPIEKGHENHMSKCKSKKETMAEDDCTNMPSATNAETADLISSIARNTEGQQAVQAVDAPDGPSKMANGNDKNHDSHIEVTPHELGLKRSRTNGATAEIHDERNILKRSDQSAFTRYHTSVASNQGGARYGESSSPQDNSSEAMKTDSTCKMKSNSDAAPIKQGSNGSSNIDVGSSTKNVAARPSGDRERVASPLAIKSTQHASAFHTIQNQTSPANLIGEDKADEGISNAVKMSHPTEVPQGCVQHHHHVHYYLHVMTQKQPSTAGGSTDVHCGSSNVFDPPVEGHAANYSVNRPRLSWSIMGANGQNGSSAVPNIARPNIESINGTMSQNIAGGGIVSGSGSGNDMYQNRFLQREAALNKFRLKRKDRNFGKKVRYQSRKRLAEQRPRVRGQFVRQSEQEDQTAQGSER

SEQ ID NO: 159 - DNA, 443 bp, Zea mays subsp. mays
  misc_feature (1)..(443): Ceres Seq. ID no. 13624364
atcgcagaaattctccgcaacttcacagcgtatcatcgttttccatcgctcctactcctatcatccagaaaatctgagcggtattgatggcgcccaaggcggagaagaagccggcggcgaagaaggtggcggaggaggagccctcggagaaggcggctccggcggagaaggcccccgcggggaagaaggccaaggcggagaagcggctacctgcgggcaagtccgccggcaaggagggcggcgacaagaaggggaggaagaaggcgaagaagagcgtggagacctacaagatctacatcttcaaggtcctgaagcaggtgcaccccgacatcggcatctcctccaaggccatgtccatcatgaactccttcatcaacgacatcttcgagaagatgccgatgttggggtccgctcttcggcaagctcttcttcgccttctgggt

SEQ ID NO: 160 - protein, 147 aa, Zea mays subsp. mays
  misc_feature (1)..(147): Ceres Seq. ID no. 13624365
SQKFSATSQRIIVFHRSYSYHPENLSGIDGAQGGEEAGGEEGGGGGALGEGGSGGEGPRGEEGQGGEAATCGQVRRQGGRRQEGEEEGEEERGDLQDLHLQGPEAGAPRHRHLLQGHVHHELLHQRHLREDADVGVRSSASSSSPSG

SEQ ID NO: 161 - protein, 119 aa, Zea mays subsp. mays
  misc_feature (1)..(119): Ceres Seq. ID no. 13624366
MAPKAEKKPAAKKVAEEEPSEKAAPAEKAPAGKKAKAEKRLPAGKSAGKEGGDKKGRKKAKKSVETYKIYIFKVLKQVHPDIGISSKAMSIMNSFINDIFEKMPMLGSALRQALLRLLG

SEQ ID NO: 162 - DNA, 585 bp, Zea mays subsp. mays
  misc_feature (1)..(585): Ceres Seq. ID no. 13625975
aaacctagacattttctctcgtctcgccgcaggaaaaagaaagctctcttcagtgacattctgaggtgaagaaatgaagcacaacaatgttatcccgaatggtcatttcaagaagcactggcagaactatgtcaagacatggtttaaccagcctgccaggaaaaccagaagaagagttgcgagacagaagaaggctgtgaagatcttccctcgtcccacagctggacctctccgccctgttgtgcatggtcagaccctaaagtacaacatgaaggtcagaactggtaaaggattcactcttgaagagctcaaggctgctggaatccccaagaagttggcacccaccattggtatctctgttgaccatcgtcgcaagaacagatcattggagggtcttcaatccaatgtccagaggcttaaaacctacaaggctaagctggtcatcttcccgcgtcgtgccaggaaggtcaaggctggtgattctactgcagaagagttggctaatgccacccaagtccagggagattacatgcctatcgtccgtgagaagcaagcaacagagctagtgaagctgacctctgagat

SEQ ID NO: 163 - protein, 170 aa, Zea mays subsp. mays
  misc_feature (1)..(170): Ceres Seq. ID no. 13625976
MKHNNVIPNGHFKKHWQNYVKTWFNQPARKTRRRVARQKKAVKIFPRPTAGPLRPVVHGQTLKYNMKVRTGKGFTLEELKAAGIPKKLAPTIGISVDHRRKNRSLEGLQSNVQRLKTYKAKLVIFPRRARKVKAGDSTAEELANATQVQGDYMPIVREKQATELVKLTSE

SEQ ID NO: 164 - protein, 105 aa, Zea mays subsp. mays
  misc_feature (1)..(105): Ceres Seq. ID no. 13625977
MKVRTGKGFTLEELKAAGIPKKLAPTIGISVDHRRKNRSLEGLQSNVQRLKTYKAKLVIFPRRARKVKAGDSTAEELANATQVQGDYMPIVREKQATELVKLTSE

SEQ ID NO: 165 - DNA, 469 bp, Zea mays subsp. mays
  misc_feature (1)..(469): Ceres Seq. ID no. 13626086
aaatttccccgtgctcctctccatccagctctcctcttgctcataccgcgacgctctatctctttcgccgagctcctcgaaaccctaggagcgtgcttgaccggcggcggcgaggtgatggcgatggaccctgacgcggtagcgaaggccttcgtggagcattactaccgaacgttcgacaccaaccgcgcggcgctggttgggctgtaccaggagacctccatgctcaccttcgagggccagaagttccagggcccgtccgccattgccggcaagctcggatctctccctttccaggcctgcgagcatcagatcgtcaccgtcgactgccagccatcgggtccccagggaggcatgctcgtcttcgtctccggttccatacgcaccggcccccgagagcaccccatcaagttctcccaggcattccatttgctgccggccgctgggtccttcttcgtgcagaatgaca

SEQ ID NO: 166 - protein, 156 aa, Zea mays subsp. mays
  misc_feature (1)..(156): Ceres Seq. ID no. 13626087
KFPRAPLHPALLLLIPRRSISFAELLETLGACLTGGGEVMAMDPDAVAKAFVEHYYRTFDTNRAALVGLYQETSMLTFEGQKFQGPSAIAGKLGSLPFQACEHQIVTVDCQPSGPQGGMLVFVSGSIRTGPREHPIKFSQAFHLLPAAGSFFVQND

SEQ ID NO: 167 - protein, 117 aa, Zea mays subsp. mays
  misc_feature (1)..(117): Ceres Seq. ID no. 13626088
MAMDPDAVAKAFVEHYYRTFDTNRAALVGLYQETSMLTFEGQKFQGPSAIAGKLGSLPFQACEHQIVTVDCQPSGPQGGMLVFVSGSIRTGPREHPIKFSQAFHLLPAAGSFFVQND

SEQ ID NO: 168 - protein, 115 aa, Zea mays subsp. mays
  misc_feature (1)..(115): Ceres Seq. ID no. 13626089
MDPDAVAKAFVEHYYRTFDTNRAALVGLYQETSMLTFEGQKFQGPSAIAGKLGSLPFQACEHQIVTVDCQPSGPQGGMLVFVSGSIRTGPREHPIKFSQAFHLLPAAGSFFVQND

SEQ ID NO: 169 - DNA, 577 bp, Zea mays subsp. mays
  misc_feature (1)..(577): Ceres Seq. ID no. 13627944
aacatatatatgattgatatcatcaagtaatatataatgggtaaccatctatctctctcacactctctctgtctatcaagatattttccctccttatgctccttgctctttctacatgtgttgctaacgcgacaattttccctcaatgctcacaagctcctatagcttcccttcttcccccataccttccatcaattatagcttcaatatgtgaaaacccagctcttcaaccatataggcttcaacaagcaatcgcagcaagcaacatacctttatcgcccttgttgtttcaacaatcgccagccctatctttggtgcagtcattggtacaaaccatcagggcacaacagctgcagcaactcgtgctacctctgatcaaccaagtagctctggcaaacctttctccctactctcagcaacaacaatttcttccattcaaccaactgtctacactgaaccctgctgcttatttgcagcaacaactattaccatttagccagctagctactgcctactctcagcaacaacaacttcttccatttaaccaattggccgcactgaaccccgctgcttattt

SEQ ID NO: 170 - protein, 160 aa, Zea mays subsp. mays
  misc_feature (1)..(160): Ceres Seq. ID no. 13627945
MLLALSTCVANATIFPQCSQAPIASLLPPYLPSIIASICENPALQPYRLQQAIAASNIPLSPLLFQQSPALSLVQSLVQTIRAQQLQQLVLPLINQVALANLSPYSQQQQFLPFNQLSTLNPAAYLQQQLLPFSQLATAYSQQQQLLPFNQLAALNPAAY

SEQ ID NO: 171 - DNA, 1041 bp, Zea mays subsp. mays
  misc_feature (1)..(1041): Ceres Seq. ID no. 14301986
accgcctccattcctctctgctctgttctgctccaccaccctgatgacgacgaggccagacggcagcgcctccacgcccgcggacaagcagctcgtggcggcctccaacggcaacggcaacggcaacccgctggccgtccgcaaggcgccctccaaggaccggcacagcaaggtggacgggcgaggccggcgcatccgcatgcccatcatctgcgccgctcgcgtgttccagctcacgagggagctcgggcacaagtccgacggacagaccatcgagtggctgctcaggcaggccgagccctccatcatcgccgccaccggcaccggcaccacgccggcctccttctccacctcgtccccgtcatcgctccgctcctcctcgtcctccacagccggcgtccacccgcacgccgccccggcccaggggttctgggcgctgccggcgcgggccgacttcggacagctctggagcttcgcggccgcgccggagatgatggtcgccgcggctgcagcagcagcgccgggcatggccggggaggcgtccgccgccagggtcggcaactacctccccgtcgcgcagggcaacctcaacctgctggcctccttctccggcgggcctgctcccacagcggccgccggacgggccgaggaggagaccgcccgctaagggtcgtcaattcccagtctctctgtgtgtggctcaatccgggatagacagtgtcactctcacccaactctccatttctttttttggggttcagttcagatcagtgttggccacccgaattgggtggccttccactccatcccagtgagcaatcaagcaaggaggagctgcatcagctctccctcccgtcctatctatctatatgattttttttctttctttttgagcattggattagtgctctcaactacccacaagtgtttattagtcagccagctccttcagtgctactagcagctcagttcagtccatggtatgtgtccggattgtttgctgatgtgcttgttgatcaattaatggacataatggttgcg

SEQ ID NO: 172 - protein, 237 aa, Zea mays subsp. mays
  misc_feature (1)..(237): Ceres Seq. ID no. 14301987
TASIPLCSVLLHHPDDDEARRQRLHARGQAARGGLQRQRQRQPAGRPQGALQGPAQQGGRARPAHPHAHHLRRSRVPAHEGARAQVRRTDHRVAAQAGRALHHRRHRHRHHAGLLLHLVPVIAPLLLVLHSRRPPARRPGPGVLGAAGAGRLRTALELRGRAGDDGRRGCSSSAGHGRGGVRRQGRQLPPRRAGQPQPAGLLLRRACSHSGRRTGRGGDRPLRVVNSQSLCVWLNPG

SEQ ID NO: 173 - protein, 221 aa, Zea mays subsp. mays
  misc_feature (1)..(221): Ceres Seq. ID no. 14301988
PPPFLSALFCSTTLMTTRPDGSASTPADKQLVAASNGNGNGNPLAVRKAPSKDRHSKVDGRGRRIRMPIICAARVFQLTRELGHKSDGQTIEWLLRQAEPSIIAATGTGTTPASFSTSSPSSLRSSSSSTAGVHPHAAPAQGFWALPARADFGQLWSFAAAPEMMVAAAAAAAPGMAGEASAARVGNYLPVAQGNLNLLASFSGGPAPTAAAGRAEEETAR

SEQ ID NO: 174 - protein, 207 aa, Zea mays subsp. mays
  misc_feature (1)..(207): Ceres Seq. ID no. 14301989
MTTRPDGSASTPADKQLVAASNGNGNGNPLAVRKAPSKDRHSKVDGRGRRIRMPIICAARVFQLTRELGHKSDGQTIEWLLRQAEPSIIAATGTGTTPASFSTSSPSSLRSSSSSTAGVHPHAAPAQGFWALPARADFGQLWSFAAAPEMMVAAAAAAAPGMAGEASAARVGNYLPVAQGNLNLLASFSGGPAPTAAAGRAEEETAR

SEQ ID NO: 175 - protein, 207 aa, Zea mays subsp. mays; identical to SEQ ID NO: 174
  misc_feature (1)..(207): Ceres Seq. ID no. 16625432

SEQ ID NO: 176 - DNA, 1097 bp, Zea mays subsp. mays
  misc_feature (1)..(1097): Ceres Seq. ID no. 14305144
gattcccggatggatgtgccggcccggcccggcccgctcggcgctcgtgcttctccccagtcccgtccatccaaagcgttttgcacttgtgcacaaactgcggctgctgtagatacgcgcgccgccactccaaggtccaagcctcccttgctcccgccaccgcccctcaccatgggcagcgccgccacctctccgcagccgtctgggaatctgacgcaggacgagctcaagcgcgtggcggcgcaccgcgcgttggagttcgtggagtccggcatgacgctgggcctgggcacgggttccacggccgcgcacgcgctggaccgcctgggcgacctcctccgcgcgggcgcgctgcccggggtcgccggcgttcccacctccctcaagacggaggcccacgccgcccgcgtcgggatcccgctgcttccgctcgacgccgcctcgggcgccagcatccgcctctccatcgacggcgccgacgaggtcgacccggacctcaacctcgtcaagggccgcggcgggtcgctgctccgggagaagatgatcgagggcgccggcgatcggttcgtcgtcatcgtcgacgagtccaagctcgtgccgaggctcggctgcacgggcgccgtccccgtcgaggtcatccccttcggcgcaccccacacgctcggcctcatccgcaaggtgttcgatggagtgcctggcttccacgccaggctgaggacggtccccgccgccaatggggaggactcggacgcgccgttcctcaccgacaacggcaactacatcgtggagatgttcttcgaggacggtatccgcggcgacctgctggacatcagcgatcgtctgctccggatcaccggcgtcatcgagcatggcatgtttcttggcatggccactacagtcatcgtcgctaacaaggacggcaccgtcacagtcatcaacaagaagaagtaataatctacaagtagcctgtatgtgtgcgtccgtgtgtgatccagctacctaagttctgctcgttaccgttgtgaaaccatcattttgttttatcatctcatatctttcctactggtgattccaatatatcttatttattatccctc

SEQ ID NO: 177 - protein, 316 aa, Zea mays subsp. mays
  misc_feature (1)..(316): Ceres Seq. ID no. 14305145
DSRMDVPARPGPLGARASPQSRPSKAFCTCAQTAAAVDTRAATPRSKPPLLPPPPLTMGSAATSPQPSGNLTQDELKRVAAHRALEFVESGMTLGLGTGSTAAHALDRLGDLLRAGALPGVAGVPTSLKTEAHAARVGIPLLPLDAASGASIRLSIDGADEVDPDLNLVKGRGGSLLREKMIEGAGDRFVVIVDESKLVPRLGCTGAVPVEVIPFGAPHTLGLIRKVFDGVPGFHARLRTVPAANGEDSDAPFLTDNGNYIVEMFFEDGIRGDLLDISDRLLRITGVIEHGMFLGMATTVIVANKDGTVTVINKKK

SEQ ID NO: 178 - protein, 313 aa, Zea mays subsp. mays
  misc_feature (1)..(313): Ceres Seq. ID no. 14305146
MDVPARPGPLGARASPQSRPSKAFCTCAQTAAAVDTRAATPRSKPPLLPPPPLTMGSAATSPQPSGNLTQDELKRVAAHRALEFVESGMTLGLGTGSTAAHALDRLGDLLRAGALPGVAGVPTSLKTEAHAARVGIPLLPLDAASGASIRLSIDGADEVDPDLNLVKGRGGSLLREKMIEGAGDRFVVIVDESKLVPRLGCTGAVPVEVIPFGAPHTLGLIRKVFDGVPGFHARLRTVPAANGEDSDAPFLTDNGNYIVEMFFEDGIRGDLLDISDRLLRITGVIEHGMFLGMATTVIVANKDGTVTVINKKK

SEQ ID NO: 179 - protein, 302 aa, Zea mays subsp. mays
  misc_feature (1)..(302): Ceres Seq. ID no. 14305147
FPDGCAGPARPARRSCFSPVPSIQSVLHLCTNCGCCRYARRHSKVQASLAPATAPHHGQRRHLSAAVWESDAGRAQARGGAPRVGVRGVRHDAGPGHGFHGRARAGPPGRPPPRGRAARGRRRSHLPQDGGPRRPRRDPAASARRRLGRQHPPLHRRRRRGRPGPQPRQGPRRVAAPGEDDRGRRRSVRRHRRRVQARAEARLHGRRPRRGHPLRRTPHARPHPQGVRWSAWLPRQAEDGPRRQWGGLGRAVPHRQRQLHRGDVLRGRYPRRPAGHQRSSAPDHRRHRAWHVSWHGHYSHRR

SEQ ID NO: 180 - protein, 259 aa, Zea mays subsp. mays
  misc_feature (1)..(259): Ceres Seq. ID no. 16625452
MGSAATSPQPSGNLTQDELKRVAAHRALEFVESGMTLGLGTGSTAAHALDRLGDLLRAGALPGVAGVPTSLKTEAHAARVGIPLLPLDAASGASIRLSIDGADEVDPDLNLVKGRGGSLLREKMIEGAGDRFVVIVDESKLVPRLGCTGAVPVEVIPFGAPHTLGLIRKVFDGVPGFHARLRTVPAANGEDSDAPFLTDNGNYIVEMFFEDGIRGDLLDISDRLLRITGVIEHGMFLGMATTVIVANKDGTVTVINKKK

SEQ ID NO: 181 - DNA, 977 bp, Zea mays subsp. mays
  misc_feature (1)..(977): Ceres Seq. ID no. 14305255
caaacactttgccgcaccgcgaccactccgcttggcgcccggcgccagccagccagccatgttcacggacggcatgtcgaggctggcggtggcggtgagcgtcacggtggccctcagcctggccatcttcctcaccatcctggcgctcctcctcgcggacctaatctgcgcgcacctccggcgccggcggctccgcgccgaggcgccccggtcgaagctgggcctcggcctgtcgctggcggcttcgtcaccggcgcgcgccgacggcgcgtcgtcgtcggccacgacggcgctcgccggtacgccgccctcctactacgcgcacggcgtcctgcacgcgccctgcaccaaggacctcctcctcgccatccccaggctggagggcgccgtgtggcggtggtcgccgccgacgccgtcgtcgggctcgtcggggggcggctcctcggcgggcggcgacgggttcatgtgcatctccaacccggtgtacgaccgggccgcggccgcccccggcggggacacgccgctcgggatcacggaggaggcggacgcgtacgggtacggcgaggaggacgcccgcgggttctcgccgccgctgtcggcgatgaggaagctaccgccgctgggtgtcctggccgcgtaccccccaccgccgcggccgagcttcaccgatgccatgccgacaatggcagcaccggtgaccgacaccaaccgggcctcctcctcttcgtccgcctactttttctcttcgtggtcgtccaagtaagagatcacctgtgacgtacgcggattgtagtgagatggaggtggtcagcagcttcgatttcattcattattttggccgttttttcctcgttctgtcatatcattgtcatctacggagtacggagtagtaccatcgcctcggtcctgctagctcctcctgcacactccatgtcctacgactacgataaccgaagcttttgcttggtgttttatcc

SEQ ID NO: 182 - protein, 258 aa, Zea mays subsp. mays
  misc_feature (1)..(258): Ceres Seq. ID no. 14305256
QTLCRTATTPLGARRQPASHVHGRHVEAGGGGERHGGPQPGHLPHHPGAPPRGPNLRAPPAPAAPRRGAPVEAGPRPVAGGFVTGARRRRVVVGHDGARRYAALLLRARRPARALHQGPPPRHPQAGGRRVAVVAADAVVGLVGGRLLGGRRRVHVHLQPGVRPGRGRPRRGHAARDHGGGGRVRVRRGGRPRVLAAAVGDEEATAAGCPGRVPPTAAAELHRCHADNGSTGDRHQPGLLLFVRLLFLFVVVQVRDHL

SEQ ID NO: 183 - protein, 253 aa, Zea mays subsp. mays
  misc_feature (1)..(253): Ceres Seq. ID no. 14305257
KHFAAPRPLRLAPGASQPAMFTDGMSRLAVAVSVTVALSLAIFLTILALLLADLICAHLRRRRLRAEAPRSKLGLGLSLAASSPARADGASSSATTALAGTPPSYYAHGVLHAPCTKDLLLAIPRLEGAVWRWSPPTPSSGSSGGGSSAGGDGFMCISNPVYDRAAAAPGGDTPLGITEEADAYGYGEEDARGFSPPLSAMRKLPPLGVLAAYPPPPRPSFTDAMPTMAAPVTDTNRASSSSSAYFFSSWSSK

SEQ ID NO: 184 - protein, 234 aa, Zea mays subsp. mays
  misc_feature (1)..(234): Ceres Seq. ID no. 14305258
MFTDGMSRLAVAVSVTVALSLAIFLTILALLLADLICAHLRRRRLRAEAPRSKLGLGLSLAASSPARADGASSSATTALAGTPPSYYAHGVLHAPCTKDLLLAIPRLEGAVWRWSPPTPSSGSSGGGSSAGGDGFMCISNPVYDRAAAAPGGDTPLGITEEADAYGYGEEDARGFSPPLSAMRKLPPLGVLAAYPPPPRPSFTDAMPTMAAPVTDTNRASSSSSAYFFSSWSSK

SEQ ID NO: 185 - protein, 234 aa, Zea mays subsp. mays; identical to SEQ ID NO: 184
  misc_feature (1)..(234): Ceres Seq. ID no. 16625453

SEQ ID NO: 186 - DNA, 819 bp, Zea mays subsp. mays
  misc_feature (1)..(819): Ceres Seq. ID no. 14305316
aacgccaacgcctcaaccacctgtggtggcttctcctctccccgctccccccctgccccttcccttcgtcctcagatccgccgatcccccgcccctgcgcctccgtctcatgatctctgcgcctctgcgggtgccggcgccgaaggctgccgccgggggttcgttcctgctcggcgcgtcctccgtcgagtccaatcccaatcccaagcccagcaggatccgctgcgccgccgccacgctgtacgaggtcctgggcctgcgcgccggcgcgacgggccgggagatcaaggccgcgtacaggcgcctggcgcgggagcggcacccggacgtggcgcacgcgcccggggccgccgccgagttcgcccgcctgcacgacgcctacgccacgctctccgacccggacagccgcgcgcgctacgacggcggcggcgccgcgcccgcggcggcggtggcgaggcgcccctggagcggcgccgtctacggccggccccgacgccgcacatgggagacggaccagtgctggtagtagagagtagagaggcacagccaagagccccacgcgcttcttgtctgtctgtagaatagttagacctcctgccgccagccatgcggccatggcggctcaccttggactttttttttggtttcggtggccatccatgtagcgtgatttttcgttttccttcctccacttgcccttgtacctgtgtgctgtggtcttgacttcttgagatgtaaatactagtacttgatgagatggttggaggagtagccgccctgcctctgttaattctaaataatccaagctgttctctccat

SEQ ID NO: 187 - protein, 194 aa, Zea mays subsp. mays
  misc_feature (1)..(194): Ceres Seq. ID no. 14305317
NANASTTCGGFSSPRSPPAPSLRPQIRRSPAPAPPSHDLCASAGAGAEGCRRGFVPARRVLRRVQSQSQAQQDPLRRRHAVRGPGPARRRDGPGDQGRVQAPGAGAAPGRGARARGRRRVRPPARRLRHALRPGQPRALRRRRRRARGGGGEAPLERRRLRPAPTPHMGDGPVLVVESREAQPRAPRASCLSVE

SEQ ID NO: 188 - protein, 174 aa, Zea mays subsp. mays
  misc_feature (1)..(174): Ceres Seq. ID no. 14305318
TPTPQPPVVASPLPAPPLPLPFVLRSADPPPLRLRLMISAPLRVPAPKAAAGGSFLLGASSVESNPNPKPSRIRCAAATLYEVLGLRAGATGREIKAAYRRLARERHPDVAHAPGAAAEFARLHDAYATLSDPDSRARYDGGGAAPAAAVARRPWSGAVYGRPRRRTWETDQCW

SEQ ID NO: 189 - protein, 138 aa, Zea mays subsp. mays
  misc_feature (1)..(138): Ceres Seq. ID no. 14305319
MISAPLRVPAPKAAAGGSFLLGASSVESNPNPKPSRIRCAAATLYEVLGLRAGATGREIKAAYRRLARERHPDVAHAPGAAAEFARLHDAYATLSDPDSRARYDGGGAAPAAAVARRPWSGAVYGRPRRRTWETDQCW

SEQ ID NO: 190 - protein, 138 aa, Zea mays subsp. mays; identical to SEQ ID NO: 189
  misc_feature (1)..(138): Ceres Seq. ID no. 16625454

SEQ ID NO: 191 - DNA, 993 bp, Zea mays subsp. mays
  misc_feature (1)..(993): Ceres Seq. ID no. 14306276
attttcacctccacccacccgactcggcggcctgcgctcgtccgcccgttcctcgccggcgccgtctcttccgcagaccggtccgtgggtcgagggagccgcttcttcctccagcttatggcagacagaagtgatggaccgattgggaggctcccagaacatcttattatagaaatactcattcgtttaccggtctatgagtgggtgcaattagcatgtgtcaacaagcattgggcaagcatatttcaaggagaatgcgtgtggcaaactgctattgcaaggaactggccatctgctggtctccagaaacgctggcctgggccaattcctagaggttctgctaggaggagatttcaagcactgtatgtcagtgagaacttagtaccatctggtggggagattgatgagcttgttggtcacacttatctctacttaaaagaacagcttgagcgtcctgtcatgcctccttccagcatacttcatggcaccatcattgaccaattcattgcttgcggcaatacaggagaaaaggcccatgatcttgcttcaaaaatatggcttgcagtcattgacagcttggaagaaaaccagcaaactttcttactgttaaaacgtgtggcacaagaaggagaatttttccttccgtttccatactccagatcatatagggtactatggagggtgtttgacaagctgttcaccgacttccgcgactgtttcagcggggctgagtaccatgatgttctatcgactgctaagtctaggtttcagccggtgccttccacatggcttggccattagcgcactgcagttgctcttgttgtgcgcactctacagtgtcgtagataaagcagtgatacttacagcagtcatttcgagtacatgtagcatcttgacagcttcaagagcattaaaatgttgtttgagatggaatactcagtgttcttgcaagtccttgaaagtaattcgatacactctgtcatttgcacagtt

SEQ ID NO: 192 - protein, 266 aa, Zea mays subsp. mays
  misc_feature (1)..(266): Ceres Seq. ID no. 14306277
IFTSTHPTRRPALVRPFLAGAVSSADRSVGRGSRFFLQLMADRSDGPIGRLPEHLIIEILIRLPVYEWVQLACVNKHWASIFQGECVWQTAIARNWPSAGLQKRWPGPIPRGSARRRFQALYVSENLVPSGGEIDELVGHTYLYLKEQLERPVMPPSSILHGTIIDQFIACGNTGEKAHDLASKIWLAVIDSLEENQQTFLLLKRVAQEGEFFLPFPYSRSYRVLWRVFDKLFTDFRDCFSGAEYHDVLSTAKSRFQPVPSTWLGH

SEQ ID NO: 193 - protein, 227 aa, Zea mays subsp. mays
  misc_feature (1)..(227): Ceres Seq. ID no. 14306278
MADRSDGPIGRLPEHLIIEILIRLPVYEWVQLACVNKHWASIFQGECVWQTAIARNWPSAGLQKRWPGPIPRGSARRRFQALYVSENLVPSGGEIDELVGHTYLYLKEQLERPVMPPSSILHGTIIDQFIACGNTGEKAHDLASKIWLAVIDSLEENQQTFLLLKRVAQEGEFFLPFPYSRSYRVLWRVFDKLFTDFRDCFSGAEYHDVLSTAKSRFQPVPSTWLGH

SEQ ID NO: 194 - protein, 227 aa, Zea mays subsp. mays; identical to SEQ ID NO: 193
  misc_feature (1)..(227): Ceres Seq. ID no. 16625462

SEQ ID NO: 195 - DNA, 879 bp, Zea mays subsp. mays
  misc_feature (1)..(879): Ceres Seq. ID no. 14309027
cacatcgagttcttcttctcggttctcaatttccacgataaaatggtgaccggcgacgtaaagctgattggctcatgggctagtgtcttcgtcatgagggccagaatcgctctcaacctcaaatctattaggtacgagtttctccaggagacatacggtactaagagcgagttgctccttaaatctaatcccgttcacaagaagatcccggttctgattcacgatgacaaacccgtgtgtgagtccaacatcatcgttcagtacatcgacgaggcttggagctcatatggaccgtctattctcccttcccagccctacgacagagccatcgctcggttctgggccgcctacgtcgacgataagtggtttattgctctgagaagtatcctaaccgctcgaggagaagaggagaagaaagcagccatagctgaagtcgaaggaaggactgaccatttagagaaagccttcatcgagtgcagcaatgggaaaccgttcttcaacggtgaccatatcggttacctagacattgccctagggagcttcttgggttggtggaaagtcgtggagttagacgccaatcatatacttcttgacgagaccaagactccctctctgttcaagtgggcagagcggttctgtaatgaccctgatgtgaagcctctcatgcccgagacagcaaagctagctgaatttgcgaggaaactctttcccaagccgcaggcttgatggcaaagtatattgactccttttaaatatattgttggagatagaaacaatataatatatcggttagtggaaatatgaaactggtttactagaacgtgtaagttatgttccatttcaatgtatccaagaccttctatcaagcaaatattttgt

SEQ ID NO: 196 - protein, 241 aa, Zea mays subsp. mays
  misc_feature (1)..(241): Ceres Seq. ID no. 14309028
HIEFFFSVLNFHDKMVTGDVKLIGSWASVFVMRARIALNLKSIRYEFLQETYGTKSELLLKSNPVHKKIPVLIHDDKPVCESNIIVQYIDEAWSSYGPSILPSQPYDRAIARFWAAYVDDKWFIALRSILTARGEEEKKAAIAEVEGRTDHLEKAFIECSNGKPFFNGDHIGYLDIALGSFLGWWKVVELDANHILLDETKTPSLFKWAERFCNDPDVKPLMPETAKLAEFARKLFPKPQA

SEQ ID NO: 197 - protein, 227 aa, Zea mays subsp. mays
  misc_feature (1)..(227): Ceres Seq. ID no. 14309029
MVTGDVKLIGSWASVFVMRARIALNLKSIRYEFLQETYGTKSELLLKSNPVHKKIPVLIHDDKPVCESNIIVQYIDEAWSSYGPSILPSQPYDRAIARFWAAYVDDKWFIALRSILTARGEEEKKAAIAEVEGRTDHLEKAFIECSNGKPFFNGDHIGYLDIALGSFLGWWKVVELDANHILLDETKTPSLFKWAERFCNDPDVKPLMPETAKLAEFARKLFPKPQA

SEQ ID NO: 198 - protein, 210 aa, Zea mays subsp. mays
  misc_feature (1)..(210): Ceres Seq. ID no. 14309030
MRARIALNLKSIRYEFLQETYGTKSELLLKSNPVHKKIPVLIHDDKPVCESNIIVQYIDEAWSSYGPSILPSQPYDRAIARFWAAYVDDKWFIALRSILTARGEEEKKAAIAEVEGRTDHLEKAFIECSNGKPFFNGDHIGYLDIALGSFLGWWKVVELDANHILLDETKTPSLFKWAERFCNDPDVKPLMPETAKLAEFARKLFPKPQA

SEQ ID NO: 199 - protein, 227 aa, Zea mays subsp. mays; identical to SEQ ID NO: 197
  misc_feature (1)..(227): Ceres Seq. ID no. 16625481

SEQ ID NO: 200 - DNA, 795 bp, Zea mays subsp. mays
  misc_feature (1)..(795): Ceres Seq. ID no. 14309220
attcacaaccacacctctaaacatttctcacaattttttggtctaaagaaggaatataactctttttctcttttcctttttgcttttacacaatcttataagaaactttagcctgagagagcgagagacggtgtaggatgcactacacgcgcatctcaccaattatattgccttctccaccacccaccatcaccgccaccgttgaatccagtggtagaggaaccatgttagccaccctattcatggccctccttctcccttgcgttggcatgtgcattgtcttcctcatatatctcttcttcttgtggtgctccacacgtcgccgtattgagcgtctaagattttctgaaccggttaagctggtcaccggtaaaggtctctctgtctcggagctcgagaaactcccaaaactcaccggaaaagagcttgccttagaagtgaggtcgacagagtgccctgtttgccttgaaaatatcgagagttgccaatcggcccgtctggttcccggttgcaaccatgggtttcaccaattatgtgctgacacgtggttatctaaccacacggtgtgtcctgtttgtcgtggcgatcttgctcagaaggttcctcaacttagtaacaatcatagtccatgttgaaaacatgatcccaaatactcttcttctttattcattttcttctacttgtcttgttttctctctgttaacattttagttttttcatcgtttgctgtagtaggtggatatggtttgtacagtaaattgtaatagagtcaagtacaaaatttcctgttttgtc

SEQ ID NO: 201 - protein, 165 aa, Zea mays subsp. mays
  misc_feature (1)..(165): Ceres Seq. ID no. 14309221
MHYTRISPIILPSPPPTITATVESSGRGTMLATLFMALLLPCVGMCIVFLIYLFFLWCSTRRRIERLRFSEPVKLVTGKGLSVSELEKLPKLTGKELALEVRSTECPVCLENIESCQSARLVPGCNHGFHQLCADTWLSNHTVCPVCRGDLAQKVPQLSNNHSPC

SEQ ID NO: 202 - protein, 136 aa, Zea mays subsp. mays
  misc_feature (1)..(136): Ceres Seq. ID no. 14309222
MLATLFMALLLPCVGMCIVFLIYLFFLWCSTRRRIERLRFSEPVKLVTGKGLSVSELEKLPKLTGKELALEVRSTECPVCLENIESCQSARLVPGCNHGFHQLCADTWLSNHTVCPVCRGDLAQKVPQLSNNHSPC

SEQ ID NO: 203 - protein, 130 aa, Zea mays subsp. mays
  misc_feature (1)..(130): Ceres Seq. ID no. 14309223
MALLLPCVGMCIVFLIYLFFLWCSTRRRIERLRFSEPVKLVTGKGLSVSELEKLPKLTGKELALEVRSTECPVCLENIESCQSARLVPGCNHGFHQLCADTWLSNHTVCPVCRGDLAQKVPQLSNNHSPC

SEQ ID NO: 204 - protein, 165 aa, Zea mays subsp. mays; identical to SEQ ID NO: 201
  misc_feature (1)..(165): Ceres Seq. ID no. 16625482

SEQ ID NO: 205 - DNA, 590 bp, Zea mays subsp. mays
  misc_feature (1)..(590): Ceres Seq. ID no. 14309318
cacaaattctcagctattgagatttgaacatttcatccaaaaaatgttctttcagattattcagggggttttcaccggcgttgaggcattagctctattggcattcgctggtataacgcttggcggctcggccgtgggactagctttaagcacgccgctttttattctattcagtccgattctcgtgccagcaactatagccaccactttgttaactacgggtttcacaacctccgggggcttaggaatcgtggctctccgcatcttctggaagctcttcaagcgtcttaggaagaaggggaaaggaacgccaaaaattccgggattggccccgggggctccagattctaactcagtgtctgggggataaacggagtaggctttcgtagtatgagataatctatggaggaatttaatgagaattgatggggttccttaaataaaacctaaaattatccagtgtctttaacgtaatactgattacgcgcggatgaaactaatgtttcatataccattcttcaaatgtatatcgtgttacgaaattatagtaaatgtactcgatcgtgttgtatattttaaagaattaagtg

SEQ ID NO: 206 - protein, 122 aa, Zea mays subsp. mays
  misc_feature (1)..(122): Ceres Seq. ID no. 14309319
TNSQLLRFEHFIQKMFFQIIQGVFTGVEALALLAFAGITLGGSAVGLALSTPLFILFSPILVPATIATTLLTTGFTTSGGLGIVALRIFWKLFKRLRKKGKGTPKIPGLAPGAPDSNSVSGG

SEQ ID NO: 207 - protein, 108 aa, Zea mays subsp. mays
  misc_feature (1)..(108): Ceres Seq. ID no. 14309320
MFFQIIQGVFTGVEALALLAFAGITLGGSAVGLALSTPLFILFSPILVPATIATTLLTTGFTTSGGLGIVALRIFWKLFKRLRKKGKGTPKIPGLAPGAPDSNSVSGG

SEQ ID NO: 208 - protein, 108 aa, Zea mays subsp. mays; identical to SEQ ID NO: 207
  misc_feature (1)..(108): Ceres Seq. ID no. 16625483

SEQ ID NO: 209 - DNA, 1127 bp, Zea mays subsp. mays
  misc_feature (1)..(1127): Ceres Seq. ID no. 14312434
ccccaccagtccgtcccatccctcgcctgccttcgcacgggtgcgccgcccgctcgacagccacgccgcgccgcgccgcgccgctcagctgcccggcacccgcccttcctcgccgagctcgggatcgacgtctcccgcacctcctccgcgcccgttccgggctccgcatccggcctctcccccgtccccaaccccattccgcagcaggcgaccagcacaacatctcgaatcccccgcctcgcattcggctcgccgtcgctcctcctccgcgtcccgccaccctccgcacgcacaagtttactatgtctgggatggcatctgatgattcacctgcccaagtgaatgttgaaggagatgtttcagagaaaaaagtagaagttcaagaccagaatgaagtgggtgggatgccctcacgacaagaggaggaggcagcaattaagaaaaagtatggaggaatattgcccagaaagactccacttatatctaaggatcatgaacgtgcttactttgattctgctgattgggctctaggaaagcaaggtggtgttcccaacaagcctaaaggtcctcttgaggcactccgacccaagcttcagcctacgcaacagaatgcccgcgcccgccgaacttcatatgcgtctgcggacagtgacgacactttgaatctgtcccccgaggatctggtcccgcaaggagaacccagccagcagggagaaccagtcgaggacaagaacaaggaataaacacatgcccagcatagctactgtactgtaccccttttcatacacaagatgccattttccgccgtcgcacaaaaaaaaaacttcttttgccttggtaataagcgtgttgattcggttccggcccaacggtcccggtgaggctgaggttgagacacgtgcagcttgaactgcatgtgagatgtggtatccgctgcactgggctgttgggggtccttgggatgcatgaacaaataaacaatgatgcttgcgatgtttacattgctgtacctggacctgtgttacctctatgcaaacacatgcaaatccgatggtccgagactcgaaactctcccgttgagctgaaggagttgctgtactaataataatgaagattttttttttttc

SEQ ID NO: 210 - protein, 246 aa, Zea mays subsp. mays
  misc_feature (1)..(246): Ceres Seq. ID no. 14312435
PPVRPIPRLPSHGCAARSTATPRRAAPLSCPAPALPRRARDRRLPHLLRARSGLRIRPLPRPQPHSAAGDQHNISNPPPRIRLAVAPPPRPATLRTHKFTMSGMASDDSPAQVNVEGDVSEKKVEVQDQNEVGGMPSRQEEEAAIKKKYGGILPRKTPLISKDHERAYFDSADWALGKQGGVPNKPKGPLEALRPKLQPTQQNARARRTSYASADSDDTLNLSPEDLVPQGEPSQQGEPVEDKNKE

SEQ ID NO: 211 - protein, 146 aa, Zea mays subsp. mays
  misc_feature (1)..(146): Ceres Seq. ID no. 14312436
MSGMASDDSPAQVNVEGDVSEKKVEVQDQNEVGGMPSRQEEEAAIKKKYGGILPRKTPLISKDHERAYFDSADWALGKQGGVPNKPKGPLEALRPKLQPTQQNARARRTSYASADSDDTLNLSPEDLVPQGEPSQQGEPVEDKNKE

SEQ ID NO: 212 - protein, 143 aa, Zea mays subsp. mays
  misc_feature (1)..(143): Ceres Seq. ID no. 14312437
MASDDSPAQVNVEGDVSEKKVEVQDQNEVGGMPSRQEEEAAIKKKYGGILPRKTPLISKDHERAYFDSADWALGKQGGVPNKPKGPLEALRPKLQPTQQNARARRTSYASADSDDTLNLSPEDLVPQGEPSQQGEPVEDKNKE

SEQ ID NO: 213 - protein, 143 aa, Zea mays subsp. mays; identical to SEQ ID NO: 212
  misc_feature (1)..(143): Ceres Seq. ID no. 16612000

SEQ ID NO: 214 - DNA, 702 bp, Zea mays subsp. mays
  misc_feature (1)..(702): Ceres Seq. ID no. 14312544
aacgccgctcctgcgcgccatcactccactcgatcgaccgcctccgtgtccgtgccctacagctggtcatgagcgcccgcccaaccatggcggcggcggcgcccgtgcgcgcctgggtggtggcgctggcgctggtgctggcgtgcgcgctgctccagccgcggccgtccgacgccgcggcgcagcccgccccgcagtcgccggcgacggcggtgtcgtcgggcgccgccaagcccaagtgcgtggccggcgccaggaacgaccacgcgtgccgcgtcggcgccgtgcacgacccggacagccaggaggaggagggctccagcgtcaccatcgacgcgcccgccgccgcgcccgacgacgtcggccacgacgacggcagcgactacaacgaccccgacgtgcccaacaacgaccagctcgtcgtcgtcggccactgaaagctgccgcgcgcgcgcgcgcgccgacccgtggaccatgcgtgcatgaagaagaatgcagggggtgggcctgggcctgtaacctgttaatggatcggattctcggtgccaattcgtgatcttgaccggtctaagaagatggggacttgcgtctttgtttcattggttattatttctactagtgtgtatatggtaaagtcgtgtgctgtgaacctgcgatcatttatcctctgttcattgaattgaagcaatcccctctcccgtt

SEQ ID NO: 215 - protein, 184 aa, Zea mays subsp. mays
  misc_feature (1)..(184): Ceres Seq. ID no. 14312545
TPLLRAITPLDRPPPCPCPTAGHERPPNHGGGGARARLGGGAGAGAGVRAAPAAAVRRRGAARPAVAGDGGVVGRRQAQVRGRRQERPRVPRRRRARPGQPGGGGLQRHHRRARRRARRRRPRRRQRLQRPRRAQQRPARRRRPLKAAARARAPTRGPCVHEEECRGWAWACNLLMDRILGANS

SEQ ID NO: 216 - protein, 144 aa, Zea mays subsp. mays
  misc_feature (1)..(144): Ceres Seq. ID no. 14312546
RRSCAPSLHSIDRLRVRALQLVMSARPTMAAAAPVRAWVVALALVLACALLQPRPSDAAAQPAPQSPATAVSSGAAKPKCVAGARNDHACRVGAVHDPDSQEEEGSSVTIDAPAAAPDDVGHDDGSDYNDPDVPNNDQLVVVGH

SEQ ID NO: 217 - protein, 122 aa, Zea mays subsp. mays
  misc_feature (1)..(122): Ceres Seq. ID no. 14312547
MSARPTMAAAAPVRAWVVALALVLACALLQPRPSDAAAQPAPQSPATAVSSGAAKPKCVAGARNDHACRVGAVHDPDSQEEEGSSVTIDAPAAAPDDVGHDDGSDYNDPDVPNNDQLVVVGH

SEQ ID NO: 218 - protein, 122 aa, Zea mays subsp. mays; identical to SEQ ID NO: 217
  misc_feature (1)..(122): Ceres Seq. ID no. 16625510

SEQ ID NO: 219 - DNA, 905 bp, Zea mays subsp. mays
  misc_feature (1)..(905): Ceres Seq. ID no. 14312614
atatagggcaccaaccatttcatcctctccgactccgacatcgtccggtccgatacgccacaggatcgaccaccaatgcagactgccgtggcggtgctgttatcaggcgtggtggcgctgttcggagtgacgagcgccgtgctggcgttcatagccgaggcaaagaggctcacagcggatgaaatccgcgtgtcaggtcgcgagtgcgtgtacccggccaacgccgctcacacgctggggatatgcgccatcttcctgcttgccgcggcccagatcatcgcctcggtggccggtggctgctgcggctgctgcaggccaccgggcggcggcggtccttctcccagtcccagctccactaggcgacgcgtcgtgggagtcatcgcctctgtcctctcatgggtagcggcggcgattgctgtggtctacgactgggtgggcgcggcgctgaacgcgcccgtgacgcgcgaagccaggctcgcgggctccgacgaggagtgctacctactcaggggcggcatcttcgtcagggcggccgtgctcagcctcgtcgccacctcgcttgggatcatgtcctgcatcttgctccgcctgccgccgccggctacgcacgcgccggaacaaggccaccgcgcggtcgggctgccgcagtggcccgcgcaagagacgtacccgtaccccgcgcacgggtacgcccacgcatcggaccccaagttcgctcctcctgctcctcacggtcaggcgaacgagcaagtgtacgtgtagtgcgtagatgacgtgatgagtagtgatggtgtgatctccgtattattttttccttttgttttgtacgtaggtaatatgtgcgtcgtgattactagtgatggtgtgctctctgtattaattttttcttttattgttagtttgcc

SEQ ID NO: 220 - protein, 228 aa, Zea mays subsp. mays
  misc_feature (1)..(228): Ceres Seq. ID no. 14312615
MQTAVAVLLSGVVALFGVTSAVLAFIAEAKRLTADEIRVSGRECVYPANAAHTLGICAIFLLAAAQIIASVAGGCCGCCRPPGGGGPSPSPSSTRRRVVGVIASVLSWVAAAIAVVYDWVGAALNAPVTREARLAGSDEECYLLRGGIFVRAAVLSLVATSLGIMSCILLRLPPPATHAPEQGHRAVGLPQWPAQETYPYPAHGYAHASDPKFAPPAPHGQANEQVYV

SEQ ID NO: 221 - protein, 125 aa, Zea mays subsp. mays
  misc_feature (1)..(125): Ceres Seq. ID no. 14312616
MGSGGDCCGLRLGGRGAERARDARSQARGLRRGVLPTQGRHLRQGGRAQPRRHLAWDHVLHLAPPAAAGYARAGTRPPRGRAAAVARARDVPVPRARVRPRIGPQVRSSCSSRSGERASVRVVRR

SEQ ID NO: 222 - protein, 228 aa, Zea mays subsp. mays; identical to SEQ ID NO: 220
  misc_feature (1)..(228): Ceres Seq. ID no. 16625511

SEQ ID NO: 223 - DNA, 789 bp, Zea mays subsp. mays
  misc_feature (1)..(789): Ceres Seq. ID no. 14312670
tcgaaaaactccaaccgccgagccagaggcacccggagcagcgcacagcaagtcagcaacagagcgcacaccgtcgccgcatccgcctccgcagcagcagcaatggcgcgcgccggcgctctctgcctggtgctgctctgcctcgtggccgcgcactcagccgcagcgcagaagtccacgacggccccggccgccgcgccggccgccgccaccaccccgccggcgaccccgaccaagaagacgcccgcgcccgccgccgcgccgcccaccaccccggccaccctggccccggccgccgccccgcccaccacgccggccacccccgcgcccgtcgctgcggcgcccactaccccggccaccctggcacccgccgcggcgccgtgatggcggtggcggctacggcggtggcggcggctacggtggcggcggcggctacggtggtggtggcggcggctacggcggtggcaaccgtggcggcggctacggcaactccgacgggaactggaggaactgagcggtggggcccgcgcggccaagttatcctgttcgctaccgtgatgtttaccctagtccagagggtttatcttcgttcgtgtcgtgtttgttgttgcccatctgtgtttttgattgcaaggtcgctctgtgtcagttgttagtgctgtgttcatcctcggtttcagcagacccatgcatcaaacagcatggactgcggatcgatggatgctgttacccccgtcaggctttattctaagttaatcttaaggaaaaaatggtgcttcttggtgctgc

SEQ ID NO: 224 - protein, 217 aa, Zea mays subsp. mays
  misc_feature (1)..(217): Ceres Seq. ID no. 14312671
EKLQPPSQRHPEQRTASQQQSAHRRRIRLRSSSNGARRRSLPGAALPRGRALSRSAEVHDGPGRRAGRRHHPAGDPDQEDARARRRAAHHPGHPGPGRRPAHHAGHPRARRCGAHYPGHPGTRRGAVMAVAATAVAAATVAAAATVVVAAATAVATVAAATATPTGTGGTERWGPRGQVILFATVMFTLVQRVYLRSCRVCCCPSVFLIARSLCVSC

SEQ ID NO: 225 - protein, 170 aa, Zea mays subsp. mays
  misc_feature (1)..(170): Ceres Seq. ID no. 14312672
RKTPTAEPEAPGAAHSKSATERTPSPHPPPQQQQWRAPALSAWCCSASWPRTQPQRRSPRRPRPPRRPPPPPRRRPRPRRRPRPPPRRPPPRPPWPRPPPRPPRRPPPRPSLRRPLPRPPWHPPRRRDGGGGYGGGGGYGGGGGYGGGGGGYGGGNRGGGYGNSDGNWRN

SEQ ID NO: 226 - protein, 127 aa, Zea mays subsp. mays
  misc_feature (1)..(127): Ceres Seq. ID no. 14312673
SKNSNRRARGTRSSAQQVSNRAHTVAASASAAAAMARAGALCLVLLCLVAAHSAAAQKSTTAPAAAPAAATTPPATPTKKTPAPAAAPPTTPATLAPAAAPPTTPATPAPVAAAPTTPATLAPAAAP

SEQ ID NO: 227 - protein, 93 aa, Zea mays subsp. mays
  misc_feature (1)..(93): Ceres Seq. ID no. 16625512
MARAGALCLVLLCLVAAHSAAAQKSTTAPAAAPAAATTPPATPTKKTPAPAAAPPTTPATLAPAAAPPTTPATPAPVAAAPTTPATLAPAAAP

SEQ ID NO: 228 - DNA, 935 bp, Zea mays subsp. mays
  misc_feature (1)..(935): Ceres Seq. ID no. 14312757
gctagtttcgttcttatctccgtttctctggattgtcccccgctcccctcttccggtcttccccatgtcggatgcgtataggaaagccaagcccggccgcctcgtcttcaagggcggcgaagccgcctccatccacaagccaaagaagcacaagaagaataagaagcccgcgtcggcgagggcgtcctccccgggcgaggggctgaccctgttctacaacccggcggcgagcaagatggccccgaacgacgtgttcggcgtggcgttcaacggcggcttcaaccagcccatcatgtgcggcggcgagccgaggcagatgacgctgcaggtccgcgggaaagccgacccgcccatctacaccatcaggatacgcgtgccgcagcacgccacaagcttgatcttctccttcaccaacggggccgagtgggacgggccgtacaccctcaagttcagggtcccgaagccatggcagaagaagccgctgagcttcttcaacgagggcctggcggacgagctcaacagggagggcgcgtgcgacctggccatctacccggacgagaacatcgccatcaccagttgcgccatggacggctacctcgacgaggggggggatcggtgcaagctggatatcgtgagcgggtgcacggaccccagctccgacatgttcgacccgctggccaccgtcgacgacggctcctgccccctcgagtctgattccgaggaatgaagcttcagttcgatcctaaaaagttaggacccttaaataattttagtttaaaaatgaataggaataggatccgatcctaatccgattagatccttaaagtttgtagcgtaaaattgaaagctcattaccacccctatgtccatacatcttatcagtgcaagtttgtgatcatgtgatacattaagcatatacgtgtatgtatttcacc

SEQ ID NO: 229 - protein, 241 aa, Zea mays subsp. mays
  misc_feature (1)..(241): Ceres Seq. ID no. 14312758
LVSFLSPFLWIVPRSPLPVFPMSDAYRKAKPGRLVFKGGEAASIHKPKKHKKNKKPASARASSPGEGLTLFYNPAASKMAPNDVFGVAFNGGFNQPIMCGGEPRQMTLQVRGKADPPIYTIRIRVPQHATSLIFSFTNGAEWDGPYTLKFRVPKPWQKKPLSFFNEGLADELNREGACDLAIYPDENIAITSCAMDGYLDEGGDRCKLDIVSGCTDPSSDMFDPLATVDDGSCPLESDSEE

SEQ ID NO: 230 - protein, 220 aa, Zea mays subsp. mays
  misc_feature (1)..(220): Ceres Seq. ID no. 14312759
MSDAYRKAKPGRLVFKGGEAASIHKPKKHKKNKKPASARASSPGEGLTLFYNPAASKMAPNDVFGVAFNGGFNQPIMCGGEPRQMTLQVRGKADPPIYTIRIRVPQHATSLIFSFTNGAEWDGPYTLKFRVPKPWQKKPLSFFNEGLADELNREGACDLAIYPDENIAITSCAMDGYLDEGGDRCKLDIVSGCTDPSSDMFDPLATVDDGSCPLESDSEE

SEQ ID NO: 231 - protein, 163 aa, Zea mays subsp. mays
  misc_feature (1)..(163): Ceres Seq. ID no. 14312760
MAPNDVFGVAFNGGFNQPIMCGGEPRQMTLQVRGKADPPIYTIRIRVPQHATSLIFSFTNGAEWDGPYTLKFRVPKPWQKKPLSFFNEGLADELNREGACDLAIYPDENIAITSCAMDGYLDEGGDRCKLDIVSGCTDPSSDMFDPLATVDDGSCPLESDSEE

SEQ ID NO: 232 - protein, 220 aa, Zea mays subsp. mays; identical to SEQ ID NO: 230
  misc_feature (1)..(220): Ceres Seq. ID no. 16625514

SEQ ID NO: 233 - DNA, 1134 bp, Zea mays subsp. mays
  misc_feature (1)..(1134): Ceres Seq. ID no. 15174329
ataaaactaagaggaagatgaagacttatttacttctccttctcatcttctcactcctcttatcatattcctccggccagcaatgcggtcgtcaagcccaaggagcactctgccccaacggtctatgctgcagcgagtacggatggtgcggcaccaccgaagcttactgtgggcgtggttgccaaagccagtgcactcccactcctcccactcccactcccactcctcctagtcccacccctcctaggcccactccacctggtcccagcggggatctttcgggcatcatttcaagagatcagttctataaaatgcttaagcacatgaacgataacgcttgtcctgctagagggttcttcacttacgacgccttcatcaccgccgctaagtttttccctagtttcgggaacaccggagaccttgccacaaggaagaaggagatcgcagccttcttcggccaaacttcccacgaaaccactggtgggtggacggatgcaccagacggagcaaatacatggggctactgtttcaaggacgaaattggcaaaagcaatccctactgtgatagcaacaacctcgagtggccatgcgcacctggccaattttactacggaagaggaccaatgatgctgtcttggaactacaattatggacagtgcgggagagacctaggactcgacttactacgcaggccagctattgcgtccagcgacccagtgatcgctttcgaaaccgcaatttggttctggatgactcctcaggctcctaaaccgtcttgccacgatgtgatcaccgaccagtggcagccgtcggctgccgacatttcagcggggagattaccaggttatggagtgattaccaatatcattaacggtggattagagtgtgctggtcgcaatgtcgcacaggtcgaagatcggatatcgttttatacgaggtattgtggcatgtttggtgttgatcctggaagtaatgttgactgtgacaaacaaaggccgtttagtgaaggaattaacgttttcttggatgctgctatctaataaggagtgttaaaaaaaaaaaagagtgttaatgcagctttgttgtatccatgcaataagagaatatcaaactaaataaaactccttttatgat

SEQ ID NO: 234 - protein, 345 aa, Zea mays subsp. mays
  misc_feature (1)..(345): Ceres Seq. ID no. 15174330
KTKRKMKTYLLLLLIFSLLLSYSSGQQCGRQAQGALCPNGLCCSEYGWCGTTEAYCGRGCQSQCTPTPPTPTPTPPSPTPPRPTPPGPSGDLSGIISRDQFYKMLKHMNDNACPARGFFTYDAFITAAKFFPSFGNTGDLATRKKEIAAFFGQTSHETTGGWTDAPDGANTWGYCFKDEIGKSNPYCDSNNLEWPCAPGQFYYGRGPMMLSWNYNYGQCGRDLGLDLLRRPAIASSDPVIAFETAIWFWMTPQAPKPSCHDVITDQWQPSAADISAGRLPGYGVITNIINGGLECAGRNVAQVEDRISFYTRYCGMFGVDPGSNVDCDKQRPFSEGINVFLDAAI

SEQ ID NO: 235 - protein, 340 aa, Zea mays subsp. mays
  misc_feature (1)..(340): Ceres Seq. ID no. 15174331
MKTYLLLLLIFSLLLSYSSGQQCGRQAQGALCPNGLCCSEYGWCGTTEAYCGRGCQSQCTPTPPTPTPTPPSPTPPRPTPPGPSGDLSGIISRDQFYKMLKHMNDNACPARGFFTYDAFITAAKFFPSFGNTGDLATRKKEIAAFFGQTSHETTGGWTDAPDGANTWGYCFKDEIGKSNPYCDSNNLEWPCAPGQFYYGRGPMMLSWNYNYGQCGRDLGLDLLRRPAIASSDPVIAFETAIWFWMTPQAPKPSCHDVITDQWQPSAADISAGRLPGYGVITNIINGGLECAGRNVAQVEDRISFYTRYCGMFGVDPGSNVDCDKQRPFSEGINVFLDAAI

SEQ ID NO: 236 - protein, 242 aa, Zea mays subsp. mays
  misc_feature (1)..(242): Ceres Seq. ID no. 15174332
MLKHMNDNACPARGFFTYDAFITAAKFFPSFGNTGDLATRKKEIAAFFGQTSHETTGGWTDAPDGANTWGYCFKDEIGKSNPYCDSNNLEWPCAPGQFYYGRGPMMLSWNYNYGQCGRDLGLDLLRRPAIASSDPVIAFETAIWFWMTPQAPKPSCHDVITDQWQPSAADISAGRLPGYGVITNIINGGLECAGRNVAQVEDRISFYTRYCGMFGVDPGSNVDCDKQRPFSEGINVFLDAAI

SEQ ID NO: 237 - protein, 340 aa, Zea mays subsp. mays; identical to SEQ ID NO: 235
  misc_feature (1)..(340): Ceres Seq. ID no. 16625573

SEQ ID NO: 238 - DNA, 1048 bp, Zea mays subsp. mays
  misc_feature (1)..(1048): Ceres Seq. ID no. 15174333
ctccagttgattagatttctcccactttacactttctcccattctccaccgctctgcgacaatgtcggctgctttcattcccatggatcaatctcagaacaacattctcatggattcccagcctactacttcccccgtgaaaactgtgaaaattagcaatgtttcactcaatgtctccaagaaagatctcaatgagttcttttctttctctggtgacattcactacatcgagatgcgcagtgaaacgcaagaaactcagcttgcttatgttaccttcaaggatccacaaggagcagaaactgctatgctcttaacgggagctgtcattgctgatcatcgtgttagtattactcctgctgtgaactacgacctaccaccagaagcccttgcacttgactcgcaggaatattcatttaatggcttcactgtcaagaaagctgaacatgtggtaagcaccatgatggaaagaggttatgctgttggcaaagacgctatggagaaagccaaagcctttgacgacagacacaacctagtctcaaacgcttcagcaaccattgcctccctcgacaacaagatgggtttgagcgagaagctaagcataggaactaccgtggtgaacgaaaagctgagagaggtggacgagcggtatcaagtgagggagatcacaaaatccgctctagcagctgctgaggagagagcgattagcgcaggaacggctttgatggcgaatccttatgtttcaagcggagcttcgtggctatcaaacgcctttggtgcagtgacaaaggcggttagggctgaggatggaggagagggaagaaaggagattgtccaacttgatgacacgtcacctaaagctcctgctgttgttcctgttaactcagtggacacagacttcaccaaaccaagtttctaaagattgtcttaaactccaattctttgatacatttgctgtgcatatacatgcttacatattcattggtctttcttttattgcacaacataaacataacataaaacctttaaaatgtattttgttgtcacattc

SEQ ID NO: 239 - protein, 284 aa, Zea mays subsp. mays
  misc_feature (1)..(284): Ceres Seq. ID no. 15174334
MSAAFIPMDQSQNNILMDSQPTTSPVKTVKISNVSLNVSKKDLNEFFSFSGDIHYIEMRSETQETQLAYVTFKDPQGAETAMLLTGAVIADHRVSITPAVNYDLPPEALALDSQEYSFNGFTVKKAEHVVSTMMERGYAVGKDAMEKAKAFDDRHNLVSNASATIASLDNKMGLSEKLSIGTTVVNEKLREVDERYQVREITKSALAAAEERAISAGTALMANPYVSSGASWLSNAFGAVTKAVRAEDGGEGRKEIVQLDDTSPKAPAVVPVNSVDTDFTKPSF

SEQ ID NO: 240 - protein, 277 aa, Zea mays subsp. mays
  misc_feature (1)..(277): Ceres Seq. ID no. 15174335
MDQSQNNILMDSQPTTSPVKTVKISNVSLNVSKKDLNEFFSFSGDIHYIEMRSETQETQLAYVTFKDPQGAETAMLLTGAVIADHRVSITPAVNYDLPPEALALDSQEYSFNGFTVKKAEHVVSTMMERGYAVGKDAMEKAKAFDDRHNLVSNASATIASLDNKMGLSEKLSIGTTVVNEKLREVDERYQVREITKSALAAAEERAISAGTALMANPYVSSGASWLSNAFGAVTKAVRAEDGGEGRKEIVQLDDTSPKAPAVVPVNSVDTDFTKPSF

SEQ ID NO: 241 - protein, 268 aa, Zea mays subsp. mays
  misc_feature (1)..(268): Ceres Seq. ID no. 15174336
MDSQPTTSPVKTVKISNVSLNVSKKDLNEFFSFSGDIHYIEMRSETQETQLAYVTFKDPQGAETAMLLTGAVIADHRVSITPAVNYDLPPEALALDSQEYSFNGFTVKKAEHVVSTMMERGYAVGKDAMEKAKAFDDRHNLVSNASATIASLDNKMGLSEKLSIGTTVVNEKLREVDERYQVREITKSALAAAEERAISAGTALMANPYVSSGASWLSNAFGAVTKAVRAEDGGEGRKEIVQLDDTSPKAPAVVPVNSVDTDFTKPSF

SEQ ID NO: 242 - protein, 268 aa, Zea mays subsp. mays; identical to SEQ ID NO: 241
  misc_feature (1)..(268): Ceres Seq. ID no. 16625574

SEQ ID NO: 243 - DNA, 1085 bp, Zea mays subsp. mays
  misc_feature (1)..(1085): Ceres Seq. ID no. 15175178
agaactctctttctctcacaaagacactcgtctcaaaggatctctgaaacctaaaaaaacaagttggatctgagctatatttcttaaaagattcttctctcacgactaaaaaaatcaacacagtcatgtcggttttacttcctctgtgtctggttctctccatgattacctattcaaatgctgcgtattgtgtatgcaaagacgggaacgagcaagtgcttcagaaagccatagattatgcatgtggagcaggagctgactgctctcagatccagcagaacggagcttgtttccagcctaacaccgtcaaaaaccactgcgacgtcgccgtcaacagttactaccagaagaaagcttcctccggtgccacctgtgactttaacggcgccgccgttatctctacctcccctccgtcaactgcttcaagctgtttaactggttccagctctagtgggaccccgtccactgggactcccaccacaggaaccccaagcactggaacaccaaccacaggaaccccaagcactgggacaccaaccacggggactccaaccagtggcttcccatccaccgggactccgtcgaccgggacacctactgccggaatgccaaccacggggactccttccactggcatgccaaattccggcacgccagcaaacggaatgccaacttcgtcttcatcttccgtgttccctggcactactcttggaccgaccgggagcgggggattcggcgatccgaacgctggagagaagatctcagtccgaactaacactgccttcttctttctaaccggtgtagctattatgcttgtggtttaaaaaacagtcacggttgggctgagattttgccaacggcttatgggggttgcgcaaatcggatagagctgctatatctctttttttttcgttcacttttgtcttttgtagggttcgaactggggtttactattaggtttggccgagagacatcatgcaagtagctagctagtaatatttcttttattttgtaaattcggaggatgagatgcccttttgtttctttgaatcgtttatcttttagtacgtaccatcattctctcc

SEQ ID NO: 244 - protein, 232 aa, Zea mays subsp. mays
  misc_feature (1)..(232): Ceres Seq. ID no. 15175179
MSVLLPLCLVLSMITYSNAAYCVCKDGNEQVLQKAIDYACGAGADCSQIQQNGACFQPNTVKNHCDVAVNSYYQKKASSGATCDFNGAAVISTSPPSTASSCLTGSSSSGTPSTGTPTTGTPSTGTPTTGTPSTGTPTTGTPTSGFPSTGTPSTGTPTAGMPTTGTPSTGMPNSGTPANGMPTSSSSSVFPGTTLGPTGSGGFGDPNAGEKISVRTNTAFFFLTGVAIMLVV

SEQ ID NO: 245 - protein, 220 aa, Zea mays subsp. mays
  misc_feature (1)..(220): Ceres Seq. ID no. 15175180
MITYSNAAYCVCKDGNEQVLQKAIDYACGAGADCSQIQQNGACFQPNTVKNHCDVAVNSYYQKKASSGATCDFNGAAVISTSPPSTASSCLTGSSSSGTPSTGTPTTGTPSTGTPTTGTPSTGTPTTGTPTSGFPSTGTPSTGTPTAGMPTTGTPSTGMPNSGTPANGMPTSSSSSVFPGTTLGPTGSGGFGDPNAGEKISVRTNTAFFFLTGVAIMLVV

SEQ ID NO: 246 - protein, 232 aa, Zea mays subsp. mays; identical to SEQ ID NO: 244
  misc_feature (1)..(232): Ceres Seq. ID no. 16625580

SEQ ID NO: 247 - DNA, 1692 bp, Zea mays subsp. mays
  misc_feature (1)..(1692): Ceres Seq. ID no. 15176705
ggcttgatttcacttggccctctagcgttgtttggtcaatcctctctctcccttccccatctccccgtaccccaaaccctaggacgcagcgccgccgccgtagcaccctcacacgcagcaagatgaggccgcgcggcaggggcgacgacgtcgaagacgacgaggatgagtacgaggacatcacgccccctcgaagaacgccagagcctgaggccgaccccgtccgctcgccctcgccctcgccctcgcccgctcctgcccccgccccaccacatcccgcgcgtgcccctctcagcagtctcgttgtcaggccgccgccgcagcaacaggagaacggcggcggatcctccccgccctcatcctccgcccgctcgctttctcccagcaccggcggacaccgaggccgcggggcctcgcccccgcggcgacggcgggacttctcaccgccgcctccccgtggttgggtgaggcgccggtcgccgctgccgccaccgccggagaggcggcgtcctgggagcccgccgccccagcgccgacgcttcagcccaccgccccggtcccacctaccgcggcatccgcgcttccacgatgagcaggaaggatatggaatgcatgcaggcccttcgccaccacgcagagcagaagccagcaaatttgatgatgatgttagtccacgttacactcatggatatcaagggggtggtagaggaggtgcaaggttccgagagggtcctccaccatatggaagaggtagatcatatgggagaggttatggtgctccacatggaaaggatttgattaatattgatggagaatatgttcaccgaaatgacccaaatctgtcgccaagagaaggtgattggatatgccagaaccctaattgtggaaatctcaattttgctcggcgaactcactgtaacaactgcaacaagttccgctattcagcacgtgaagcatatgaacctaggcgcagccctcccttcaggagttaccccagccctccacgagggcctccaaggatggttggtccacctggtgatcgagcccctgcaagagagatggccaggtacagatccccacctcatggttggggagcaagtgatcccagggcatatgcaggtcgatcccctccagaacgtgcaggacggtttacagatccatcaactaagggaagaatgggcttccgtggtgagcgtgacccaagggaccgtgtgaaatatgagtggtctgccactgatgactacgttcagagggagcgcccatatgatggttatcttgacaggagtcggcgtcgctcaggatctcctcgtggtaactggggaaatgatctgcgtgacagaagccgctctcctgcacggaacaggcctatgaagagttccttcaccggaagaggtcgacctgacgactatgctgctgatccatatggcagccgagggagacccaatggtatggaggccggccgtgggcgtgggcatgcttacagagcaggcagtggtccgtaccctggtgagactcgaggtgaccaacgcgctgctccacgcgctaggaacgaggatggctattagatcttcatgaagctgagtgacgtcattttgtctttgttggtcaggaaaggagaaccttagtcaagctggagcttgagaatatctgcagcttgtaatattaaagatcgtgcacacatcctgttcctgc

SEQ ID NO: 248 - protein, 520 aa, Zea mays subsp. mays
  misc_feature (1)..(520): Ceres Seq. ID no. 15176706
LDFTWPSSVVWSILSLPSPSPRTPNPRTQRRRRSTLTRSKMRPRGRGDDVEDDEDEYEDITPPRRTPEPEADPVRSPSPSPSPAPAPAPPHPARAPLSSLVVRPPPQQQENGGGSSPPSSSARSLSPSTGGHRGRGASPPRRRRDFSPPPPRGWVRRRSPLPPPPERRRPGSPPPQRRRFSPPPRSHLPRHPRFHDEQEGYGMHAGPSPPRRAEASKFDDDVSPRYTHGYQGGGRGGARFREGPPPYGRGRSYGRGYGAPHGKDLINIDGEYVHRNDPNLSPREGDWICQNPNCGNLNFARRTHCNNCNKFRYSAREAYEPRRSPPFRSYPSPPRGPPRMVGPPGDRAPAREMARYRSPPHGWGASDPRAYAGRSPPERAGRFTDPSTKGRMGFRGERDPRDRVKYEWSATDDYVQRERPYDGYLDRSRRRSGSPRGNWGNDLRDRSRSPARNRPMKSSFTGRGRPDDYAADPYGSRGRPNGMEAGRGRGHAYRAGSGPYPGETRGDQRAAPRARNEDGY

SEQ ID NO: 249 - protein, 480 aa, Zea mays subsp. mays
  misc_feature (1)..(480): Ceres Seq. ID no. 15176707
MRPRGRGDDVEDDEDEYEDITPPRRTPEPEADPVRSPSPSPSPAPAPAPPHPARAPLSSLVVRPPPQQQENGGGSSPPSSSARSLSPSTGGHRGRGASPPRRRRDFSPPPPRGWVRRRSPLPPPPERRRPGSPPPQRRRFSPPPRSHLPRHPRFHDEQEGYGMHAGPSPPRRAEASKFDDDVSPRYTHGYQGGGRGGARFREGPPPYGRGRSYGRGYGAPHGKDLINIDGEYVHRNDPNLSPREGDWICQNPNCGNLNFARRTHCNNCNKFRYSAREAYEPRRSPPFRSYPSPPRGPPRMVGPPGDRAPAREMARYRSPPHGWGASDPRAYAGRSPPERAGRFTDPSTKGRMGFRGERDPRDRVKYEWSATDDYVQRERPYDGYLDRSRRRSGSPRGNWGNDLRDRSRSPARNRPMKSSFTGRGRPDDYAADPYGSRGRPNGMEAGRGRGHAYRAGSGPYPGETRGDQRAAPRARNEDGY

SEQ ID NO: 250 - protein, 318 aa, Zea mays subsp. mays
  misc_feature (1)..(318): Ceres Seq. ID no. 15176708
MHAGPSPPRRAEASKFDDDVSPRYTHGYQGGGRGGARFREGPPPYGRGRSYGRGYGAPHGKDLINIDGEYVHRNDPNLSPREGDWICQNPNCGNLNFARRTHCNNCNKFRYSAREAYEPRRSPPFRSYPSPPRGPPRMVGPPGDRAPAREMARYRSPPHGWGASDPRAYAGRSPPERAGRFTDPSTKGRMGFRGERDPRDRVKYEWSATDDYVQRERPYDGYLDRSRRRSGSPRGNWGNDLRDRSRSPARNRPMKSSFTGRGRPDDYAADPYGSRGRPNGMEAGRGRGHAYRAGSGPYPGETRGDQRAAPRARNEDGY

SEQ ID NO: 251 - protein, 480 aa, Zea mays subsp. mays; identical to SEQ ID NO: 249
  misc_feature (1)..(480): Ceres Seq. ID no. 16625592

SEQ ID NO: 252 - DNA, 750 bp, Zea mays subsp. mays
  misc_feature (1)..(750): Ceres Seq. ID no. 15176721
caatacacaagacaacaaacaaggaataatggcgctcgcgctgttagcatctcctccacctccgctcgggggggtccgtcgcagttttggaacaaagtgttcgctcttcgccgcacagcgagccaagcggaacctgatggatctcatctccgaccaggaccgaggtctgagaacccagaaagacgctgtgaagcgagacgcgatcgtgaatgccatcgaggccatggcggtgatcgggggaagctccgtcaccacaggagattcgctgtctgccacgtggagactactgtggacgacggagaaagaacagctgttcatcatagagaaggcggggttgttcggcacgcgcgctggagaggtactgcaggtgatcgatgtgaggaaagggacgctcaacaacgtcatcactttcccgcccgacggcgttttctttgtacgctccgatatcgacatctcttccccgcagagagtcaatttcaaattcactagtgcggtgttgagaggaagcaattgggagatcccactcccaccatttggccagggctggtttgaaaatgtgtatatggatggtgacatcagagtggccaaggacatcagaggggactacttagttgttgatcgtgctccttttaactggaaagaatgatctgttactcaacaatgcatctcctcctttttaatgatctttgttttgtacatcaacactacactactctattctacgactttacatcatctacttttaatgcc

SEQ ID NO: 253 - protein, 214 aa, Zea mays subsp. mays
  misc_feature (1)..(214): Ceres Seq. ID no. 15176722
NTQDNKQGIMALALLASPPPPLGGVRRSFGTKCSLFAAQRAKRNLMDLISDQDRGLRTQKDAVKRDAIVNAIEAMAVIGGSSVTTGDSLSATWRLLWTTEKEQLFIIEKAGLFGTRAGEVLQVIDVRKGTLNNVITFPPDGVFFVRSDIDISSPQRVNFKFTSAVLRGSNWEIPLPPFGQGWFENVYMDGDIRVAKDIRGDYLVVDRAPFNWKE

SEQ ID NO: 254 - protein, 205 aa, Zea mays subsp. mays
  misc_feature (1)..(205): Ceres Seq. ID no. 15176723
MALALLASPPPPLGGVRRSFGTKCSLFAAQRAKRNLMDLISDQDRGLRTQKDAVKRDAIVNAIEAMAVIGGSSVTTGDSLSATWRLLWTTEKEQLFIIEKAGLFGTRAGEVLQVIDVRKGTLNNVITFPPDGVFFVRSDIDISSPQRVNFKFTSAVLRGSNWEIPLPPFGQGWFENVYMDGDIRVAKDIRGDYLVVDRAPFNWKE

SEQ ID NO: 255 - protein, 169 aa, Zea mays subsp. mays
  misc_feature (1)..(169): Ceres Seq. ID no. 15176724
MDLISDQDRGLRTQKDAVKRDAIVNAIEAMAVIGGSSVTTGDSLSATWRLLWTTEKEQLFIIEKAGLFGTRAGEVLQVIDVRKGTLNNVITFPPDGVFFVRSDIDISSPQRVNFKFTSAVLRGSNWEIPLPPFGQGWFENVYMDGDIRVAKDIRGDYLVVDRAPFNWKE

SEQ ID NO: 256 - protein, 205 aa, Zea mays subsp. mays; identical to SEQ ID NO: 254
  misc_feature (1)..(205): Ceres Seq. ID no. 16625593

SEQ ID NO: 257 - DNA, 1194 bp, Zea mays subsp. mays
  misc_feature (1)..(1194): Ceres Seq. ID no. 15176835
acttcgccttctctacacaaacaaaactggttcgctaagagctccgacaatggctgtctgcgcaactcactcctctctcatgatagcatacgccgcatccaaggaccttacaattccgtctcttttctcatctgccaacccaagacccaacaagttgagcgtcgcactctatccccctcttgttctccttgcggggagaagagcttcgaacccatccttcccggtggttgtctcagccgtagccgcagaggctgatgtcgacacggaggacgcggagcagaacgaagccacctccaccaccgccacagccgtcctcgatccgccaaagcctaagaaaggaaaagcagctttgcttctcaagagagatagaacaaggtctaagaggtttctggaaatccaaaagctaagggaaaccaaaaaggagtacgacgtcaagactgctatatctttgcttaagcaaaccgctaacacaaggtttgtggagtcggtcgaagcccatttccgtctcaacatcgatcctaagtacaatgatcagcagctgcgagcaaccgtgagccttcctaaaggaacagggcaaactgttaaagtggctgttcttgcacaaggtgagaaggtcgatgaagcaaaaaatgcaggggcagatattgtgggcagtgatgatttgatcgaacagataaaaggagggttcatggagttcgataagttaattgcatccccggatatgatggtcaaggttgctggcctgggaaagattcttggtccacgaggactcatgccaaatcccaaggctggtaccgtcacagctaacattccacaggctatagaagagttcaagaagggaaaagtagaattcagagcagacaaaactgggattgttcacattccgtttgggaaagtgaatttcacagaggaagacctgctcgtaaacttccttgcagcagtgaaatcggtggagacaaacaagccaaagggagcaaaaggagtgtactggaaaagcgcacacatatgttcgtcaatggggccatccatcaagttgaacataagggagatgatagagttcaagccataaataaccacatttgtgtttttttttttgtgagtgtaggcgaacaccattagttatctcttgtatacctcaccggttgtatcaccttaactctgataagaccatttgctttattgattattactgtt

SEQ ID NO: 258 - protein, 355 aa, Zea mays subsp. mays
  misc_feature (1)..(355): Ceres Seq. ID no. 15176836
LRLLYTNKTGSLRAPTMAVCATHSSLMIAYAASKDLTIPSLFSSANPRPNKLSVALYPPLVLLAGRRASNPSFPVVVSAVAAEADVDTEDAEQNEATSTTATAVLDPPKPKKGKAALLLKRDRTRSKRFLEIQKLRETKKEYDVKTAISLLKQTANTRFVESVEAHFRLNIDPKYNDQQLRATVSLPKGTGQTVKVAVLAQGEKVDEAKNAGADIVGSDDLIEQIKGGFMEFDKLIASPDMMVKVAGLGKILGPRGLMPNPKAGTVTANIPQAIEEFKKGKVEFRADKTGIVHIPFGKVNFTEEDLLVNFLAAVKSVETNKPKGAKGVYWKSAHICSSMGPSIKLNIREMIEFKP

SEQ ID NO: 259 - protein, 339 aa, Zea mays subsp. mays
  misc_feature (1)..(339): Ceres Seq. ID no. 15176837
MAVCATHSSLMIAYAASKDLTIPSLFSSANPRPNKLSVALYPPLVLLAGRRASNPSFPVVVSAVAAEADVDTEDAEQNEATSTTATAVLDPPKPKKGKAALLLKRDRTRSKRFLEIQKLRETKKEYDVKTAISLLKQTANTRFVESVEAHFRLNIDPKYNDQQLRATVSLPKGTGQTVKVAVLAQGEKVDEAKNAGADIVGSDDLIEQIKGGFMEFDKLIASPDMMVKVAGLGKILGPRGLMPNPKAGTVTANIPQAIEEFKKGKVEFRADKTGIVHIPFGKVNFTEEDLLVNFLAAVKSVETNKPKGAKGVYWKSAHICSSMGPSIKLNIREMIEFKP

SEQ ID NO: 260 - protein, 329 aa, Zea mays subsp. mays
  misc_feature (1)..(329): Ceres Seq. ID no. 15176838
MIAYAASKDLTIPSLFSSANPRPNKLSVALYPPLVLLAGRRASNPSFPVVVSAVAAEADVDTEDAEQNEATSTTATAVLDPPKPKKGKAALLLKRDRTRSKRFLEIQKLRETKKEYDVKTAISLLKQTANTRFVESVEAHFRLNIDPKYNDQQLRATVSLPKGTGQTVKVAVLAQGEKVDEAKNAGADIVGSDDLIEQIKGGFMEFDKLIASPDMMVKVAGLGKILGPRGLMPNPKAGTVTANIPQAIEEFKKGKVEFRADKTGIVHIPFGKVNFTEEDLLVNFLAAVKSVETNKPKGAKGVYWKSAHICSSMGPSIKLNIREMIEFKP

SEQ ID NO: 261 - protein, 339 aa, Zea mays subsp. mays; identical to SEQ ID NO: 259
  misc_feature (1)..(339): Ceres Seq. ID no. 16612101

SEQ ID NO: 262 - DNA, 1501 bp, Zea mays subsp. mays
  misc_feature (1)..(1501): Ceres Seq. ID no. 15177738
ataagttcctgtgagctgtctcccgctcactcggtccctgtccatccgtagcgttccattccattccatcccatccccggaaagtgcaaggacgggagggagagcggccggcgcgtcacaaataccaccagcccaggggccatggccgccgcgatgaccagcttcgtcgccaagaacccgctgctcgcggccgcggcgcggcgcagggcgcctcccctcgcggggcgcgccctgccgttctctccgctcaggctgaggaccgtcacgtgcttcgtgccgcaggacacggcggccccggccgctcccgtgccggcgctggacgaggaggccagggccgcggcggcgcggcgcgtcgcggagaaggaggcgcggaagcggtccgagcggcggacgtacctggtggccgccgtgatgtctagcctcggagtcacgtccatggccgtcgccgccgtgtactatcgcttcagctggcaaatggagggcggcgaggtgccggtgatcgagacgctgggcacgttcgcgctctccgtcggggcggcggtcgggatggagttctgggcgcggtgggcgcaccgggcgctgtggcacgcctccctgtggcacatgcacgagtcgcaccaccggccgcgcgagggccccttcgagctcaacgacgtgttcgccatcgtcaacgccgcgccggccatctccctcctcgcctacggcttcttccaccgcggcatcgtgcccggcctctgcttcggcgcgggcctggggattacgctgttcggcatggcctacatgttcgtccacgacggcctggtccaccgccgctttccggtcggccccatcgccgacgtgccctacttcctccgagtggctgcctcgcacaagatacaccacatggacaagttcggcggcgtcccgtatgggctcttcctgggaccaaaggagctggaggaggttggtggcctggacgagcttgttagcagtccggtgagtgaagctactgatactgaagacgcaggagaagaaaagacgcgtccagttgtatgcgttgtccgaacaagcgtgttcatgggccagagtgtgccaaatgagttctagctttaggcgagtgggccaaatgagtgtgggctgcgtcccagggtagtataagtactatgagtctgtaataatcaggacaagaagaatttagcatccagtagctaacagagctggaaaaggagctcgcgcgaaccagaagggccatctgatggattcgtacatggagctggaggaggttgtgagtccggcgcggcgagctcctccgcgcgctccgtggtttttgttttttgttttggtcgcttttttgttgatttcattgtcttgtttggtactggagggttggcgaatcgattttggatgcactggcgtagatgttggctgtccacttgccctgcatttcgaatggtctgggaaggcacggttcgtacatggaaaatgtccggtgccgtggaattactattgttttgtttgctgc

SEQ ID NO: 263 - protein, 314 aa, Zea mays subsp. mays
  misc_feature (1)..(314): Ceres Seq. ID no. 15177739
MAAAMTSFVAKNPLLAAAARRRAPPLAGRALPFSPLRLRTVTCFVPQDTAAPAAPVPALDEEARAAAARRVAEKEARKRSERRTYLVAAVMSSLGVTSMAVAAVYYRFSWQMEGGEVPVIETLGTFALSVGAAVGMEFWARWAHRALWHASLWHMHESHHRPREGPFELNDVFAIVNAAPAISLLAYGFFHRGIVPGLCFGAGLGITLFGMAYMFVHDGLVHRRFPVGPIADVPYFLRVAASHKIHHMDKFGGVPYGLFLGPKELEEVGGLDELVSSPVSEATDTEDAGEEKTRPVVCVVRTSVFMGQSVPNEF

SEQ ID NO: 264 - protein, 310 aa, Zea mays subsp. mays
  misc_feature (1)..(310): Ceres Seq. ID no. 15177740
MTSFVAKNPLLAAAARRRAPPLAGRALPFSPLRLRTVTCFVPQDTAAPAAPVPALDEEARAAAARRVAEKEARKRSERRTYLVAAVMSSLGVTSMAVAAVYYRFSWQMEGGEVPVIETLGTFALSVGAAVGMEFWARWAHRALWHASLWHMHESHHRPREGPFELNDVFAIVNAAPAISLLAYGFFHRGIVPGLCFGAGLGITLFGMAYMFVHDGLVHRRFPVGPIADVPYFLRVAASHKIHHMDKFGGVPYGLFLGPKELEEVGGLDELVSSPVSEATDTEDAGEEKTRPVVCVVRTSVFMGQSVPNEF

SEQ ID NO: 265 - protein, 224 aa, Zea mays subsp. mays
  misc_feature (1)..(224): Ceres Seq. ID no. 15177741
MSSLGVTSMAVAAVYYRFSWQMEGGEVPVIETLGTFALSVGAAVGMEFWARWAHRALWHASLWHMHESHHRPREGPFELNDVFAIVNAAPAISLLAYGFFHRGIVPGLCFGAGLGITLFGMAYMFVHDGLVHRRFPVGPIADVPYFLRVAASHKIHHMDKFGGVPYGLFLGPKELEEVGGLDELVSSPVSEATDTEDAGEEKTRPVVCVVRTSVFMGQSVPNEF

SEQ ID NO: 266 - protein, 314 aa, Zea mays subsp. mays; identical to SEQ ID NO: 263
  misc_feature (1)..(314): Ceres Seq. ID no. 16612107

SEQ ID NO: 267 - DNA, 772 bp, Zea mays subsp. mays
  misc_feature (1)..(772): Ceres Seq. ID no. 15178494
agtggcaaactttggagccggaggtgtgcaggtgcaagagagcatggttgtgtcgcctcaggcactggaagcagtcgaggggagccaggatgttgaagaacacaaggacgagaaggaagattctcaggctacagaaatctacagtgaccatcaggctcctgttgttgacgctgaacatgtggatgatgaaggcctggtgaacccagctcatgaagttccttcagctgaggcagagcaggagacatttgacgattatgtggacgatcaggaacaaaaagaccaacaattcacccagcggcgctcttaccagaaccagcgtagtggcggcggtcgtggtggcggcaggaggggctatcctaatggtcgtggagtgcgtgggtaccagaatggccgaggtggcggtggataccagaatggccgtggcggaggcggtgggtactacgaatctggatactaccagccgaggaactacaacaacagaggccggggtggtcgcaactcttattacaacaaccatggtggaggtgcacaggcaggcggccatggccatcctgggagggttgagctgggtgcaaacgcctagctcgagctgactgttttgtttgaggagcagaggtcggggggagccattttgttattatagaactaactgagcctgttatttcttttttgctactcgcatatggaaatgctttggggaagtagtttcaggtcgactttgttcttctaagttacgtctattaatcgtgttaacaaaaaaaaaaaaaaaaaa

SEQ ID NO: 268 - protein, 193 aa, Zea mays subsp. mays
  misc_feature (1)..(193): Ceres Seq. ID no. 15178495
VANFGAGGVQVQESMVVSPQALEAVEGSQDVEEHKDEKEDSQATEIYSDHQAPVVDAEHVDDEGLVNPAHEVPSAEAEQETFDDYVDDQEQKDQQFTQRRSYQNQRSGGGRGGGRRGYPNGRGVRGYQNGRGGGGYQNGRGGGGGYYESGYYQPRNYNNRGRGGRNSYYNNHGGGAQAGGHGHPGRVELGANA

SEQ ID NO: 269 - protein, 179 aa, Zea mays subsp. mays
  misc_feature (1)..(179): Ceres Seq. ID no. 15178496
MVVSPQALEAVEGSQDVEEHKDEKEDSQATEIYSDHQAPVVDAEHVDDEGLVNPAHEVPSAEAEQETFDDYVDDQEQKDQQFTQRRSYQNQRSGGGRGGGRRGYPNGRGVRGYQNGRGGGGYQNGRGGGGGYYESGYYQPRNYNNRGRGGRNSYYNNHGGGAQAGGHGHPGRVELGANA

SEQ ID NO: 270 - protein, 127 aa, Zea mays subsp. mays
  misc_feature (1)..(127): Ceres Seq. ID no. 15178497
MKFLQLRQSRRHLTIMWTIRNKKTNNSPSGALTRTSVVAAVVVAAGGAILMVVECVGTRMAEVAVDTRMAVAEAVGTTNLDTTSRGTTTTEAGVVATLITTTMVEVHRQAAMAILGGLSWVQTPSSS

SEQ ID NO: 271 - protein, 179 aa, Zea mays subsp. mays; identical to SEQ ID NO: 269
  misc_feature (1)..(179): Ceres Seq. ID no. 16625603

SEQ ID NO: 272 - DNA, 1353 bp, Zea mays subsp. mays
  misc_feature (1)..(1353): Ceres Seq. ID no. 15178630
gcttgtccccaccaggcgccatggacgctcgcgacgacgaaccccccgttctcctcgaccgcgccgcccgcgcctcccgaggcaagaggataaccaagctgctcgaggacgaggtcgagcaggacgaggctttctggaaccaagaagccctcaaggatgaggagaacgatgacaactacgtggaagagccggatgctggtgacgaattcgacagtgattttggtgaagatgaatctgaaactgatgatgagccggagaaggaagtacgcgagagattacctatcaagaaacggctaatgtttcctggcaagacgctgaggaagaccaacgtcaagaagaagaaggcgaccccaaaaccagaagatggcacaaaagccgacaagtctgctgataagccgagttcatccacacaagcagatcttcctgatgaactggaggctgagaaggccatccggaaatcatccagaacgtcggtcatcgtgaggcaagctgaaagagaagcgatacgtgctgaaaaagaagcaacggccaagccgattaagagaaaaaaggagggagaagaaaagcggatgacacaagaggagatgcttttggaagcagctgaaacagagatcatgaacatgagaaatctagaacgtgtcctggcaagagaggaggaagtgaagaaaaaagctgttgttcataaggacacttatgagggtcctacaattcgttttttctcaagagatggggaatcacgtctggaattcataaatggagcatcatttgggtctgaactttgtacaacatcatctccttatccggagaaacctgtttgtgtggtgacaggacttccagccaaataccgtgatccgaagacagggctgccttatgcaactatggaagcatttaaaataatccgggagagtttcctgaaagaggaggctgatagaaagcgtccgaacatgtcgaatatgggagagcttttcgaatcaataactggtggacacttgatgcctaagaagagaagggttgagataaggtctccgaacatgttaggaggctctaggcatggcgggcgtacctggcgaatacctgcttttgatatggtggacgaggactaacgagacagatcccgtggctcccaatatgtcaatatgagagatctttctaaatcaatagccggtgaagaggaagatggataggatgttgtatttagtgttagatcttgtgcttgtagttatcttaatgtatttttgtcagttgataaattcatggttattaaagtggtaaaacgttaaaatgttatgaaacaactttttaatattttaacgcttaaacgaacgttgaaacgccaaaaaaaaaaaaaaaaaa

SEQ ID NO: 273 - protein, 366 aa, Zea mays subsp. mays
  misc_feature (1)..(366): Ceres Seq. ID no. 15178631
LSPPGAMDARDDEPPVLLDRAARASRGKRITKLLEDEVEQDEAFWNQEALKDEENDDNYVEEPDAGDEFDSDFGEDESETDDEPEKEVRERLPIKKRLMFPGKTLRKTNVKKKKATPKPEDGTKADKSADKPSSSTQADLPDELEAEKAIRKSSRTSVIVRQAEREAIRAEKEATAKPIKRKKEGEEKRMTQEEMLLEAAETEIMNMRNLERVLAREEEVKKKAVVHKDTYEGPTIRFFSRDGESRLEFINGASFGSELCTTSSPYPEKPVCVVTGLPAKYRDPKTGLPYATMEAFKIIRESFLKEEADRKRPNMSNMGELFESITGGHLMPKKRRVEIRSPNMLGGSRHGGRTWRIPAFDMVDED

SEQ ID NO: 274 - protein, 360 aa, Zea mays subsp. mays
  misc_feature (1)..(360): Ceres Seq. ID no. 15178632
MDARDDEPPVLLDRAARASRGKRITKLLEDEVEQDEAFWNQEALKDEENDDNYVEEPDAGDEFDSDFGEDESETDDEPEKEVRERLPIKKRLMFPGKTLRKTNVKKKKATPKPEDGTKADKSADKPSSSTQADLPDELEAEKAIRKSSRTSVIVRQAEREAIRAEKEATAKPIKRKKEGEEKRMTQEEMLLEAAETEIMNMRNLERVLAREEEVKKKAVVHKDTYEGPTIRFFSRDGESRLEFINGASFGSELCTTSSPYPEKPVCVVTGLPAKYRDPKTGLPYATMEAFKIIRESFLKEEADRKRPNMSNMGELFESITGGHLMPKKRRVEIRSPNMLGGSRHGGRTWRIPAFDMVDED

SEQ ID NO: 275 - protein, 268 aa, Zea mays subsp. mays
  misc_feature (1)..(268): Ceres Seq. ID no. 15178633
MFPGKTLRKTNVKKKKATPKPEDGTKADKSADKPSSSTQADLPDELEAEKAIRKSSRTSVIVRQAEREAIRAEKEATAKPIKRKKEGEEKRMTQEEMLLEAAETEIMNMRNLERVLAREEEVKKKAVVHKDTYEGPTIRFFSRDGESRLEFINGASFGSELCTTSSPYPEKPVCVVTGLPAKYRDPKTGLPYATMEAFKIIRESFLKEEADRKRPNMSNMGELFESITGGHLMPKKRRVEIRSPNMLGGSRHGGRTWRIPAFDMVDED

SEQ ID NO: 276 - protein, 360 aa, Zea mays subsp. mays; identical to SEQ ID NO: 274
  misc_feature (1)..(360): Ceres Seq. ID no. 16625606

SEQ ID NO: 277 - DNA, 952 bp, Zea mays subsp. mays
  misc_feature (1)..(952): Ceres Seq. ID no. 15178634
ctccattattcccagcgggcgcgctcgctctctctttctccctcccctcctcgtggcgacgattgggggcagtcgctgccgccgtacgccaggtgcccagatcttcttcatgcccttctccagcgacgagtatcagaagtgccttgcacgggtaccattcttgttccatccgacgcttcagttggtttgccgctcttggcgagcatcagtttgcagtggcgaacttctcaaaattcgtaaccagattggtacgacagaagagctcttgtgtgtgttggcgtttgaaccagaaaacatgtggcaactttatgatcccctacgagacaagtggataactcttcctgtcatgccatctcagattaggaacatagcccgctttggcgtggcctcagttgctggcaagctctatgtaattggtggtggcagtgatcgagttgatccgcttactggagatcacgacaggatctttgcaagcaatgaggtttggtcttatgatccgctgcaccgtgtgtggtcccacagggctcctatgcttgtggctcgagcgatgtttgcttgttgtgcactggatgggaaaataatcgttgcaggaggcttcactaactgccgcaaatcgatatcaaaggctgagatctatgaccctgaagctggcatatgggagcctcttcctgaccttcgtctggctcatagctctgcatgtactggacttgtcatcaagggtaagatgcatgtattgcataaaggtctatcgacagttcagattctggaagatggtggcagtcattgggctgttgaggatttctcttgctttcgtacattaattagtccggtgtggcaaacatcaatttgtagtgctgtcaatatctgttaatatacgtgcagctcagttctgacttgaaaaatgcagagtcgtgtttgcctgaaacatgtcgtttcaaaaaaaaaaaaaaaa

SEQ ID NO: 278 - protein, 289 aa, Zea mays subsp. mays
  misc_feature (1)..(289): Ceres Seq. ID no. 15178635
SIIPSGRARSLFLPPLLVATIGGSRCRRTPGAQIFFMPFSSDEYQKCLARVPFLFHPTLQLVCRSWRASVCSGELLKIRNQIGTTEELLCVLAFEPENMWQLYDPLRDKWITLPVMPSQIRNIARFGVASVAGKLYVIGGGSDRVDPLTGDHDRIFASNEVWSYDPLHRVWSHRAPMLVARAMFACCALDGKIIVAGGFTNCRKSISKAEIYDPEAGIWEPLPDLRLAHSSACTGLVIKGKMHVLHKGLSTVQILEDGGSHWAVEDFSCFRTLISPVWQTSICSAVNIC

SEQ ID NO: 279 - protein, 253 aa, Zea mays subsp. mays
  misc_feature (1)..(253): Ceres Seq. ID no. 15178636
MPFSSDEYQKCLARVPFLFHPTLQLVCRSWRASVCSGELLKIRNQIGTTEELLCVLAFEPENMWQLYDPLRDKWITLPVMPSQIRNIARFGVASVAGKLYVIGGGSDRVDPLTGDHDRIFASNEVWSYDPLHRVWSHRAPMLVARAMFACCALDGKIIVAGGFTNCRKSISKAEIYDPEAGIWEPLPDLRLAHSSACTGLVIKGKMHVLHKGLSTVQILEDGGSHWAVEDFSCFRTLISPVWQTSICSAVNIC

SEQ ID NO: 280 - protein, 191 aa, Zea mays subsp. mays
  misc_feature (1)..(191): Ceres Seq. ID no. 15178637
MWQLYDPLRDKWITLPVMPSQIRNIARFGVASVAGKLYVIGGGSDRVDPLTGDHDRIFASNEVWSYDPLHRVWSHRAPMLVARAMFACCALDGKIIVAGGFTNCRKSISKAEIYDPEAGIWEPLPDLRLAHSSACTGLVIKGKMHVLHKGLSTVQILEDGGSHWAVEDFSCFRTLISPVWQTSICSAVNIC

SEQ ID NO: 281 - protein, 253 aa, Zea mays subsp. mays; identical to SEQ ID NO: 279
  misc_feature (1)..(253): Ceres Seq. ID no. 16625607

SEQ ID NO: 282 - DNA, 1062 bp, Zea mays subsp. mays
  misc_feature (1)..(1062): Ceres Seq. ID no. 15178797
attcaaaacaaaacaccatacaacatggatcataagacaaacacgacactgcttttctcgctcttgttttccatcacgtacctcatcaccatcgcgacatcgaaagatctatgtaaccaaaacgacaaaaacaccctccttaaaatcaagaagtccctaaacaacccttaccacctcgcctcgtggcacccggaaaccgactgctgctcctggtactgcctcgaatgcggcgacgccaccgttaaccaccgcgtcatctccctaaccatattcgccggtcagatatccggtcagattccgcctgaagtgggtgacttaccgtatcttcagaatcttatgttccacaggatcactaacatcaccggtcagatcccatccaccatcaccaagcttaagtatctccgttctctcatgcttagctggttgaacctcaccggcccggttcctgatttccttagtcagctcatgaatcttgaatacttaagccttgccttcaatcagctctctggttccatacctagctctctcgctttgttacctaaactttcgtacattgatgttagtaggaataaacttacaggtacaatacctgaatcatttggatcgtttccagcagaagttcctcaccttatcttttcacacaatcagctctccggttctatacccaaatcactaggcaaccttgattttaaccggatagatttctcaaggaacaagctcacaggcgatgcttcgatgttgtttggagccaacaaaacgacgttttccattgacttatcaagaaacatgttccagtttgatctgtccagagttgtgctccatgagtcacttggtgtactggacttgaaccacaatgggatcacagggagtattccggttcagtggactgaatattctctccaaatcttaaatgttagctataacagactgtgtggacccatccccactggaggaagtcttcagagatttgattcttatacatattttcataacaagtgtttatgtggtgcacctcttgatagtagttgcaagtaataaaccaagcttatctctagttttccc

SEQ ID NO: 283 - protein, 344 aa, Zea mays subsp. mays
  misc_feature (1)..(344): Ceres Seq. ID no. 15178798
IQNKTPYNMDHKTNTTLLFSLLFSITYLITIATSKDLCNQNDKNTLLKIKKSLNNPYHLASWHPETDCCSWYCLECGDATVNHRVISLTIFAGQISGQIPPEVGDLPYLQNLMFHRITNITGQIPSTITKLKYLRSLMLSWLNLTGPVPDFLSQLMNLEYLSLAFNQLSGSIPSSLALLPKLSYIDVSRNKLTGTIPESFGSFPAEVPHLIFSHNQLSGSIPKSLGNLDFNRIDFSRNKLTGDASMLFGANKTTFSIDLSRNMFQFDLSRVVLHESLGVLDLNHNGITGSIPVQWTEYSLQILNVSYNRLCGPIPTGGSLQRFDSYTYFHNKCLCGAPLDSSCK

SEQ ID NO: 284 - protein, 336 aa, Zea mays subsp. mays
  misc_feature (1)..(336): Ceres Seq. ID no. 15178799
MDHKTNTTLLFSLLFSITYLITIATSKDLCNQNDKNTLLKIKKSLNNPYHLASWHPETDCCSWYCLECGDATVNHRVISLTIFAGQISGQIPPEVGDLPYLQNLMFHRITNITGQIPSTITKLKYLRSLMLSWLNLTGPVPDFLSQLMNLEYLSLAFNQLSGSIPSSLALLPKLSYIDVSRNKLTGTIPESFGSFPAEVPHLIFSHNQLSGSIPKSLGNLDFNRIDFSRNKLTGDASMLFGANKTTFSIDLSRNMFQFDLSRVVLHESLGVLDLNHNGITGSIPVQWTEYSLQILNVSYNRLCGPIPTGGSLQRFDSYTYFHNKCLCGAPLDSSCK

SEQ ID NO: 285 - protein, 232 aa, Zea mays subsp. mays
  misc_feature (1)..(232): Ceres Seq. ID no. 15178800
MFHRITNITGQIPSTITKLKYLRSLMLSWLNLTGPVPDFLSQLMNLEYLSLAFNQLSGSIPSSLALLPKLSYIDVSRNKLTGTIPESFGSFPAEVPHLIFSHNQLSGSIPKSLGNLDFNRIDFSRNKLTGDASMLFGANKTTFSIDLSRNMFQFDLSRVVLHESLGVLDLNHNGITGSIPVQWTEYSLQILNVSYNRLCGPIPTGGSLQRFDSYTYFHNKCLCGAPLDSSCK

SEQ ID NO: 286 - protein, 336 aa, Zea mays subsp. mays; identical to SEQ ID NO: 284
  misc_feature (1)..(336): Ceres Seq. ID no. 16625608

SEQ ID NO: 287 - DNA, 1001 bp, Zea mays subsp. mays
  misc_feature (1)..(1001): Ceres Seq. ID no. 15179047
acacatcaatctcgaagtgcgttttctcttgaatctgcgttacaaagcaatcaccacctctcagcgacgaagatcagcaacatccatggcggtaagatcagtaaaagttggcaatctctcctcaggagcaaaggagcatgatattaaagagttcttctctttctccggtgaagttgaaagcattgacatccaaagtaacgagcatagtgcttatgtgacattcaaagaccctcaaggagcagagaccgctgtgctcttatcaggtgcaagtattgccgatcagtccgtcgtcattgagatggctcctaactacactccacctgctgcccctcatgctgaaacacagagcggtggcgttgcagaatcagttgtccaaaaggcagaagatgttgtgagcaccatgttagcaaagggtttcatcctcggaaaagacgcggtcggcaaagcaaaagcttttgacgagaaactcggttttacttcaaccgcaaccgcaggcgttgcttccatagaccaaaaaatcggcctgagccaaaaaatcacagctggtacaagcttggtgaccgagaagatcaaaggggtggaccaaagcttccaagtcacagagaggaccaagtctgcctttgcgacagcggaacagacggtgagcagcgcgggaaccgccgtgatgaaaaaccgctttgtgttaacgggtgtgagctgggccgcaggagcgttcaacagagttgctaaagctgctggagaggttggacagaagacaaaggaaaaggttgaagctgagcaaccaccacaaccgtcgcagtcagagcagaaaccaccagaagggtattttccgcttcactgaaaaagctgcgtttttatatttcttttactcgttggtttccttacataaaaaaatgggaatttgtttttttttttttttttttttggatgtaacatagaacctatgtttggatcttctctattactagtttgggttttttttataagatattgtgttcact

SEQ ID NO: 288 - protein, 279 aa, Zea mays subsp. mays
  misc_feature (1)..(279): Ceres Seq. ID no. 15179048
HINLEVRFLLNLRYKAITTSQRRRSATSMAVRSVKVGNLSSGAKEHDIKEFFSFSGEVESIDIQSNEHSAYVTFKDPQGAETAVLLSGASIADQSVVIEMAPNYTPPAAPHAETQSGGVAESVVQKAEDVVSTMLAKGFILGKDAVGKAKAFDEKLGFTSTATAGVASIDQKIGLSQKITAGTSLVTEKIKGVDQSFQVTERTKSAFATAEQTVSSAGTAVMKNRFVLTGVSWAAGAFNRVAKAAGEVGQKTKEKVEAEQPPQPSQSEQKPPEGYFPLH

SEQ ID NO: 289 - protein, 251 aa, Zea mays subsp. mays
  misc_feature (1)..(251): Ceres Seq. ID no. 15179049
MAVRSVKVGNLSSGAKEHDIKEFFSFSGEVESIDIQSNEHSAYVTFKDPQGAETAVLLSGASIADQSVVIEMAPNYTPPAAPHAETQSGGVAESVVQKAEDVVSTMLAKGFILGKDAVGKAKAFDEKLGFTSTATAGVASIDQKIGLSQKITAGTSLVTEKIKGVDQSFQVTERTKSAFATAEQTVSSAGTAVMKNRFVLTGVSWAAGAFNRVAKAAGEVGQKTKEKVEAEQPPQPSQSEQKPPEGYFPLH

SEQ ID NO: 290 - protein, 180 aa, Zea mays subsp. mays
  misc_feature (1)..(180): Ceres Seq. ID no. 15179050
MAPNYTPPAAPHAETQSGGVAESVVQKAEDVVSTMLAKGFILGKDAVGKAKAFDEKLGFTSTATAGVASIDQKIGLSQKITAGTSLVTEKIKGVDQSFQVTERTKSAFATAEQTVSSAGTAVMKNRFVLTGVSWAAGAFNRVAKAAGEVGQKTKEKVEAEQPPQPSQSEQKPPEGYFPLH

SEQ ID NO: 291 - protein, 251 aa, Zea mays subsp. mays; identical to SEQ ID NO: 289
  misc_feature (1)..(251): Ceres Seq. ID no. 16625609

SEQ ID NO: 292 - DNA, 671 bp, Zea mays subsp. mays
  misc_feature (1)..(671): Ceres Seq. ID no. 15179058
atttcataggagtgtaagacaaaaagtatttcttttgttgttaagaattttctcattttcagccatgagactcagtgttattttaatggtttcttgtgttctcacatttctcattttaaataatgtagaggtggaagccggcatgagaaaacttggctgcgaaacattaccaagcaattatcttggaacatgcggaaaaaatggaattaatttatgtgtagatgacgtaaaaaaaatgattgtcaaaaatactggaaaagctgtgccaaaaggttatggagtacgttgtgacaaatgtattgatgaacctcccaagccaggttatgctcgcatgcataaatgtgtatgtcgatatgattgctaaattttaaaatatctatataagcataatctctttactaataaaaatcattgtaagggagagttttttggcgtagatctggctggaaaaacagctcatgtcttactaataattttccaaattatattggttatggttctaaattttaaaatatctatataagcataatctctttactaataaagacatgagatcattgtaatcgagaggtttttggcgtagatctagctggaaaaacagctcatgtcttactaataattttccgagttatattggttatggttctaaataaatataaatttgagctaat

SEQ ID NO: 293 - protein, 120 aa, Zea mays subsp. mays
  misc_feature (1)..(120): Ceres Seq. ID no. 15179059
FHRSVRQKVFLLLLRIFSFSAMRLSVILMVSCVLTFLILNNVEVEAGMRKLGCETLPSNYLGTCGKNGINLCVDDVKKMIVKNTGKAVPKGYGVRCDKCIDEPPKPGYARMHKCVCRYDC

SEQ ID NO: 294 - protein, 99 aa, Zea mays subsp. mays
  misc_feature (1)..(99): Ceres Seq. ID no. 15179060
MRLSVILMVSCVLTFLILNNVEVEAGMRKLGCETLPSNYLGTCGKNGINLCVDDVKKMIVKNTGKAVPKGYGVRCDKCIDEPPKPGYARMHKCVCRYDC

SEQ ID NO: 295 - protein, 92 aa, Zea mays subsp. mays
  misc_feature (1)..(92): Ceres Seq. ID no. 15179061
MVSCVLTFLILNNVEVEAGMRKLGCETLPSNYLGTCGKNGINLCVDDVKKMIVKNTGKAVPKGYGVRCDKCIDEPPKPGYARMHKCVCRYDC

SEQ ID NO: 296 - protein, 99 aa, Zea mays subsp. mays; identical to SEQ ID NO: 294
  misc_feature (1)..(99): Ceres Seq. ID no. 16625610

SEQ ID NO: 297 - DNA, 1187 bp, Zea mays subsp. mays
  misc_feature (1)..(1187): Ceres Seq. ID no. 15179072
aaatatataagagattagtgtagcacggttctgccagtgccatccgcgccctcagccgaggatctccattctcctccccacgcagaatccaccgcgaggtctccgccgccctaaccgcgcccttccatccatggttgcagtggtgtcgtgctccccagatctaccacgggcgcgtgcccggatctggcccgacgaacagcggtggagctcgcgcggtgttccattcatggattgggatctcaagatgtcggtctcctaggacctccgcgacttcccccgcgacagcgtcgggcattgccgccgcagctgccgcgccttccctcgcgacggcgccgagccgagcggagtgctccgtcgacctcaagctcggcaggacgacaccaccacgaaggagccggtggctgcaaccgcagcgccgtccgccagcccgatgggcggcgtcgggcattgccgccgcagctgccgagccttcccccgcgacggtgctgagccgggcggagtgctccgtcgacctcaagctcggcgggctaggcccaggagcagcccccggccccggggacctgcgacctgtacaagggccgctgggtgtacgacgagtcccgcgcgccgctgtacaaggagtccgactgcagcttcctcacggagcaggtcacctgtatgcgcaacggccgacgcgacgacgactaccagaagtggcgctggcagcccgacggctgcgatctccccagttcggctgcttcaaggtgctcggaaaggggatgctgttgtccaaccccatcattgttagggccaagctcatctccaagatcatcgagaagaggatcaatgttactggaggcactgtcttgctgaccgccacatagggcactgaaagagtcattcctagagactctacggaaggacacaacggagatggagcagcctgcttgagaagaggcggcggaggagaaggaagcgctcaacctagactcgtggtcgtcgaccagcatgcgccttgacgtcctcttttttgattcatttatttgattttttgaacaaaattgcccttgtctttgtccttcctcccttttttcattttcttaatgccctcatgtaaaatataaggcatgtgttgttcaaatctttcttttaaaactacatgtatttcgtgtgttctatgatgatatatacagaaactggtcttcttg

SEQ ID NO: 298 - protein, 118 aa, Zea mays subsp. mays
  misc_feature (1)..(118): Ceres Seq. ID no. 15179073
MGGVGHCRRSCRAFPRDGAEPGGVLRRPQARRARPRSSPRPRGPATCTRAAGCTTSPARRCTRSPTAASSRSRSPVCATADATTTTRSGAGSPTAAISPVRLLQGARKGDAVVQPHHC

SEQ ID NO: 299 - protein, 64 aa, Zea mays subsp. mays
  misc_feature (1)..(64): Ceres Seq. ID no. 15179074
MRNGRRDDDYQKWRWQPDGCDLPSSAASRCSERGCCCPTPSLLGPSSSPRSSRRGSMLLEALSC

SEQ ID NO: 300 - protein, 118 aa, Zea mays subsp. mays; identical to SEQ ID NO: 298
  misc_feature (1)..(118): Ceres Seq. ID no. 16625611

SEQ ID NO: 301 - DNA, 1181 bp, Zea mays subsp. mays
  misc_feature (1)..(1181): Ceres Seq. ID no. 15179157
aaaattaaattaaaaaacaaaaacctctctgttctccccaaaaatggcacacactcaccgtcttgccgtccttctcatcctcctctccgccaccatcggcttctcctccgccgcgttggtcgaagagcagcctctggtgcttaagtaccacaacggcattctcttgaaaggaaacgtcactctcaacctcgtctggtacgggaagttcacctcaatccaacggtcaatcatcgtcgacttcatccgctctctcagctcctccgccgtcccatcaaaaggtccatccgtggcctcgtggtggaagacgacggagaagtacaaaggcggctcgtcgaagatcgtcgtcggtaaacagctcctcctcgagaactaccctctcggaaaatcgttaaagagtccttacctcagagctctctcggggaagctcaacggaggtggtgttcggtcgataaccgtcgttttaacggcgaaggacgtcgccgttgaaggattctgcatgaaccggtgcgggactcacggcgcgaaagcacgttccgttaacagcggagcttacgtctgggtgggaaactctgaaacgcagtgtgctggctactgcgcgtggccgtttcatcagccgatgtacggacctcagtctccgccgttaatcgcgcctaacggcgacgtcggagtcgacggaatgatcataaaccttgcgacgctactggttaacaccgtcacgaatccgtttaaaagcggttactttaacggcgggaatcaagaagccgtctcggtatgtaccgggatgttcgggtccggttcctacccgggttacgcgggtcgggtccttgtagacaagactaccggggcgagttacaacgccttgggactcgccgggaggaaatatcttttgccagcgatgtgggacccgcagacttcgaagtgtaagactttggtttgactttagacggtctagaaggagacacgtggcaagagatcaatggagatggagagttgaagcttatcggagccaaagaaagttgttgtagatatctatcttgtctgattgtacggaggagtttagggagggaagtggatgtgtttcttttgtcgttttgtgtgtcgtgtacattcgatcctggagatatgtgaaggatgggccatatatctaatttaatgccaataaataaaatcgatttgtagct

SEQ ID NO: 302 - protein, 297 aa, Zea mays subsp. mays
  misc_feature (1)..(297): Ceres Seq. ID no. 15179158
MAHTHRLAVLLILLSATIGFSSAALVEEQPLVLKYHNGILLKGNVTLNLVWYGKFTSIQRSIIVDFIRSLSSSAVPSKGPSVASWWKTTEKYKGGSSKIVVGKQLLLENYPLGKSLKSPYLRALSGKLNGGGVRSITVVLTAKDVAVEGFCMNRCGTHGAKARSVNSGAYVWVGNSETQCAGYCAWPFHQPMYGPQSPPLIAPNGDVGVDGMIINLATLLVNTVTNPFKSGYFNGGNQEAVSVCTGMFGSGSYPGYAGRVLVDKTTGASYNALGLAGRKYLLPAMWDPQTSKCKTLV

SEQ ID NO: 303 - protein, 297 aa, Zea mays subsp. mays; identical to SEQ ID NO: 302
  misc_feature (1)..(297): Ceres Seq. ID no. 16625612

SEQ ID NO: 304 - DNA, 870 bp, Zea mays subsp. mays
  misc_feature (1)..(870): Ceres Seq. ID no. 15179249
agagataaaaaaagtaagtaatttaataattaattaccgcatttaagaaaatctcacattcacatataaagatgacaaggaccattacgctcctatctctcgccgtcaccgtcttggccattaccgctgtcttcgccgctgatcctccaacaccagccggagcgcctaaagccaacgccaacaaaagctcacccactcctcccgccgccgcagcatcccccaaacaacccgccgcagcatcccccaaacaacccgccgcaggatcaccaaaaccaaccaccgcaggatcccccaaacaacccgccgcagcatccccaaaatccaccgcttccgccccaacctcgccgcctacggcttctgctcccaccaccaccaagaagaactcctccgccactccaagcgcttccccatcttcaggtggtggcgcccccacaaacgctccaaaatcttcgtcagccaaaactccggctccaagccccgactcaagcaccggaggtcctaccagctcatccgaaggtcctacaagctcatcggaaggtcctacaagctcgtccgaaggccctacaagctcgtctgaaggccctacaagctcgtctgaaggtcctactagctcgtccgactcaccatccgcatcttctccgccgtctccgacaccagacatgtctccgtcgtcgtcccctgatgaaggacccaccagtgaaggccccgaagcttcagccccgacgggaagagcctcgtcgcttgagatctctatctctggatctgttctcatcgcagctgcatggttcttcttcatatgatgaaatgttactcttgtgtttcttattacacttaaaaaggctcgtttcatttaatattttttgattcctt

SEQ ID NO: 305 - protein, 242 aa, Zea mays subsp. mays
  misc_feature (1)..(242): Ceres Seq. ID no. 15179250
MTRTITLLSLAVTVLAITAVFAADPPTPAGAPKANANKSSPTPPAAAASPKQPAAASPKQPAAGSPKPTTAGSPKQPAAASPKSTASAPTSPPTASAPTTTKKNSSATPSASPSSGGGAPTNAPKSSSAKTPAPSPDSSTGGPTSSSEGPTSSSEGPTSSSEGPTSSSEGPTSSSEGPTSSSDSPSASSPPSPTPDMSPSSSPDEGPTSEGPEASAPTGRASSLEISISGSVLIAAAWFFFI

SEQ ID NO: 306 - protein, 242 aa, Zea mays subsp. mays; identical to SEQ ID NO: 305
  misc_feature (1)..(242): Ceres Seq. ID no. 16612120

SEQ ID NO: 307 - DNA, 976 bp, Zea mays subsp. mays
  misc_feature (1)..(976): Ceres Seq. ID no. 15179263
accagcccctctcgcctcacgaaaaggcgcaggccaaggccaaggccaagccgccccctccctcctctcgtctccactctctctctctctctggcagccaaaggcgaggccgagatccggcgcgcggaggatgccttccaggtccatgagccggctgtccgtcgagtccgcctcgggcagcgggggcggctgccgggaggccgagccggtgctctgcgcgcctcggccgcgcagggcccagcagcagctggtccacgtccacccccgcggcgccgacctcatcctcggcccgccgcccttcctgctcaacgagagcagcgaggagggtcgctgcagctgggcggcgttgggcggcgggtcgccgccggcgcgcgcgggcaacccgctggtgcacgaccccagcttcctgctgagccagcgccaccccgcggcggacccgccgctggagctcggcttcttcgaccacctgatccgcaccagcagctacgtgcaccggccgacgacgacgacgtcgtataccagctccggcaccagcagcagcggcggcagtagcagcaagagcagttttggcccgtcgtcgttcgcgcccgccgtgaggatccaggggttcgacgtcgccgcgtgccggagctcccacggcggcgggggcggccgcgtgctgtccgccgcccgcgcgtgagcggtcgagctccatggtgtggagggggatgaaatcaaagagggaggaggaagaaccttgtgtacagattctgtgtctgacgagtcgtgttcgtgttcgtgtccgctgtactaattgtgaacaccaccacacatagcatagcatatagcatagcatatcaaagactactaggtcggtcggagtcggacggtcagcgctcgtgttcttgtagcagtcgagcgagcgactaggctaccgcgcgccatgtaacgtacggtcctgcaaacaatactgcacgtataaagatggaaaccgtgc

SEQ ID NO: 308 - protein, 225 aa, Zea mays subsp. mays
  misc_feature (1)..(225): Ceres Seq. ID no. 15179264
PAPLASRKGAGQGQGQAAPSLLSSPLSLSLWQPKARPRSGARRMPSRSMSRLSVESASGSGGGCREAEPVLCAPRPRRAQQQLVHVHPRGADLILGPPPFLLNESSEEGRCSWAALGGGSPPARAGNPLVHDPSFLLSQRHPAADPPLELGFFDHLIRTSSYVHRPTTTTSYTSSGTSSSGGSSSKSSFGPSSFAPAVRIQGFDVAACRSSHGGGGGRVLSAARA

SEQ ID NO: 309 - protein, 183 aa, Zea mays subsp. mays
  misc_feature (1)..(183): Ceres Seq. ID no. 15179265
TSPSRLTKRRRPRPRPSRPLPPLVSTLSLSLAAKGEAEIRRAEDAFQVHEPAVRRVRLGQRGRLPGGRAGALRASAAQGPAAAGPRPPPRRRPHPRPAALPAQREQRGGSLQLGGVGRRVAAGARGQPAGARPQLPAEPAPPRGGPAAGARLLRPPDPHQQLRAPADDDDVVYQLRHQQQRRQ

SEQ ID NO: 310 - protein, 182 aa, Zea mays subsp. mays
  misc_feature (1)..(182): Ceres Seq. ID no. 15179266
MPSRSMSRLSVESASGSGGGCREAEPVLCAPRPRRAQQQLVHVHPRGADLILGPPPFLLNESSEEGRCSWAALGGGSPPARAGNPLVHDPSFLLSQRHPAADPPLELGFFDHLIRTSSYVHRPTTTTSYTSSGTSSSGGSSSKSSFGPSSFAPAVRIQGFDVAACRSSHGGGGGRVLSAARA

SEQ ID NO: 311 - protein, 177 aa, Zea mays subsp. mays
  misc_feature (1)..(177): Ceres Seq. ID no. 16625614
MSRLSVESASGSGGGCREAEPVLCAPRPRRAQQQLVHVHPRGADLILGPPPFLLNESSEEGRCSWAALGGGSPPARAGNPLVHDPSFLLSQRHPAADPPLELGFFDHLIRTSSYVHRPTTTTSYTSSGTSSSGGSSSKSSFGPSSFAPAVRIQGFDVAACRSSHGGGGGRVLSAARA

SEQ ID NO: 312 - DNA, 3044 bp, Zea mays subsp. mays
  misc_feature (1)..(3044): Ceres Seq. ID no. 15179283
accacgctccggtcagcctcgcctcccttctccgtctcattcccccaatcccacgccactcccgcaggaatccccacccaaattcccgtctccccgatcgccgcccttctcggtgcccgtaaaccctacccccggagtcgcccgtgcgctgtcgtgcccgcgttgccaccgtcggtggtccgcggcgcccgtaaccaaaacctaaccgcagcctgcagatcccgattccgcagggaggcgggagaggtgaaggccgcctcgccgcagatggagcccgcgggcgcgcgcaaggagtggcgcgccgtccccggctcctcgctccgctccaatggcgccgaggatgccgcggagcacgggaaactggggcagtcggaggaccgagctatctacgaggaaggggcgggtggactggaggacttctgcgccatcaccattgatgggagcggagggctcagcgaggacatcctgcagcagcgcctgcagagcgttgtgcggcaaagggagcagctgcagcaggtcgagatggagctgcgtgcgcaggccattgcacacccgcagatcattcaggcgcaacaaagcttccaggctacttccaaggaacatgccgcagctgtggccaagatcaaggagcaactgcatgagcgggagcaatacattcttgaactagaaatgaaactcaatgacaaggatagagaactaaatgctctgaagattgatcatcaaacggtgtgggcaaatcaagatcttattagagaacagaccaaagagctggcaactgtcagaagggaacgcgacaactctgaagctgaaagagcccaacatcttacacaaattcatgagctccaagaacatctgcgagaaaaagaaagccagttcattgcattagaggaacagcatagggctgctcaagacaacattctttacaaagatgagcagttgagggaagcccatgcttgggtatctcaagttcgagaaatggatgctttgcagtctcaatccctacaagttgagttacgtgagcgcatggagcaatttaatcaatattggattagctcccagcagcagtatgctgaaatgcagcggagtcttctccatacaatacaacaactccagcaagaattaactgaggcaagggaacagtctggtgcacaaaaagatggtccacaagtttctcgggaagggtcagctgaatcatcactagttcaaagcatgggaaacagcgtggcttcaaatggtagtgcaactgcagatgggaaccagcaattgttgaaaaataatggaagcgtggatgtctctgttcaggccaatagtgcctcagctgtacctgttccttcttccctactgggaatcggtggtccggctgcgcatatcgctgcgatgcatgcttttatgattcatcctcaaggcattcctcaacccttagtagcatcacccaactctggtgttcctcaatttggcagttttcagtctcagtctacaattcaaccaaattcacaatggccaaatcagcaggaagtacaaaatgtctcacaaccacaagatgaaacaaactatcagacatcccaatcagaccggactgttttacaacaaggcgctattaatactgatgagttgtcctcaaagccaagccaggatagtcagccagaccatcttaatgcccatgtgaaacaacagcaaagccctgcaagtgcacctactgaatcaactcatgaacttactgttgttgaagcgaatgtagctgaacatgtatcttgtgacgaacaacaaaaaatcttaaacgaacaggattcactgtcaaatatgaacaaccatattggaatagttgagcatctagagcaaaataccgaatccaaggatgaaagagctgcatctgataagcaacctgaacctgtatctaggcagcataaacatttgaactttcctccgttcactacccagattcacttgaaaaagagtgcaacagagaatcctaatgttgtaaatcaggttgatataatgaaatcagttgcaggtggttttagttcgcagttacctcgtgcaccaaaggaaccttctctcctagatgagagatctctattggcttgcattgtacgtgcagttcctgctgggactgagggtggaatcaggataagttcaactctgccaaataggcttgggaaaatgttggctccccttcactggcatgactataagaagcaatacgggaagctcgacgattttgtggctagtcatccagagctgtttgtgattgagggagacttcattcaccttcgtgatggagcacagcagattatttctgccactacagctgctgcaaaaatagctgctgcgacagcatcttctgcctcttactcatccttactgccttctgttgccgttactcctgtggcacaaaatactcggcaaaagaggaggcccgcagttgattccagatcatcaaatgcaattccctctggaaacggcttcacagatcaatttaacatcattcagggtgtcagcgacgtaacaatttcaggcaaagtaagaaatatccaagataatggcttcatagatgaagttcgcactgggcagccatccgtgctcacagctgctactgccaacggagcaagacatgacaaatgtgcaaataataccagacatggttatggtggaaaacaacaggggaggaccactgggacgacatacctttccagaagatgaaccaactttcactgggcgatgatgctgttggaattggaaaccatgcgagtggcgatgatgcggttggggaaaccatacgagtgacgatgctttggcttcgaaatgatggtgaagatgacctggattaaagttattctagattcattttttattttgcactattggtcttcacagagcctgtatggttgggggccttgttttggcaaagctgtactgatatatccctaccccaagaatcagaagcctgccaaagttttgcgactatgtacctcgtctgcgcttgtgtattgtggtgcacttgaatgatgcgaatgttatatcgaatccccgtccttgatcgtgag

SEQ ID NO: 313 - protein, 899 aa, Zea mays subsp. mays
  misc_feature (1)..(899): Ceres Seq. ID no. 15179284
TTLRSASPPFSVSFPQSHATPAGIPTQIPVSPIAALLGARKPYPRSRPCAVVPALPPSVVRGARNQNLTAACRSRFRREAGEVKAASPQMEPAGARKEWRAVPGSSLRSNGAEDAAEHGKLGQSEDRAIYEEGAGGLEDFCAITIDGSGGLSEDILQQRLQSVVRQREQLQQVEMELRAQAIAHPQIIQAQQSFQATSKEHAAAVAKIKEQLHEREQYILELEMKLNDKDRELNALKIDHQTVWANQDLIREQTKELATVRRERDNSEAERAQHLTQIHELQEHLREKESQFIALEEQHRAAQDNILYKDEQLREAHAWVSQVREMDALQSQSLQVELRERMEQFNQYWISSQQQYAEMQRSLLHTIQQLQQELTEAREQSGAQKDGPQVSREGSAESSLVQSMGNSVASNGSATADGNQQLLKNNGSVDVSVQANSASAVPVPSSLLGIGGPAAHIAAMHAFMIHPQGIPQPLVASPNSGVPQFGSFQSQSTIQPNSQWPNQQEVQNVSQPQDETNYQTSQSDRTVLQQGAINTDELSSKPSQDSQPDHLNAHVKQQQSPASAPTESTHELTVVEANVAEHVSCDEQQKILNEQDSLSNMNNHIGIVEHLEQNTESKDERAASDKQPEPVSRQHKHLNFPPFTTQIHLKKSATENPNVVNQVDIMKSVAGGFSSQLPRAPKEPSLLDERSLLACIVRAVPAGTEGGIRISSTLPNRLGKMLAPLHWHDYKKQYGKLDDFVASHPELFVIEGDFIHLRDGAQQIISATTAAAKIAAATASSASYSSLLPSVAVTPVAQNTRQKRRPAVDSRSSNAIPSGNGFTDQFNIIQGVSDVTISGKVRNIQDNGFIDEVRTGQPSVLTAATANGARHDKCANNTRHGYGGKQQGRTTGTTYLSRR

SEQ ID NO: 314 - protein, 810 aa, Zea mays subsp. mays
  misc_feature (1)..(810): Ceres Seq. ID no. 15179285
MEPAGARKEWRAVPGSSLRSNGAEDAAEHGKLGQSEDRAIYEEGAGGLEDFCAITIDGSGGLSEDILQQRLQSVVRQREQLQQVEMELRAQAIAHPQIIQAQQSFQATSKEHAAAVAKIKEQLHEREQYILELEMKLNDKDRELNALKIDHQTVWANQDLIREQTKELATVRRERDNSEAERAQHLTQIHELQEHLREKESQFIALEEQHRAAQDNILYKDEQLREAHAWVSQVREMDALQSQSLQVELRERMEQFNQYWISSQQQYAEMQRSLLHTIQQLQQELTEAREQSGAQKDGPQVSREGSAESSLVQSMGNSVASNGSATADGNQQLLKNNGSVDVSVQANSASAVPVPSSLLGIGGPAAHIAAMHAFMIHPQGIPQPLVASPNSGVPQFGSFQSQSTIQPNSQWPNQQEVQNVSQPQDETNYQTSQSDRTVLQQGAINTDELSSKPSQDSQPDHLNAHVKQQQSPASAPTESTHELTVVEANVAEHVSCDEQQKILNEQDSLSNMNNHIGIVEHLEQNTESKDERAASDKQPEPVSRQHKHLNFPPFTTQIHLKKSATENPNVVNQVDIMKSVAGGFSSQLPRAPKEPSLLDERSLLACIVRAVPAGTEGGIRISSTLPNRLGKMLAPLHWHDYKKQYGKLDDFVASHPELFVIEGDFIHLRDGAQQIISATTAAAKIAAATASSASYSSLLPSVAVTPVAQNTRQKRRPAVDSRSSNAIPSGNGFTDQFNIIQGVSDVTISGKVRNIQDNGFIDEVRTGQPSVLTAATANGARHDKCANNTRHGYGGKQQGRTTGTTYLSRR

SEQ ID NO: 315 - protein, 725 aa, Zea mays subsp. mays
  misc_feature (1)..(725): Ceres Seq. ID no. 15179286
MELRAQAIAHPQIIQAQQSFQATSKEHAAAVAKIKEQLHEREQYILELEMKLNDKDRELNALKIDHQTVWANQDLIREQTKELATVRRERDNSEAERAQHLTQIHELQEHLREKESQFIALEEQHRAAQDNILYKDEQLREAHAWVSQVREMDALQSQSLQVELRERMEQFNQYWISSQQQYAEMQRSLLHTIQQLQQELTEAREQSGAQKDGPQVSREGSAESSLVQSMGNSVASNGSATADGNQQLLKNNGSVDVSVQANSASAVPVPSSLLGIGGPAAHIAAMHAFMIHPQGIPQPLVASPNSGVPQFGSFQSQSTIQPNSQWPNQQEVQNVSQPQDETNYQTSQSDRTVLQQGAINTDELSSKPSQDSQPDHLNAHVKQQQSPASAPTESTHELTVVEANVAEHVSCDEQQKILNEQDSLSNMNNHIGIVEHLEQNTESKDERAASDKQPEPVSRQHKHLNFPPFTTQIHLKKSATENPNVVNQVDIMKSVAGGFSSQLPRAPKEPSLLDERSLLACIVRAVPAGTEGGIRISSTLPNRLGKMLAPLHWHDYKKQYGKLDDFVASHPELFVIEGDFIHLRDGAQQIISATTAAAKIAAATASSASYSSLLPSVAVTPVAQNTRQKRRPAVDSRSSNAIPSGNGFTDQFNIIQGVSDVTISGKVRNIQDNGFIDEVRTGQPSVLTAATANGARHDKCANNTRHGYGGKQQGRTTGTTYLSRR

SEQ ID NO: 316 - protein, 810 aa, Zea mays subsp. mays; identical to SEQ ID NO: 314
  misc_feature (1)..(810): Ceres Seq. ID no. 16625615

SEQ ID NO: 317 - DNA, 704 bp, Zea mays subsp. mays
  misc_feature (1)..(704): Ceres Seq. ID no. 15179329
atccaaatccaacatttttcacaaaatgttctcttttctcagcccattgttggatgttatcaaggttgttgttgcttccgtgacttccgtagtcttatttgtctttgcgggtctaacactctccggttcagccgtggcattagttgtatccacaccgtttttcctcatattcagtccaattcttgttcccgccactatagccactactctcctagcctctggggtcacggccggtgccaccctcggaatcaccgccattagtctcatcatgggactcatcaagacagcggaaggaagttcgttggcacggttagcccaaacaccattgaaactgtttaagttttcaggtggatttggaggatcatggggaggaaaaccattttctggaacatttggaaataaaggatctcaatcgtccggaaatatcccaggatggttaaaaaatctactcaatggtataccagggggtggagcggcacctgcggcaggaggagctgcacctgcacccgcggcgcctgcacccgcggcacccccaggataagggaaattagccgagcttgtccaaacatatagcatatatactaattgtgtatcaattatagattttatcaaattaaaaggaaaaagtcttcttattaatacgttctatataatgatgaaaaatatgtggctacatatatatatatgaacaaaacttgagttct

SEQ ID NO: 318 - protein, 179 aa, Zea mays subsp. mays
  misc_feature (1)..(179): Ceres Seq. ID no. 15179330
SKSNIFHKMFSFLSPLLDVIKVVVASVTSVVLFVFAGLTLSGSAVALVVSTPFFLIFSPILVPATIATTLLASGVTAGATLGITAISLIMGLIKTAEGSSLARLAQTPLKLFKFSGGFGGSWGGKPFSGTFGNKGSQSSGNIPGWLKNLLNGIPGGGAAPAAGGAAPAPAAPAPAAPPG

SEQ ID NO: 319 - protein, 171 aa, Zea mays subsp. mays
  misc_feature (1)..(171): Ceres Seq. ID no. 15179331
MFSFLSPLLDVIKVVVASVTSVVLFVFAGLTLSGSAVALVVSTPFFLIFSPILVPATIATTLLASGVTAGATLGITAISLIMGLIKTAEGSSLARLAQTPLKLFKFSGGFGGSWGGKPFSGTFGNKGSQSSGNIPGWLKNLLNGIPGGGAAPAAGGAAPAPAAPAPAAPPG

SEQ ID NO: 320 - protein, 90 aa, Zea mays subsp. mays
  misc_feature (1)..(90): Ceres Seq. ID no. 15179332
MGLIKTAEGSSLARLAQTPLKLFKFSGGFGGSWGGKPFSGTFGNKGSQSSGNIPGWLKNLLNGIPGGGAAPAAGGAAPAPAAPAPAAPPG

SEQ ID NO: 321 - protein, 171 aa, Zea mays subsp. mays; identical to SEQ ID NO: 319
  misc_feature (1)..(171): Ceres Seq. ID no. 16625616

SEQ ID NO: 322 - DNA, 1955 bp, Zea mays subsp. mays
  misc_feature (1)..(1955): Ceres Seq. ID no. 15179432
atttgatttcgctcagaaaagtagaaaacgccagccgaacacaccggtccgccgcccacgccagcgctgagctcaccaggaaaccgtcttcttccactggcgcgggctaggagcgtcgccgccgcgtcgcggttatgggtacggcggctgtcgtggaggacacgatacgcgtcgtcctcacctgcctccctgctccgcccttccgcaccaccggttcctcccgtccctaccagagtcccagcggcggcggcggcggcggggaccgcatcagccgcctctcagacgcggtgctctctaacatcgtggcgcgtctccccgccaaggacgcagcgcgcactaccgcgctctccaggcgctggcgccgcgtctgggcctccactccactcgtcctcgacgactccgacctcctcgtcttccacgacgacggcggctgctctacgcccaactggttagccgtcacagacaccgtgtcccacgtcctctcctcccacagggggcccatccgctttgtgcgcctcacctgctgctacatggcgctggcctcgcacaacggcgcgctccagtactggctccgggtcctcgctgcggggggagtcgaggatctcgtcctcgtcaaccgcccattacccacctccgtgggcctccccatcgacgtcctccacctcgcctccctccgcaccctctacctcggtttctggtgcttcccggacaccgccgccctcccgcgaggccgcgccaccgtgttcccctgcctccaggagattggactctgcgctaccgtcatccacgccagggacatcgactacctgctcgcctgcagccccgtgctcgagaagttcgccagcatcaccagcatctacttcacagaccctgtccggatccgcagctgcagcctccggtgccttgtcttctgggagtccctggccaatgagctcgacctggtcgtcgccccgcgcctccagcgcctaatcctgtggcagtcgcgccaatggatgatcggctccgtccatttccgcagcaggatcaggattggctccgccaccgaactcaaggtgctcggctacctggagccaagcatccaccagctcgagattggcggcaccataattgatagtggaacaaagatgaccccatctaacatggttccaagtgtcaagatcttggccttgaagatgcagttcagaatccgcaaggaagtcaagatgctgcccaccttcctgagatgctttcccaatgtggagacattgcatgttctgtcacatgaaactgatgagcaaaatggcaagttcaatttgaagttctgggaggaggttggctccatcagctgcctagagacacgcatcaccaaggtggtgtttgacaaattcagaggagagcgttgtgagctcgcgttcctcaagttcgtcctagagagggcagaatcgctgctgaagcttgtggttgtattggccaatggagatcaagcctcagtggatgagatgcttgccaagttgaagtctctgaccacggtgaaacgagccagcgatttccctactctgttggcagttgcccgtgagggtgacagcgcctggtactttgagagagcatccgatctttctgttactgaccccttcaatttgtgaagctcaaggcgatgacatattccatgaccaattctattgttctcctgagccaatcagttgttctttgtcattcagggtatacttgctaggcattccctagaatcttgtctcgtcttgtgttgactgtaaatgtgagtacagttctgagtgaatcaggagaggtatatagtttatggaaagcgctgcttgacatttcactattgaaaatataggttctgcatagctgctcttgagttgactacttccaaatgttgtcactggctagtttctcagttgtgatgtactgcatactgggcatagttggaactggaaaatatcatattggtaaccccg

SEQ ID NO: 323 - protein, 495 aa, Zea mays subsp. mays
  misc_feature (1)..(495): Ceres Seq. ID no. 15179433
MGTAAVVEDTIRVVLTCLPAPPFRTTGSSRPYQSPSGGGGGGDRISRLSDAVLSNIVARLPAKDAARTTALSRRWRRVWASTPLVLDDSDLLVFHDDGGCSTPNWLAVTDTVSHVLSSHRGPIRFVRLTCCYMALASHNGALQYWLRVLAAGGVEDLVLVNRPLPTSVGLPIDVLHLASLRTLYLGFWCFPDTAALPRGRATVFPCLQEIGLCATVIHARDIDYLLACSPVLEKFASITSIYFTDPVRIRSCSLRCLVFWESLANELDLVVAPRLQRLILWQSRQWMIGSVHFRSRIRIGSATELKVLGYLEPSIHQLEIGGTIIDSGTKMTPSNMVPSVKILALKMQFRIRKEVKMLPTFLRCFPNVETLHVLSHETDEQNGKFNLKFWEEVGSISCLETRITKVVFDKFRGERCELAFLKFVLERAESLLKLVVVLANGDQASVDEMLAKLKSLTTVKRASDFPTLLAVAREGDSAWYFERASDLSVTDPFNL

SEQ ID NO: 324 - protein, 363 aa, Zea mays subsp. mays
  misc_feature (1)..(363): Ceres Seq. ID no. 15179434
MALASHNGALQYWLRVLAAGGVEDLVLVNRPLPTSVGLPIDVLHLASLRTLYLGFWCFPDTAALPRGRATVFPCLQEIGLCATVIHARDIDYLLACSPVLEKFASITSIYFTDPVRIRSCSLRCLVFWESLANELDLVVAPRLQRLILWQSRQWMIGSVHFRSRIRIGSATELKVLGYLEPSIHQLEIGGTIIDSGTKMTPSNMVPSVKILALKMQFRIRKEVKMLPTFLRCFPNVETLHVLSHETDEQNGKFNLKFWEEVGSISCLETRITKVVFDKFRGERCELAFLKFVLERAESLLKLVVVLANGDQASVDEMLAKLKSLTTVKRASDFPTLLAVAREGDSAWYFERASDLSVTDPFNL

SEQ ID NO: 325 - protein, 495 aa, Zea mays subsp. mays; identical to SEQ ID NO: 323
  misc_feature (1)..(495): Ceres Seq. ID no. 16625617

SEQ ID NO: 326 - DNA, 1210 bp, Zea mays subsp. mays
  misc_feature (1)..(1210): Ceres Seq. ID no. 15179510
agtcatttgtcattatctgtctctctccactgagattcaacacgttatcagcactttgctctccaccgagcggttaccgtcgacagcaatgtccatgcatccgtgcatccggcgtctgtcggacgaaaagcgattcaaagacaagttcatggagacgctgcttaggtatggctacagaggctagtacatgtctaatggctggacgctggacaacaacccgacaccactggaaggagatgatctcgctggagtctggcagtctggccacaaggagttgatctctactcagcaacagttgcaccacagcatctgtatcgtcggaggccgggactgcgtggccatggcgccgcccaacgactccgagccatgcacgcaccaccggctgcccgcggacgagctgcagccgccgccgccggctacgtgctgcggcgccgctttggacgaccgggcgccggcggcggcatgggcgtcgtcgccgtccgagcctgaccaggtggcggcggcgcctgctgctcaggaggcggagaagaagcagaacagcgcgacgacgacggaggccgaagcagcagcgggaagcggcgccgggcgggagctggtggcggcgcggcggccggcggcggcggcggaggagagcgcgcgggagcggctgaagcggcatcgcaccgaaatggcggggcgggtgcggatcccggagatgtggggccaggagcggctgctcaaggactgggtcgactgcgccgtcttcgaccgcccgctcgccgccaccgcggggctgctcaccgcccgcgacgcgcttgtcgccgagtgcgccgccgcgcgccggccggccgtctcgcacggctccgcggggcgcccgctacgggtgcacaacggctgctcgtgagcactgcacacgtcatcggctacgacgactacgatcgagcgacgagcgagcccgctcgccgcatgcagttgagaagtgtgcctttcaacaactctattatttatttcgatccttcattgcgtagtactagtacgttctcggactatggatttggtcgatgatgtgatgatgatacacaccacgattggagtaattaatactactcatgcttcattagtactggtggttgtaattaatgtagttgatcaccattttaagcatgcatgtctcaaaacaatcttgtttattattttttcagctaatatataagctagagtgttcttgctt

SEQ ID NO: 327 - protein, 231 aa, Zea mays subsp. mays
  misc_feature (1)..(231): Ceres Seq. ID no. 15179511
MSNGWTLDNNPTPLEGDDLAGVWQSGHKELISTQQQLHHSICIVGGRDCVAMAPPNDSEPCTHHRLPADELQPPPPATCCGAALDDRAPAAAWASSPSEPDQVAAAPAAQEAEKKQNSATTTEAEAAAGSGAGRELVAARRPAAAAEESARERLKRHRTEMAGRVRIPEMWGQERLLKDWVDCAVFDRPLAATAGLLTARDALVAECAAARRPAVSHGSAGRPLRVHNGCS

SEQ ID NO: 328 - protein, 180 aa, Zea mays subsp. mays
  misc_feature (1)..(180): Ceres Seq. ID no. 15179512
MAPPNDSEPCTHHRLPADELQPPPPATCCGAALDDRAPAAAWASSPSEPDQVAAAPAAQEAEKKQNSATTTEAEAAAGSGAGRELVAARRPAAAAEESARERLKRHRTEMAGRVRIPEMWGQERLLKDWVDCAVFDRPLAATAGLLTARDALVAECAAARRPAVSHGSAGRPLRVHNGCS

SEQ ID NO: 329 - protein, 231 aa, Zea mays subsp. mays; identical to SEQ ID NO: 327
  misc_feature (1)..(231): Ceres Seq. ID no. 16625618

SEQ ID NO: 330 - DNA, 901 bp, Zea mays subsp. mays
  misc_feature (1)..(901): Ceres Seq. ID no. 15179570
gtattagaaaaagatttgaacatgagtgagcatcatcattttgcgtttgtgcacggtgcagggcatggaggatggtgttggtacaagctcgccaattcactgagagagaatggacataaggccacctgcatcgacctcaagggcgctgggatcaacctaactgatccaaacactgtctcctctcttgatgactacaaccagcctctctatgacttcctctcccaacttcccctcgaccaaaaggtcattctggtgagccacagcgttggaggagggagcatgacggctgccatgtgccagtatccttccaaagtctccatggctgtttacgtcgcagcagccatggtcaaacctggtaccataattcccccaattctcaaggaagtactaaagatatgttcagggatgatagagacggaagctgagaagatatgggacttcacttttggaaatggacccgagaatctccccacaagtatgatgatgaaacctgagtatgtccgggacaagtattacaacgagagccccatggaggattacacactggctaccacacttctgcgtccagcccctgtcatggcatttgcaggcatagtggatatccctgcagcaccagaggctgacaaaatcccaagggtctacattaagacaggcaaggacaatatgttccagtcaagtcgtcaagacttaatggttaccctgtggcctcctgctcaatacttccttcttgaagagagtgatcactctgcatttttctcccaacctgaagctctctacaaaatcctccttgaagcagcctcctctatctctccctgattactctttacacatctatttggaactcctttaactcttatctttttaatagttacttgaataaactggatcatattcatatcat

SEQ ID NO: 331 - protein, 271 aa, Zea mays subsp. mays
  misc_feature (1)..(271): Ceres Seq. ID no. 15179571
VLEKDLNMSEHHHFAFVHGAGHGGWCWYKLANSLRENGHKATCIDLKGAGINLTDPNTVSSLDDYNQPLYDFLSQLPLDQKVILVSHSVGGGSMTAAMCQYPSKVSMAVYVAAAMVKPGTIIPPILKEVLKICSGMIETEAEKIWDFTFGNGPENLPTSMMMKPEYVRDKYYNESPMEDYTLATTLLRPAPVMAFAGIVDIPAAPEADKIPRVYIKTGKDNMFQSSRQDLMVTLWPPAQYFLLEESDHSAFFSQPEALYKILLEAASSISP

SEQ ID NO: 332 - protein, 264 aa, Zea mays subsp. mays
  misc_feature (1)..(264): Ceres Seq. ID no. 15179572
MSEHHHFAFVHGAGHGGWCWYKLANSLRENGHKATCIDLKGAGINLTDPNTVSSLDDYNQPLYDFLSQLPLDQKVILVSHSVGGGSMTAAMCQYPSKVSMAVYVAAAMVKPGTIIPPILKEVLKICSGMIETEAEKIWDFTFGNGPENLPTSMMMKPEYVRDKYYNESPMEDYTLATTLLRPAPVMAFAGIVDIPAAPEADKIPRVYIKTGKDNMFQSSRQDLMVTLWPPAQYFLLEESDHSAFFSQPEALYKILLEAASSISP

SEQ ID NO: 333 - protein, 178 aa, Zea mays subsp. mays
  misc_feature (1)..(178): Ceres Seq. ID no. 15179573
MTAAMCQYPSKVSMAVYVAAAMVKPGTIIPPILKEVLKICSGMIETEAEKIWDFTFGNGPENLPTSMMMKPEYVRDKYYNESPMEDYTLATTLLRPAPVMAFAGIVDIPAAPEADKIPRVYIKTGKDNMFQSSRQDLMVTLWPPAQYFLLEESDHSAFFSQPEALYKILLEAASSISP

SEQ ID NO: 334 - protein, 264 aa, Zea mays subsp. mays; identical to SEQ ID NO: 332
  misc_feature (1)..(264): Ceres Seq. ID no. 16625619

SEQ ID NO: 335 - DNA, 1524 bp, Zea mays subsp. mays
  misc_feature (1)..(1524): Ceres Seq. ID no. 15179661
tttctactctcggatgatgctgacctgtcatcctctccaaaggagaaacctgctgctagatcttccttgactcaaagggctgatcgtgaggtgacgcaatcaacagtaaagaggaaggcaccaacaagtcaacctgcacgcttgtcaaatggatatggacctaagaacacaatgtcaactcaaaggcatgctgaaggtaaggtaaattccatgagaagggaggatttctcgaatacagaaagagttgtttcacgtgacaatgagaggatgtatgaaagggttgtttcacgtgataatgagaggatgcatagtattgcaagaaatggatccaaccaggcaagtactagcaaaaccacaatccaaaagcatccaagcaggggtcccattgttaataagcaaccttccaaggattcgaatgatgcaactctgaggaagagcagtgtagcctcaaagcaccatcccttagagattgacagaccaaaatcctcgcaaagtcagaggatgcagtcagctggtcagagaccgcaacattcttcccatggtcagacgccacatcaatccatgcagcataggacgcagcagtcattgcagagtcggaggccacagcaaatgacacagggtcagaagccacaacagtctttgcagagtcaaaggactcaacagtccttgcagaatcgaaggccacagcagtcctcacatagtcagaaatcgcaatcctcacaagcacacagaccacagtcattaagtaacaggtctcaggctgtacaaggacaaaggactctttcttcacagggtcaatattcggagcaaagaagagtacatgcaagtgacagagtcaaacaagctgaaaggcagattcggcctccttccaagtccatgccatcacggccagccccttccaatggaattcgtgatgatcatgcaaaaagaaagcaagtggcaaaaagaagatttgatgaagatgaagatgatgaagaccccttagcaatgatcagaaatatgtttgggtatgatcctagtagatatgcaggcagagatgaagatgtcagtgacatggaagccgattttgctactatagaaatggaagagaaaaggagcgcgaggattgctaggcaggaggatgaagaacaacttcgcttgattgaggaagaagagagacgcgagcaggagagaaagaggcgaaagatggcacgaggccgatagccaaatacactcctatttggatgttataatatactaccttcgttctcgaataattgtcgtccgctagttcatttttgaactaaaccgtgacaaataaaaaagaacacaaggagtgactggcaggcctgattgcctgaatacaaagccccatggcggatcagacaggcacttctcttgcagtcctgtttacccttaccacgatgattatctggaggcaaatctagggaaaacgacaggtgagcaacgctgggcacgtgtaacagcagaatgtagttgtagtggtttagttctcgaagctgacatggacaatatttaagttct

SEQ ID NO: 336 - protein, 400 aa, Zea mays subsp. mays
  misc_feature (1)..(400): Ceres Seq. ID no. 15179662
FLLSDDADLSSSPKEKPAARSSLTQRADREVTQSTVKRKAPTSQPARLSNGYGPKNTMSTQRHAEGKVNSMRREDFSNTERVVSRDNERMYERVVSRDNERMHSIARNGSNQASTSKTTIQKHPSRGPIVNKQPSKDSNDATLRKSSVASKHHPLEIDRPKSSQSQRMQSAGQRPQHSSHGQTPHQSMQHRTQQSLQSRRPQQMTQGQKPQQSLQSQRTQQSLQNRRPQQSSHSQKSQSSQAHRPQSLSNRSQAVQGQRTLSSQGQYSEQRRVHASDRVKQAERQIRPPSKSMPSRPAPSNGIRDDHAKRKQVAKRRFDEDEDDEDPLAMIRNMFGYDPSRYAGRDEDVSDMEADFATIEMEEKRSARIARQEDEEQLRLIEEEERREQERKRRKMARGR

SEQ ID NO: 337 - protein, 343 aa, Zea mays subsp. mays
  misc_feature (1)..(343): Ceres Seq. ID no. 15179663
MSTQRHAEGKVNSMRREDFSNTERVVSRDNERMYERVVSRDNERMHSIARNGSNQASTSKTTIQKHPSRGPIVNKQPSKDSNDATLRKSSVASKHHPLEIDRPKSSQSQRMQSAGQRPQHSSHGQTPHQSMQHRTQQSLQSRRPQQMTQGQKPQQSLQSQRTQQSLQNRRPQQSSHSQKSQSSQAHRPQSLSNRSQAVQGQRTLSSQGQYSEQRRVHASDRVKQAERQIRPPSKSMPSRPAPSNGIRDDHAKRKQVAKRRFDEDEDDEDPLAMIRNMFGYDPSRYAGRDEDVSDMEADFATIEMEEKRSARIARQEDEEQLRLIEEEERREQERKRRKMARGR

SEQ ID NO: 338 - protein, 330 aa, Zea mays subsp. mays
  misc_feature (1)..(330): Ceres Seq. ID no. 15179664
MRREDFSNTERVVSRDNERMYERVVSRDNERMHSIARNGSNQASTSKTTIQKHPSRGPIVNKQPSKDSNDATLRKSSVASKHHPLEIDRPKSSQSQRMQSAGQRPQHSSHGQTPHQSMQHRTQQSLQSRRPQQMTQGQKPQQSLQSQRTQQSLQNRRPQQSSHSQKSQSSQAHRPQSLSNRSQAVQGQRTLSSQGQYSEQRRVHASDRVKQAERQIRPPSKSMPSRPAPSNGIRDDHAKRKQVAKRRFDEDEDDEDPLAMIRNMFGYDPSRYAGRDEDVSDMEADFATIEMEEKRSARIARQEDEEQLRLIEEEERREQERKRRKMARGR

SEQ ID NO: 339 - protein, 343 aa, Zea mays subsp. mays; identical to SEQ ID NO: 337
  misc_feature (1)..(343): Ceres Seq. ID no. 16625621

SEQ ID NO: 340 - DNA, 715 bp, Zea mays subsp. mays
  misc_feature (1)..(715): Ceres Seq. ID no. 15179934
tcaccccaagcagcaagcacccgagcggccagctccagccccaccagagaaatacggcgtaaacgccgccggggaccaacccaggcgaccggggtgcctagctcgccgtttcttttcgccttctcctcgcaatttcttaggatcaacgccctactacacgacgggggttttccccttcggccgccactccgtcctttcgcagcctgccgccggcgccatgctgtacatcgtgggcctcggcctgggcgacgagcgcgacatcactgtgcgggggctcgatgccgtacgcagctgctccaagatatacatggaggcatacacatccctcctttccctcggcctcgacccggccgcgctcgccaacctggagaagctgtacgggaaggagataacggtcgccgatcgggagatggtggaggagcgtgtcgaccaggtgctaagcgaggctgccgacactgacgtcgccttccttgttgttggcgacccgttcgggtagtttattctctcccgttttttgagtcagcagtgtgaaggtgtctgtagctggcataagttccgggcatgcttgacggaactcagtgtgctgttcttgagttggtggccatgtcattagagtacaagtggcggagtacatactttctgttgcggagatgttcttggatagacttgctcatgaattcgactaaatttgttagttgtgctttgattgaccatc

SEQ ID NO: 341 - protein, 164 aa, Zea mays subsp. mays
  misc_feature (1)..(164): Ceres Seq. ID no. 15179935
HPKQQAPERPAPAPPEKYGVNAAGDQPRRPGCLARRFFSPSPRNFLGSTPYYTTGVFPFGRHSVLSQPAAGAMLYIVGLGLGDERDITVRGLDAVRSCSKIYMEAYTSLLSLGLDPAALANLEKLYGKEITVADREMVEERVDQVLSEAADTDVAFLVVGDPFG

SEQ ID NO: 342 - protein, 152 aa, Zea mays subsp. mays
  misc_feature (1)..(152): Ceres Seq. ID no. 15179936
SPQAASTRAASSSPTREIRRKRRRGPTQATGVPSSPFLFAFSSQFLRINALLHDGGFPLRPPLRPFAACRRRHAVHRGPRPGRRARHHCAGARCRTQLLQDIHGGIHIPPFPRPRPGRARQPGEAVREGDNGRRSGDGGGACRPGAKRGCRH

SEQ ID NO: 343 - protein, 92 aa, Zea mays subsp. mays
  misc_feature (1)..(92): Ceres Seq. ID no. 15179937
MLYIVGLGLGDERDITVRGLDAVRSCSKIYMEAYTSLLSLGLDPAALANLEKLYGKEITVADREMVEERVDQVLSEAADTDVAFLVVGDPFG

SEQ ID NO: 344 - protein, 92 aa, Zea mays subsp. mays; identical to SEQ ID NO: 343
  misc_feature (1)..(92): Ceres Seq. ID no. 16625629

SEQ ID NO: 345 - DNA, 1378 bp, Zea mays subsp. mays
  misc_feature (1)..(1378): Ceres Seq. ID no. 15180141
acggcacgatggcctccgccgaaatccccaactccagccccgacgccaccaaccccgcccccgccgccgccgccgccgccgccaccggccccgacctctcctcttcgccgccgccgctcccgccgcgcaagcgccgcctttcgccttccccaccaccaacgcggtccgcgtcacgctctcggtccccccgctcccgctccccgcacggccgacgctcgcgcagccggagccgcagcccgcagcagtacccgaccgatggcaagcggcaacggcacaatggccttaccgtggatgcgtgccgcgatttcctgcgcgacaggtgcacccgctccgacctcgagtgcagatacgcgcaccctcacaactccgtttccatcgacctggacaataaggtgactgcgtgtgcggattctctgaggaacaattgcttccgggggatgacatgccgttactaccatccgcctccacatatccaggagcaattactgagatcagttggtgtggaagacccaaaggtgaagacgatctgcagagattttacacgtgggaagtgttcaagatcagcaaatgagtgccgattcttgcaccattcatctgttgaagatgttgcaattgtttgccaagacttcttgcgtggacagtgcaatcgcatagcatgtaggtactctcatgtagtagcacatccgatgccaccaatgaaccatgttcccatgccataccctgagatgctttacatgccaccaccaccaccaccaccccttggagtaccaatgatggggcctctgccttcacctcctataccatttgctgataatacgaacagagttgaagtttgtagggacttcttgaagaacatgtgcaatagagaatcctgccggtttgtgcaccctgagacacatacaacagcggtgaacgccaatgttgaagtatgccgtgattttaaacgaggagaatgcaatcgatctgcctgtcgctttttccatccacatacaagctgaagttttctgttgcctaaacttgagtgccctgcgccgctgctgctgctgctgccgccgccgccgcagccaccaattctgcttctgccaccaaagagctgctgcgctggctgttgtgttgctaaggtgccatagagcatggaagccgtagaaggtgctacgtaggcatggaataaaagatactatcgtcctgttacattcagatggttgcttgaacttgcttgactcaatgcttgagtggtacctcttcactatggggtctctctctcccccccctgtgtgtggttatgtatttgttgtcataaagatgattttgactccagctaatctggtgtctgcgctattggcttccctttagcgccacacgtttgttgtatggataa

SEQ ID NO: 346 - protein, 331 aa, Zea mays subsp. mays
  misc_feature (1)..(331): Ceres Seq. ID no. 15180142
GTMASAEIPNSSPDATNPAPAAAAAAATGPDLSSSPPPLPPRKRRLSPSPPPTRSASRSRSPRSRSPHGRRSRSRSRSPQQYPTDGKRQRHNGLTVDACRDFLRDRCTRSDLECRYAHPHNSVSIDLDNKVTACADSLRNNCFRGMTCRYYHPPPHIQEQLLRSVGVEDPKVKTICRDFTRGKCSRSANECRFLHHSSVEDVAIVCQDFLRGQCNRIACRYSHVVAHPMPPMNHVPMPYPEMLYMPPPPPPPLGVPMMGPLPSPPIPFADNTNRVEVCRDFLKNMCNRESCRFVHPETHTTAVNANVEVCRDFKRGECNRSACRFFHPHTS

SEQ ID NO: 347 - protein, 329 aa, Zea mays subsp. mays
  misc_feature (1)..(329): Ceres Seq. ID no. 15180143
MASAEIPNSSPDATNPAPAAAAAAATGPDLSSSPPPLPPRKRRLSPSPPPTRSASRSRSPRSRSPHGRRSRSRSRSPQQYPTDGKRQRHNGLTVDACRDFLRDRCTRSDLECRYAHPHNSVSIDLDNKVTACADSLRNNCFRGMTCRYYHPPPHIQEQLLRSVGVEDPKVKTICRDFTRGKCSRSANECRFLHHSSVEDVAIVCQDFLRGQCNRIACRYSHVVAHPMPPMNHVPMPYPEMLYMPPPPPPPLGVPMMGPLPSPPIPFADNTNRVEVCRDFLKNMCNRESCRFVHPETHTTAVNANVEVCRDFKRGECNRSACRFFHPHTS

SEQ ID NO: 348 - protein, 186 aa, Zea mays subsp. mays
  misc_feature (1)..(186): Ceres Seq. ID no. 15180144
MTCRYYHPPPHIQEQLLRSVGVEDPKVKTICRDFTRGKCSRSANECRFLHHSSVEDVAIVCQDFLRGQCNRIACRYSHVVAHPMPPMNHVPMPYPEMLYMPPPPPPPLGVPMMGPLPSPPIPFADNTNRVEVCRDFLKNMCNRESCRFVHPETHTTAVNANVEVCRDFKRGECNRSACRFFHPHTS

SEQ ID NO: 349 - protein, 186 aa, Zea mays subsp. mays; identical to SEQ ID NO: 348
  misc_feature (1)..(186): Ceres Seq. ID no. 16625630

SEQ ID NO: 350 - DNA, 2788 bp, Zea mays subsp. mays
  misc_feature (1)..(2788): Ceres Seq. ID no. 15180188
caacaagggagaaggggaaaccaccaccaccaccacacttgataagaagggggccgcacgcgcctgcccgctcccgccgctacgccatggacgcctgggaggccaccaaggcggtgttcgaccgggtgcgggcgctggacccggacaacgcgtccaagatcatgggcctgctgctcatccaggacaacagcgacaaggagctcatccgcctcgccttcggccccgaccacctcctccacgccttcgtctccgccgcgcgcgccgacctcgccgccaagcccgcgtccccgccgtcgcccgtgctgggcccgctccaccagacctggggagcgccgccgcacccgagccctaccgctggctccgaccaccaacaccaggcccccttcgccgccgacctcgcgctcggctacgacttcgacggcgccggcgccggcgctgacgcgttcttccccgacgactacgactgctggtcaccggccggcgccgcccaccgccgcagcttctcgctcagcgacgccgaggccaccgccgccgccgccggaggcgctgcgtggaggccatgcatgtacttcgcgcgcgggttctgcaagaacggctcctcctgccgcttcctccacggctttccggaggacgatgacgccgccgcggagcgcgagatggtcgtcatgcgcgccaaagcccttgccgccgccgccgcgcgcccccagcagcagcagcagctcatggcgtccgcgtttcccttctcgccgtcgccgcccaagggcgtcaacctcaacttcctgctccaccagcaccagcagcagaacgagccgcaaagggcggcggcggcggcggccatgctgctccagggcggcgacgacatgcacagcaggttcccggtgcggtcgccccggatggaccgcggcgagctcatgtccagccccgccgcgcggcagatctacctcaccttcccggccgactccaccttcagcgaggaggacgtctccatctacttcagcatgtacgggccggtgcaggacgtgcgcatcccgtaccagcagaagcgcatgttcggcttcgtcaccttcgtctacgccgagacggtgaagatcatcctcagcaagggcaacccgcacttcgtttgcgacgctcgcgtgctcgtcaagccctacaaggagaagggcaaggtccccgacaggttcaggaagctgcagcacccgcaccacggcgacttcgccggctgcacgtcgcccaccggactgctggattccagggaccccttcgacctgcagcaaccgcagattggacctaggatgatgtacgggaacgttgctggccacgaagcattcctgaggaggaaactggaagagcagcagcaggcggccgagctgcagcaggccatcgagctggaggggcgccgcttcatggtgctgcacctcctcgacctcaagagcaggggccaccaccacctcggctcctcccccgcggccatggccaccaccactctggggcaaggcgacgacggctgcaaaggccgcagcgccaacgggaatgacaatgccgtcgccttccatttggaggatgccaacatccaagatactcctaccaagatgaacagtaacagccttgcaatgagtggtgggcctgcagccggtgcaggaggcgagcacgaggagcagcagcaggatggggacggggatggcagtcccaagcaggcagtcaaccctgggaaagaggagaagacggaatctggtcctgtcacagccacgcccattgttgcctgtggattccaagaaagtggcgtggtggagcacatcttgcctgacagcccctttgcgtcccccagcaaggcctccactcaaaatgggagcatcatcagcaatgcgggttggtccctcttccccccgcctgcatccaccatggagctgcccccgtacagctcttgcttcttccaggcgcccaggttttctcctgggcatgaagccattgggctgtgaatacagagcaaggggagggagggggtctactttcctctaatctgtgaggactatcggtgaccccgtcaagtggaggcaagagttaggaagctttgattaacaaatactaggtgtatgttcagagagagggacagcaacaacatcaaccaaaaagagagagagagagacaaagacaagtctaggttgttttagctctaggccctaagtatatgatgatagcagtcgtataaataacagtgttttagtaagtatctcctgccgggtatgaagactcaagaacaaaggtcagatctcgcgtatgctcgtttgtagcagtgtggatctgatacaggtaattgaaacctttagatggtggtagggctagtagtgagcagtagacgacaactagtcctggcagccagttgtagtgaggtgacatggctgcatacagacatccaaccaaaggaaacagagggtgtggtgtggaaagaaggggagagtggacaaaagccagacatggctggcgctgctgctgcataggcacaggcacaggcacagggaaaggtgatgagacgagaggggtggggtggtactctgctgggaccggcgcactcacgggtgcggagaatcagcttcgcctcacgagcgatgcagcagcggagacacagacacctctcgtctgcgtactgtttcgcccatgctcttgtcttgtacgcatgcagcagcgctccttgtcctttggctccatcgatgtattacctggctcttcttttcaactaggagtttagcggacaaagaaatgaaaaagtaattagcagtcatttatcttggtc

SEQ ID NO: 351 - protein, 657 aa, Zea mays subsp. mays
  misc_feature (1)..(657): Ceres Seq. ID no. 15180189
TREKGKPPPPPHLIRRGPHAPARSRRYAMDAWEATKAVFDRVRALDPDNASKIMGLLLIQDNSDKELIRLAFGPDHLLHAFVSAARADLAAKPASPPSPVLGPLHQTWGAPPHPSPTAGSDHQHQAPFAADLALGYDFDGAGAGADAFFPDDYDCWSPAGAAHRRSFSLSDAEATAAAAGGAAWRPCMYFARGFCKNGSSCRFLHGFPEDDDAAAEREMVVMRAKALAAAAARPQQQQQLMASAFPFSPSPPKGVNLNFLLHQHQQQNEPQRAAAAAAMLLQGGDDMHSRFPVRSPRMDRGELMSSPAARQIYLTFPADSTFSEEDVSIYFSMYGPVQDVRIPYQQKRMFGFVTFVYAETVKIILSKGNPHFVCDARVLVKPYKEKGKVPDRFRKLQHPHHGDFAGCTSPTGLLDSRDPFDLQQPQIGPRMMYGNVAGHEAFLRRKLEEQQQAAELQQAIELEGRRFMVLHLLDLKSRGHHHLGSSPAAMATTTLGQGDDGCKGRSANGNDNAVAFHLEDANIQDTPTKMNSNSLAMSGGPAAGAGGEHEEQQQDGDGDGSPKQAVNPGKEEKTESGPVTATPIVACGFQESGVVEHILPDSPFASPSKASTQNGSIISNAGWSLFPPPASTMELPPYSSCFFQAPRFSPGHEAIGL

SEQ ID NO: 352 - protein, 629 aa, Zea mays subsp. mays
  misc_feature (1)..(629): Ceres Seq. ID no. 15180190
MDAWEATKAVFDRVRALDPDNASKIMGLLLIQDNSDKELIRLAFGPDHLLHAFVSAARADLAAKPASPPSPVLGPLHQTWGAPPHPSPTAGSDHQHQAPFAADLALGYDFDGAGAGADAFFPDDYDCWSPAGAAHRRSFSLSDAEATAAAAGGAAWRPCMYFARGFCKNGSSCRFLHGFPEDDDAAAEREMVVMRAKALAAAAARPQQQQQLMASAFPFSPSPPKGVNLNFLLHQHQQQNEPQRAAAAAAMLLQGGDDMHSRFPVRSPRMDRGELMSSPAARQIYLTFPADSTFSEEDVSIYFSMYGPVQDVRIPYQQKRMFGFVTFVYAETVKIILSKGNPHFVCDARVLVKPYKEKGKVPDRFRKLQHPHHGDFAGCTSPTGLLDSRDPFDLQQPQIGPRMMYGNVAGHEAFLRRKLEEQQQAAELQQAIELEGRRFMVLHLLDLKSRGHHHLGSSPAAMATTTLGQGDDGCKGRSANGNDNAVAFHLEDANIQDTPTKMNSNSLAMSGGPAAGAGGEHEEQQQDGDGDGSPKQAVNPGKEEKTESGPVTATPIVACGFQESGVVEHILPDSPFASPSKASTQNGSIISNAGWSLFPPPASTMELPPYSSCFFQAPRFSPGHEAIGL

SEQ ID NO: 353 - protein, 604 aa, Zea mays subsp. mays
  misc_feature (1)..(604): Ceres Seq. ID no. 15180191
MGLLLIQDNSDKELIRLAFGPDHLLHAFVSAARADLAAKPASPPSPVLGPLHQTWGAPPHPSPTAGSDHQHQAPFAADLALGYDFDGAGAGADAFFPDDYDCWSPAGAAHRRSFSLSDAEATAAAAGGAAWRPCMYFARGFCKNGSSCRFLHGFPEDDDAAAEREMVVMRAKALAAAAARPQQQQQLMASAFPFSPSPPKGVNLNFLLHQHQQQNEPQRAAAAAAMLLQGGDDMHSRFPVRSPRMDRGELMSSPAARQIYLTFPADSTFSEEDVSIYFSMYGPVQDVRIPYQQKRMFGFVTFVYAETVKIILSKGNPHFVCDARVLVKPYKEKGKVPDRFRKLQHPHHGDFAGCTSPTGLLDSRDPFDLQQPQIGPRMMYGNVAGHEAFLRRKLEEQQQAAELQQAIELEGRRFMVLHLLDLKSRGHHHLGSSPAAMATTTLGQGDDGCKGRSANGNDNAVAFHLEDANIQDTPTKMNSNSLAMSGGPAAGAGGEHEEQQQDGDGDGSPKQAVNPGKEEKTESGPVTATPIVACGFQESGVVEHILPDSPFASPSKASTQNGSIISNAGWSLFPPPASTMELPPYSSCFFQAPRFSPGHEAIGL

SEQ ID NO: 354 - protein, 629 aa, Zea mays subsp. mays; identical to SEQ ID NO: 352
  misc_feature (1)..(629): Ceres Seq. ID no. 16625631

SEQ ID NO: 355 - DNA, 1256 bp, Zea mays subsp. mays
  misc_feature (1)..(1256): Ceres Seq. ID no. 15180241
agcttcttctccccgtcgagctcgagctcccggtggcgcgccgccgagcccctttcccacgctcgccctgtccgttcccccctccacgcctgcagggcgcttgcatcggcactctctggtcctcgcgccgcctcctggagtcggtcatcgttcggctgccgcccagaagctctccaccgccggcgtcgtcgatgccctccacctcgggcgctcctcctgcaacagctgttatagaagaaagggagaaagaaggtagttttgagatggagtccttcttaattgatgatttccatggcattgatgatgagcctttagcaattgtagaagctcctattcgacatgatcagcaactagctgctattgattgggacacactacatatttttgatagtacagatgaagaaggaaggatagaaatagttgatgataaccaaatgtatgtgctattggggctaagagatgaggatgacgctgccgagaagggtagtgaaacttctgaacaggcagatagtgcacgtgctgctagtggcaatgtctcctttgtcgacaatgacactcttggtgcagccatccctgttaatgatgacataccaggggaaagggtggtggtgcatgatccggataatccttgtatggatattggaactgtgtacccgagcatgcgtgaatttaggttggctatgagacagtttgctataaatgaagagtttgagttgcaaatcgtgaaaaccgacccgagtcgatttattggtgattgcaaaggggaggattgcccttggcatatcgtgggtcgtaggcaacccgatgggaagactgttatggtgacagtgttacttgatgaacacagttgtacctccagtgctagaagaaagaccactacacctactagtgcctgggtggcatcaaaggctgtccatctgttaaagaattcaaccatgacagtccaattagggtcaccagaagtcgacttgcaatgctattggcagatggtacaacttcacaggaaggtctgccatcagcatcattctcaaacaagatgacacctcctaagaagttgacacctaggaaactgagatgctgatttgtgaaatcagctagtatttgttagtaccatgtatctgagatgtgaactcacctactattagtagcatgtatctgagaagtgaactcagcctttatgtatctgtgaaaatttgatatggctgctagcctttatgtacctgagaactccgcctttatgaacatcaacgttgtgc

SEQ ID NO: 356 - protein, 345 aa, Zea mays subsp. mays
  misc_feature (1)..(345): Ceres Seq. ID no. 15180242
LLLPVELELPVARRRAPFPRSPCPFPPPRLQGACIGTLWSSRRLLESVIVRLPPRSSPPPASSMPSTSGAPPATAVIEEREKEGSFEMESFLIDDFHGIDDEPLAIVEAPIRHDQQLAAIDWDTLHIFDSTDEEGRIEIVDDNQMYVLLGLRDEDDAAEKGSETSEQADSARAASGNVSFVDNDTLGAAIPVNDDIPGERVVVHDPDNPCMDIGTVYPSMREFRLAMRQFAINEEFELQIVKTDPSRFIGDCKGEDCPWHIVGRRQPDGKTVMVTVLLDEHSCTSSARRKTTTPTSAWVASKAVHLLKNSTMTVQLGSPEVDLQCYWQMVQLHRKVCHQHHSQTR

SEQ ID NO: 357 - protein, 282 aa, Zea mays subsp. mays
  misc_feature (1)..(282): Ceres Seq. ID no. 15180243
MPSTSGAPPATAVIEEREKEGSFEMESFLIDDFHGIDDEPLAIVEAPIRHDQQLAAIDWDTLHIFDSTDEEGRIEIVDDNQMYVLLGLRDEDDAAEKGSETSEQADSARAASGNVSFVDNDTLGAAIPVNDDIPGERVVVHDPDNPCMDIGTVYPSMREFRLAMRQFAINEEFELQIVKTDPSRFIGDCKGEDCPWHIVGRRQPDGKTVMVTVLLDEHSCTSSARRKTTTPTSAWVASKAVHLLKNSTMTVQLGSPEVDLQCYWQMVQLHRKVCHQHHSQTR

SEQ ID NO: 358 - protein, 258 aa, Zea mays subsp. mays
  misc_feature (1)..(258): Ceres Seq. ID no. 15180244
MESFLIDDFHGIDDEPLAIVEAPIRHDQQLAAIDWDTLHIFDSTDEEGRIEIVDDNQMYVLLGLRDEDDAAEKGSETSEQADSARAASGNVSFVDNDTLGAAIPVNDDIPGERVVVHDPDNPCMDIGTVYPSMREFRLAMRQFAINEEFELQIVKTDPSRFIGDCKGEDCPWHIVGRRQPDGKTVMVTVLLDEHSCTSSARRKTTTPTSAWVASKAVHLLKNSTMTVQLGSPEVDLQCYWQMVQLHRKVCHQHHSQTR

SEQ ID NO: 359 - protein, 282 aa, Zea mays subsp. mays; identical to SEQ ID NO: 357
  misc_feature (1)..(282): Ceres Seq. ID no. 16625632

SEQ ID NO: 360 - DNA, 1084 bp, Zea mays subsp. mays
  misc_feature (1)..(1084): Ceres Seq. ID no. 15180245
aaaaaaacagttcttcaaacgaggaacaggggcggtccacatctggccgtacccttcccggctccctccgtctccgatatgcaccagcaccacgcctcccgctcccgctccccctgcccctcctcgtccgccgcggcgcgtcccaggaccgaggacttccccgtggacatcgtcagcgacgaggagatggcgctcatcgacgccgcgctcgccgccgccgcggcgggggcgcgcccgctcctctccgcagcggcccgccgcgccgccgtcccgctctcccgtgcggcgtgctcggccaccgacgggctcgccgccggcgacatcgaggacggggtgggcgtgatggcgaccaaggtggggatgatgacctacttcgatccggagacggggaagccggtgccggtgaccgtggtcgggttccgggagggcggcaacgtggtgacgcaggtgaagacggccgccacggacgggtacgacgccgtccaggtcgggtaccacggcgtgcgcgaggacaagctcacccgcccggagctgggccacctgggcaaggccggcgcccctccgttgcgccacctgcaggagttccggctcaccgccgtcgacgccttcgagcccggccagcccctcgacttcgccgacctcttcaaggagggcgacctcatcgacgtctccggcaactccatcggcaaggggttccaaggtggcatcaagaggcacaacttcaagcgcgggctgatgacgcacggttccaagagccaccggcagctgggttccatcggagccgggacgacgccgggccgcgtgtacaaggggaagaagatgcccgggaggatgggaggaaccaagaccaagatcaggaagctcaagatcgtcaagatcgacaacaacctccgggtgctcatgatcaagggggccgtgccagggaagcccgggaacctcctccgcataacgccggccaagatcgtcggcaagaacatccccaagaactagacttcttttttcaggggggtgaatgttgagtgtttgtgtttgttaccctgctacaaactggatgtaatcctttgccaatttccagtttttgaac

SEQ ID NO: 361 - protein, 338 aa, Zea mays subsp. mays
  misc_feature (1)..(338): Ceres Seq. ID no. 15180246
KNSSSNEEQGRSTSGRTLPGSLRLRYAPAPRLPLPLPLPLLVRRGASQDRGLPRGHRQRRGDGAHRRRARRRRGGGAPAPLRSGPPRRRPALPCGVLGHRRARRRRHRGRGGRDGDQGGDDDLLRSGDGEAGAGDRGRVPGGRQRGDAGEDGRHGRVRRRPGRVPRRARGQAHPPGAGPPGQGRRPSVAPPAGVPAHRRRRLRARPAPRLRRPLQGGRPHRRLRQLHRQGVPRWHQEAQLQARADDARFQEPPAAGFHRSRDDAGPRVQGEEDAREDGRNQDQDQEAQDRQDRQQPPGAHDQGGRAREAREPPPHNAGQDRRQEHPQELDFFFQGGEC

SEQ ID NO: 362 - protein, 329 aa, Zea mays subsp. mays
  misc_feature (1)..(329): Ceres Seq. ID no. 15180247
KKTVLQTRNRGGPHLAVPFPAPSVSDMHQHHASRSRSPCPSSSAAARPRTEDFPVDIVSDEEMALIDAALAAAAAGARPLLSAAARRAAVPLSRAACSATDGLAAGDIEDGVGVMATKVGMMTYFDPETGKPVPVTVVGFREGGNVVTQVKTAATDGYDAVQVGYHGVREDKLTRPELGHLGKAGAPPLRHLQEFRLTAVDAFEPGQPLDFADLFKEGDLIDVSGNSIGKGFQGGIKRHNFKRGLMTHGSKSHRQLGSIGAGTTPGRVYKGKKMPGRMGGTKTKIRKLKIVKIDNNLRVLMIKGAVPGKPGNLLRITPAKIVGKNIPKN

SEQ ID NO: 363 - protein, 303 aa, Zea mays subsp. mays
  misc_feature (1)..(303): Ceres Seq. ID no. 15180248
MHQHHASRSRSPCPSSSAAARPRTEDFPVDIVSDEEMALIDAALAAAAAGARPLLSAAARRAAVPLSRAACSATDGLAAGDIEDGVGVMATKVGMMTYFDPETGKPVPVTVVGFREGGNVVTQVKTAATDGYDAVQVGYHGVREDKLTRPELGHLGKAGAPPLRHLQEFRLTAVDAFEPGQPLDFADLFKEGDLIDVSGNSIGKGFQGGIKRHNFKRGLMTHGSKSHRQLGSIGAGTTPGRVYKGKKMPGRMGGTKTKIRKLKIVKIDNNLRVLMIKGAVPGKPGNLLRITPAKIVGKNIPKN

SEQ ID NO: 364 - protein, 215 aa, Zea mays subsp. mays
  misc_feature (1)..(215): Ceres Seq. ID no. 16625633
MATKVGMMTYFDPETGKPVPVTVVGFREGGNVVTQVKTAATDGYDAVQVGYHGVREDKLTRPELGHLGKAGAPPLRHLQEFRLTAVDAFEPGQPLDFADLFKEGDLIDVSGNSIGKGFQGGIKRHNFKRGLMTHGSKSHRQLGSIGAGTTPGRVYKGKKMPGRMGGTKTKIRKLKIVKIDNNLRVLMIKGAVPGKPGNLLRITPAKIVGKNIPKN

SEQ ID NO: 365 - DNA, 1083 bp, Zea mays subsp. mays
  misc_feature (1)..(1083): Ceres Seq. ID no. 15180294
cttcccacccacccccgcgcctgcctgctccccgacaccgggggcgccacggcggcgacagcaagccgggacatggcgcgcggcggcctcgcccgcctgctcgccacgctcatcctcttcctcctgctcgccgccggaccttccctcgccgagtcagaggcggacctcgcgcggggcgcgtccgaggcggcgccggacgcgcagcagcacctcctgccgcgcccgctcgtcatcgagctcccgtcggcgcgggccggggccgagctcgacgccgacgccgacgccgacgccgtggtaacggtcgacgtgcgctgcgccagctggcggctcgcggccgaggccaacaacctcgcgccgtgggcggcggtgccgcccgaatgcgcgccgcacgtgcgggactacgtcaccggctccgcctaccgctccgacctcgacctcgtggcgcgggagtcggccgcctacgcgcgcgccgccgcgccggccggcgccgccgacggacgcgacgcctgggtgttcgacgtcgacgagacgctgctctccaatctcccatactacgccgagcacggctacggggccgagttgttcgaccaccacaagttcgacgagtgggtggaaaggggcgaggcggccgccatcccttccagcttgaagctctacaacgaggtccgcgggctgggattcaagaccttcctgctcacgggcagaagcgaggcgcaccgaggagtcacggtggagaacctcacaaagcaggggttccatgactgggagaagctcatactcagggcagcaggtgaccgcgagaaaacagcgacagtctacaaatcagagaagagggacgaaatggaacaggagggttacaggatcctaggcaactccggcgaccaatggagcgacctgctgggatcttccatgagcgctcgctctttcaagctccctaacccaatgtactatatcccgtgacagaaagaaactggagaacagggcgggtgaaaggtgctctgcgtttactggatgcacattctaccaggccctcggctgatgatggaaaatgaaaaataattttgcaatggaattaaactgtac

SEQ ID NO: 366 - protein, 319 aa, Zea mays subsp. mays
  misc_feature (1)..(319): Ceres Seq. ID no. 15180295
LPTHPRACLLPDTGGATAATASRDMARGGLARLLATLILFLLLAAGPSLAESEADLARGASEAAPDAQQHLLPRPLVIELPSARAGAELDADADADAVVTVDVRCASWRLAAEANNLAPWAAVPPECAPHVRDYVTGSAYRSDLDLVARESAAYARAAAPAGAADGRDAWVFDVDETLLSNLPYYAEHGYGAELFDHHKFDEWVERGEAAAIPSSLKLYNEVRGLGFKTFLLTGRSEAHRGVTVENLTKQGFHDWEKLILRAAGDREKTATVYKSEKRDEMEQEGYRILGNSGDQWSDLLGSSMSARSFKLPNPMYYIP

SEQ ID NO: 367 - protein, 295 aa, Zea mays subsp. mays
  misc_feature (1)..(295): Ceres Seq. ID no. 15180296
MARGGLARLLATLILFLLLAAGPSLAESEADLARGASEAAPDAQQHLLPRPLVIELPSARAGAELDADADADAVVTVDVRCASWRLAAEANNLAPWAAVPPECAPHVRDYVTGSAYRSDLDLVARESAAYARAAAPAGAADGRDAWVFDVDETLLSNLPYYAEHGYGAELFDHHKFDEWVERGEAAAIPSSLKLYNEVRGLGFKTFLLTGRSEAHRGVTVENLTKQGFHDWEKLILRAAGDREKTATVYKSEKRDEMEQEGYRILGNSGDQWSDLLGSSMSARSFKLPNPMYYIP

SEQ ID NO: 368 - protein, 252 aa, Zea mays subsp. mays
  misc_feature (1)..(252): Ceres Seq. ID no. 15180297
SHPPPRLPAPRHRGRHGGDSKPGHGARRPRPPARHAHPLPPARRRTFPRRVRGGPRAGRVRGGAGRAAAPPAAPARHRAPVGAGRGRARRRRRRRRRGNGRRALRQLAARGRGQQPRAVGGGAARMRAARAGLRHRLRLPLRPRPRGAGVGRLRARRRAGRRRRRTRRLGVRRRRDAALQSPILRRARLRGRVVRPPQVRRVGGKGRGGRHPFQLEALQRGPRAGIQDLPAHGQKRGAPRSHGGEPHKAGVP

SEQ ID NO: 369 - protein, 295 aa, Zea mays subsp. mays; identical to SEQ ID NO: 367
  misc_feature (1)..(295): Ceres Seq. ID no. 16625634

SEQ ID NO: 370 - DNA, 1239 bp, Zea mays subsp. mays
  misc_feature (1)..(1239): Ceres Seq. ID no. 15180298
ctctttcctcatcctcatccgagtggctctctccttgtgctgtggcggcggcggcgcccggctctgctcggacggactccaccgaaggcgctcggctcccctcgggctgcacctgcgacggccggccctctgactgcaccgacggtgcccgccccccctcggcatccaccagcggtgcccggctccaagagccagtgtccagcctgccagctcagcccggcgccaaccgcccagcggctggctcgggcagcggccagtggccaacagccgacaaccatacctcgtttcgtcggcgtcctccgccactgcccccaactatgcaccctgttccagtcccctcccagccctttaccgcaactcctgcaaaaaaacttgtttcaaggagcactgctgtgaggaaggccatccattttgtcaacctgcggacagctggaaggtctagtggaaacctggctatgaactccgtaccgaaaccagcacttgggtccgaaacatcttggagggaggattttgctgtgggggataaggatgctgtggtcattgttgatcatgggtcaagacgccaagaatccaatctcatgctaaatgactttgttgagatgttccgggcgaagactagctatagtattgttgaggctgctcatatggagctagcggagcctactataaaggatgcttttggaaaatgtgtgcaacaaggagcatcacgagttattgtcagtccatatttcctttcccctggacgacactggaagcaagacattcctgctttagcagcagaggcatcaaaggagcactcaaatataccctatattgtcactgcccctcttgggctgcatgagcttatggtggatatcatgaatgatcgcatcaagtactgcctgcgacatgttgcgggtgatgtcgatgagtgtacagtgtgtgctggaaccggaaagtgccgcctgtactcctgatggagcatacctgggaggcacatcgatactgttaccatttattatgagatctggagaatacgagatctgaccatattctgagcagatcgtcagaattagacaagtgccaaattagttatgctgtgcatgcttgcgaacatcaataatggtagagattcattagctaatcttgagtttatttacataacgaacaaactcagtcaagtgctctgatatttccattcacatgtaatctatattcctgctaccttgtagttgaatgaattaacatggatcaaatgac

SEQ ID NO: 371 - protein, 317 aa, Zea mays subsp. mays
  misc_feature (1)..(317): Ceres Seq. ID no. 15180299
LSSSSSEWLSPCAVAAAAPGSARTDSTEGARLPSGCTCDGRPSDCTDGARPPSASTSGARLQEPVSSLPAQPGANRPAAGSGSGQWPTADNHTSFRRRPPPLPPTMHPVPVPSQPFTATPAKKLVSRSTAVRKAIHFVNLRTAGRSSGNLAMNSVPKPALGSETSWREDFAVGDKDAVVIVDHGSRRQESNLMLNDFVEMFRAKTSYSIVEAAHMELAEPTIKDAFGKCVQQGASRVIVSPYFLSPGRHWKQDIPALAAEASKEHSNIPYIVTAPLGLHELMVDIMNDRIKYCLRHVAGDVDECTVCAGTGKCRLYS

SEQ ID NO: 372 - protein, 212 aa, Zea mays subsp. mays
  misc_feature (1)..(212): Ceres Seq. ID no. 15180300
MHPVPVPSQPFTATPAKKLVSRSTAVRKAIHFVNLRTAGRSSGNLAMNSVPKPALGSETSWREDFAVGDKDAVVIVDHGSRRQESNLMLNDFVEMFRAKTSYSIVEAAHMELAEPTIKDAFGKCVQQGASRVIVSPYFLSPGRHWKQDIPALAAEASKEHSNIPYIVTAPLGLHELMVDIMNDRIKYCLRHVAGDVDECTVCAGTGKCRLYS

SEQ ID NO: 373 - protein, 166 aa, Zea mays subsp. mays
  misc_feature (1)..(166): Ceres Seq. ID no. 15180301
MNSVPKPALGSETSWREDFAVGDKDAVVIVDHGSRRQESNLMLNDFVEMFRAKTSYSIVEAAHMELAEPTIKDAFGKCVQQGASRVIVSPYFLSPGRHWKQDIPALAAEASKEHSNIPYIVTAPLGLHELMVDIMNDRIKYCLRHVAGDVDECTVCAGTGKCRLYS

SEQ ID NO: 374 - protein, 212 aa, Zea mays subsp. mays; identical to SEQ ID NO: 372
  misc_feature (1)..(212): Ceres Seq. ID no. 16625635

SEQ ID NO: 375 - DNA, 763 bp, Zea mays subsp. mays
  misc_feature (1)..(763): Ceres Seq. ID no. 15180370
tcttcgcgtttgtccgccagcgcccctccctcgttcgttccacttccacctcctcccacgcatcgcactcgcacccaccgcccgtgatctcccgtgcgcctacatacggcggccagatgagctccgcggcggccgacgtcctcccggcggcgctgccgccgatcaggaccacggcggagcccgtggcctcgtccttgcctccggcggagaagggggcgcaggagcaggaggcggagcccacgacgccgacgtcggaggagaaccggcttcgggcgccggccgagtgccctccggcgccgcggaagccggcgtgggcgcctccgcggccgccggcggtgccaccaacgcccgccaagcgcaggctcccgtcttccgctgcgccgtcggcgtcggcgcgccgcgccttcttccccgtcgcccgcgacctcgccgccgtgttccgcgccctgccgcccaagaagcggatccgcgcgggctacggccagttgcgtgccttgcgggcacggcgacctcaccggcatggtggtacagactacagagtacagacctttcgtagaaatggtgtgttggttgattatttacttgccctatgcttcttcttcttttttttttagtgtggttgtgtgcgtgtgtgtgtgtggaatagaaactgtagaattgggaattgttcttatttacaggggggtgatgaattggggggcgagaagaaatggaaagcatgtaagagagttcgcagagatctgttcattactacattcgttat

SEQ ID NO: 376 - protein, 203 aa, Zea mays subsp. mays
  misc_feature (1)..(203): Ceres Seq. ID no. 15180371
FAFVRQRPSLVRSTSTSSHASHSHPPPVISRAPTYGGQMSSAAADVLPAALPPIRTTAEPVASSLPPAEKGAQEQEAEPTTPTSEENRLRAPAECPPAPRKPAWAPPRPPAVPPTPAKRRLPSSAAPSASARRAFFPVARDLAAVFRALPPKKRIRAGYGQLRALRARRPHRHGGTDYRVQTFRRNGVLVDYLLALCFFFFFF

SEQ ID NO: 377 - protein, 184 aa, Zea mays subsp. mays
  misc_feature (1)..(184): Ceres Seq. ID no. 15180372
LRVCPPAPLPRSFHFHLLPRIALAPTARDLPCAYIRRPDELRGGRRPPGGAAADQDHGGARGLVLASGGEGGAGAGGGAHDADVGGEPASGAGRVPSGAAEAGVGASAAAGGATNARQAQAPVFRCAVGVGAPRLLPRRPRPRRRVPRPAAQEADPRGLRPVACLAGTATSPAWWYRLQSTDLS

SEQ ID NO: 378 - protein, 165 aa, Zea mays subsp. mays
  misc_feature (1)..(165): Ceres Seq. ID no. 15180373
MSSAAADVLPAALPPIRTTAEPVASSLPPAEKGAQEQEAEPTTPTSEENRLRAPAECPPAPRKPAWAPPRPPAVPPTPAKRRLPSSAAPSASARRAFFPVARDLAAVFRALPPKKRIRAGYGQLRALRARRPHRHGGTDYRVQTFRRNGVLVDYLLALCFFFFFF

SEQ ID NO: 379 - protein, 165 aa, Zea mays subsp. mays; identical to SEQ ID NO: 378
  misc_feature (1)..(165): Ceres Seq. ID no. 16625637

SEQ ID NO: 380 - DNA, 1402 bp, Zea mays subsp. mays
  misc_feature (1)..(1402): Ceres Seq. ID no. 15180436
ccggctcccgcacgccgcctctcagtgagatgttgccatcgctggtgcgcgctcgcagcgcccctctccgccgcctcgtctccacgttctcctcgacgctagccgtattgcctcgcgtcccgcacgtcatcagtagcggcggtaacctcaacctcccgttctccgctcacccctcgccggcccgcgacggcccgagcggtccggctggtggagcccagcgagggataagcttcagcacccgcgcggtggacgccagggacgaggcagcctccagctccgccgcggcggactctgacctctccgcgccttacctctccgtccgcatacgatgccgcaggcacgacgtggaagtactctccgaggcgctcttgagcttcggtgctagctccgtgaccgtggatgacatttccgatgctgaaaatctcgatgaaatctccataacttcattatatgctgatggggaagacgtggactccagtgtaagaagtgccgcgaggtcagctggtgtgaactacagtccagtgtatgaaacctctgtcgggaagcagtgcgattggatagcaactgtgcaggaaacatacgagtcgactgaagtggctgatggcctttgggttgttcctaaatggagaactccccctgatccagaggccacaaacataatcatcgatccaggtttggcttttgggatgggggagcacccgacaactaagctgtgccttctatttctacgagaagttattaaaggtggtgaatgtgtgttggattatggaacaggcacgggagtattggggattgcagctctgaagatgggtgctactcaatcaactgggatagatattgaccctcaagccatagcctctgcttcagaaaacttgttgctgaatggtttacattctaaccaaatgcctgtttatttggtatcaacaaatgcccagccttcatgccttccaagcttcatcgacaaatcagaagagcatcactcaaccaataaccttgacttgaagttatcaagaggaacttatgatgtagttgcagcaaatatccttctaaatcccttactggagctggtcgaggacatagttggttatgcaaaacctggtggaataattgctgtttctggaatattggaggagcaggtgccaaaaatcaaagaagtttactcgaggtatttggacagaatattggtatccgaaatggatgggtgggcctgtcttcagggaaccaggagagtgtagaggaattaagtatttcaccacgttgaagaagggttttgaccttacatgttttgacgattaagagaggactaggtatatacccgtgcgttgcaacaggggacacttgcgcacgcataggtcactatttagtgatgctatcaataatcaactcagcaatcataacaaac

SEQ ID NO: 381 - protein, 410 aa, Zea mays subsp. mays
  misc_feature (1)..(410): Ceres Seq. ID no. 15180437
GSRTPPLSEMLPSLVRARSAPLRRLVSTFSSTLAVLPRVPHVISSGGNLNLPFSAHPSPARDGPSGPAGGAQRGISFSTRAVDARDEAASSSAAADSDLSAPYLSVRIRCRRHDVEVLSEALLSFGASSVTVDDISDAENLDEISITSLYADGEDVDSSVRSAARSAGVNYSPVYETSVGKQCDWIATVQETYESTEVADGLWVVPKWRTPPDPEATNIIIDPGLAFGMGEHPTTKLCLLFLREVIKGGECVLDYGTGTGVLGIAALKMGATQSTGIDIDPQAIASASENLLLNGLHSNQMPVYLVSTNAQPSCLPSFIDKSEEHHSTNNLDLKLSRGTYDVVAANILLNPLLELVEDIVGYAKPGGIIAVSGILEEQVPKIKEVYSRYLDRILVSEMDGWACLQGTRRV

SEQ ID NO: 382 - protein, 401 aa, Zea mays subsp. mays
  misc_feature (1)..(401): Ceres Seq. ID no. 15180438
MLPSLVRARSAPLRRLVSTFSSTLAVLPRVPHVISSGGNLNLPFSAHPSPARDGPSGPAGGAQRGISFSTRAVDARDEAASSSAAADSDLSAPYLSVRIRCRRHDVEVLSEALLSFGASSVTVDDISDAENLDEISITSLYADGEDVDSSVRSAARSAGVNYSPVYETSVGKQCDWIATVQETYESTEVADGLWVVPKWRTPPDPEATNIIIDPGLAFGMGEHPTTKLCLLFLREVIKGGECVLDYGTGTGVLGIAALKMGATQSTGIDIDPQAIASASENLLLNGLHSNQMPVYLVSTNAQPSCLPSFIDKSEEHHSTNNLDLKLSRGTYDVVAANILLNPLLELVEDIVGYAKPGGIIAVSGILEEQVPKIKEVYSRYLDRILVSEMDGWACLQGTRRV

SEQ ID NO: 383 - protein, 401 aa, Zea mays subsp. mays; identical to SEQ ID NO: 382
  misc_feature (1)..(401): Ceres Seq. ID no. 16625639

SEQ ID NO: 384 - DNA, 1784 bp, Zea mays subsp. mays
  misc_feature (1)..(1784): Ceres Seq. ID no. 15180518
actttcccagggagcgtttaattgcctccgcctgcctcgctctcgcttccttcggatgccgctctgcctctgccgcgcccgccagctgcacgcagttcagcaacgcgcgcgccacggcccgcgacgcgatgagcgagaggaggaggcgggcgagcgctgcttccctcgggggtggaggtggcggcggcgttggtggtgttgcgcctgcgcgggccgaggaggacaaggtcgcggcgccgggtaaagcgcctccgccgacggtgtggttcgcgttcaagcggtcgctgcactgccgctccgagccgtcggaggtccacgtgccgcgtgccaaggccggtcccgtcgcgggcgggggcgccggcgcggctgtcggcggcggccacctgtcgtcgatcgtcaccaagcgcgccgcgcggtcggggtgctcgcgctccatcgccaacctccgggacgtcatccacgggagcaagcgccacccggggcagccgcccagctgcagcccgcggtccatcggcagcagcgagttcctcaaccccattgcacacgaggtcgtgctcagcaccaactcccgctgcgagctcaagatcaccggcttcggcggctgcggggggctggcggccgtcggggtggggaccggcgccgcgaacgacgccgacggcgggggcgacggcggcgtcgtgtcgtcgttcgtcggcacgctccgccctggcacgccgggcccagcgtgggccggacacggactgccgtacagcggctccgtgcggggcagcgtgcgctgcacgccgccgaggtcgccgaacgtgatgctcgagaggaatggctcagtggtgaacggccaccgcgcgtcatgcgacgaaaccgctaaaaacggcgccagcaagggctccggtgggctcagctgccacaagtgcggcgagcagttcagcaagtgggaggcgctggaggcgcaccacctctccaaacacgcagtgacggagctggtggaaggggactcgtcgcggaagatcgtggagatcatctgccggacgagcctgctcaagtcggagagcagctgcgtccggatcgagcgcgtgttcaaggtgcacaacacgcagcggacgctgtcccgcttcgaggagtaccgcgaggccgtgaagctcaaggcgagcaagctagccaagaagcacccgcgctgcctcgccgacggcaacgagctgctgcgcttccacggcgccacgctctcgtgcgcgctcggcggcggctccggctcttccagcctctgcgcctccgacaagtgcgccgtgtgccgcatcatccggcacggcttctccgccaggaaggagggcaagggcggcgtgggcgtgttcaccacgtccaccagcggccgcgcgttcgagtccatcgttgaggcgccccccgccatcggcgtcggcgacgacgacggagcgggccagctgggcctgggcaccgcgcgcagggcgctgctggtgtgcagggtcatcgccggccgcgtgcacaagccgctggacaacctcaaggagttcgtggggcagacgggcttcgattcgctcgccggcaaggtcggaccctactccaacatcgaggagctgtacctgctgaacccgagggcgctgctcccgtgcttcgtcgtcatctgtagaccgtagcctactactagctaaacacaccgtctcattcttctctcttcccacttttctctttcgattgctactctagtgtacgtagttaacacggacacggcatagctatcgcctatcggttggaaggtcggatggatttgtcct

SEQ ID NO: 385 - protein, 547 aa, Zea mays subsp. mays
  misc_feature (1)..(547): Ceres Seq. ID no. 15180519
FPRERLIASACLALASFGCRSASAAPASCTQFSNARATARDAMSERRRRASAASLGGGGGGGVGGVAPARAEEDKVAAPGKAPPPTVWFAFKRSLHCRSEPSEVHVPRAKAGPVAGGGAGAAVGGGHLSSIVTKRAARSGCSRSIANLRDVIHGSKRHPGQPPSCSPRSIGSSEFLNPIAHEVVLSTNSRCELKITGFGGCGGLAAVGVGTGAANDADGGGDGGVVSSFVGTLRPGTPGPAWAGHGLPYSGSVRGSVRCTPPRSPNVMLERNGSVVNGHRASCDETAKNGASKGSGGLSCHKCGEQFSKWEALEAHHLSKHAVTELVEGDSSRKIVEIICRTSLLKSESSCVRIERVFKVHNTQRTLSRFEEYREAVKLKASKLAKKHPRCLADGNELLRFHGATLSCALGGGSGSSSLCASDKCAVCRIIRHGFSARKEGKGGVGVFTTSTSGRAFESIVEAPPAIGVGDDDGAGQLGLGTARRALLVCRVIAGRVHKPLDNLKEFVGQTGFDSLAGKVGPYSNIEELYLLNPRALLPCFVVICRP

SEQ ID NO: 386 - protein, 505 aa, Zea mays subsp. mays
  misc_feature (1)..(505): Ceres Seq. ID no. 15180520
MSERRRRASAASLGGGGGGGVGGVAPARAEEDKVAAPGKAPPPTVWFAFKRSLHCRSEPSEVHVPRAKAGPVAGGGAGAAVGGGHLSSIVTKRAARSGCSRSIANLRDVIHGSKRHPGQPPSCSPRSIGSSEFLNPIAHEVVLSTNSRCELKITGFGGCGGLAAVGVGTGAANDADGGGDGGVVSSFVGTLRPGTPGPAWAGHGLPYSGSVRGSVRCTPPRSPNVMLERNGSVVNGHRASCDETAKNGASKGSGGLSCHKCGEQFSKWEALEAHHLSKHAVTELVEGDSSRKIVEIICRTSLLKSESSCVRIERVFKVHNTQRTLSRFEEYREAVKLKASKLAKKHPRCLADGNELLRFHGATLSCALGGGSGSSSLCASDKCAVCRIIRHGFSARKEGKGGVGVFTTSTSGRAFESIVEAPPAIGVGDDDGAGQLGLGTARRALLVCRVIAGRVHKPLDNLKEFVGQTGFDSLAGKVGPYSNIEELYLLNPRALLPCFVVICRP

SEQ ID NO: 387 - protein, 280 aa, Zea mays subsp. mays
  misc_feature (1)..(280): Ceres Seq. ID no. 15180521
MLERNGSVVNGHRASCDETAKNGASKGSGGLSCHKCGEQFSKWEALEAHHLSKHAVTELVEGDSSRKIVEIICRTSLLKSESSCVRIERVFKVHNTQRTLSRFEEYREAVKLKASKLAKKHPRCLADGNELLRFHGATLSCALGGGSGSSSLCASDKCAVCRIIRHGFSARKEGKGGVGVFTTSTSGRAFESIVEAPPAIGVGDDDGAGQLGLGTARRALLVCRVIAGRVHKPLDNLKEFVGQTGFDSLAGKVGPYSNIEELYLLNPRALLPCFVVICRP

SEQ ID NO: 388 - protein, 505 aa, Zea mays subsp. mays; identical to SEQ ID NO: 386
  misc_feature (1)..(505): Ceres Seq. ID no. 16625641

SEQ ID NO: 389 - DNA, 2310 bp, Zea mays subsp. mays
  misc_feature (1)..(2310): Ceres Seq. ID no. 15180650
tcgccgaaaccaaccgccgcagccgccgccgccatggggggttcgcacagccgcgaggacctcgacctatccgactctgactccgaggacgccgagtccccccgggcttccgacaactcctccgactacggcacgcctcccccggcctccgtctcctccaagttagccagcggcgcaggggcggctacccccgcctccatcgacgccatcgaccgccacctccgccagctccacctcaagtacaacgagcccatctccccgaaccctagctccgggcccacccccagcgctaaccccgccgcgctcaacgccgtcaagctctacctccacatcggcggctcctctccctccgccaagtggatcgtctccgaccgcctcgccgccgcctccttcgtgcgcgccggcgccggcgccggcgacggcgacgacgaggatgacgacgcccccgccgccggcgggccgtggtccctcgtcgtgggctcgaagatccgggccagggtcgggcccgagctgcagctcaaggccttccccgcgcagcgccgggtggatttcgtcgccgacggcgtatgggccctcaagttcctgcactccgacggcttcggcgacttctgcgcgaagcaccacagctgtatgtttgagaacagctacggcgtcgccgccacggacgagggccgcgccaaggtattcgggaaggacttcgcggcgtgggcgcgcccggaggacggcgacgagtcgatatgggaggacgccaccgacggcttctccccgggccccaagggcagcccgatgcccccgcggacaccgctactgaaggccgtgctggaggatctgcgggagtttgaggagcccgtcgaggaaggaagtggaatcaagagccttgcgcttggcgcgctggacaacagtttccttgttggagacaagggcattgaggtcgtgaggaatttcgagcatgggatacatggaaagggcatgtccgtgaagttttctggagggagcacaaacttctcgacaccgaaaaaggctcttcttatgcgggccgagaccaacatgcttctgatgagcccagccactgatggaaagccacacgccaagggggtgcatcagttggacattgagacggggaaggtggtttcagaatggaagtttgagaaggatggagcagatattaacatgagggatatcaccaatgatagcaaaggtgctcagctggattcgtctgagtccaccttcttgggactggatgacaaccagttgtgccggtgggatatgagagatcgcaggggcattgtacagaagttggcaagtgcgactgaatcgccagtgttgcagtggactcaggggcatcagttctcccgggggacaaactttcagtgctttgcttcaactggtgatggttcaattgttgttggatcattagatgggaaaattcgcttgtattctaagagctctatgaggatggcaaagacagcctttcctgggttgggttcgcccattacccatgtcgacgtgacatatgatgggaagtggattcttgggacaacagatgcgtacctgattcttgtatgcaccatcttcatcgacaaagatggaaaggagaagactgggtttagtggtagaatggggaaccgtattgctgctccaaggctgctgaagctcaacccactggactctcatctagcaggagcaaacaacaggttcagggagggaagattctcttgggtgacggagaacgggaagcaggagcggcatctagtggcgacggtggggaagtacagcgtggtgtggaacttcctgcaggtgaagaacagccaccacgagtgctaccagtaccaggaggggctgaagagctgctattgctacaaggtgatccccaaggacgagtccatcgtggccagccgcttcatgcacgacaagtactcggtcagcgactccccggaggctccactggtggtggccacgcccatgaaggtcacctccttcagcatatccagcaggcactaactagcctccttgctccgccccgcaacttcgctgccggccgacgcgttccccttggctcctcggcctccggtgatctggtaacattttgttaagcaattgtttgtgcgacggttgcctgttccattgccttctaagttggttcaaattaattagtgatttgctgtgttgagtcgatacgcaacgttgaagaggggatggtagtgtctgttgggttagctacatattgctgaacaatctgatttagctgtgaggaagtggctaatggttgtaagaaagctgaaagttgtttgattaaaataattgttaact

SEQ ID NO: 390 - protein, 666 aa, Zea mays subsp. mays
  misc_feature (1)..(666): Ceres Seq. ID no. 15180651
SPKPTAAAAAAMGGSHSREDLDLSDSDSEDAESPRASDNSSDYGTPPPASVSSKLASGAGAATPASIDAIDRHLRQLHLKYNEPISPNPSSGPTPSANPAALNAVKLYLHIGGSSPSAKWIVSDRLAAASFVRAGAGAGDGDDEDDDAPAAGGPWSLVVGSKIRARVGPELQLKAFPAQRRVDFVADGVWALKFLHSDGFGDFCAKHHSCMFENSYGVAATDEGRAKVFGKDFAAWARPEDGDESIWEDATDGFSPGPKGSPMPPRTPLLKAVLEDLREFEEPVEEGSGIKSLALGALDNSFLVGDKGIEVVRNFEHGIHGKGMSVKFSGGSTNFSTPKKALLMRAETNMLLMSPATDGKPHAKGVHQLDIETGKVVSEWKFEKDGADINMRDITNDSKGAQLDSSESTFLGLDDNQLCRWDMRDRRGIVQKLASATESPVLQWTQGHQFSRGTNFQCFASTGDGSIVVGSLDGKIRLYSKSSMRMAKTAFPGLGSPITHVDVTYDGKWILGTTDAYLILVCTIFIDKDGKEKTGFSGRMGNRIAAPRLLKLNPLDSHLAGANNRFREGRFSWVTENGKQERHLVATVGKYSVVWNFLQVKNSHHECYQYQEGLKSCYCYKVIPKDESIVASRFMHDKYSVSDSPEAPLVVATPMKVTSFSISSRH

SEQ ID NO: 391 - protein, 655 aa, Zea mays subsp. mays
  misc_feature (1)..(655): Ceres Seq. ID no. 15180652
MGGSHSREDLDLSDSDSEDAESPRASDNSSDYGTPPPASVSSKLASGAGAATPASIDAIDRHLRQLHLKYNEPISPNPSSGPTPSANPAALNAVKLYLHIGGSSPSAKWIVSDRLAAASFVRAGAGAGDGDDEDDDAPAAGGPWSLVVGSKIRARVGPELQLKAFPAQRRVDFVADGVWALKFLHSDGFGDFCAKHHSCMFENSYGVAATDEGRAKVFGKDFAAWARPEDGDESIWEDATDGFSPGPKGSPMPPRTPLLKAVLEDLREFEEPVEEGSGIKSLALGALDNSFLVGDKGIEVVRNFEHGIHGKGMSVKFSGGSTNFSTPKKALLMRAETNMLLMSPATDGKPHAKGVHQLDIETGKVVSEWKFEKDGADINMRDITNDSKGAQLDSSESTFLGLDDNQLCRWDMRDRRGIVQKLASATESPVLQWTQGHQFSRGTNFQCFASTGDGSIVVGSLDGKIRLYSKSSMRMAKTAFPGLGSPITHVDVTYDGKWILGTTDAYLILVCTIFIDKDGKEKTGFSGRMGNRIAAPRLLKLNPLDSHLAGANNRFREGRFSWVTENGKQERHLVATVGKYSVVWNFLQVKNSHHECYQYQEGLKSCYCYKVIPKDESIVASRFMHDKYSVSDSPEAPLVVATPMKVTSFSISSRH

SEQ ID NO: 392 - protein, 456 aa, Zea mays subsp. mays
  misc_feature (1)..(456): Ceres Seq. ID no. 15180653
MFENSYGVAATDEGRAKVFGKDFAAWARPEDGDESIWEDATDGFSPGPKGSPMPPRTPLLKAVLEDLREFEEPVEEGSGIKSLALGALDNSFLVGDKGIEVVRNFEHGIHGKGMSVKFSGGSTNFSTPKKALLMRAETNMLLMSPATDGKPHAKGVHQLDIETGKVVSEWKFEKDGADINMRDITNDSKGAQLDSSESTFLGLDDNQLCRWDMRDRRGIVQKLASATESPVLQWTQGHQFSRGTNFQCFASTGDGSIVVGSLDGKIRLYSKSSMRMAKTAFPGLGSPITHVDVTYDGKWILGTTDAYLILVCTIFIDKDGKEKTGFSGRMGNRIAAPRLLKLNPLDSHLAGANNRFREGRFSWVTENGKQERHLVATVGKYSVVWNFLQVKNSHHECYQYQEGLKSCYCYKVIPKDESIVASRFMHDKYSVSDSPEAPLVVATPMKVTSFSISSRH

SEQ ID NO: 393 - protein, 655 aa, Zea mays subsp. mays; identical to SEQ ID NO: 391
  misc_feature (1)..(655): Ceres Seq. ID no. 16625642

SEQ ID NO: 394 - DNA, 1212 bp, Zea mays subsp. mays
  misc_feature (1)..(1212): Ceres Seq. ID no. 15180694
ctagaggttgctgttgatgggatctggaagtcatgtccacaatctggtgggcctgttcagtttccaggattcaacggggaattaatttgcccgatgtatcatgagttgtgtactactgtaccagttccaatgattggccaatgtccaaagtcatgcagttttaacggtgactgcattgatggaacctgtcactgctttcctggttttcatggccatgactgcagcagaagatcttgcccagacaagtgcagtaaccatggtacatgcaaagctaatgggatctgtgaatgtcaaagtggatggacagggattgactgctctacagcggtttgcgatgaacaatgtagtttacatggaggggtttgtgataatggtaaatgtgaattccgttgttcagattatgcaggctacacatgtcagaagggttctgcaatactgccaagtctgtcaatgtgtcacgatgtacttgttagagattcagatgggcagcattgtgcgccaagtgaactcagtatactacagcagcttgaaactgtagttctcgtgccaaattacaatagattgatgccaagtgggcggaccttccttaacttcttcaacaatgccaactgtgcagcagctgcaaagcggctagcctgctggatctcaattcaacggtgtgacgaggatggggacaacaggctcagggtatgctactctgcatgcgaattgtacaatacagcttgtggagcgggtctggattgttcagaccagaccctttttagcaaaagggaagaagaagagaagggtgttccgtgcacaggatatggcgagaagaagtctttctggctataacatctctgaagcttcttccgttatggctctggtagaagctcagcgtttgtgtaaagtattttccaccccaaattattttctcttttttccccatttcatccactacttcccaattgtaggatacgggaagtaagcgtccgtttcacctaggcacccgaagatgggctgccctggtgtacaagctatgttggagtgggctctttgttagaaggttagtctgacatgaaaaggggagtggaccggtgagagttggatggtagatttttcgttttcaccgcttcagaattagtgattggaatgaatgtaaagattgatgtgtcttgtacacactctttacagaatcatttcaatgggagcccgtgttgtgttctttgctcg

SEQ ID NO: 395 - protein, 277 aa, Zea mays subsp. mays
  misc_feature (1)..(277): Ceres Seq. ID no. 15180695
LEVAVDGIWKSCPQSGGPVQFPGFNGELICPMYHELCTTVPVPMIGQCPKSCSFNGDCIDGTCHCFPGFHGHDCSRRSCPDKCSNHGTCKANGICECQSGWTGIDCSTAVCDEQCSLHGGVCDNGKCEFRCSDYAGYTCQKGSAILPSLSMCHDVLVRDSDGQHCAPSELSILQQLETVVLVPNYNRLMPSGRTFLNFFNNANCAAAAKRLACWISIQRCDEDGDNRLRVCYSACELYNTACGAGLDCSDQTLFSKREEEEKGVPCTGYGEKKSFWL

SEQ ID NO: 396 - protein, 246 aa, Zea mays subsp. mays
  misc_feature (1)..(246): Ceres Seq. ID no. 15180696
MYHELCTTVPVPMIGQCPKSCSFNGDCIDGTCHCFPGFHGHDCSRRSCPDKCSNHGTCKANGICECQSGWTGIDCSTAVCDEQCSLHGGVCDNGKCEFRCSDYAGYTCQKGSAILPSLSMCHDVLVRDSDGQHCAPSELSILQQLETVVLVPNYNRLMPSGRTFLNFFNNANCAAAAKRLACWISIQRCDEDGDNRLRVCYSACELYNTACGAGLDCSDQTLFSKREEEEKGVPCTGYGEKKSFWL

SEQ ID NO: 397 - protein, 234 aa, Zea mays subsp. mays
  misc_feature (1)..(234): Ceres Seq. ID no. 15180697
MIGQCPKSCSFNGDCIDGTCHCFPGFHGHDCSRRSCPDKCSNHGTCKANGICECQSGWTGIDCSTAVCDEQCSLHGGVCDNGKCEFRCSDYAGYTCQKGSAILPSLSMCHDVLVRDSDGQHCAPSELSILQQLETVVLVPNYNRLMPSGRTFLNFFNNANCAAAAKRLACWISIQRCDEDGDNRLRVCYSACELYNTACGAGLDCSDQTLFSKREEEEKGVPCTGYGEKKSFWL

SEQ ID NO: 398 - protein, 246 aa, Zea mays subsp. mays; identical to SEQ ID NO: 396
  misc_feature (1)..(246): Ceres Seq. ID no. 16625643

SEQ ID NO: 399 - DNA, 2017 bp, Zea mays subsp. mays
  misc_feature (1)..(2017): Ceres Seq. ID no. 15180732
gtcatcttcttcgtttcgtccttcttccgccgcagccgccgtcgccgtcgccgtcgccgcagctaggggttttgccttttttggctatggacgcgacgggacagcaggagcagcatacaggaagtgtaggcggagatctctacggagtgcttctttactacaagtacgccgaggtgcctgacgccgccgcgctcgccgcgttctacgaggcgcactgccgcagccttgcgctcgtcggccgcgtccgcgtcggccccgacggagtaaacgcgacgctcggagggcagatgaacgcgctggagaagcatatcgcggagatgagctccaacgacttgttcgttggcacagatttcaagctggcgtcctgcgacgaccctgtcgacgagagggtcgcccgggagtgcggcttcacctcactctccgttcgggtcgtcaaggagctagttaccctgtgctccaaccccgcattggcacccccagagatttcgagtgctgggagacacttgtctgcggccgagttccattcagtgctccagaatgttgctgggactagtttgaatgctgtggcatctgtggagaagaaggaagtggttgtcttggatgcaaggaatgtatatgagactctgatcggcaagttcaatgtgccaaatgcgaagaccttagatcctgaaattaggcaatacagtgacctgccttcttggatagacaagcatgctgagcagctgcatgggaaatcaattcttatgtactgcacaggaggtatacgctgtgaaatggcatcagcttatattcgctcaaaaggtgaaggatttgagaacgtttttcagctatatggaggcattcagcgatatctggagcaattcccagatggtggctattttgaaggaaagaattttgtatttgaccacagaatatcagtgggaagccttaaggaaaacatactcggtgcatgtttgatatgtggttcttcttttgatgactattcgtcacgctgtcggtgtagccattgcagaatgttggtcttagtgtgcccaacatgtcaggattctactgaggaatatgcatgcgagctgtgccaaaagaatggaaaagaaccgtgccaactatcaacaggacaagactgcaaaatacagagaggactatctgaaagctttgaaaagccatccataagctatcacaatgtgacctccaaagtttcctggagtgatggtagcgagcaaccgaaaaggttgaggatcctctgcttgcatggtttccgccagaacgcatccagttttaagggaagaacgtcagcactttccaagaagctgaagcatatcactgagcttgtctttgtcgacgcgcctcatgagctttcctttgtatatcaaccaatccggggacactgctccgacaaaccctcacctctgtctgttacaccgaaacggaaattcgcatggctcattgctccaaactcccactgcaaccctgaacaaaactggagggctgcagatgtgccgtttgaccctcttcagtaccagcaacaaaccgaaggcttcgaggaatcatacacctatcttgaaaatgcaatctctcacatggggaaatttgatggaatcctgggcttctctcagggcgctgccatggctgccttattctgcaggcagcagcagaagatgtgcggctttccaaagttcaggtttgggatgttctgctctggatatccagcacctgtgggcgattttggcaacgaaccaatcaagctcccctcgctccattgtttcggcaatggggatggtcatgataggcagatagcgaacagggcaagcgctgaacttgctggtttgttcgagcaggattgctgctccgttgttgagcatgatatgggccacataatccccacccggtcgccctacatcgatcggataaaggattttctttccagtttcctgtgaaatgttttgaactgactattgcgttgtaagttggtatacacaagttgggttctgaatggcattgactgtgtttgttggtcact

SEQ ID NO: 400 - protein, 643 aa, Zea mays subsp. mays
  misc_feature (1)..(643): Ceres Seq. ID no. 15180733
HLLRFVLLPPQPPSPSPSPQLGVLPFLAMDATGQQEQHTGSVGGDLYGVLLYYKYAEVPDAAALAAFYEAHCRSLALVGRVRVGPDGVNATLGGQMNALEKHIAEMSSNDLFVGTDFKLASCDDPVDERVARECGFTSLSVRVVKELVTLCSNPALAPPEISSAGRHLSAAEFHSVLQNVAGTSLNAVASVEKKEVVVLDARNVYETLIGKFNVPNAKTLDPEIRQYSDLPSWIDKHAEQLHGKSILMYCTGGIRCEMASAYIRSKGEGFENVFQLYGGIQRYLEQFPDGGYFEGKNFVFDHRISVGSLKENILGACLICGSSFDDYSSRCRCSHCRMLVLVCPTCQDSTEEYACELCQKNGKEPCQLSTGQDCKIQRGLSESFEKPSISYHNVTSKVSWSDGSEQPKRLRILCLHGFRQNASSFKGRTSALSKKLKHITELVFVDAPHELSFVYQPIRGHCSDKPSPLSVTPKRKFAWLIAPNSHCNPEQNWRAADVPFDPLQYQQQTEGFEESYTYLENAISHMGKFDGILGFSQGAAMAALFCRQQQKMCGFPKFRFGMFCSGYPAPVGDFGNEPIKLPSLHCFGNGDGHDRQIANRASAELAGLFEQDCCSVVEHDMGHIIPTRSPYIDRIKDFLSSFL

SEQ ID NO: 401 - protein, 615 aa, Zea mays subsp. mays
  misc_feature (1)..(615): Ceres Seq. ID no. 15180734
MDATGQQEQHTGSVGGDLYGVLLYYKYAEVPDAAALAAFYEAHCRSLALVGRVRVGPDGVNATLGGQMNALEKHIAEMSSNDLFVGTDFKLASCDDPVDERVARECGFTSLSVRVVKELVTLCSNPALAPPEISSAGRHLSAAEFHSVLQNVAGTSLNAVASVEKKEVVVLDARNVYETLIGKFNVPNAKTLDPEIRQYSDLPSWIDKHAEQLHGKSILMYCTGGIRCEMASAYIRSKGEGFENVFQLYGGIQRYLEQFPDGGYFEGKNFVFDHRISVGSLKENILGACLICGSSFDDYSSRCRCSHCRMLVLVCPTCQDSTEEYACELCQKNGKEPCQLSTGQDCKIQRGLSESFEKPSISYHNVTSKVSWSDGSEQPKRLRILCLHGFRQNASSFKGRTSALSKKLKHITELVFVDAPHELSFVYQPIRGHCSDKPSPLSVTPKRKFAWLIAPNSHCNPEQNWRAADVPFDPLQYQQQTEGFEESYTYLENAISHMGKFDGILGFSQGAAMAALFCRQQQKMCGFPKFRFGMFCSGYPAPVGDFGNEPIKLPSLHCFGNGDGHDRQIANRASAELAGLFEQDCCSVVEHDMGHIIPTRSPYIDRIKDFLSSFL

SEQ ID NO: 402 - protein, 548 aa, Zea mays subsp. mays
  misc_feature (1)..(548): Ceres Seq. ID no. 15180735
MNALEKHIAEMSSNDLFVGTDFKLASCDDPVDERVARECGFTSLSVRVVKELVTLCSNPALAPPEISSAGRHLSAAEFHSVLQNVAGTSLNAVASVEKKEVVVLDARNVYETLIGKFNVPNAKTLDPEIRQYSDLPSWIDKHAEQLHGKSILMYCTGGIRCEMASAYIRSKGEGFENVFQLYGGIQRYLEQFPDGGYFEGKNFVFDHRISVGSLKENILGACLICGSSFDDYSSRCRCSHCRMLVLVCPTCQDSTEEYACELCQKNGKEPCQLSTGQDCKIQRGLSESFEKPSISYHNVTSKVSWSDGSEQPKRLRILCLHGFRQNASSFKGRTSALSKKLKHITELVFVDAPHELSFVYQPIRGHCSDKPSPLSVTPKRKFAWLIAPNSHCNPEQNWRAADVPFDPLQYQQQTEGFEESYTYLENAISHMGKFDGILGFSQGAAMAALFCRQQQKMCGFPKFRFGMFCSGYPAPVGDFGNEPIKLPSLHCFGNGDGHDRQIANRASAELAGLFEQDCCSVVEHDMGHIIPTRSPYIDRIKDFLSSFL

SEQ ID NO: 403 - protein, 615 aa, Zea mays subsp. mays; identical to SEQ ID NO: 401
  misc_feature (1)..(615): Ceres Seq. ID no. 16625644

SEQ ID NO: 404 - DNA, 471 bp, Zea mays subsp. mays
  misc_feature (1)..(471): Ceres Seq. ID no. 15224692
ttcacggacctagggttttgctcccgccgccgccgcagccgccgccgacgccgaagccgccgctgcgtcttcgtctccgccgcgacgatgccgtcccacaagaccttccgcatcaagcagaagctggccaagaagcagcgccagaaccgccccatcccctactggatccgcatgcggaccgacaacaccatcaggtacaacgcgaagcgcaggcactggcgccgcaccaagctcgggttctagatccggcccgcccggccgcggcgtggtggagccatggctcaagagttatctgcattttgttttatggacgtttcagtgtttgttatgcaagctaggaagtgattccaggatatgtctctgttatcaatttcgtcgtgttatgaggatattgcttgtactctggtgtactcatgttaccatgctgtgccaagtaaagaacctttgctatatgcaaaaaaaaaaaaaaaa

SEQ ID NO: 405 - protein, 111 aa, Zea mays subsp. mays
  misc_feature (1)..(111): Ceres Seq. ID no. 15224693
HGPRVLLPPPPQPPPTPKPPLRLRLRRDDAVPQDLPHQAEAGQEAAPEPPHPLLDPHADRQHHQVQREAQALAPHQARVLDPARPAAAWWSHGSRVICILFYGRFSVCYAS

SEQ ID NO: 406 - protein, 80 aa, Zea mays subsp. mays
  misc_feature (1)..(80): Ceres Seq. ID no. 15224694
FTDLGFCSRRRRSRRRRRSRRCVFVSAATMPSHKTFRIKQKLAKKQRQNRPIPYWIRMRTDNTIRYNAKRRHWRRTKLGF

SEQ ID NO: 407 - protein, 51 aa, Zea mays subsp. mays
  misc_feature (1)..(51): Ceres Seq. ID no. 16625647
MPSHKTFRIKQKLAKKQRQNRPIPYWIRMRTDNTIRYNAKRRHWRRTKLGF

SEQ ID NO: 408 - DNA, 1917 bp, Zea mays subsp. mays
  misc_feature (1)..(1917): Ceres Seq. ID no. 15224789
aaccacgacatcttggacagcacagcgcagcgcagcgcagcgagctcgatcaccacaccaaccagactcagatcatccagaactcagagcttctacttctagaacagaacatcaagatcagtcctcccctgcagcctccaccggcctcacctagatgagcacctcgtacaccgaggcgcagttcggctccttgttagacctgcccgccggagacgacctcacgtcctggttcacacacctgtgcggcgaggagcaggcggcggcgctgccggcgttccaggcgccggtggcgatggcggaccccaggaagaggagcgccgagtaccagctcctggaaggggaggcgtccggtgtcaagaggcagcgctccccgaccagcagctccagggagaacagcgccggcagcaatgacggcgactacgagcacacgtccgcagccgcagccgcagccgctcccggcggcggtggcggaggcaggggcggcggccgccgcctctgggtcaaggagcgcgaccacgagtggtgggaccggatgagcagccccgcgtgccccgaggacgagttccgccgcgccttccgcatgtcccgggccaccttcgaggccgtgtgcgaggagctgggcgccgccgtcgccaaggaggacaccatgctgcgcgccgccatccccgtccgccagcgcgtggccgtctgcatctggcgcctcgccaccggggagccgctccgcctcgtgtccaagcgcttcggcctcggcatctccacctgccacaagctcgtcctcgaggtctgcgccgccatcaaggccgtgctcatgcccaaggccgtgcagtggcccgaggcgcccgacgccgccgcggccgagtccgccaggttcgaggccgcgtcggggatcccgggcgtcgtgggcgccatgtacaccacgcacatccccatcatcgcgcccaaggccaacgtcgccgcctactacaaccgccgccacacggagcgcaaccagaagacgtcctactccatcacggtgcagggcgtggtggacgcgggcggtgccttcacggacgtctgcatcggctggccgggctccatgtccgacgccgacgtgctcgaccgctccgcgctctacctgcagcgaggcgccgcgggcctgctgcaggggcagcgcctggtgggcggcgccgggtacccgctcatggactggctgctggtgccctacacgcaccacaacatgacgtgggcgcagcacgtgttcaacgagcgggtggacggcgtgcgcgccgtggccagggacgccttccagcgcctcaagtcccgctggggctgcctccagaagcgcaccgaggtgaagctgcaggacctccccgtcgtgctcggcgcctgctgcgtcctccacaacatctgcgagcgcgccggagacgccgtcgaccccgacatcgcgttccagctcttcgacgacgacatggtcgccgagaaccccgttcgctccacggcggccgtcgccgcgcgcgacaacatcgcccacaacctcctccaccgcagtagcagcagcagcagcgccgccgccggccccaggttcgccttcaattgaactctgacggcgggggcgaggaaaagcagctcgctttctcggcggaatcagagaagacgacgccacgaggctcagcaatctttcaccgtttttttttcgcttgaatgaaattgtaataagttgggaacatagcaacgggggttgatagcgaaacatacatagggttcaaagatacagtaggtaattggttgataggatttgagattgttctgcatttttttttttgtagagtcaaaggttcaatcatcatttttcagatttggtgagaccgcgtagcctgtgtagtcaatactgtgcaggctattttgccaccagactttgcaatcaatcggtttttagcc

SEQ ID NO: 409 - protein, 473 aa, Zea mays subsp. mays
  misc_feature (1)..(473): Ceres Seq. ID no. 15224790
MSTSYTEAQFGSLLDLPAGDDLTSWFTHLCGEEQAAALPAFQAPVAMADPRKRSAEYQLLEGEASGVKRQRSPTSSSRENSAGSNDGDYEHTSAAAAAAAPGGGGGGRGGGRRLWVKERDHEWWDRMSSPACPEDEFRRAFRMSRATFEAVCEELGAAVAKEDTMLRAAIPVRQRVAVCIWRLATGEPLRLVSKRFGLGISTCHKLVLEVCAAIKAVLMPKAVQWPEAPDAAAAESARFEAASGIPGVVGAMYTTHIPIIAPKANVAAYYNRRHTERNQKTSYSITVQGVVDAGGAFTDVCIGWPGSMSDADVLDRSALYLQRGAAGLLQGQRLVGGAGYPLMDWLLVPYTHHNMTWAQHVFNERVDGVRAVARDAFQRLKSRWGCLQKRTEVKLQDLPVVLGACCVLHNICERAGDAVDPDIAFQLFDDDMVAENPVRSTAAVAARDNIAHNLLHRSSSSSSAAAGPRFAFN

SEQ ID NO: 410 - protein, 427 aa, Zea mays subsp. mays
  misc_feature (1)..(427): Ceres Seq. ID no. 15224791
MADPRKRSAEYQLLEGEASGVKRQRSPTSSSRENSAGSNDGDYEHTSAAAAAAAPGGGGGGRGGGRRLWVKERDHEWWDRMSSPACPEDEFRRAFRMSRATFEAVCEELGAAVAKEDTMLRAAIPVRQRVAVCIWRLATGEPLRLVSKRFGLGISTCHKLVLEVCAAIKAVLMPKAVQWPEAPDAAAAESARFEAASGIPGVVGAMYTTHIPIIAPKANVAAYYNRRHTERNQKTSYSITVQGVVDAGGAFTDVCIGWPGSMSDADVLDRSALYLQRGAAGLLQGQRLVGGAGYPLMDWLLVPYTHHNMTWAQHVFNERVDGVRAVARDAFQRLKSRWGCLQKRTEVKLQDLPVVLGACCVLHNICERAGDAVDPDIAFQLFDDDMVAENPVRSTAAVAARDNIAHNLLHRSSSSSSAAAGPRFAFN

SEQ ID NO: 411 - protein, 347 aa, Zea mays subsp. mays
  misc_feature (1)..(347): Ceres Seq. ID no. 15224792
MSSPACPEDEFRRAFRMSRATFEAVCEELGAAVAKEDTMLRAAIPVRQRVAVCIWRLATGEPLRLVSKRFGLGISTCHKLVLEVCAAIKAVLMPKAVQWPEAPDAAAAESARFEAASGIPGVVGAMYTTHIPIIAPKANVAAYYNRRHTERNQKTSYSITVQGVVDAGGAFTDVCIGWPGSMSDADVLDRSALYLQRGAAGLLQGQRLVGGAGYPLMDWLLVPYTHHNMTWAQHVFNERVDGVRAVARDAFQRLKSRWGCLQKRTEVKLQDLPVVLGACCVLHNICERAGDAVDPDIAFQLFDDDMVAENPVRSTAAVAARDNIAHNLLHRSSSSSSAAAGPRFAFN

SEQ ID NO: 412 - protein, 473 aa, Zea mays subsp. mays; identical to SEQ ID NO: 409
  misc_feature (1)..(473): Ceres Seq. ID no. 16611637

SEQ ID NO: 413 - DNA, 2011 bp, Zea mays subsp. mays
  misc_feature (1)..(2011): Ceres Seq. ID no. 15225007
cccccccccccccccccccctgccgcggtcggccacggaaagcacgctccgagagatattttcttcatgcggagagattattgatgcgcgcataatgaaagatcagagtggtcactcaaagggatatggttttgtgcggtttgcaaagagggattatgctaatactgccaaaaggcaaaagaatggtattgaggttcaaggaaagaggcttgtggttgagctttcaatggatcaagatacagttttctttggaaatctttgcaaagagtggactttagaagaatttgaagaattgattcacaaggcattcaaagatgttgtttcggttgaccttgcaatggcgtcaaatcttggttcttcaaacaagaagaatatcaatcgaggctttggatttgtgagattttcttctcatgcagctgcagcacgtgtaatccgcatcggttcaagaacagatttcatgcttggtgatattttgcatcctgcgataaattgggctgataaagagtctcatctggatcctgatgaaatggccaagatgaagtctgcttttattggtaacctgccagaagatgttaatgaggagtacttgagaaagctttttggacagttcggtgaggtagtacgggttgctatctcaagaaaaggacaatgtccagttgcttttgttcacttcgccaaacgttcagagcttgagaatgctatagaagaaatggatggtaaaacggtgagaggacctggccgaggaccgtctttcaagatccaggtgtcagttgctcgacctacggcagacaacgacaagaagcgatctcgtgaagaagtgagaactagaagatcaaatgcatcaggagataggcgagattattctcatggaagatatggacacgattcacttgatcgtcaagtgaaagctccaagattatctaattatgtggccgatgctgctgacccctatgaatcagctgttaattcattaccttcagctgtcaaggaagtcttgcttcgaattctacgtctaagaattggtactcgatatgatattgatatccattgtgtaaaaagccttgatgagcttcctgagtcatctgctcttgctgtccttaatcagtttttgatatcaggtggagacaaacacaacaaaggagattattttgcatcgttggttgctaagcacaaggctgagacctttggcttaacacatgcattacacggtaccacttatttgtcaagaaatccggaaatgcatagcaagcgatacccacatgaagattatgattttgtgacacccaggagcagtaggtacgattcgtcagcccatcatccttcaacatactacgaagacgatccaccagtgtctcagtcaagggttagaagatatgctgaagaaaggtccaccattgtaagaagcccagaaccacgtccgcgatatgacgaagcagacataagaataaacccagaaccaagattaccgtatgaatcaagacacaacgccgaaaagcatctcgatcgaagatacatacaagagcatagttcaaatattgaaagaccagctgaagaagctctcctttctagggaaaggagatttctgcctgctgcagggtacatgccgaacccaggcggctcggatttccgctccaggtcgcccgccgaatattcagcacaacgccaacaaatgaggtttgatcaattcacaggtgaaccttacaagtttgatcccttcacaggggagcccatcaggccagatccgaaccagcgccgctcaggaagcctgtactgatcagattagttggagcgatatgccagataagaccctgaaacaaagctagatctggataactcttcttcttgtctgccaagtgtctctgtgattttgcttgtgggctacagagcaccatgtgtgatccagtcggactaatcatttcggcattgaaaagtcggactaactttttttgtgcccataacgctacgtattgtttggtaaaacattcaggagtacccttttggtagattaatt

SEQ ID NO: 414 - protein, 590 aa, Zea mays subsp. mays
  misc_feature (1)..(590): Ceres Seq. ID no. 15225008
PPPPPPLPRSATESTLREIFSSCGEIIDARIMKDQSGHSKGYGFVRFAKRDYANTAKRQKNGIEVQGKRLVVELSMDQDTVFFGNLCKEWTLEEFEELIHKAFKDVVSVDLAMASNLGSSNKKNINRGFGFVRFSSHAAAARVIRIGSRTDFMLGDILHPAINWADKESHLDPDEMAKMKSAFIGNLPEDVNEEYLRKLFGQFGEVVRVAISRKGQCPVAFVHFAKRSELENAIEEMDGKTVRGPGRGPSFKIQVSVARPTADNDKKRSREEVRTRRSNASGDRRDYSHGRYGHDSLDRQVKAPRLSNYVADAADPYESAVNSLPSAVKEVLLRILRLRIGTRYDIDIHCVKSLDELPESSALAVLNQFLISGGDKHNKGDYFASLVAKHKAETFGLTHALHGTTYLSRNPEMHSKRYPHEDYDFVTPRSSRYDSSAHHPSTYYEDDPPVSQSRVRRYAEERSTIVRSPEPRPRYDEADIRINPEPRLPYESRHNAEKHLDRRYIQEHSSNIERPAEEALLSRERRFLPAAGYMPNPGGSDFRSRSPAEYSAQRQQMRFDQFTGEPYKFDPFTGEPIRPDPNQRRSGSLY

SEQ ID NO: 415 - protein, 559 aa, Zea mays subsp. mays
  misc_feature (1)..(559): Ceres Seq. ID no. 15225009
MKDQSGHSKGYGFVRFAKRDYANTAKRQKNGIEVQGKRLVVELSMDQDTVFFGNLCKEWTLEEFEELIHKAFKDVVSVDLAMASNLGSSNKKNINRGFGFVRFSSHAAAARVIRIGSRTDFMLGDILHPAINWADKESHLDPDEMAKMKSAFIGNLPEDVNEEYLRKLFGQFGEVVRVAISRKGQCPVAFVHFAKRSELENAIEEMDGKTVRGPGRGPSFKIQVSVARPTADNDKKRSREEVRTRRSNASGDRRDYSHGRYGHDSLDRQVKAPRLSNYVADAADPYESAVNSLPSAVKEVLLRILRLRIGTRYDIDIHCVKSLDELPESSALAVLNQFLISGGDKHNKGDYFASLVAKHKAETFGLTHALHGTTYLSRNPEMHSKRYPHEDYDFVTPRSSRYDSSAHHPSTYYEDDPPVSQSRVRRYAEERSTIVRSPEPRPRYDEADIRINPEPRLPYESRHNAEKHLDRRYIQEHSSNIERPAEEALLSRERRFLPAAGYMPNPGGSDFRSRSPAEYSAQRQQMRFDQFTGEPYKFDPFTGEPIRPDPNQRRSGSLY

SEQ ID NO: 416 - protein, 515 aa, Zea mays subsp. mays
  misc_feature (1)..(515): Ceres Seq. ID no. 15225010
MDQDTVFFGNLCKEWTLEEFEELIHKAFKDVVSVDLAMASNLGSSNKKNINRGFGFVRFSSHAAAARVIRIGSRTDFMLGDILHPAINWADKESHLDPDEMAKMKSAFIGNLPEDVNEEYLRKLFGQFGEVVRVAISRKGQCPVAFVHFAKRSELENAIEEMDGKTVRGPGRGPSFKIQVSVARPTADNDKKRSREEVRTRRSNASGDRRDYSHGRYGHDSLDRQVKAPRLSNYVADAADPYESAVNSLPSAVKEVLLRILRLRIGTRYDIDIHCVKSLDELPESSALAVLNQFLISGGDKHNKGDYFASLVAKHKAETFGLTHALHGTTYLSRNPEMHSKRYPHEDYDFVTPRSSRYDSSAHHPSTYYEDDPPVSQSRVRRYAEERSTIVRSPEPRPRYDEADIRINPEPRLPYESRHNAEKHLDRRYIQEHSSNIERPAEEALLSRERRFLPAAGYMPNPGGSDFRSRSPAEYSAQRQQMRFDQFTGEPYKFDPFTGEPIRPDPNQRRSGSLY

SEQ ID NO: 417 - protein, 559 aa, Zea mays subsp. mays; identical to SEQ ID NO: 415
  misc_feature (1)..(559): Ceres Seq. ID no. 16625649

SEQ ID NO: 418 - DNA, 2342 bp, Zea mays subsp. mays
  misc_feature (1)..(2342): Ceres Seq. ID no. 15225015
gaaaaaacatgacctagaatccggtccggtacgtcctctgcgccgcgcctcctcggctcctcccatccgtcgccagcgcccagcgccgcccgactccgccccacgtcgcgcgtagctcaagaccaagcacgtcttgcaccgcctagctcacctctacggccgccgaacctgcctccgccgttgccgactccaagctccactcgcctgaggtcccctcgtccgaggtgctcgactggacttcctccccccgaggtcccctcctatccattgccgctcctccccgacatgtccaagaaggtcggtaagctaccgccgccggcggcggcgcatgaggaggcgagagaggagctgtttgcttcatgctctttcgccgacctcggcctccactctaccctctgcgcccaccttcaagataagatgagtttccaagcacccactcgaattcaagctcaggcaattccagttgccatttctggacagcacatgctagtgaaggctgctactggcactgggaagactcttgcgtaccttgctccgattgttcacgttctccagatgagggagcctcgtgtggatagaactcatggaacttttgcgttggtacttgtgccaacgcgagagctatgcttacaggtttacgggattgcacaacagctggttcatcgttttcactggattgtccctgggtatgtcatgggtggggagaacagagcaaaagagaaagcaagactgcggaaaggaatatcaattctcattgctactcctgggcgccttcttgaccatttacagcgtactgcttcatttagctattccaatctgcagtggatcgtttttgatgaggctgacagcattctcgaacttggttttggaaaagcagttgaggatattctagagcacttgggttcaaggaatggcgctactggtcaaattaaaaacaaaggtgggcatatcagaagacaaaaccttcttttatctgccactcttaatgagaaggtgaatcgtttggcaaaaattagtttgaaaaacccagtgatgatcggccttgatgatcaaagcaagccatcaggaaaatccaacaatgtagggaacaatcatacttctctattatctgatgaggatgatgaaatactgaaaaagcagaatgatttagtggagcatgcagttgatgatttcaagcttcctactcaattggttcaaagatatgttaaagtttcatgtggttcgaggcttgcagttcttcttatgattctgaaatctctatttgaaagacaagtctctcagaaggtcgttgttttcttttcaacctgcgactctgtagattttcaccacacagtactcagccagcttgagtggagctctggcccacagcgtgatatggataagaagcaaaaatttcttagctgtaaagtgttccgtttgcatggtaacatggagcaggatgatcgcaagaagtcatttttgggttttggttctgagaaatcagcaattcttgtatctaccgatatcgctgctaggggtttggactttccaaaagtcaagtacatcatacaatatgattctccaggagaagcttctgaatacgttcacagggttggaagaactgcaagaattggtgagaagggggaggctctcctctttctgcaacctattgaactcgactacttgaaagatctggagttacacggtgtatcactgacagaatatcccttgcaaagggttttggatagttttcctgtaaatggacagaaacctcacaaaaggaagcaaatatccttagacatgcatccctgcataatgtctccgcagaggtcacttgagggtttcgttgcagctgaggacgcaacgaagaagcttgccagggatgccttctgttcctgggttcgtgcctacactgcccaccgaggtgaactgaagaaaattttcatggtgaagaagctccacctgggccatgtagcgaggagcttcgggctaaaggagcagccgtcgctggttggaaggtcacatcaggtgtctcttaagaagcggaagaaagagcagaagcgcgagcggcctgccaaaaggaggaagcttccctccaagaagtgaatttgcacacccggaatgctgctgcatcgcttgacttcggatcatgacgcacgccatttttgggaccgacaaccgtggtagcctatgcctcggtctgtagactcttgacatgagctatttttgttcgcgatattacatgtagaaatgtaggaactatagcaacaaatgcacaatcacattgttcgctgcagcagctgtttgttgatgtgagatcatctgttactattattattttagtatccgcttgggtttgtctt

SEQ ID NO: 419 - protein, 599 aa, Zea mays subsp. mays
  misc_feature (1)..(599): Ceres Seq. ID no. 15225016
MSKKVGKLPPPAAAHEEAREELFASCSFADLGLHSTLCAHLQDKMSFQAPTRIQAQAIPVAISGQHMLVKAATGTGKTLAYLAPIVHVLQMREPRVDRTHGTFALVLVPTRELCLQVYGIAQQLVHRFHWIVPGYVMGGENRAKEKARLRKGISILIATPGRLLDHLQRTASFSYSNLQWIVFDEADSILELGFGKAVEDILEHLGSRNGATGQIKNKGGHIRRQNLLLSATLNEKVNRLAKISLKNPVMIGLDDQSKPSGKSNNVGNNHTSLLSDEDDEILKKQNDLVEHAVDDFKLPTQLVQRYVKVSCGSRLAVLLMILKSLFERQVSQKVVVFFSTCDSVDFHHTVLSQLEWSSGPQRDMDKKQKFLSCKVFRLHGNMEQDDRKKSFLGFGSEKSAILVSTDIAARGLDFPKVKYIIQYDSPGEASEYVHRVGRTARIGEKGEALLFLQPIELDYLKDLELHGVSLTEYPLQRVLDSFPVNGQKPHKRKQISLDMHPCIMSPQRSLEGFVAAEDATKKLARDAFCSWVRAYTAHRGELKKIFMVKKLHLGHVARSFGLKEQPSLVGRSHQVSLKKRKKEQKRERPAKRRKLPSKK

SEQ ID NO: 420 - protein, 555 aa, Zea mays subsp. mays
  misc_feature (1)..(555): Ceres Seq. ID no. 15225017
MSFQAPTRIQAQAIPVAISGQHMLVKAATGTGKTLAYLAPIVHVLQMREPRVDRTHGTFALVLVPTRELCLQVYGIAQQLVHRFHWIVPGYVMGGENRAKEKARLRKGISILIATPGRLLDHLQRTASFSYSNLQWIVFDEADSILELGFGKAVEDILEHLGSRNGATGQIKNKGGHIRRQNLLLSATLNEKVNRLAKISLKNPVMIGLDDQSKPSGKSNNVGNNHTSLLSDEDDEILKKQNDLVEHAVDDFKLPTQLVQRYVKVSCGSRLAVLLMILKSLFERQVSQKVVVFFSTCDSVDFHHTVLSQLEWSSGPQRDMDKKQKFLSCKVFRLHGNMEQDDRKKSFLGFGSEKSAILVSTDIAARGLDFPKVKYIIQYDSPGEASEYVHRVGRTARIGEKGEALLFLQPIELDYLKDLELHGVSLTEYPLQRVLDSFPVNGQKPHKRKQISLDMHPCIMSPQRSLEGFVAAEDATKKLARDAFCSWVRAYTAHRGELKKIFMVKKLHLGHVARSFGLKEQPSLVGRSHQVSLKKRKKEQKRERPAKRRKLPSKK

SEQ ID NO: 421 - protein, 533 aa, Zea mays subsp. mays
  misc_feature (1)..(533): Ceres Seq. ID no. 15225018
MLVKAATGTGKTLAYLAPIVHVLQMREPRVDRTHGTFALVLVPTRELCLQVYGIAQQLVHRFHWIVPGYVMGGENRAKEKARLRKGISILIATPGRLLDHLQRTASFSYSNLQWIVFDEADSILELGFGKAVEDILEHLGSRNGATGQIKNKGGHIRRQNLLLSATLNEKVNRLAKISLKNPVMIGLDDQSKPSGKSNNVGNNHTSLLSDEDDEILKKQNDLVEHAVDDFKLPTQLVQRYVKVSCGSRLAVLLMILKSLFERQVSQKVVVFFSTCDSVDFHHTVLSQLEWSSGPQRDMDKKQKFLSCKVFRLHGNMEQDDRKKSFLGFGSEKSAILVSTDIAARGLDFPKVKYIIQYDSPGEASEYVHRVGRTARIGEKGEALLFLQPIELDYLKDLELHGVSLTEYPLQRVLDSFPVNGQKPHKRKQISLDMHPCIMSPQRSLEGFVAAEDATKKLARDAFCSWVRAYTAHRGELKKIFMVKKLHLGHVARSFGLKEQPSLVGRSHQVSLKKRKKEQKRERPAKRRKLPSKK

SEQ ID NO: 422 - protein, 280 aa, Zea mays subsp. mays
  misc_feature (1)..(280): Ceres Seq. ID no. 16625650
MILKSLFERQVSQKVVVFFSTCDSVDFHHTVLSQLEWSSGPQRDMDKKQKFLSCKVFRLHGNMEQDDRKKSFLGFGSEKSAILVSTDIAARGLDFPKVKYIIQYDSPGEASEYVHRVGRTARIGEKGEALLFLQPIELDYLKDLELHGVSLTEYPLQRVLDSFPVNGQKPHKRKQISLDMHPCIMSPQRSLEGFVAAEDATKKLARDAFCSWVRAYTAHRGELKKIFMVKKLHLGHVARSFGLKEQPSLVGRSHQVSLKKRKKEQKRERPAKRRKLPSKK

SEQ ID NO: 423 - DNA, 426 bp, Zea mays subsp. mays
  misc_feature (1)..(426): Ceres Seq. ID no. 15226823
gtctagctagggtttcgtctccgccgcttgctctaatcctctcccggcacgcgacacgcgagggcgcagcgtttatggcggcgacaccggcggacgcgaagaccgaggccgccaagatggacctcctcgaggacgacgacgagttcgaagagttcgagatcgaccaagaatgggatgagaaggaagaaggcaatgaagctgtccagcagtgggaggatgattgggatgacgatgatgtgaatgatgatttctcgctgcagctgaggaaagaactggagggtcttaccgttcgctttgtagggagcatattcggcccattcttttgttgcagatcgttgcattgattcttcattggaaatttagctgaagtatttgacttgcacatcttcattgaaactttccttggtgatgacagtaggttatgtc

SEQ ID NO: 424 - protein, 113 aa, Zea mays subsp. mays
  misc_feature (1)..(113): Ceres Seq. ID no. 15226824
LARVSSPPLALILSRHATREGAAFMAATPADAKTEAAKMDLLEDDDEFEEFEIDQEWDEKEEGNEAVQQWEDDWDDDDVNDDFSLQLRKELEGLTVRFVGSIFGPFFCCRSLH

SEQ ID NO: 425 - protein, 89 aa, Zea mays subsp. mays
  misc_feature (1)..(89): Ceres Seq. ID no. 15226825
MAATPADAKTEAAKMDLLEDDDEFEEFEIDQEWDEKEEGNEAVQQWEDDWDDDDVNDDFSLQLRKELEGLTVRFVGSIFGPFFCCRSLH

SEQ ID NO: 426 - protein, 75 aa, Zea mays subsp. mays
  misc_feature (1)..(75): Ceres Seq. ID no. 15226826
MDLLEDDDEFEEFEIDQEWDEKEEGNEAVQQWEDDWDDDDVNDDFSLQLRKELEGLTVRFVGSIFGPFFCCRSLH

SEQ ID NO: 427 - protein, 89 aa, Zea mays subsp. mays; identical to SEQ ID NO: 425
  misc_feature (1)..(89): Ceres Seq. ID no. 16611859

SEQ ID NO: 428 - DNA, 1018 bp, Zea mays subsp. mays
  misc_feature (1)..(1018): Ceres Seq. ID no. 15227057
acacagacaacaacgagttaacgaaagccttttatccaagctcagggaagggaagctcacagtttcgttggatccaatcttttatccaagctcagcgatggcttctcgtcagcagcatcctactagctaccacgccggcgagaccaaggcccgtgccgaggagaagacgggtcaagtgatgggggcgacgcaggagaaagggagggaggccaagcacaaggcgtccgacgcctccgaccgcgccatgggaatgggccacgacgccatggaggcgaccagggagaaggcgcgcgccgccgcggaccgaaccatggggatgggccacgacgccggggaggcggccaaggacagggcgtaccgggccaaggacgcggcctccggtgccgctggccgcgccagggacactgcgtccgacgcggccggcgctgccggggaccgcgcccgcgacggcgcgcagcagaccgggagctacgtcgcgcagacggccgaggccgccaggcagaaggcggccggcgccgcgctgtacgccaaggacaccgtggtggccggcaaggacaagaccggcgccctcctgcagcaggcaggggagaaggtgatgagcacggccgtgggggccaaggacacggttgtcagcacggccgtgggggccaaggacacggttgtcagcaccgccgtgggagccaaggacgcgatgatgaactcgctcggcatggccggcgaggacaaggacggcaccaccaccaccgacgccggcaaggacaccagcacccgcaagcctggcagggactattagaggacacggcagccaaacttctcagtgtttctgttccagaagtttctgatcccatcatttaggttcaaaagtttctcatttcatttcaaactttcagtgtttggtgcatgctgtaaactctcttcaggacgggtcgtttgacatttgtgtcgactgaagcctccgcgctttcgactcaacgatgtatatgtaataataaagtcgcaaagctgttgttttattttc

SEQ ID NO: 429 - protein, 263 aa, Zea mays subsp. mays
  misc_feature (1)..(263): Ceres Seq. ID no. 15227058
HRQQRVNESLLSKLREGKLTVSLDPIFYPSSAMASRQQHPTSYHAGETKARAEEKTGQVMGATQEKGREAKHKASDASDRAMGMGHDAMEATREKARAAADRTMGMGHDAGEAAKDRAYRAKDAASGAAGRARDTASDAAGAAGDRARDGAQQTGSYVAQTAEAARQKAAGAALYAKDTVVAGKDKTGALLQQAGEKVMSTAVGAKDTVVSTAVGAKDTVVSTAVGAKDAMMNSLGMAGEDKDGTTTTDAGKDTSTRKPGRDY

SEQ ID NO: 430 - protein, 231 aa, Zea mays subsp. mays
  misc_feature (1)..(231): Ceres Seq. ID no. 15227059
MASRQQHPTSYHAGETKARAEEKTGQVMGATQEKGREAKHKASDASDRAMGMGHDAMEATREKARAAADRTMGMGHDAGEAAKDRAYRAKDAASGAAGRARDTASDAAGAAGDRARDGAQQTGSYVAQTAEAARQKAAGAALYAKDTVVAGKDKTGALLQQAGEKVMSTAVGAKDTVVSTAVGAKDTVVSTAVGAKDAMMNSLGMAGEDKDGTTTTDAGKDTSTRKPGRDY

SEQ ID NO: 431 - protein, 204 aa, Zea mays subsp. mays
  misc_feature (1)..(204): Ceres Seq. ID no. 15227060
MGATQEKGREAKHKASDASDRAMGMGHDAMEATREKARAAADRTMGMGHDAGEAAKDRAYRAKDAASGAAGRARDTASDAAGAAGDRARDGAQQTGSYVAQTAEAARQKAAGAALYAKDTVVAGKDKTGALLQQAGEKVMSTAVGAKDTVVSTAVGAKDTVVSTAVGAKDAMMNSLGMAGEDKDGTTTTDAGKDTSTRKPGRDY

SEQ ID NO: 432 - protein, 231 aa, Zea mays subsp. mays; identical to SEQ ID NO: 430
  misc_feature (1)..(231): Ceres Seq. ID no. 16625660

SEQ ID NO: 433 - DNA, 781 bp, Zea mays subsp. mays
  misc_feature (1)..(781): Ceres Seq. ID no. 12484029
aggacactagtattggcccatcttcatcttcgtcgcagcgccggcgctccatctttcgctccatcccttactcgcgctcggcacaccggttctcagggcggcggcgctcaggctcgggctctcagcgacggcgtcaacggcttcccctcccgcctccgctcctccgcacaccggccggtgaccctgctgaactatagtcttatggcggcaagcgcgggcgagagccagggggtggaaagactcctctcctatgctgaagatctcgtggccgtcctttgcgtcagcaccgactgcgacgacaatgcacaggtcggtgccggagtgcagaggctgctgtctgcctgtcgatccgagtctgacgatctcgagatgcagctcaaagagtatcaggaaaaaatacactcctgcaaagaaaagattgacaaagcaaaagctgaaaccattactgacgatgaactcaatgcactacaaagcaagatggaagaaaaactgcaggaagagaagcagcttcgccaagagttaagagtgttacatgatgacgatgatgatctgattgagtagaaaggatcatgagtcttgaacttgagcaggagttgtgccttgcgtgttttaagttgttctagggtgaactcttgagttctcattgtctggatcatctttttctccttggatgtgttgcatcttttgagtgtggaaatggatggtactcctcgccatgaatttgctggctactttatacattgctttgtaactctgtttgatgataaactttgttgtggct

SEQ ID NO: 434 - protein, 186 aa, Zea mays subsp. mays
  misc_feature (1)..(186): Ceres Seq. ID no. 12484030
RTLVLAHLHLRRSAGAPSFAPSLTRARHTGSQGGGAQARALSDGVNGFPSRLRSSAHRPVTLLNYSLMAASAGESQGVERLLSYAEDLVAVLCVSTDCDDNAQVGAGVQRLLSACRSESDDLEMQLKEYQEKIHSCKEKIDKAKAETITDDELNALQSKMEEKLQEEKQLRQELRVLHDDDDDLIE

SEQ ID NO: 435 - protein, 119 aa, Zea mays subsp. mays
  misc_feature (1)..(119): Ceres Seq. ID no. 12484031
MAASAGESQGVERLLSYAEDLVAVLCVSTDCDDNAQVGAGVQRLLSACRSESDDLEMQLKEYQEKIHSCKEKIDKAKAETITDDELNALQSKMEEKLQEEKQLRQELRVLHDDDDDLIE

SEQ ID NO: 436 - protein, 119 aa, Zea mays subsp. mays; identical to SEQ ID NO: 435
  misc_feature (1)..(119): Ceres Seq. ID no. 16625333

SEQ ID NO: 437 - DNA, 608 bp, Zea mays subsp. mays
  misc_feature (1)..(608): Ceres Seq. ID no. 12635456
accgaagcttctcactagtaaatggcggctccctcctccaccgccgccaacatcatcagctcctgctgccgcctcgggccttccgctccgcccaaacaagccgctgcaggcgctcgcaggccacaggcgccgacagcaggcgtgtcggcgtcgcacgcgctgcgcggggcgtgcgtggcagccgcggcgtgcgcggcgatggggatggcgggcggcggcgacatagcgctggcgcgggacggggcattcgtcgcctcgtggaccgacgccatgggcgccgcgcgcaccaaggcgccggcgccggcgcggtggagcgagcgcaggcagtgcccgccgtggcgcgccaactcgctggagaacgtcgtgcccgagaacctgccccgcccgcccgcgcccaggaggttcgacagcgtctcggtctcggcggccgcgccggacttggtggcgccgccgtcctctgtcctcacggcggtgcgccccggcacgggctgcttctcgctctgacgcgccgcgggcaactgtggagatcggaggttgtaagaaaaaaaagcgacaaatgtgggaattggaaaacgcaatatgtacactataggttttattgtctcggt

SEQ ID NO: 438 - protein, 202 aa, Zea mays subsp. mays
  misc_feature (1)..(202): Ceres Seq. ID no. 12635457
RSFSLVNGGSLLHRRQHHQLLLPPRAFRSAQTSRCRRSQATGADSRRVGVARAARGVRGSRGVRGDGDGGRRRHSAGAGRGIRRLVDRRHGRRAHQGAGAGAVERAQAVPAVARQLAGERRAREPAPPARAQEVRQRLGLGGRAGLGGAAVLCPHGGAPRHGLLLALTRRGQLWRSEVVRKKSDKCGNWKTQYVHYRFYCLG

SEQ ID NO: 439 - protein, 160 aa, Zea mays subsp. mays
  misc_feature (1)..(160): Ceres Seq. ID no. 12635458
MAAPSSTAANIISSCCRLGPSAPPKQAAAGARRPQAPTAGVSASHALRGACVAAAACAAMGMAGGGDIALARDGAFVASWTDAMGAARTKAPAPARWSERRQCPPWRANSLENVVPENLPRPPAPRRFDSVSVSAAAPDLVAPPSSVLTAVRPGTGCFSL

SEQ ID NO: 440 - protein, 101 aa, Zea mays subsp. mays
  misc_feature (1)..(101): Ceres Seq. ID no. 12635459
MGMAGGGDIALARDGAFVASWTDAMGAARTKAPAPARWSERRQCPPWRANSLENVVPENLPRPPAPRRFDSVSVSAAAPDLVAPPSSVLTAVRPGTGCFSL

SEQ ID NO: 441 - protein, 160 aa, Zea mays subsp. mays; identical to SEQ ID NO: 439
  misc_feature (1)..(160): Ceres Seq. ID no. 16625385

SEQ ID NO: 442 - DNA, 706 bp, Zea mays subsp. mays
  misc_feature (1)..(706): Ceres Seq. ID no. 13623650
aacaagcccctttccaggtcactgctgaccttgttcatatcgatttctttgttttgtagtcagttttgctgtgcagagttactctttcagtttgcctaatttaaaaggaaaaaaaactttacatgcaagaaataatggatgctgttaacaatagtggaaaatttgacacgaagtttggaggctttactggtactgacggtccattggggaagataatggagaattcaaaaactcgggctgagatcggttgggaaccaaagtatccaagcttcaccgaattccttggtatcagcagttaacatccttgcatagtgttcagttagtctgactcagctgagttgcaaccgtgattagattgtacatcgttaggggatggtacacagattcagttctgggaagataaatgggttggggtctgtcctttgaaagaccaatttccagatctgtacaacattgtgagaaagaaaaaggcaacagtagctaatgttcttcaacataatcaacttaatgtggcttttcgtcggtcacttaatgtaaataatctagctgctttgaataaggtagtagctagagtatttactattagtctatttgatcgaagagacacgtttgtttgggatcttctcccgcaaggtcagtttacggtcagctctatgtatagggctttagtcgccccgaacattgtttcgagaaaccaccccatctg

SEQ ID NO: 443 - protein, 58 aa, Zea mays subsp. mays
  misc_feature (1)..(58): Ceres Seq. ID no. 13623651
MQEIMDAVNNSGKFDTKFGGFTGTDGPLGKIMENSKTRAEIGWEPKYPSFTEFLGISS

SEQ ID NO: 444 - protein, 54 aa, Zea mays subsp. mays
  misc_feature (1)..(54): Ceres Seq. ID no. 13623652
MDAVNNSGKFDTKFGGFTGTDGPLGKIMENSKTRAEIGWEPKYPSFTEFLGISS

SEQ ID NO: 445 - protein, 32 aa, Zea mays subsp. mays
  misc_feature (1)..(32): Ceres Seq. ID no. 13623653
NKPLSRSLLTLFISISLFCSQFCCAELLFQFA

SEQ ID NO: 446 - protein, 58 aa, Zea mays subsp. mays; identical to SEQ ID NO: 443
  misc_feature (1)..(58): Ceres Seq. ID no. 16625405

SEQ ID NO: 447 - DNA, 446 bp, Zea mays subsp. mays
  misc_feature (1)..(446): Ceres Seq. ID no. 14305948
aggacggagatgacgcagaagcagaccctgttcaaggggcagagcaagaagaagactatccctcccaaccgccacggcaaggcgcctcatgttcgtaaaggaaagagagccgtcaagcccaccaagttcacaaaggacatggacgccgagaaggaactcaccaagttcatcaaccagtgcaacgaaataaaagctgcgaatcttgctagcaaagagggcggtgacctcaacatagtgaaggcggatggtgaggaatctaaatcaaagaaataggaagccagaaactgaaaacgagtgtgtgaaacgtgatgcgtggtaaactgttaatgcgatgtattctgctgaagaaaattcagttccgtatggctgggtagatgaacatgtttagcgcaaagtgacggtgtaactgcaaccggggtaatggcttgcaagttttgttctggccc

SEQ ID NO: 448 - protein, 90 aa, Zea mays subsp. mays
  misc_feature (1)..(90): Ceres Seq. ID no. 14305949
RTEMTQKQTLFKGQSKKKTIPPNRHGKAPHVRKGKRAVKPTKFTKDMDAEKELTKFINQCNEIKAANLASKEGGDLNIVKADGEESKSKK

SEQ ID NO: 449 - protein, 87 aa, Zea mays subsp. mays
  misc_feature (1)..(87): Ceres Seq. ID no. 14305950
MTQKQTLFKGQSKKKTIPPNRHGKAPHVRKGKRAVKPTKFTKDMDAEKELTKFINQCNEIKAANLASKEGGDLNIVKADGEESKSKK

SEQ ID NO: 450 - protein, 44 aa, Zea mays subsp. mays
  misc_feature (1)..(44): Ceres Seq. ID no. 16625459
MDAEKELTKFINQCNEIKAANLASKEGGDLNIVKADGEESKSKK

SEQ ID NO: 451 - DNA, 702 bp, Zea mays subsp. mays
  misc_feature (1)..(702): Ceres Seq. ID no. 15175150
atcaccaaaccaaaaaatctctctgagaatccctaaatccacttgaaaaaaatggcagaaaccgcggaaacaatcaacaccaccgtctcaccgccgcattccgaatcggagggctccaccacattgcccgcgacgacgccagatcagacatcggatgaaacctcaaaagccgcagatctgaagaaggaagagtccgtcccagagacgaagccaggaggaggcaactcgctccgcatttggcctccgactcagaaaactcgcgacgccgtcttgaagcgcctgatcgagacgctctccaccgaatccatcctctccaagaggtacggcacgctcaactccgacgaggcttccgccgtcgccaaatccatcgaggaggaagcctacggcgtcgcgtccaacgctgtgtctgacgacgacgatgggatcaagatccttgaggtttactccaaggagattagcaagaggatgcttgagacggtgaaggatcgatctgcagccgccgccaacaaggaagcggttgaggaagctgcgaaagacgatgaagctcctgagtcggagaagagtgaggcgtaactcgttcttgatccttaccttatctattagggtttcgctagattcgtatgagtttctcagagtttatgacgacagatctcttcttgtggatttggtatttgcctatttcgaagatgcttccttcttcct

SEQ ID NO: 452 - protein, 173 aa, Zea mays subsp. mays
  misc_feature (1)..(173): Ceres Seq. ID no. 15175151
MAETAETINTTVSPPHSESEGSTTLPATTPDQTSDETSKAADLKKEESVPETKPGGGNSLRIWPPTQKTRDAVLKRLIETLSTESILSKRYGTLNSDEASAVAKSIEEEAYGVASNAVSDDDDGIKILEVYSKEISKRMLETVKDRSAAAANKEAVEEAAKDDEAPESEKSEA

SEQ ID NO: 453 - protein, 173 aa, Zea mays subsp. mays; identical to SEQ ID NO: 452
  misc_feature (1)..(173): Ceres Seq. ID no. 16625579

SEQ ID NO: 454 - DNA, 948 bp, Zea mays subsp. mays
  misc_feature (1)..(948): Ceres Seq. ID no. 15179239
atgaaaaccaccctttactgaaaaacaataaaatctaagagaatgaaattttcatattctctatccaaacgatttgtttcccctattttggctatgcagttcctcatcatacatagtgtttcttcattgaaccttaccaatgagtatctcaaccacaaatgcttccttgatcaagggatatataatactggaagtgagtacgaggacagcctcaacattattttacgtagtgttcgtactggtagttattataagaacggtttcatgcgcacaagcaagggtcgtgaacctgctcctgatgctgtcaccgtcatgttccagtgtcgtggtgactcttatgggtctaaatgccgtacatgtgccgacaccgcagtcgcagggtttcgtagaagatgtctaaggaacaaaggaggaataatatggtacgaccaatgttttctctgggttagtgcaatcggtgaagacatgccaatcaatactaattacaagaatattttttctatgtacaacccaaataacgtaagaggggatgcaaaattgtttgccaagagggtggtggattttttctctgagctaacacttaaggttgataaaaataccgaagtcgactctgtcgtcatattttacgcagaagggaaaaagaagcttgggaaaaatacattgtatgcaatggtgcagtgtgtagaactaacaatagattgtaaaagttgtttgacatggagtatcgcaaagcttttcaaaaacgacgacattaaacaaggagggagagttttgggttcgaactgtgaaataagatatgagctatacccttttattaggagttaagcattttttatggtggtgatgaatacatccgcttcataatttccaaattatgttttagttttgtttacttttttttttgctcaaatttaatacatatattaataaatagagtgtttaagaaac

SEQ ID NO: 455 - protein, 260 aa, Zea mays subsp. mays
  misc_feature (1)..(260): Ceres Seq. ID no. 15179240
MKFSYSLSKRFVSPILAMQFLIIHSVSSLNLTNEYLNHKCFLDQGIYNTGSEYEDSLNIILRSVRTGSYYKNGFMRTSKGREPAPDAVTVMFQCRGDSYGSKCRTCADTAVAGFRRRCLRNKGGIIWYDQCFLWVSAIGEDMPINTNYKNIFSMYNPNNVRGDAKLFAKRVVDFFSELTLKVDKNTEVDSVVIFYAEGKKKLGKNTLYAMVQCVELTIDCKSCLTWSIAKLFKNDDIKQGGRVLGSNCEIRYELYPFIRS

SEQ ID NO: 456 - protein, 243 aa, Zea mays subsp. mays
  misc_feature (1)..(243): Ceres Seq. ID no. 15179241
MQFLIIHSVSSLNLTNEYLNHKCFLDQGIYNTGSEYEDSLNIILRSVRTGSYYKNGFMRTSKGREPAPDAVTVMFQCRGDSYGSKCRTCADTAVAGFRRRCLRNKGGIIWYDQCFLWVSAIGEDMPINTNYKNIFSMYNPNNVRGDAKLFAKRVVDFFSELTLKVDKNTEVDSVVIFYAEGKKKLGKNTLYAMVQCVELTIDCKSCLTWSIAKLFKNDDIKQGGRVLGSNCEIRYELYPFIRS

SEQ ID NO: 457 - protein, 186 aa, Zea mays subsp. mays
  misc_feature (1)..(186): Ceres Seq. ID no. 15179242
MRTSKGREPAPDAVTVMFQCRGDSYGSKCRTCADTAVAGFRRRCLRNKGGIIWYDQCFLWVSAIGEDMPINTNYKNIFSMYNPNNVRGDAKLFAKRVVDFFSELTLKVDKNTEVDSVVIFYAEGKKKLGKNTLYAMVQCVELTIDCKSCLTWSIAKLFKNDDIKQGGRVLGSNCEIRYELYPFIRS

SEQ ID NO: 458 - protein, 260 aa, Zea mays subsp. mays; identical to SEQ ID NO: 455
  misc_feature (1)..(260): Ceres Seq. ID no. 16625613

SEQ ID NO: 459 - DNA, 1541 bp, Zea mays subsp. mays
  misc_feature (1)..(1541): Ceres Seq. ID no. 15179578
agaactttcgggttgcgtgtccttatttataaatggttttcaactttttactcaccagagattttgattaatactttgagaaattcgaatgctctgttttgttttctcgggaaaattatcagagtgagataaagatcagaggaaagatgagagccggcgcgagtggaaacaacgtttcggagactataaacgcagccgctagtgcgtttgcttcctctgatgatcgtgttcatcaccaaccttctccgattcataagaagcgaagatggtgggatcgcttcatatgtttcagaccttcaacacaaagaagaaaacgaatagggaaagccgctcttgctcctgaaccggttcataccgattccacatccaattccggttatcgttcggttatgacggctcttcctttcatagctccaccttcatctcctgcttccttcttccaatcagaacctccttccgctacgcagtcgcctgtagggatcctctcctttagtcctctaccttctaacaacaacaacaacaacaacaacaacgagcgtccttcgatattcgccatcggaccttacgctcacgagcctcagctggtgtctcctccggttttctctacttacaccaccgaaccatcttccgctccggttacgccgcctctcgatgagtctttctacttaaccaccactactccttcttcgcctgaagtccctttcgctcagctctttaactccaacactaactatggtctcaggtctccagtgtctaactatgagtttcagttttaccaacttcctcctggtagtccactcgctcagcttatctcgcccagctcggttatgtccggttcgggtccagcttctccttttcctgacggagtcactcacttccaagtctctgatccaccaaagctgttgagccctggtaagctgcatttctccaaggctgttacgactcctaaagagcagaagaagattgcgagaccgaataaaccggtttcttttgatcttgatgcggatcatttcattagatgtgtagatcagaagctaagaacaacgttccctgaagcatctgcgtcgtctcatcaagaagcagcgcagtattcctctctcgggccgaataaggagttcgattttggtacggatgagaaacatttgagcgttgatgatgatgaacatagcgcttcgaccaagaacaacaacgattggtccttccctgtgatgcaatcaggtgcacttagctgacttctagttatatagattctgaatttcgaaatcgatttggacataagccagcacacaaagatcttgttcaagattcaagaacgaaaacgaaaacgagttagtgatcttattacccttgtttttaacagaagtatgatgttcttacatagaagcctttagatgattatgttcaggatcttatggatagtttctcgtctctctttttggttttgtaataaatagttgacgttgtcagttgttgtatttggctgtctttatgtagatttttttttttcaatttgtgcatataatatatttgatcgcatttat

SEQ ID NO: 460 - protein, 361 aa, Zea mays subsp. mays
  misc_feature (1)..(361): Ceres Seq. ID no. 15179579
MRAGASGNNVSETINAAASAFASSDDRVHHQPSPIHKKRRWWDRFICFRPSTQRRKRIGKAALAPEPVHTDSTSNSGYRSVMTALPFIAPPSSPASFFQSEPPSATQSPVGILSFSPLPSNNNNNNNNNERPSIFAIGPYAHEPQLVSPPVFSTYTTEPSSAPVTPPLDESFYLTTTTPSSPEVPFAQLFNSNTNYGLRSPVSNYEFQFYQLPPGSPLAQLISPSSVMSGSGPASPFPDGVTHFQVSDPPKLLSPGKLHFSKAVTTPKEQKKIARPNKPVSFDLDADHFIRCVDQKLRTTFPEASASSHQEAAQYSSLGPNKEFDFGTDEKHLSVDDDEHSASTKNNNDWSFPVMQSGALS

SEQ ID NO: 461 - protein, 280 aa, Zea mays subsp. mays
  misc_feature (1)..(280): Ceres Seq. ID no. 15179580
MTALPFIAPPSSPASFFQSEPPSATQSPVGILSFSPLPSNNNNNNNNNERPSIFAIGPYAHEPQLVSPPVFSTYTTEPSSAPVTPPLDESFYLTTTTPSSPEVPFAQLFNSNTNYGLRSPVSNYEFQFYQLPPGSPLAQLISPSSVMSGSGPASPFPDGVTHFQVSDPPKLLSPGKLHFSKAVTTPKEQKKIARPNKPVSFDLDADHFIRCVDQKLRTTFPEASASSHQEAAQYSSLGPNKEFDFGTDEKHLSVDDDEHSASTKNNNDWSFPVMQSGALS

SEQ ID NO: 462 - protein, 361 aa, Zea mays subsp. mays; identical to SEQ ID NO: 460
  misc_feature (1)..(361): Ceres Seq. ID no. 16625620

SEQ ID NO: 463 - DNA, 1912 bp, Zea mays subsp. mays
  misc_feature (1)..(1912): Ceres Seq. ID no. 15225748
tcacctgtacgggcgacttcacctgcacgggcgcatccttcagccgatccgaagacaccatgcctccagggaggaagggaatacgaagcacaagggaacccccaccagaaatcacttctactgagtatgagaaacaaagggcagcaaatgtgatgaggaacaatcagatgttccaacggcttgggattaatcagttacgcacaatgatgactgctacaagagtaaagagcaaatatgatggtccagaggaatcagggtctttgtttgatggcgaggatagtgaaggctctgagccagaggaggattcccatgttgcacaaggtgtacgtagccacaacccaactcatgttgctgacaaacctacacaacaaacacgaggttctaaaagggttgtggcccctgatgttcatggacaacagattagattcactaggcaaaggagtgctgccataaatcaacaatcctccctaagcctaactactactacacaagctggttcaagagccaccacaaaccaagaatccacccaaaacttggctgctgcaacacaatttacttcaagtgttgccactgagcaagattacaccgcaggcctgactactactgcacaacctacttctcccacacaagctgaggtcactgaccacaatagagatgaagaattggtaccaaggcaaagaagtaggggcaaacaacttgaatccttgagcagagggttaggcactaagattccaatccaaatctctaatgggaagcgaaggccagagccacctattcaggctgcaaagtttgcatcggagggtgggatcatattgaggcaacacattccaatatttccgcactggaaggagtacaagaagcaagagaacgagggtaaaattacagactacattgggaagcttgctggtcaattcaccatggatgttgagagtaatgcagtaaaagatgcatgtgttgatatgctaaagggtggacagcgccaaatgaggtataggctgaaaaaaaagtacttcactggagttcctgcaaatcaagtgaggactacatcacctgtttcatgtatgactgatgatcaatggagagagttggtacaaatgtggtctagcccaaaccacaagaacaattgtgtgaagaacaaacttaatcgtgagaaggtgcaatttccacagtgcacaggatctcaatcatatgttgcaaaagcttatgtagtgagacaagaaaaatataaagatgtcgaacctagtgcaattgatcttttcaaggagatgcattgcagcaagaaaaaaggatttagtgaagttgttcagaaagccataggtgatatggaagcaatggtggcaacaccagctgaagatggacagcttgcaaagtctgcaacagaagttgtttccaatgtactgccgggttcaagtaaatttcttcacaatgctggccttttgccctcctccaagagaagcaacacagggactgtttcagcaagaatgcaagagcttcagtctcaattggacaatgagaggcgagaaaaagatggacttcgagaagatatggataccttaaaagccaagtcacaatcatctgaggcaaccattgctaatcaatcaactgagattgcagatttaaagaagtccttagcagaaaatagcatcctacttcgacagatattaagtattagtcgtgatcagctgaatccttaagcatgcttgctaagatgctggtgtcaaccatcctgaatacacatctcacaaaactgtggacctctttttatccttatgtttgctatatggaactgcaacttacagtctattatatgtgttctcttgctatagagttttagtacttgtctggttaaagaattatgaaccatgttcctttgtgtgttggacatattatgcttgaaatatatggatgttgg

SEQ ID NO: 464 - protein, 563 aa, Zea mays subsp. mays
  misc_feature (1)..(563): Ceres Seq. ID no. 15225749
TCTGDFTCTGASFSRSEDTMPPGRKGIRSTREPPPEITSTEYEKQRAANVMRNNQMFQRLGINQLRTMMTATRVKSKYDGPEESGSLFDGEDSEGSEPEEDSHVAQGVRSHNPTHVADKPTQQTRGSKRVVAPDVHGQQIRFTRQRSAAINQQSSLSLTTTTQAGSRATTNQESTQNLAAATQFTSSVATEQDYTAGLTTTAQPTSPTQAEVTDHNRDEELVPRQRSRGKQLESLSRGLGTKIPIQISNGKRRPEPPIQAAKFASEGGIILRQHIPIFPHWKEYKKQENEGKITDYIGKLAGQFTMDVESNAVKDACVDMLKGGQRQMRYRLKKKYFTGVPANQVRTTSPVSCMTDDQWRELVQMWSSPNHKNNCVKNKLNREKVQFPQCTGSQSYVAKAYVVRQEKYKDVEPSAIDLFKEMHCSKKKGFSEVVQKAIGDMEAMVATPAEDGQLAKSATEVVSNVLPGSSKFLHNAGLLPSSKRSNTGTVSARMQELQSQLDNERREKDGLREDMDTLKAKSQSSEATIANQSTEIADLKKSLAENSILLRQILSISRDQLNP

SEQ ID NO: 465 - protein, 544 aa, Zea mays subsp. mays
  misc_feature (1)..(544): Ceres Seq. ID no. 15225750
MPPGRKGIRSTREPPPEITSTEYEKQRAANVMRNNQMFQRLGINQLRTMMTATRVKSKYDGPEESGSLFDGEDSEGSEPEEDSHVAQGVRSHNPTHVADKPTQQTRGSKRVVAPDVHGQQIRFTRQRSAAINQQSSLSLTTTTQAGSRATTNQESTQNLAAATQFTSSVATEQDYTAGLTTTAQPTSPTQAEVTDHNRDEELVPRQRSRGKQLESLSRGLGTKIPIQISNGKRRPEPPIQAAKFASEGGIILRQHIPIFPHWKEYKKQENEGKITDYIGKLAGQFTMDVESNAVKDACVDMLKGGQRQMRYRLKKKYFTGVPANQVRTTSPVSCMTDDQWRELVQMWSSPNHKNNCVKNKLNREKVQFPQCTGSQSYVAKAYVVRQEKYKDVEPSAIDLFKEMHCSKKKGFSEVVQKAIGDMEAMVATPAEDGQLAKSATEVVSNVLPGSSKFLHNAGLLPSSKRSNTGTVSARMQELQSQLDNERREKDGLREDMDTLKAKSQSSEATIANQSTEIADLKKSLAENSILLRQILSISRDQLNP

SEQ ID NO: 466 - protein, 513 aa, Zea mays subsp. mays
  misc_feature (1)..(513): Ceres Seq. ID no. 15225751
MRNNQMFQRLGINQLRTMMTATRVKSKYDGPEESGSLFDGEDSEGSEPEEDSHVAQGVRSHNPTHVADKPTQQTRGSKRVVAPDVHGQQIRFTRQRSAAINQQSSLSLTTTTQAGSRATTNQESTQNLAAATQFTSSVATEQDYTAGLTTTAQPTSPTQAEVTDHNRDEELVPRQRSRGKQLESLSRGLGTKIPIQISNGKRRPEPPIQAAKFASEGGIILRQHIPIFPHWKEYKKQENEGKITDYIGKLAGQFTMDVESNAVKDACVDMLKGGQRQMRYRLKKKYFTGVPANQVRTTSPVSCMTDDQWRELVQMWSSPNHKNNCVKNKLNREKVQFPQCTGSQSYVAKAYVVRQEKYKDVEPSAIDLFKEMHCSKKKGFSEVVQKAIGDMEAMVATPAEDGQLAKSATEVVSNVLPGSSKFLHNAGLLPSSKRSNTGTVSARMQELQSQLDNERREKDGLREDMDTLKAKSQSSEATIANQSTEIADLKKSLAENSILLRQILSISRDQLNP

SEQ ID NO: 467 - protein, 544 aa, Zea mays subsp. mays; identical to SEQ ID NO: 465
  misc_feature (1)..(544): Ceres Seq. ID no. 16625652

SEQ ID NO: 468 - DNA, 412 bp, Zea mays subsp. mays
  misc_feature (1)..(412): Ceres Seq. ID no. 3315376
tttcttggctcgaccctttcatccgtcgatctcatactattctcattctacatgtttgcgatagccccaaatcaattgcgaatgaaccttgtcaggcatctcctctctgacccaactggctcatccatgatcaagacctacctgaccttataaaaccatttgcaccaggctgcaagcctgcaagaactcttagaaactgtacagttttgtagttgtacataagttagagaggatctggggggttacttggcggcggatctaggggttagcagcaatgctataatacactgtaaatcttttatggttgctatggtgattggatagagaagcacaccgtgttgtgcatgatggaagaataataagagagatcaggtgatggtcaatggttcctgcattggccaattttaggttg

SEQ ID NO: 469 - protein, 50 aa, Zea mays subsp. mays
  misc_feature (1)..(50): Ceres Seq. ID no. 3315377
FLGSTLSSVDLILFSFYMFAIAPNQLRMNLVRHLLSDPTGSSMIKTYLTL

SEQ ID NO: 470 - protein, 35 aa, Zea mays subsp. mays
  misc_feature (1)..(35): Ceres Seq. ID no. 3315378
SWLDPFIRRSHTILILHVCDSPKSIANEPCQASPL

SEQ ID NO: 471 - protein, 33 aa, Zea mays subsp. mays
  misc_feature (1)..(33): Ceres Seq. ID no. 3315379
MFAIAPNQLRMNLVRHLLSDPTGSSMIKTYLTL

SEQ ID NO: 472 - DNA, 709 bp, Zea mays subsp. mays
  misc_feature (1)..(709): Ceres Seq. ID no. 12588986
agaatccagcatttataacccaactacttcccctagtgttatagcatctgcacagggtctacagaacgaggagttttccccaagccagctaagtaaaatgtttggatcccatgcaactatgatggccaacacccttcgcacaccaatcattgtatttacgcagacaggctccatggctgtcctcctgagccactatcgtccgtcgtctacactatttgcgtttacaaacgaggaacgagtgaagcaacggctggcactctaccagggggtcatccctattcacatgcagttctctgacgacgcagaagaaactttctccagagcaattagcagcttgctgaaagcacaatatgtgaagaagggagactacgtcactcttgttcagagcggagtgacttcaatctggagagaggaatccactcacaacatccaagtgaagagagctcaggtctgatgtgaatcggtcgccggagaagttttgatagcgccgctagaagtgttatcatcatcatcaccatcatatgcgagtaattttaatgttttaccaggagattgctacgtcgagttgtatgttgtgtcgaattcacgtgtagactctggacctttaactctgtattcgttcattttcacttgtttcacactggagtgctataaaacaaaaaaaaaaaaaaaaaatatcgataccgtcgacctcgagggggggcccggt

SEQ ID NO: 473 - protein, 150 aa, Zea mays subsp. mays
  misc_feature (1)..(150): Ceres Seq. ID no. 12588987
ESSIYNPTTSPSVIASAQGLQNEEFSPSQLSKMFGSHATMMANTLRTPIIVFTQTGSMAVLLSHYRPSSTLFAFTNEERVKQRLALYQGVIPIHMQFSDDAEETFSRAISSLLKAQYVKKGDYVTLVQSGVTSIWREESTHNIQVKRAQV

SEQ ID NO: 474 - protein, 118 aa, Zea mays subsp. mays
  misc_feature (1)..(118): Ceres Seq. ID no. 12588988
MFGSHATMMANTLRTPIIVFTQTGSMAVLLSHYRPSSTLFAFTNEERVKQRLALYQGVIPIHMQFSDDAEETFSRAISSLLKAQYVKKGDYVTLVQSGVTSIWREESTHNIQVKRAQV

SEQ ID NO: 475 - protein, 111 aa, Zea mays subsp. mays
  misc_feature (1)..(111): Ceres Seq. ID no. 12588989
MMANTLRTPIIVFTQTGSMAVLLSHYRPSSTLFAFTNEERVKQRLALYQGVIPIHMQFSDDAEETFSRAISSLLKAQYVKKGDYVTLVQSGVTSIWREESTHNIQVKRAQV

SEQ ID NO: 476 - DNA, 602 bp, Zea mays subsp. mays
  misc_feature (1)..(602): Ceres Seq. ID no. 12589011
tgatgaatgtaaggaaaggactgtgtgccagtgcgaagaatgcagatgcaaaaacacgtggggaagctacgagtgcggctgcagcgggggcctgctttacatgaaggagcatgacacatgcataagcaaaaacggagcatcagaagccggctggggcttcctgtgggccgtcgtcttcggcctcgtcgcagcaggaattgcagggtacgcggtgtacaagtacaggatccggaggtacatggactcggagatccgcgccatcatggcccagtacatgcctctggacagccaaggagatgtccagagccacgcgcaccatattgagatgtgaggaggatgcatgcagacttgatgagaggagacggaggcttggtctagctagcttatataatacaccagaattagatgtgcatattcgtaacaatcttgtgtttagcacgcaaagtccttgaacatttggcgtctgtgttaggttgtaccatgacatggtcttgtttagcaataattgccgtcttttatttcggtgccaataaaggagatggcaaacgggcatgacttgtgtgttgctcagttggtctgaggtccatgatcagtggtaaagg

SEQ ID NO: 477 - protein, 109 aa, Zea mays subsp. mays
  misc_feature (1)..(109): Ceres Seq. ID no. 12589012
DECKERTVCQCEECRCKNTWGSYECGCSGGLLYMKEHDTCISKNGASEAGWGFLWAVVFGLVAAGIAGYAVYKYRIRRYMDSEIRAIMAQYMPLDSQGDVQSHAHHIEM

SEQ ID NO: 478 - protein, 76 aa, Zea mays subsp. mays
  misc_feature (1)..(76): Ceres Seq. ID no. 12589013
MKEHDTCISKNGASEAGWGFLWAVVFGLVAAGIAGYAVYKYRIRRYMDSEIRAIMAQYMPLDSQGDVQSHAHHIEM

SEQ ID NO: 479 - protein, 68 aa, Zea mays subsp. mays
  misc_feature (1)..(68): Ceres Seq. ID no. 12589014
MHKQKRSIRSRLGLPVGRRLRPRRSRNCRVRGVQVQDPEVHGLGDPRHHGPVHASGQPRRCPEPRAPY

SEQ ID NO: 480 - DNA, 1599 bp, Zea mays subsp. mays
  misc_feature (1)..(1599): Ceres Seq. ID no. 12589137
catcctaatcgaaaactctgcgcgctgcttcctgttcggccgtgcctgcgtgccgctcgccccagctcccagctatggcgtctggccgagagagcttctctcatctcctccctgctcaatctccagccacgcgccctccagttctgagctcctctgcgcgcgcgaagtcctctgcgccgcaccctgaagccccctgctcggcgcccgagatccctcccatggccggtgttcggtccctgcgctcgtccgaccgaactccctggccatcgcgcttgccgtttccccacgcgcaggaattcaccagtgttcggtccgcgcgcagcctccctcccagctcagccgcccatctccatggccagagctccttcatctccctcctctcagcgtcttctccgtgctcccgctcggctccacccatggccggaatccccttcctgccgagctcccatggcggcgcccatcccctgctccctccagttctccctaccacgcccaccgccggtctatgcgcgcgcgctctgctcccatgccgcgcgcctagaccggcggtggtggaggtcgggcccgaggtggccaagtacggcgtcggcgacgtggtaggcgtcggggtgatcgttgggtgctgccgcgagtgcagcccctgcaaggccaacgttgagcagtactgcaacaagaagatctggtcatacaacgacgtctacactgatggacggcccacgcagggtggattcgcctccaccatggtcgtcgaccagaagtttgtggtgaagatcccggcgggtctggctccggagcaagcggcgccgctgctgtgcgctggcgtgacggtgtacagcccgctgaagcactttgggctgacgaccccgggcctccgtggcggcatcctgggcctcggcggcgtgggccacatgggcgtgaaggtagccaaggccatgggccaccacgtgacggtgatcagctcgtcgtccaagaagcgcgcggaggcaatggaccacctcggcgcggacgcgtacctagtgagctcggacgccgcggccatggcggcggccgccgactcgctggactacatcatcgacacggtgcccgtgcaccacccgctggagccgtacctggcgctgctgaagctggacggcaagctcgtgctgctgggcgtcatcggcgagcccctgagcttcgtgtcgcccatggtgatgctggggcggaaggccatcacggggagcttcatcggcagcatcgacgagaccgctgaggtgcttcagttctgcgtcgacaaggggctcacctcccagatcgaggtggtcaagatggggtacgtgaacgaggcgctggagcggctggagcgcaacgacgtccgctaccgcttcgtcgtcgacgtcgccggtagcaacgtcgaggcggaggcggcggcggcggatgcggccagcaactgatggcaccgcgtcgtcgagtcgaaccacgtctgtgcgccgcgtgcaacgttcgttcgggtcgagtctgcgtgcaacgttctgcttcctttactagttgttgtctttccgccttcttgccgttctgttctgggctttgagatgagacgatggatggtcagtttttaatgtc

SEQ ID NO: 481 - protein, 451 aa, Zea mays subsp. mays
  misc_feature (1)..(451): Ceres Seq. ID no. 12589138
MASGRESFSHLLPAQSPATRPPVLSSSARAKSSAPHPEAPCSAPEIPPMAGVRSLRSSDRTPWPSRLPFPHAQEFTSVRSARSLPPSSAAHLHGQSSFISLLSASSPCSRSAPPMAGIPFLPSSHGGAHPLLPPVLPTTPTAGLCARALLPCRAPRPAVVEVGPEVAKYGVGDVVGVGVIVGCCRECSPCKANVEQYCNKKIWSYNDVYTDGRPTQGGFASTMVVDQKFVVKIPAGLAPEQAAPLLCAGVTVYSPLKHFGLTTPGLRGGILGLGGVGHMGVKVAKAMGHHVTVISSSSKKRAEAMDHLGADAYLVSSDAAAMAAAADSLDYIIDTVPVHHPLEPYLALLKLDGKLVLLGVIGEPLSFVSPMVMLGRKAITGSFIGSIDETAEVLQFCVDKGLTSQIEVVKMGYVNEALERLERNDVRYRFVVDVAGSNVEAEAAAADAASN

SEQ ID NO: 482 - protein, 403 aa, Zea mays subsp. mays
  misc_feature (1)..(403): Ceres Seq. ID no. 12589139
MAGVRSLRSSDRTPWPSRLPFPHAQEFTSVRSARSLPPSSAAHLHGQSSFISLLSASSPCSRSAPPMAGIPFLPSSHGGAHPLLPPVLPTTPTAGLCARALLPCRAPRPAVVEVGPEVAKYGVGDVVGVGVIVGCCRECSPCKANVEQYCNKKIWSYNDVYTDGRPTQGGFASTMVVDQKFVVKIPAGLAPEQAAPLLCAGVTVYSPLKHFGLTTPGLRGGILGLGGVGHMGVKVAKAMGHHVTVISSSSKKRAEAMDHLGADAYLVSSDAAAMAAAADSLDYIIDTVPVHHPLEPYLALLKLDGKLVLLGVIGEPLSFVSPMVMLGRKAITGSFIGSIDETAEVLQFCVDKGLTSQIEVVKMGYVNEALERLERNDVRYRFVVDVAGSNVEAEAAAADAASN

SEQ ID NO: 483 - protein, 337 aa, Zea mays subsp. mays
  misc_feature (1)..(337): Ceres Seq. ID no. 12589140
MAGIPFLPSSHGGAHPLLPPVLPTTPTAGLCARALLPCRAPRPAVVEVGPEVAKYGVGDVVGVGVIVGCCRECSPCKANVEQYCNKKIWSYNDVYTDGRPTQGGFASTMVVDQKFVVKIPAGLAPEQAAPLLCAGVTVYSPLKHFGLTTPGLRGGILGLGGVGHMGVKVAKAMGHHVTVISSSSKKRAEAMDHLGADAYLVSSDAAAMAAAADSLDYIIDTVPVHHPLEPYLALLKLDGKLVLLGVIGEPLSFVSPMVMLGRKAITGSFIGSIDETAEVLQFCVDKGLTSQIEVVKMGYVNEALERLERNDVRYRFVVDVAGSNVEAEAAAADAASN

SEQ ID NO: 484 - DNA, 444 bp, Zea mays subsp. mays
  misc_feature (1)..(444): Ceres Seq. ID no. 12589183
gccggcatcaccaacttcagcagactcaaggaagttgatctaaacgaaaccccaacgatgcagaataggaggcttcgcgaacgccttgatgccttaacaaagacagttgagctagggagacgatacttcccacactgttcggacgttctggataagttcctcaacgaagaatccactgatccgatcttccttgagactgggaccccggaggatcagcaagtcaagaggatgcgtttctctgagctcagagaggacgtgcgcaaggcgttcacgaaagataaggcagcagtggctgcaatagcttcctcggcgtcctcgtcttcgtctccgaggtgcagacgacccaataggaaatcacggtgatgtcagtctgttcaggacacctgcactgggttgtgtgtgttttgacatgtaacactgtttcagtagataatgctgattgtc

SEQ ID NO: 485 - protein, 120 aa, Zea mays subsp. mays
  misc_feature (1)..(120): Ceres Seq. ID no. 12589184
AGITNFSRLKEVDLNETPTMQNRRLRERLDALTKTVELGRRYFPHCSDVLDKFLNEESTDPIFLETGTPEDQQVKRMRFSELREDVRKAFTKDKAAVAAIASSASSSSSPRCRRPNRKSR

SEQ ID NO: 486 - protein, 101 aa, Zea mays subsp. mays
  misc_feature (1)..(101): Ceres Seq. ID no. 12589185
MQNRRLRERLDALTKTVELGRRYFPHCSDVLDKFLNEESTDPIFLETGTPEDQQVKRMRFSELREDVRKAFTKDKAAVAAIASSASSSSSPRCRRPNRKSR

SEQ ID NO: 487 - DNA, 863 bp, Zea mays subsp. mays
  misc_feature (1)..(863): Ceres Seq. ID no. 12589281
acaaccacactgattgaggcagttcgtgaacaagccgtcacacccactcgctgctgaaccaggagttccatccatcgccgctcactcccacgatcagcgtcgtcgcttatccgcaaatatctctcttcctctttgcagtcggcaccatgggttccgacttcaaatcgatccccttgatcgatatcggcccgcttgtcgaaaagattgatgatccaagcatggccaacgataaggatttactgcaggttgtccggttactggatgatgcttgcaaggaggccggattcttctatgtgaaaggccatggtattgatgagtcactgatgagggaagtcaggaatgtaacccgtgaattctttcagcttccttatgaggaaaaattaaaaattaagatgacaccgagtaccacggagtttctgccgtacagctggagagaaggctccacgagcttctccacgaaagaaaccgggaccggattgaggagctggaagccgcgttgcggcgtgcggagaagaagctcgttgagaaagaaatggaggtgtccctgtggaaggacacggctaagtttgcgttgagacaggaggacaaggagttgcaatgagcatcgaatttctcctgttctctttcagtcgtacaactcttgcgcacgatttcatcggctgttcatgatcaccgaccgccgaaggaggattttggtcaaacaaggtttgccatggcgaactgcggtttgtggaagatatagtcaacctgttcataccaaagtttagtgctagcatattagatctccagtgaacgttttgggctccggtaaaaatcagtagaatgctgtgtaacagttaagttagcctactggtgtacggatc

SEQ ID NO: 488 - protein, 142 aa, Zea mays subsp. mays
  misc_feature (1)..(142): Ceres Seq. ID no. 12589282
MGSDFKSIPLIDIGPLVEKIDDPSMANDKDLLQVVRLLDDACKEAGFFYVKGHGIDESLMREVRNVTREFFQLPYEEKLKIKMTPSTTEFLPYSWREGSTSFSTKETGTGLRSWKPRCGVRRRSSLRKKWRCPCGRTRLSLR

SEQ ID NO: 489 - protein, 118 aa, Zea mays subsp. mays
  misc_feature (1)..(118): Ceres Seq. ID no. 12589283
MANDKDLLQVVRLLDDACKEAGFFYVKGHGIDESLMREVRNVTREFFQLPYEEKLKIKMTPSTTEFLPYSWREGSTSFSTKETGTGLRSWKPRCGVRRRSSLRKKWRCPCGRTRLSLR

SEQ ID NO: 490 - protein, 83 aa, Zea mays subsp. mays
  misc_feature (1)..(83): Ceres Seq. ID no. 12589284
MREVRNVTREFFQLPYEEKLKIKMTPSTTEFLPYSWREGSTSFSTKETGTGLRSWKPRCGVRRRSSLRKKWRCPCGRTRLSLR

SEQ ID NO: 491 - DNA, 768 bp, Zea mays subsp. mays
  misc_feature (1)..(768): Ceres Seq. ID no. 12589383
  misc_feature (710)..(710): n is a, c, t, g, unknown, or other
agaaagcttcgaacatattcaaacgtattgatctgataaatttctctgcatgccaatttgctaacccagctttgcaaagacactatgggatcttggaggccttagctttaggcgaagatgagatgcctgatataaaggatgagaccctgcctgacgaagaaggcttgtctaagccaggggtagccaatgctattgaggaattcaagacttcagtctatggtgaaaattatgaccaagaggaggcagaagcggcagcagggaaagcttcccgtggtaatgcttcaaaaaagcggaaggaggtcactgatgcagctgcgcagataagtgctgcttatgattgggcagaacttgcagacaatggaaaactgaaggaaatgaccacggtggaattgagatcctacctgaccgcgcatgatctcccggtttctggtaagaaagatgtacttatcagcaggatcttgactcacctgggtaagtgaagccgggtatccgaactgttagtttcctgagacccgactgacatctgtagtgctgtctcgcggatccttgtggaccgtaatcctcccccgtgcaggctacgtgccgattttttgtatagcgacaggacagcaccagttgccaatgtaacctgtgttaagtttcgtcttgtggtatcatctgcttgtcattgtcaacatgaaacataatgtaattctggatacttagacccncaatatggagcataactgcataaggtatgttaaagcataggccctctttagcatggcc

SEQ ID NO: 492 - protein, 158 aa, Zea mays subsp. mays
  misc_feature (1)..(158): Ceres Seq. ID no. 12589384
KASNIFKRIDLINFSACQFANPALQRHYGILEALALGEDEMPDIKDETLPDEEGLSKPGVANAIEEFKTSVYGENYDQEEAEAAAGKASRGNASKKRKEVTDAAAQISAAYDWAELADNGKLKEMTTVELRSYLTAHDLPVSGKKDVLISRILTHLGK

SEQ ID NO: 493 - protein, 118 aa, Zea mays subsp. mays
  misc_feature (1)..(118): Ceres Seq. ID no. 12589385
MPDIKDETLPDEEGLSKPGVANAIEEFKTSVYGENYDQEEAEAAAGKASRGNASKKRKEVTDAAAQISAAYDWAELADNGKLKEMTTVELRSYLTAHDLPVSGKKDVLISRILTHLGK

SEQ ID NO: 494 - DNA, 706 bp, Zea mays subsp. mays
  misc_feature (1)..(706): Ceres Seq. ID no. 12589400
ggagccacacgaggagtggagaaacaaggtcgtagaaaggttggcttctgatgcccagagactcagtgccctccagtccagcatccaagaacttaaaacgaacgccgaaacatccgaagaggtagaactcgggagtgtcaggtaccaaataacagaagctgagggtaccatcatgcagctgatcgataccaacagtaagctatccaagaaggccgaggagttcacgtctcccgatggccccgatgcggagaacagtgacttgaggagcaggcatcagcgtaagatcttggagcgtgcaaggaagatgtccgagaagatcgggaggctggaggtggaaatgcagaaggtccagcaggctctgctcaaatacgaggaggagcagagtaccaggagtacctcaaaagccctgcagcggcggtccaaagtgcagctcgtggagtatctctacggccggcggcgggacagtcgcaaacagcagcggaactcgccttgtggttgcatgagagcgaaaaccatcgacgactaacgacgtgcctttcatgccgcttccttttttttaaggcgtaatggaaggccaatcttgtcagcttcagaatgtatcaggtcttatgtttatttcatgttcaatgtagataaatgagtggctgtataagggctgtaaattgtagccatgtacaataaccctctgttattaacgaccaattgg

SEQ ID NO: 495 - protein, 174 aa, Zea mays subsp. mays
  misc_feature (1)..(174): Ceres Seq. ID no. 12589401
EPHEEWRNKVVERLASDAQRLSALQSSIQELKTNAETSEEVELGSVRYQITEAEGTIMQLIDTNSKLSKKAEEFTSPDGPDAENSDLRSRHQRKILERARKMSEKIGRLEVEMQKVQQALLKYEEEQSTRSTSKALQRRSKVQLVEYLYGRRRDSRKQQRNSPCGCMRAKTIDD

SEQ ID NO: 496 - protein, 117 aa, Zea mays subsp. mays
  misc_feature (1)..(117): Ceres Seq. ID no. 12589402
MQLIDTNSKLSKKAEEFTSPDGPDAENSDLRSRHQRKILERARKMSEKIGRLEVEMQKVQQALLKYEEEQSTRSTSKALQRRSKVQLVEYLYGRRRDSRKQQRNSPCGCMRAKTIDD

SEQ ID NO: 497 - DNA, 1618 bp, Zea mays subsp. mays
  misc_feature (1)..(1618): Ceres Seq. ID no. 12589493
cagctacgtaggcccccccccccaaacaaatcactttctgcacttggtgatgttatatctgctcttgcaacgaagacctcacacataccctttaggaattcgaagctaacgcacttgctccaagactcactaagtggagattccaaaaccttgatgttcgttcaaatcagtcctaatgagaacgacgtgggtgaaactctttgttcgttgaacttcgcgagcagagtgcgaggcatagagcttggacaagctaaaaagcaagtcgatattggagaattgtcaagatacaagctcatggttgggagagccaaacaggacagcaagaacaaagatgctcagattaaaagcatggaagaaaggatacagatacttgaagcaaagaataagaccaaagacttgctcactttgaatctccaagagaagatcaaagagctggaatcacagctcctagttgaaagaaagatagcacggcagcatgtcgacaacaagattgcccaagaccatctgcagaagcagcacggcatgaaagaagagaactcgtacccgagaagcccgatggccgagaggaacctcaactccacagcagagaaagcagcagcgcctaaagacttggggggcatctcgaagcagatgttctccgacagcaacactgacacttacagcttcaagcagctgatgtcactaggggacgagaaggagaacgaccctgaagctgctgtgcagctgccgccgacaacgaaggccaggcgagtgtcactctgcaacggtggagctcaccagcggccgttgaacccagcttcacgcaggacgtccctcataccgctgccacggcgcaactcgctgctgccaatgcccgtagcaaagcctgctgctgcagcagcagcggtgttgccgcttgaaaagatcattgagaacctgtcctcgcccccgctgtgctctcctccggctgtatccaacgacaagggcagccggagtaggaggatcaacagcatactgcggcgaagcctgcagaagaaggtagtcatccggccgtcgctggcagcgcaggcagggaagaaagccgccggtgctgctgctgctgcccggggtactgacagcgcacgcagggcggcgcggcgggtgcctgtgagccacggcgctggcgtgcacaaggtacagcagaacagggacaaggagcgggggtggagcaacttctgaccaggagatcgcggcacctctattgttaaagaagcctgtggagatttagggtctgttcggttgtaccggaatgagccatgattcattccagctcatcaaaatatatataaattagagaagtaatccggctagaaattaatccggggctccaatccggaacaactgaacagggccttaggtgtttattattttaggttggttgtacaaaatttaggtgttattatttggttgggtttgtgagttctcgcgtattgtgagagaactcgaccgtttgctgctgaccccgatcaggtcaggtttttacaatgcttccagggacttttgtgggaggctgggagtgttcatgtaacgatctcttatgctgattactgacacagtggacagtgctttcccgatgcgtgaagaaaatttgcagggattt

SEQ ID NO: 498 - protein, 398 aa, Zea mays subsp. mays
  misc_feature (1)..(398): Ceres Seq. ID no. 12589494
QLRRPPPPNKSLSALGDVISALATKTSHIPFRNSKLTHLLQDSLSGDSKTLMFVQISPNENDVGETLCSLNFASRVRGIELGQAKKQVDIGELSRYKLMVGRAKQDSKNKDAQIKSMEERIQILEAKNKTKDLLTLNLQEKIKELESQLLVERKIARQHVDNKIAQDHLQKQHGMKEENSYPRSPMAERNLNSTAEKAAAPKDLGGISKQMFSDSNTDTYSFKQLMSLGDEKENDPEAAVQLPPTTKARRVSLCNGGAHQRPLNPASRRTSLIPLPRRNSLLPMPVAKPAAAAAAVLPLEKIIENLSSPPLCSPPAVSNDKGSRSRRINSILRRSLQKKVVIRPSLAAQAGKKAAGAAAAARGTDSARRAARRVPVSHGAGVHKVQQNRDKERGWSNF

SEQ ID NO: 499 - protein, 347 aa, Zea mays subsp. mays
  misc_feature (1)..(347): Ceres Seq. ID no. 12589495
MFVQISPNENDVGETLCSLNFASRVRGIELGQAKKQVDIGELSRYKLMVGRAKQDSKNKDAQIKSMEERIQILEAKNKTKDLLTLNLQEKIKELESQLLVERKIARQHVDNKIAQDHLQKQHGMKEENSYPRSPMAERNLNSTAEKAAAPKDLGGISKQMFSDSNTDTYSFKQLMSLGDEKENDPEAAVQLPPTTKARRVSLCNGGAHQRPLNPASRRTSLIPLPRRNSLLPMPVAKPAAAAAAVLPLEKIIENLSSPPLCSPPAVSNDKGSRSRRINSILRRSLQKKVVIRPSLAAQAGKKAAGAAAAARGTDSARRAARRVPVSHGAGVHKVQQNRDKERGWSNF

SEQ ID NO: 500 - protein, 300 aa, Zea mays subsp. mays
  misc_feature (1)..(300): Ceres Seq. ID no. 12589496
MVGRAKQDSKNKDAQIKSMEERIQILEAKNKTKDLLTLNLQEKIKELESQLLVERKIARQHVDNKIAQDHLQKQHGMKEENSYPRSPMAERNLNSTAEKAAAPKDLGGISKQMFSDSNTDTYSFKQLMSLGDEKENDPEAAVQLPPTTKARRVSLCNGGAHQRPLNPASRRTSLIPLPRRNSLLPMPVAKPAAAAAAVLPLEKIIENLSSPPLCSPPAVSNDKGSRSRRINSILRRSLQKKVVIRPSLAAQAGKKAAGAAAAARGTDSARRAARRVPVSHGAGVHKVQQNRDKERGWSNF

SEQ ID NO: 501 - DNA, 705 bp, Zea mays subsp. mays
  misc_feature (1)..(705): Ceres Seq. ID no. 12589515
cagctacgtaggccccccccccccaaagcacaagtgcacaaccaacagcaaagaagagacgacgtcgatcgatcgatatctcagcaaccaagcaggtaggtaggcatggcggccgagaaggagggcgcggtggtgaccaagggccacgacgaggggatgaaggcggcggcggcgctgctggaggagttcgggctcccgccggggctgctgccgctggaggacgtgacggaggtggggttcgtgcgggccaccggctacttctggctcgcgcagcgcaagaaggtggagcaccggttccgcaagatcggcaagcaggtgagctacgacgtcgatatcgccggctacgtccggcccaggggcatcaggaggctcaagggggtcaaggccaaggagctcatgctctggccgcccgtctacgagatggccgtcgacgacgacccgcccaccggcggcaagatccacttcaagagcctcgccggcgtcaccaagaccttccccgttgacgcattcgccgccggccagtagccatcttatatcactacaataatacatacaccattatatatggcgcatatatatactattaattaatctcttgtgttactaccttatatatatgttatgtgtgtacttgctaatcctgatgatgatggagaacgtaacctctagtttttttctgacaaatataatgaaatgaagccgaat

SEQ ID NO: 502 - protein, 139 aa, Zea mays subsp. mays
  misc_feature (1)..(139): Ceres Seq. ID no. 12589516
MAAEKEGAVVTKGHDEGMKAAAALLEEFGLPPGLLPLEDVTEVGFVRATGYFWLAQRKKVEHRFRKIGKQVSYDVDIAGYVRPRGIRRLKGVKAKELMLWPPVYEMAVDDDPPTGGKIHFKSLAGVTKTFPVDAFAAGQ

SEQ ID NO: 503 - protein, 122 aa, Zea mays subsp. mays
  misc_feature (1)..(122): Ceres Seq. ID no. 12589517
MKAAAALLEEFGLPPGLLPLEDVTEVGFVRATGYFWLAQRKKVEHRFRKIGKQVSYDVDIAGYVRPRGIRRLKGVKAKELMLWPPVYEMAVDDDPPTGGKIHFKSLAGVTKTFPVDAFAAGQ

SEQ ID NO: 504 - DNA, 631 bp, Zea mays subsp. mays
  misc_feature (1)..(631): Ceres Seq. ID no. 12589546
cagctacgtaggccccccccccttcactcgagcgccgcttcctctccccttccatcgagcacagcgccgccgccaccactccgcaccgccgccagttccccacttcctccccacccccgaatcggattgaagccagaaggcaaggtgaagagtgggcttgggtgacggttacaaagagatatccccaacagttgcagtcactcgcatccagtcggctcagctatggaggaggactcatcagcgatggagcggaataggctgcgcgaggccgaggcggccgctggggagctgaagaggctgcgcgaggccgggcagtctcagtacatgtacctgtctgtcgccgacgccagggttgtcggcggccgggtctgcctcttcgccgtcgtctccgagatcggcgctaccgtccacagccgtggcacggatttcactgttacgttgagagtaatagatgaatcatacaagtctggaatatctgtaactttttttgctgacagcactgcactattgccttgtgtgaagtcgtgtggagatgtgatcagtctccataacgtcgtggtatagcataaaactctatttaatatgcaattcgcccttgattattcctcgaagttataaaaatgtctttttc

SEQ ID NO: 505 - protein, 113 aa, Zea mays subsp. mays
  misc_feature (1)..(113): Ceres Seq. ID no. 12589547
MEEDSSAMERNRLREAEAAAGELKRLREAGQSQYMYLSVADARVVGGRVCLFAVVSEIGATVHSRGTDFTVTLRVIDESYKSGISVTFFADSTALLPCVKSCGDVISLHNVVV

SEQ ID NO: 506 - protein, 106 aa, Zea mays subsp. mays
  misc_feature (1)..(106): Ceres Seq. ID no. 12589548
MERNRLREAEAAAGELKRLREAGQSQYMYLSVADARVVGGRVCLFAVVSEIGATVHSRGTDFTVTLRVIDESYKSGISVTFFADSTALLPCVKSCGDVISLHNVVV

SEQ ID NO: 507 - protein, 79 aa, Zea mays subsp. mays
  misc_feature (1)..(79): Ceres Seq. ID no. 12589549
MYLSVADARVVGGRVCLFAVVSEIGATVHSRGTDFTVTLRVIDESYKSGISVTFFADSTALLPCVKSCGDVISLHNVVV

SEQ ID NO: 508 - DNA, 524 bp, Zea mays subsp. mays
  misc_feature (1)..(524): Ceres Seq. ID no. 12589587
agaacacaattacacaagcgatagctcgcggtgagcatcgatcactgtgtactcgaacagcaagaatggccaaggttctgcaggccgctgttgctctcctgctggtggaagcgctgctgctgctagcccattgcgacggcagggagctgaaagcgagcggcgtggcggcgtcgggcggcggtgccgccgccaacggtggtggtagtagcgggggcgacgagaaggccacgggcttgccgctgatcccgccgctcccgcccgtgctcggccccgtggtgccgctcccgcccgtcgttcctgggatccctcctccggctcgtgagtccgacaagtttccgtgagtacgtgaccgtgtgcgagctaggtctgtaggccaagcatggtgccgctcggggtggctcctgctcctgagccgaacaagttgcgcgttcgcgtctttgtcatgtacctttatagctaccttgcattttctgttgtgtggagatgtatctacgcgtcacagatcgagttcgtgcttttgagat

SEQ ID NO: 509 - protein, 112 aa, Zea mays subsp. mays
  misc_feature (1)..(112): Ceres Seq. ID no. 12589588
NTITQAIARGEHRSLCTRTARMAKVLQAAVALLLVEALLLLAHCDGRELKASGVAASGGGAAANGGGSSGGDEKATGLPLIPPLPPVLGPVVPLPPVVPGIPPPARESDKFP

SEQ ID NO: 510 - protein, 91 aa, Zea mays subsp. mays
  misc_feature (1)..(91): Ceres Seq. ID no. 12589589
MAKVLQAAVALLLVEALLLLAHCDGRELKASGVAASGGGAAANGGGSSGGDEKATGLPLIPPLPPVLGPVVPLPPVVPGIPPPARESDKFP

SEQ ID NO: 511 - DNA, 627 bp, Zea mays subsp. mays
  misc_feature (1)..(627): Ceres Seq. ID no. 12589671
atgtccagcatatcgacgcagagtcgcagtcgcagcacacactgaattctctttagctagctaagagagggtagccacaccaagacaggatgcagacagcgaaggtgaaggcgaaggacatggtgagctcggcgaaggagaaggtgaaggaggggtcggcaaagatgcagggcaagacgggcgaggcgacggcggccacgcacggcgagaaggagatggccaaggaggcggcccgcgccaagaaggaccaggccaacgccgacaagcaccaggagaaggccgaccaccgagcggacgccgccactggccaccacggcacgcgcgtgcccctcaccggcccgcacggccaccacggcgctggcgcggccgtcgaccccgcgtacccgtcctccggcaacacgtacccggcgtcgggcaagtacatctaggtgactgcgtcggatgagcgaggccagggtcgtggtcgcacttgcgtttttgtgtacgtagcgaccgagaagatcgatcctggctgtacgcctgcagtaccggtaccgactggttagttgtagagggtatgcggtgcgcacgtgcacgtgcgcgcaagtcgtctggaataaaaatgctctagttgctgttaggttgctt

SEQ ID NO: 512 - protein, 112 aa, Zea mays subsp. mays
  misc_feature (1)..(112): Ceres Seq. ID no. 12589672
MQTAKVKAKDMVSSAKEKVKEGSAKMQGKTGEATAATHGEKEMAKEAARAKKDQANADKHQEKADHRADAATGHHGTRVPLTGPHGHHGAGAAVDPAYPSSGNTYPASGKYI

SEQ ID NO: 513 - protein, 102 aa, Zea mays subsp. mays
  misc_feature (1)..(102): Ceres Seq. ID no. 12589673
MVSSAKEKVKEGSAKMQGKTGEATAATHGEKEMAKEAARAKKDQANADKHQEKADHRADAATGHHGTRVPLTGPHGHHGAGAAVDPAYPSSGNTYPASGKYI

SEQ ID NO: 514 - protein, 87 aa, Zea mays subsp. mays
  misc_feature (1)..(87): Ceres Seq. ID no. 12589674
MQGKTGEATAATHGEKEMAKEAARAKKDQANADKHQEKADHRADAATGHHGTRVPLTGPHGHHGAGAAVDPAYPSSGNTYPASGKYI

SEQ ID NO: 515 - DNA, 716 bp, Zea mays subsp. mays
  misc_feature (1)..(716): Ceres Seq. ID no. 12589775
aaataatctaacatcaccaattccatacattaaaaacctccaagcctccatctccagggcagaaacaaaacatcaacacagctaattaagagaagaacatggagaaagtgtgctgcatgtgcggcgacgtcggattttccgacaaactattccgctgcgggcactgccgcaaccgctttcaacactcctattgtagtaattactacagtgagtttgcggagccgaccgagatttgcgactggtgccagagcgacgacaaaaagctgagcagcgttgctaaacacggcggatcttcgttttcttcttcaaagaagaagaaggcttcttcctccgtaaattacgagagcggggtcacaaaccaatcggagtatccttccggtggcgggatcaagcatgacaataaccatcacgatcaagtggccaagagcgttgttgccggacctgcaggaggcggcgtgccgtcgccgaggacggccacgcgaaggtacaagcttctcaaggatgtcaggtgttagatcaatttctgaaagagagcttaataatataatatgctaaaataataataaaaatgcgcctttgagatatgattgagtggtttacaaaatattacgattatctatgtataattaattagatatagtgaatgtatatcttgttgagaagcttttcgtactaatgttgaaaaaataatgaatttatgtttgtcgtgagcttcc

SEQ ID NO: 516 - protein, 138 aa, Zea mays subsp. mays
  misc_feature (1)..(138): Ceres Seq. ID no. 12589776
MEKVCCMCGDVGFSDKLFRCGHCRNRFQHSYCSNYYSEFAEPTEICDWCQSDDKKLSSVAKHGGSSFSSSKKKKASSSVNYESGVTNQSEYPSGGGIKHDNNHHDQVAKSVVAGPAGGGVPSPRTATRRYKLLKDVRC

SEQ ID NO: 517 - protein, 132 aa, Zea mays subsp. mays
  misc_feature (1)..(132): Ceres Seq. ID no. 12589777
MCGDVGFSDKLFRCGHCRNRFQHSYCSNYYSEFAEPTEICDWCQSDDKKLSSVAKHGGSSFSSSKKKKASSSVNYESGVTNQSEYPSGGGIKHDNNHHDQVAKSVVAGPAGGGVPSPRTATRRYKLLKDVRC

SEQ ID NO: 518 - DNA, 915 bp, Zea mays subsp. mays
  misc_feature (1)..(915): Ceres Seq. ID no. 12589876
accataagtaatttaatacttaattaccgcatttgagaaaatctcacattcacacatttaaagatgacaaggaccattatgctcctatctattgccgtcgccgtcttggccatcaccgccgtcttcgccgctgatcctccaacaccagccggagcgcctaaagccaacgccaacaaaagctcacccactgcttctcccaccgcagcagcatcccccaaacaaccctccggagcagcatccccaaaaccaaccgccgcaggatccccaaaaccacccgccgcagggtccccaaaacaaaccgcttccgccccaacctcgccgcctacggcctctgctcccaccaccaccaagaagaactcctccgccactccaagcgcttccccatcttcaggtggtggctcccccgcaaacgctccaaaatcttcgtcagccaaaactccggctccaagccccgactcaagctccggaggtcctaccagctcatccgaaggtcctacaagctcatcggaaggtcctacaagctcgtccgaaggccctacaagctcgtctgaaggtcctactagctcgtccgactcaccatccgcatcgtctccgccgtctccgacaccagacatgtctccgtcgtcgtcccctgatgaaggacccaccagtgaaggccccgaagcttcagctccgacgggaagagcctcgtcgcttgagatctctatctctggatctgttctcatcgcagctgcatggttattcttcatatgatgaaatgttactcttgtgttttttattacacttataaagggctcgtttcatttaatattttttggttccttaaaaaaggtttgcactcaggttcagttgaattcgtgcatagtatggaggttaggatttgatatatgttgtaataaatgtttcgcttgggtt

SEQ ID NO: 519 - protein, 229 aa, Zea mays subsp. mays
  misc_feature (1)..(229): Ceres Seq. ID no. 12589877
MTRTIMLLSIAVAVLAITAVFAADPPTPAGAPKANANKSSPTASPTAAASPKQPSGAASPKPTAAGSPKPPAAGSPKQTASAPTSPPTASAPTTTKKNSSATPSASPSSGGGSPANAPKSSSAKTPAPSPDSSSGGPTSSSEGPTSSSEGPTSSSEGPTSSSEGPTSSSDSPSASSPPSPTPDMSPSSSPDEGPTSEGPEASAPTGRASSLEISISGSVLIAAAWLFFI

SEQ ID NO: 520 - protein, 224 aa, Zea mays subsp. mays
  misc_feature (1)..(224): Ceres Seq. ID no. 12589878
MLLSIAVAVLAITAVFAADPPTPAGAPKANANKSSPTASPTAAASPKQPSGAASPKPTAAGSPKPPAAGSPKQTASAPTSPPTASAPTTTKKNSSATPSASPSSGGGSPANAPKSSSAKTPAPSPDSSSGGPTSSSEGPTSSSEGPTSSSEGPTSSSEGPTSSSDSPSASSPPSPTPDMSPSSSPDEGPTSEGPEASAPTGRASSLEISISGSVLIAAAWLFFI

SEQ ID NO: 521 - DNA, 872 bp, Zea mays subsp. mays
  misc_feature (1)..(872): Ceres Seq. ID no. 12590086
acacacacacacgcgagcctcacactctctgatcacagtaggactagcttcagctagcctgcagcgtctgccactccgggcattttcttgcatcaaccacggcaatggccaccgctgatgtccagaacccgacggccgcgctgacggaggaggcgcctgcggtggagacgcccgtcgccgccgaggaggttgctaagacagaggaggtccccgcgccggtggaggccgaagtcgaggcgcctgcccccgtcgaggttgaggcgaccaaggaggacgcaccggccgccgccgagacgaaggagaccaaggagcccgagccagcagctgctgccgagccggaggccgaggcgccgaaagagccagccgtggtcgagacagagaccaaggaggcggtggcagaggccgagccggcggtggcagaggaggtgaaggaggaggcggcgcctgctgccgagccggaggtggcggccgtcgccgaggaagcacctgctgctgcggaggaggagccggccgccgcggtggccagcgtcagcgtgtgaggcgcgcggtggagggcaactggctgggtcagcgtccacgacggcggccgtgtgctcctacgtggcaacggcgtgatgctgagtcagccagtggagtggactggagtgctactttttactacgagtactaggtgtggagtggagtggagtgctatgcgcggggtcgcgtgacgtggcctaaataaaagtgttgtcggtcagcatcgagcgagcgacgcagtgccactctagataatgtatgctttttattttgtcgacaagacatgattcattatttctacggaaaaaaaaaaaaaaaaaagcttatcgataccgtcgacctcgagggggggc

SEQ ID NO: 522 - protein, 144 aa, Zea mays subsp. mays
  misc_feature (1)..(144): Ceres Seq. ID no. 12590087
MATADVQNPTAALTEEAPAVETPVAAEEVAKTEEVPAPVEAEVEAPAPVEVEATKEDAPAAAETKETKEPEPAAAAEPEAEAPKEPAVVETETKEAVAEAEPAVAEEVKEEAAPAAEPEVAAVAEEAPAAAEEEPAAAVASVSV

SEQ ID NO: 523 - DNA, 1226 bp, Zea mays subsp. mays
  misc_feature (1)..(1226): Ceres Seq. ID no. 12590304
ccccccccccccccaatcaaaagcaagatgcaagttgcaagtctggaaagaccgactaccattcaatgttgcaagtgatttctattgttaagaagctatgagcgaaaattttgtgtctcaagatttgaagcatgagaagcgttgcgggggagaagcttcagtgcaacattgttgttctatagggatcaacatcctcaagatcacttggaaaactttcacgaaaaacttgtaatgcaagcatatgttttattggaaaagttttccaagctgaatttctaaaagcctcctcactgctttagttatgctgaattggaatttgcaactaggggtttcttacaagtaaatttcttagctaaaggcatggtgcactgcacattgatctttcttcttctatcgtatgatgtgacttgtgattgctttgccaatgcgacctacatggagctggattgttattacagacaacagaactgtatttatcttgaataatgattgatggttaagtgcatgcgtcactgggttcgagatcgactacagccactgggtggacgagcagaaaaggcacatggcagagctgacgtcgacgctccaggggcagcagacgtcggagctggagctccgcctgctggtggagacgtggctcagcaactacgagcgcctgtttaggatcaaggcgacggcggccaacgcggacgtgttctacgtcatgtcgggcttgtggaagacccccgccaagaggttcttcctctggatcggtgggttccggccgtcggatgtcctcaaggatgtaagcaatctcatgcacctgttgttgctcgcaaggttcatccctcacaagtacaagatcaaagactcgaaagcttaggttgctttgagccgtggtggatctcccggtgtgatgacatggggctgggtctgggagctcttctcaaatctgggggttctcggtctgctcttctcaatttagtgttatctttttcttttagaacaatgccaaagatacatgacagactgctttgcttgtttttgacatgatgcaaaagcaatggagtctttacttttaaacctttgttatttttgttttgattcaattatgatactgctgaaatgtacggatatctattattttgatgcaatagtggtgttttgcgatgtttaaaaaaaaaaaaaaaaaaaaaaaaaaaaaaaaaagaaaaaaaaaaaaaaaaaaaactcgagggggggcccgg

SEQ ID NO: 524 - protein, 99 aa, Zea mays subsp. mays
  misc_feature (1)..(99): Ceres Seq. ID no. 12590305
MAELTSTLQGQQTSELELRLLVETWLSNYERLFRIKATAANADVFYVMSGLWKTPAKRFFLWIGGFRPSDVLKDVSNLMHLLLLARFIPHKYKIKDSKA

SEQ ID NO: 525 - protein, 56 aa, Zea mays subsp. mays
  misc_feature (1)..(56): Ceres Seq. ID no. 12590306
MVKCMRHWVRDRLQPLGGRAEKAHGRADVDAPGAADVGAGAPPAGGDVAQQLRAPV

SEQ ID NO: 526 - protein, 52 aa, Zea mays subsp. mays
  misc_feature (1)..(52): Ceres Seq. ID no. 12590307
MRHWVRDRLQPLGGRAEKAHGRADVDAPGAADVGAGAPPAGGDVAQQLRAPV

SEQ ID NO: 527 - DNA, 952 bp, Zea mays subsp. mays
  misc_feature (1)..(952): Ceres Seq. ID no. 12590523
cgtaatcaaaaacttctgattcattttcagttctagctgtgtgctgaagtgttattctggatgtatacttgattatttgtcagtttcctaaacgcacaacacattactaccattactcccaccattgctatctaggtctgatatggtttttgtgagttcttaacttgtcgtttttgtcattttggtccaggagtgtagcaccaattagttcgagtgatgtatctctgcccacatcatcattagatctcccagatgttgcagatctctttgctccccctgcagacaatgcatcaaggaagagggaatcaaataggtctgctcttcatgactcgcgcaataaatttccaatggtgggagcacaaccctaaggcataggaagtgctgcagggaacaccctaattccaccgcagctccgtggaagtagccgatggatggagaatggtggatcgaggagaccgatgacgtactgctgcatcccgcgctgctcaatgggcagcagtaccggccagtctggtcaaacgacggcgctgtgatccacgcagatttccagttaagtttcttctgatggtgatggtactaaagaggactatgttcatatccgggcaaagcgaggccaagccactaacagccacagccttgcagaaagactggggagaaagaagataagtgagaggatgaagcttcttcaagatcttgttcctgaatgcagtaaggatcaagcggccttactggcccatttaaccaaggaatcatgcagccataattgatgtgcaccattgccaatcccgttgatgttttgcacggagctattcacgacgcgtcaacaatgaaccatgtaattttacagagtgacatactgatatatgtatatgcagttccatatgtgcttccaaagataatgccttaaacatctgtgcatcacaatatttagaatcatacacttgctctactc

SEQ ID NO: 528 - protein, 46 aa, Zea mays subsp. mays
  misc_feature (1)..(46): Ceres Seq. ID no. 12590524
MCTIANPVDVLHGAIHDASTMNHVILQSDILIYVYAVPYVLPKIMP

SEQ ID NO: 529 - protein, 45 aa, Zea mays subsp. mays
  misc_feature (1)..(45): Ceres Seq. ID no. 12590525
MDGEWWIEETDDVLLHPALLNGQQYRPVWSNDGAVIHADFQLSFF

SEQ ID NO: 530 - protein, 40 aa, Zea mays subsp. mays
  misc_feature (1)..(40): Ceres Seq. ID no. 12590526
MLQISLLPLQTMHQGRGNQIGLLFMTRAINFQWWEHNPKA

SEQ ID NO: 531 - DNA, 968 bp, Zea mays subsp. mays
  misc_feature (1)..(968): Ceres Seq. ID no. 12590574
cagctacgtaggcccccccctatatgcttcatggcgccactctccgatggctacgataagtttatgtttacttgctcaggcatacaatcacgcaagctgtgttattcagtcactgggagaagaagacataaatgtgaattttttggttcaattagataaattgatccgtctcttagagactccagtatttgcttacttgcgtttacagcttctcgagcctggaaaacacacttggcttctgaaaactctttacggtctcctgatgcttttgcctcagcaaagtgcggccttcaagatcttgaggactcgactgaagactgtgccattcagtgaaaatcttaagcgcacatcttcagcgaatccatactctcagattctgcaagtgacggaagatggcaatagaaaccaagatatgcagaactacagtgcaatcaatttcccattccttctccagcaatttgagaacatgcagctgcagcatcgtaaccatttgaaggatcaactgcaatcccgtaaatctgcttcgactttaacattatctcaggagatacaaagatacgaagaagcgcattcctcttcgctgtcagagattaacaggcccccttcaagaacatccaaaggcattttatgatgcatttgttcttgcgatgtatgatatatttgccggaagcatcaccacatatatgttggggctttggttagtctcctcgttttttttcaaaggaggttgcatagggtacatagtgtaatcttttctatttcgttcctagatttgtcaagagatggcaattatttgttggagaaagctcgttgccacattctagtcattcttttcttagtggtttcactgctcatctggtttctgtaatttttcaattgaaggccaaatgagcaaagtagtaattggagatagaaatatgttactactgtcctatctatcgatctccaataaattagcgttgcaatgc

SEQ ID NO: 532 - protein, 209 aa, Zea mays subsp. mays
  misc_feature (1)..(209): Ceres Seq. ID no. 12590575
SYVGPPLYASWRHSPMATISLCLLAQAYNHASCVIQSLGEEDINVNFLVQLDKLIRLLETPVFAYLRLQLLEPGKHTWLLKTLYGLLMLLPQQSAAFKILRTRLKTVPFSENLKRTSSANPYSQILQVTEDGNRNQDMQNYSAINFPFLLQQFENMQLQHRNHLKDQLQSRKSASTLTLSQEIQRYEEAHSSSLSEINRPPSRTSKGIL

SEQ ID NO: 533 - protein, 194 aa, Zea mays subsp. mays
  misc_feature (1)..(194): Ceres Seq. ID no. 12590576
MATISLCLLAQAYNHASCVIQSLGEEDINVNFLVQLDKLIRLLETPVFAYLRLQLLEPGKHTWLLKTLYGLLMLLPQQSAAFKILRTRLKTVPFSENLKRTSSANPYSQILQVTEDGNRNQDMQNYSAINFPFLLQQFENMQLQHRNHLKDQLQSRKSASTLTLSQEIQRYEEAHSSSLSEINRPPSRTSKGIL

SEQ ID NO: 534 - protein, 122 aa, Zea mays subsp. mays
  misc_feature (1)..(122): Ceres Seq. ID no. 12590577
MLLPQQSAAFKILRTRLKTVPFSENLKRTSSANPYSQILQVTEDGNRNQDMQNYSAINFPFLLQQFENMQLQHRNHLKDQLQSRKSASTLTLSQEIQRYEEAHSSSLSEINRPPSRTSKGIL

SEQ ID NO: 535 - DNA, 685 bp, Zea mays subsp. mays
  misc_feature (1)..(685): Ceres Seq. ID no. 12590595
aataattcttttctgctgcgccgggcaggccaggggtgatgctgctttatcctctctacgcgtccatgcgcgccatcgagagcccttcttccctggacgaccagcagtggctcacctactgggtcctgtactcgctgatcaccctcttcgagctctcaagctggaaagtcctgcagtggtttcccctgtggccgtacatgaagctgctcttctgctgctggctggtgcttcccgtcttcaacggcgcggcctacatctacgaggcgcacgtccggcgctacttcaagacgggcacctacgtgagccccagctacggcgagcgccagcgccgggtgctgcagatgatgagcctcgacgcgcgcaagtccgtcgagcgcttcatcgacacgcacgggcccgacgcgctcgacaggatcatcggagccgctgaagaggaagccaagagggagaaacctgaattgttccgggtggaaaccgaagcaagtctcccatcggttgggtagtcacttgtgcagaaatcgtatcgtatgcgtgtgtgtgtggttgatcattacgtcgggcttgcccagcagttggagaagagatgcccggtgcccatgagagcatgcatgcatatatggcttgaaagaagccgcgaaatttggtgtacttgttaatgaaaatttggcttggacctgtgaaagcc

SEQ ID NO: 536 - protein, 154 aa, Zea mays subsp. mays
  misc_feature (1)..(154): Ceres Seq. ID no. 12590596
MLLYPLYASMRAIESPSSLDDQQWLTYWVLYSLITLFELSSWKVLQWFPLWPYMKLLFCCWLVLPVFNGAAYIYEAHVRRYFKTGTYVSPSYGERQRRVLQMMSLDARKSVERFIDTHGPDALDRIIGAAEEEAKREKPELFRVETEASLPSVG

SEQ ID NO: 537 - protein, 145 aa, Zea mays subsp. mays
  misc_feature (1)..(145): Ceres Seq. ID no. 12590597
MRAIESPSSLDDQQWLTYWVLYSLITLFELSSWKVLQWFPLWPYMKLLFCCWLVLPVFNGAAYIYEAHVRRYFKTGTYVSPSYGERQRRVLQMMSLDARKSVERFIDTHGPDALDRIIGAAEEEAKREKPELFRVETEASLPSVG

SEQ ID NO: 538 - protein, 142 aa, Zea mays subsp. mays
  misc_feature (1)..(142): Ceres Seq. ID no. 12590598
IILFCCAGQARGDAALSSLRVHARHREPFFPGRPAVAHLLGPVLADHPLRALKLESPAVVSPVAVHEAALLLLAGASRLQRRGLHLRGARPALLQDGHLREPQLRRAPAPGAADDEPRRAQVRRALHRHARARRARQDHRSR

SEQ ID NO: 539 - DNA, 970 bp, Zea mays subsp. mays
  misc_feature (1)..(970): Ceres Seq. ID no. 12590628
agaaaggagaggtggtggggcgatggcagcgactgcggcggagggggtggccgcgacggcgctgcgagccgtgctggggcgggcgggtatggcggcggagcggtcggggcgcgccgcggaggcggtacgggttgtggcggtggggaagaccaagcctgtttcgatgctgcggcagctatacgacgcgggccaccgctgcttcagcgagaactacgtgcaggagttcgtcaccaaggccccccagcttccgcaagatacccggtggcattttatcgggcacctgcagagcaacaaagtgaaaccactgttagctgctgttccaaatcttgatatggttgagggcgtagacaatgaaaagattgctaaccacctagatcgagccgtcaacagtttgggaaggcagcctttgaaagttttggttcaagtgaacactagtggagaagaatctaaatctggaatcgatccctccaaatgtgtcgaccttgctaagcatgtgaaactagcatgcccacacctaatattttcaggtctgatgacaataggtatgaaagactactcgtcaacaccagaaaattttaaggcattggttaattgtaagcttgaagtttgcaaggcccttgacataccaacagaacagtttgaactctccatgggaatgtctggtgactttgagcaggcgattgagatgggcagcacgaatgtgaggattggatcaaccatttttggaccaagggagtatccaaacaaaaggcagaactagtgagattcaacgcataagtgtcatctcaatacccagtcctcttgattaaccttttgcctatgtaagcatgatgctatgtataaatgcacatgtgaataggtaacatgtacaaccccatacaacactgtttgcagggggagggggaaccctccatacaacagtacggcattgtagaagaaattttgtgacatggtcttgaatagaaatttc

SEQ ID NO: 540 - protein, 252 aa, Zea mays subsp. mays
  misc_feature (1)..(252): Ceres Seq. ID no. 12590629
ERRGGGAMAATAAEGVAATALRAVLGRAGMAAERSGRAAEAVRVVAVGKTKPVSMLRQLYDAGHRCFSENYVQEFVTKAPQLPQDTRWHFIGHLQSNKVKPLLAAVPNLDMVEGVDNEKIANHLDRAVNSLGRQPLKVLVQVNTSGEESKSGIDPSKCVDLAKHVKLACPHLIFSGLMTIGMKDYSSTPENFKALVNCKLEVCKALDIPTEQFELSMGMSGDFEQAIEMGSTNVRIGSTIFGPREYPNKRQN

SEQ ID NO: 541 - protein, 245 aa, Zea mays subsp. mays
  misc_feature (1)..(245): Ceres Seq. ID no. 12590630
MAATAAEGVAATALRAVLGRAGMAAERSGRAAEAVRVVAVGKTKPVSMLRQLYDAGHRCFSENYVQEFVTKAPQLPQDTRWHFIGHLQSNKVKPLLAAVPNLDMVEGVDNEKIANHLDRAVNSLGRQPLKVLVQVNTSGEESKSGIDPSKCVDLAKHVKLACPHLIFSGLMTIGMKDYSSTPENFKALVNCKLEVCKALDIPTEQFELSMGMSGDFEQAIEMGSTNVRIGSTIFGPREYPNKRQN

SEQ ID NO: 542 - protein, 223 aa, Zea mays subsp. mays
  misc_feature (1)..(223): Ceres Seq. ID no. 12590631
MAAERSGRAAEAVRVVAVGKTKPVSMLRQLYDAGHRCFSENYVQEFVTKAPQLPQDTRWHFIGHLQSNKVKPLLAAVPNLDMVEGVDNEKIANHLDRAVNSLGRQPLKVLVQVNTSGEESKSGIDPSKCVDLAKHVKLACPHLIFSGLMTIGMKDYSSTPENFKALVNCKLEVCKALDIPTEQFELSMGMSGDFEQAIEMGSTNVRIGSTIFGPREYPNKRQN

SEQ ID NO: 543 - DNA, 654 bp, Zea mays subsp. mays
  misc_feature (1)..(654): Ceres Seq. ID no. 12593827
acgttgagcgcctacattcaggagttccagaaacttgctacagccatggtggcaaacaaagaggtcccgacaaattttcagcccccagacatgttggacaagcaaataggactcctcccaggcgttgtgttcgactccacacctcctggggtggagttcggagatgtcagctcagacgtccccgcaagctcaactttcaggaagggcagtgtcgtgaacgctacattctactcggcgtgcccgaggaatgaccttctcacggacggcacgttcgcgctcgttgagaagctggacggcagcaacagctgggttcctgcctacgacgacgacgactggtcactacgcttcaagtggtccagaccgtcgaagctgagcccgagaagcttcgcgacgctggaatggaccgttcctgaagacgccccgtcgggcgtttataggttgaggcattttggtgcctccaaaccactgattgggtccatcaaacattttacggggacctctcgggcgttcgcagtgcgttaggtagcacaccgttgcgttgcgttgcgttcgacggcacacctgccagagaatcgacaccgggtcatatattttactttgcatacctgccacagtatatggacatgttttccctatagtttttacatgctcctg

SEQ ID NO: 544 - protein, 173 aa, Zea mays subsp. mays
  misc_feature (1)..(173): Ceres Seq. ID no. 12593828
TLSAYIQEFQKLATAMVANKEVPTNFQPPDMLDKQIGLLPGVVFDSTPPGVEFGDVSSDVPASSTFRKGSVVNATFYSACPRNDLLTDGTFALVEKLDGSNSWVPAYDDDDWSLRFKWSRPSKLSPRSFATLEWTVPEDAPSGVYRLRHFGASKPLIGSIKHFTGTSRAFAVR

SEQ ID NO: 545 - protein, 158 aa, Zea mays subsp. mays
  misc_feature (1)..(158): Ceres Seq. ID no. 12593829
MVANKEVPTNFQPPDMLDKQIGLLPGVVFDSTPPGVEFGDVSSDVPASSTFRKGSVVNATFYSACPRNDLLTDGTFALVEKLDGSNSWVPAYDDDDWSLRFKWSRPSKLSPRSFATLEWTVPEDAPSGVYRLRHFGASKPLIGSIKHFTGTSRAFAVR

SEQ ID NO: 546 - protein, 143 aa, Zea mays subsp. mays
  misc_feature (1)..(143): Ceres Seq. ID no. 12593830
MLDKQIGLLPGVVFDSTPPGVEFGDVSSDVPASSTFRKGSVVNATFYSACPRNDLLTDGTFALVEKLDGSNSWVPAYDDDDWSLRFKWSRPSKLSPRSFATLEWTVPEDAPSGVYRLRHFGASKPLIGSIKHFTGTSRAFAVR

SEQ ID NO: 547 - DNA, 674 bp, Zea mays subsp. mays
  misc_feature (1)..(674): Ceres Seq. ID no. 12594042
agtcagatggggcaaccaaacaagaaaattatcctgcctttggccttggagatggtacagatactccaaaaatgttggagagaagcaatagcagcgtaccatttgaattatacaagaaccagactaccgttgttgtttcaagagaggagtttgtaagtgttgtatgtgatgccctctctttgtacaagtatgttggacccaaccagaaagctgacctgcttcttgcttgcagaattaaagagagaaaggaatcggtggcaatactcttgtgtgggacaagtggatgtggcaagtccactttatcatctttgctgggtagtaggttgggtatcacgacagtagtttctactgattccatacgacatatgatgagaagctttgcagatgaaaaacaaagtcctcttctctatgcatcaacctaacatgcaggtgaatatttggatcctattgcagttgctcaggcaaaggcaaagcgcaatgcaaataaacccacagttgtttctcatccaaataccagtggagacaaagatgtgacttcaggtgacaaatctcagcatggatcttcagaattacctcctagagctgaattgattggcaacaagcaaatggcagtagaaggctacaaggcgcaaagtgagatggtgatcgacagcctggacaggttaattacatcc

SEQ ID NO: 548 - protein, 139 aa, Zea mays subsp. mays
  misc_feature (1)..(139): Ceres Seq. ID no. 12594043
SDGATKQENYPAFGLGDGTDTPKMLERSNSSVPFELYKNQTTVVVSREEFVSVVCDALSLYKYVGPNQKADLLLACRIKERKESVAILLCGTSGCGKSTLSSLLGSRLGITTVVSTDSIRHMMRSFADEKQSPLLYAST

SEQ ID NO: 549 - protein, 116 aa, Zea mays subsp. mays
  misc_feature (1)..(116): Ceres Seq. ID no. 12594044
MLERSNSSVPFELYKNQTTVVVSREEFVSVVCDALSLYKYVGPNQKADLLLACRIKERKESVAILLCGTSGCGKSTLSSLLGSRLGITTVVSTDSIRHMMRSFADEKQSPLLYAST

SEQ ID NO: 550 - DNA, 733 bp, Zea mays subsp. mays
  misc_feature (1)..(733): Ceres Seq. ID no. 12594261
attaaggcgctctttccttctgattacaatccattttatgctgggtttggtaacagagatactgatgagctcagttacaagaagatgggaatacctaaaggcaagatttttatcatcaacccaaagggtgaagtggctgtcaacagttctgttgatgtgaagtcttatacgtccctacatacccttgtcaatgacatgtttccaccaacgactctggttgagcaggaagactacaacaactggaattactggaaggtgccattaccagatgttgatttgtagtgtagttttgacagaaacagccgtagataccagtagatcctgcaaaagcctagcagtagagcttcctgtaccctaattttcagccaccacgacggttttaggtccaatttgtgaaggtctcaagaattcccggatgtatggttttctgaaagccaatggcccaaggaaacgttgccactttatttccttcgacggagctttcacgtgatcatacggcttttgggtagtcatctgattgtcttcgtcgaacttgttgtacccagaggtctgagccctagaccctcgattcattagagaacccgtgatctggtcattgtccaagctactttgttctgattgcaggaaatctttaggtgccaaaagcagctgtacatttttttttcgtgatccaaaaacagctgtacatcgtatatcagcggatagaagagaattgctaagcatatctgcatct

SEQ ID NO: 551 - protein, 93 aa, Zea mays subsp. mays
  misc_feature (1)..(93): Ceres Seq. ID no. 12594262
IKALFPSDYNPFYAGFGNRDTDELSYKKMGIPKGKIFIINPKGEVAVNSSVDVKSYTSLHTLVNDMFPPTTLVEQEDYNNWNYWKVPLPDVDL

SEQ ID NO: 552 - protein, 65 aa, Zea mays subsp. mays
  misc_feature (1)..(65): Ceres Seq. ID no. 12594263
MGIPKGKIFIINPKGEVAVNSSVDVKSYTSLHTLVNDMFPPTTLVEQEDYNNWNYWKVPLPDVDL

SEQ ID NO: 553 - protein, 55 aa, Zea mays subsp. mays
  misc_feature (1)..(55): Ceres Seq. ID no. 12594264
MTCFHQRLWLSRKTTTTGITGRCHYQMLICSVVLTETAVDTSRSCKSLAVELPVP

SEQ ID NO: 554 - DNA, 583 bp, Zea mays subsp. mays
  misc_feature (1)..(583): Ceres Seq. ID no. 12594265
atattcccttcttcttcttcttcttgtcctcctccttcgtcttctccatcttcccgtccttcgatccatcaaaagctggccggccgagacgacgtgcatagctataaataatagcccatagcatcctcaacaaccagacaagaagaaccacgccgccggttgtttgttaatttcttccatggagagcacggagctgaaagtggagatggtggcgttgcatgagaagcgggtacgcagatgcctgtccaaagtgaaagggatcgagcgggtggaggtggaggcgagcctgcagaaggtggtggtgacggggtgcgtgaaccggagcaagatcctcaaggcgctccgccgggtggggctgcgcgccgagccgtggtcaccgcacaacgagctgctcagcgcctacgccgccaccaccaccctcgtcttcaacaactcctacgccttcttctgatcaagtcatctcatcctttatagctagatagctactgtaatctctctctctgcgtgcttggcttgcttggagtttgttgggaacgtgaacgacggacggcgttccacatgtacacaacatgaatggcatttt

SEQ ID NO: 555 - protein, 90 aa, Zea mays subsp. mays
  misc_feature (1)..(90): Ceres Seq. ID no. 12594266
MESTELKVEMVALHEKRVRRCLSKVKGIERVEVEASLQKVVVTGCVNRSKILKALRRVGLRAEPWSPHNELLSAYAATTTLVFNNSYAFF

SEQ ID NO: 556 - protein, 81 aa, Zea mays subsp. mays
  misc_feature (1)..(81): Ceres Seq. ID no. 12594267
MVALHEKRVRRCLSKVKGIERVEVEASLQKVVVTGCVNRSKILKALRRVGLRAEPWSPHNELLSAYAATTTLVFNNSYAFF

SEQ ID NO: 557 - protein, 78 aa, Zea mays subsp. mays
  misc_feature (1)..(78): Ceres Seq. ID no. 12594268
MPVQSERDRAGGGGGEPAEGGGDGVREPEQDPQGAPPGGAARRAVVTAQRAAQRLRRHHHPRLQQLLRLLLIKSSHPL

SEQ ID NO: 558 - DNA, 613 bp, Zea mays subsp. mays
  misc_feature (1)..(613): Ceres Seq. ID no. 12594347
tatatttggttatttctccaccgtcagagatgcggcctagtaacctgtgtgccagatgcattttcatgaaatggcaaagtgccattgccaccctcaatatgtatatctgtgtgcaactctctgcgtgcatgattcttcacttagaggggaaaaataatcttatatcctttcgtgccataagattttcagaatccgattatcctctacgacagcacaaggtgtgacaaaccgcactgccatgcaatgcagattcagggaatctttcaacatatattcctctctccaggctttcattataaatagaggccaactgggttttgcacttcatacaaccccagaccttcagagcttacaaggagtagcagagctcagaagagcattcgtattcagcacatagtgcgccttcttgaaagaactgtacaggagatcacacaatgagctattacggcagcagctcttctggtggacgaagcagtaggagagtcgactatgggaggacatatgtggtgaggccaaagggaaggcacctagccaccattgtgtggctccatggcataggtgacaatggtgctagctggtcccagctcctggattctcttcctctacaaatatc

SEQ ID NO: 559 - protein, 73 aa, Zea mays subsp. mays
  misc_feature (1)..(73): Ceres Seq. ID no. 12594348
YLVISPPSEMRPSNLCARCIFMKWQSAIATLNMYICVQLSACMILHLEGKNNLISFRAIRFSESDYPLRQHKV

SEQ ID NO: 560 - protein, 64 aa, Zea mays subsp. mays
  misc_feature (1)..(64): Ceres Seq. ID no. 12594349
MRPSNLCARCIFMKWQSAIATLNMYICVQLSACMILHLEGKNNLISFRAIRFSESDYPLRQHKV

SEQ ID NO: 561 - protein, 59 aa, Zea mays subsp. mays
  misc_feature (1)..(59): Ceres Seq. ID no. 12594350
MSYYGSSSSGGRSSRRVDYGRTYVVRPKGRHLATIVWLHGIGDNGASWSQLLDSLPLQI

SEQ ID NO: 562 - DNA, 574 bp, Zea mays subsp. mays
  misc_feature (1)..(574): Ceres Seq. ID no. 12594708
ctcacgcgcgcgcacgacgcacagtcacagatacctttcctctcttctcccgtccggccgtcccctcttccgcggcaaccccggcgcggcatggcgagcccgtcctcctcctctttcccgtcccggaaggccctgagcaagatcgcctgcaggcgcctgcagaaggagctaacggagtggcaggtcaacccgcccgctggcttcgagcacagggtcaccgacaacctccagaggtgccgcttccccatcgccgcacttcctatcccctttctcaccaagcagtccctgcggtgcggggtttagattcctttctccgtggctcggtgcttgcctactgttttcttattctcgagtctaggttggtcactacttggtcctgctgaaactgtggataacgttccgcgtcctgtttgatccgagacgcgacgtgttgcgttcgttttgggcttgtaggtgtcggtttctctatttctctcgtcgtcttttccaagggattttcagtagatgtttcctagtgtttttatgatcttggacgaaagaaaaacttaatgaatgcaaaaaataatggtggatg

SEQ ID NO: 563 - protein, 126 aa, Zea mays subsp. mays
  misc_feature (1)..(126): Ceres Seq. ID no. 12594709
HARARRTVTDTFPLFSRPAVPSSAATPARHGEPVLLLFPVPEGPEQDRLQAPAEGANGVAGQPARWLRAQGHRQPPEVPLPHRRTSYPLSHQAVPAVRGLDSFLRGSVLAYCFLILESRLVTTWSC

SEQ ID NO: 564 - protein, 100 aa, Zea mays subsp. mays
  misc_feature (1)..(100): Ceres Seq. ID no. 12594710
LTRAHDAQSQIPFLSSPVRPSPLPRQPRRGMASPSSSSFPSRKALSKIACRRLQKELTEWQVNPPAGFEHRVTDNLQRCRFPIAALPIPFLTKQSLRCGV

SEQ ID NO: 565 - protein, 70 aa, Zea mays subsp. mays
  misc_feature (1)..(70): Ceres Seq. ID no. 12594711
MASPSSSSFPSRKALSKIACRRLQKELTEWQVNPPAGFEHRVTDNLQRCRFPIAALPIPFLTKQSLRCGV

SEQ ID NO: 566 - DNA, 770 bp, Zea mays subsp. mays
  misc_feature (1)..(770): Ceres Seq. ID no. 12633887
ctgtgcggattccctcccctgccctggcggttgctcctgttgcctggtgggaacttgagagttgagaggaggggttggtgggggtggaaggcgctcgtgacccggcccgtggagatggctggcgtgaaggagccgatcgaggtgaagttccggctgtccgacggcaccgacatcgggcccagcaagtacgatcccaacaccaccgtcgccgcgctcaaggagttcgtcctcgcccggtggccgcaggataaagaaatagctccaaaaactgtcaatgatgtgaagctcatcaatgttggaaggatactggagaatagcaaaactcttgctgaatctcgtgtcccagttggagaagttcctggaagtgtgattacaatgcatgttattgtgcggcctccccaatctaaaaacagtgagaagcaacagtcaaactctccgaagccaaacagatgtggatgcacgatattgtgacgttgatgcaagtagcaatgtgtatatcggtgtccacagagatcaatcacaagttcatttagcaattgattcaatctattcttcacaaccctgaagttcatttagagatggtgttacggccagtcacatatctggcttgagaaattgatgcttgcggtcgtgttcgagtgtgcaaggagttcacagggtcctggtaaaaccctgaaatcggtgtggactcaaggaattggatgtttgctattctgtaatgtgtggagacagtgataccagaagtgagttgctgcatagttacatcggag

SEQ ID NO: 567 - protein, 156 aa, Zea mays subsp. mays
  misc_feature (1)..(156): Ceres Seq. ID no. 12633888
LCGFPPLPWRLLLLPGGNLRVERRGWWGWKALVTRPVEMAGVKEPIEVKFRLSDGTDIGPSKYDPNTTVAALKEFVLARWPQDKEIAPKTVNDVKLINVGRILENSKTLAESRVPVGEVPGSVITMHVIVRPPQSKNSEKQQSNSPKPNRCGCTIL

SEQ ID NO: 568 - protein, 118 aa, Zea mays subsp. mays
  misc_feature (1)..(118): Ceres Seq. ID no. 12633889
MAGVKEPIEVKFRLSDGTDIGPSKYDPNTTVAALKEFVLARWPQDKEIAPKTVNDVKLINVGRILENSKTLAESRVPVGEVPGSVITMHVIVRPPQSKNSEKQQSNSPKPNRCGCTIL

SEQ ID NO: 569 - DNA, 952 bp, Zea mays subsp. mays
  misc_feature (1)..(952): Ceres Seq. ID no. 12634256
atcttctcccccatgccggaagctcaacaaaaacaggcaatgggcaacgcataggcatagcttggctcgcacggtgtcgctggctcccctccccttccctccccactgttacatccagcgagctgttcacggccgtgccgagctcagtgaggcagcgtttgcgagtccgggacgaggggagcggcgggcgacatggggaggggccgcagcgagataaagcggatcgagaaccccacgcagcggcagtccaccttctacaagcgcagggacggcctcttcaagaaggctagggagctctccgttctgtgcgacgtggacctgctgctgctcctcttctccacctccggcaagctctaccactacctctcgcccaccgtcccctccgtcaaggacctggtcgagaggtacgaggccacgacgcacaccaaggtctggaccgacatccgccaggagcggcgcgcggagctggagaaggcggagcagatgtgcgagctgatggagaaggagctgcgggtcatgacggtggacgacggggagcagtacacggtgccgtcgctggagctgctggagcacagcctggaggcggccgtgcgcaaggtgcgctccgagaaggaccgcaagatcggcggcgagatcaactacctcgagaacattatcagaggacgccacgaggagcgctacgggttgtgcaacaagcttgcgcactctcaggcctcgaacaacgagggaggaggtgggtcgaccccaccaagcagcggcctggaactcaaactgggtctcaactgacgggctgggctggatggaaagctcgtggactatgctctgttccttgggtactgtactctgtaggttttggttgagtggtcgttgtcagcagttgtcctttgctgcttcgattggtggtgttaatgtactccattattcaggtgggatcaagtacctttgctgcttc

SEQ ID NO: 570 - protein, 197 aa, Zea mays subsp. mays
  misc_feature (1)..(197): Ceres Seq. ID no. 12634257
MGRGRSEIKRIENPTQRQSTFYKRRDGLFKKARELSVLCDVDLLLLLFSTSGKLYHYLSPTVPSVKDLVERYEATTHTKVWTDIRQERRAELEKAEQMCELMEKELRVMTVDDGEQYTVPSLELLEHSLEAAVRKVRSEKDRKIGGEINYLENIIRGRHEERYGLCNKLAHSQASNNEGGGGSTPPSSGLELKLGLN

SEQ ID NO: 571 - protein, 100 aa, Zea mays subsp. mays
  misc_feature (1)..(100): Ceres Seq. ID no. 12634258
MCELMEKELRVMTVDDGEQYTVPSLELLEHSLEAAVRKVRSEKDRKIGGEINYLENIIRGRHEERYGLCNKLAHSQASNNEGGGGSTPPSSGLELKLGLN

SEQ ID NO: 572 - DNA, 943 bp, Zea mays subsp. mays
  misc_feature (1)..(943): Ceres Seq. ID no. 12634480
ggtacaaaagggtcaaacagaaaccctaaaaagcaagatgaacatgctccagtttcagtgaactctgaaatttctgctactccaagccgccatttgatctcttgttgtcaagagagtacgccaaaacaacagacctcagagtcaccattgttgtctggaacacctgcaatgcagacaccaaaaaggccattgctggctccgcttgagaaacccaaggccacatgtggacacattagtgaaccacgttcagccagttctgcccgcagatcactaaatacatccttaacatatgaaggaggaagcccttcttattatgatggaatggaacatacggctacagctaaaaagtgcatgatctcagaagacttgtcaagttttaacaagtcatttgaggaagatagccatgtcttctttactgataaagacaaaatcaatgaagtggagtcagtggatagccaggaaaggatagcttctctacgtaccacatttgacattgtctatgatatttctcattctaccaagaatccacttatcacgaaacaggaacttttccacaatattcttgccaacaacttggagatagaagagattggggagatagaagagcagctgcatattttagaggatctggctcccgatttgatatcaaagaaggtgataaatggaggagaaatactttatagcatcgaacctataacagataagaattcagttcgggctaggcttgtagtagaacctgtatgagatagctgcaattggttcaaagctgaagaaatttgaagagattctctatatgcatgtaccactaatggaacccagattagctgatttattcaaccatggaggcatctgcatcgctcatgtagtcatgtctgattcgagttcaaatctgtgtttttattgacctgctcagtgccgaaatttctatggaacttaaattcgc

SEQ ID NO: 573 - protein, 247 aa, Zea mays subsp. mays
  misc_feature (1)..(247): Ceres Seq. ID no. 12634481
GTKGSNRNPKKQDEHAPVSVNSEISATPSRHLISCCQESTPKQQTSESPLLSGTPAMQTPKRPLLAPLEKPKATCGHISEPRSASSARRSLNTSLTYEGGSPSYYDGMEHTATAKKCMISEDLSSFNKSFEEDSHVFFTDKDKINEVESVDSQERIASLRTTFDIVYDISHSTKNPLITKQELFHNILANNLEIEEIGEIEEQLHILEDLAPDLISKKVINGGEILYSIEPITDKNSVRARLVVEPV

SEQ ID NO: 574 - protein, 191 aa, Zea mays subsp. mays
  misc_feature (1)..(191): Ceres Seq. ID no. 12634482
MQTPKRPLLAPLEKPKATCGHISEPRSASSARRSLNTSLTYEGGSPSYYDGMEHTATAKKCMISEDLSSFNKSFEEDSHVFFTDKDKINEVESVDSQERIASLRTTFDIVYDISHSTKNPLITKQELFHNILANNLEIEEIGEIEEQLHILEDLAPDLISKKVINGGEILYSIEPITDKNSVRARLVVEPV

SEQ ID NO: 575 - protein, 140 aa, Zea mays subsp. mays
  misc_feature (1)..(140): Ceres Seq. ID no. 12634483
MEHTATAKKCMISEDLSSFNKSFEEDSHVFFTDKDKINEVESVDSQERIASLRTTFDIVYDISHSTKNPLITKQELFHNILANNLEIEEIGEIEEQLHILEDLAPDLISKKVINGGEILYSIEPITDKNSVRARLVVEPV

SEQ ID NO: 576 - DNA, 751 bp, Zea mays subsp. mays
  misc_feature (1)..(751): Ceres Seq. ID no. 12634627
ggtgggttgtggcctcctatccttgcacgcacacgcaaacgcatcccatcctgtcctcgcgttactactagttagttagagagacagagaggatcgatctgctggcggcgtctaagctggagaaaggcggcgccaccgccgagggcgacgagataggcatcgacccagcggcggagactccggagcagcgcaacaagttcctggtcctccgcctgtacgaggcgctcaacgcccgggaccacgccgccgtgcagtcgctgctggcgcccgacctggagtggtggttccatggcccgcccaagcaccagcagcacatgatgcgcctcctgacaaccaccaccaccaccaccaccggcagcttccgcttcgtgccccgctccgtggacgccctcgccgcctcgtccggcaccgtgatcgccgagggccacgagaggggttgctactgggtgcacgcctggaccgtgggacccgatggggtgatcacccagctccgtgagtacttcaacaccgacctcaccgtcacccgcctcgccgccgccgtcgccgccaagtgcgtctggcagagccgccgccccgacagcgccaccaactccctgccgggactcctgctcgccctctgatcactctgagggataaattaaataccatctctatctatatactacgtatcatccttgtcgtcgtcagtcagtcagtgcaaccgtgtgcatgtatctatctatgtatctacgtattgtatttgtatcccatc

SEQ ID NO: 577 - protein, 101 aa, Zea mays subsp. mays
  misc_feature (1)..(101): Ceres Seq. ID no. 12634628
MMRLLTTTTTTTTGSFRFVPRSVDALAASSGTVIAEGHERGCYWVHAWTVGPDGVITQLREYFNTDLTVTRLAAAVAAKCVWQSRRPDSATNSLPGLLLAL

SEQ ID NO: 578 - protein, 100 aa, Zea mays subsp. mays
  misc_feature (1)..(100): Ceres Seq. ID no. 12634629
MRLLTTTTTTTTGSFRFVPRSVDALAASSGTVIAEGHERGCYWVHAWTVGPDGVITQLREYFNTDLTVTRLAAAVAAKCVWQSRRPDSATNSLPGLLLAL

SEQ ID NO: 579 - DNA, 775 bp, Zea mays subsp. mays
  misc_feature (1)..(775): Ceres Seq. ID no. 12634668
acaaaattaaggagttttctataccgtgagatgtctggtcctattcaagttggcaatattaatgtacatggagccatttctccagtagcaggctcacctggaggacccaacctcggaaatgatatgccaatgagtgcttatcaccaagcatcacaactggcaacttcatggcattcaaaagatagtggaggcagtgcaagtggctcatttgatcaaggcagcaacattattgatgagatcagacaaggtgctacaaaaagatttgccgttcctctagtaactaggagcacactagaagttgtcataccaaatagtgctgttgcaagcctcaccatgagagctggtagcaagcttgctcaaataagcgagatctctggtgctactgtaacgctagctgaggacagacctgacatcttagagaaagttgttcgaatatctggtacccctgagcaggctagcaaagctgagaatttgctgcagggatttattctaagcattccagatgacattccttcaggctagttgaagacactctgcatgtcatagttgttagttcgtaaaattcctgtgtatattcgaggtagaatatgctgatgtcatgtgattatttgtttaattgagcagcatgtattcatgtgtggatacatgctgttttccttgtagccgttaactggctgacgggggtgtaagattagcatgtgaatttacagattgattcaacattcaattctcatgtccatatgtgaccgctgaacatgaaacctccaacttattt

SEQ ID NO: 580 - protein, 173 aa, Zea mays subsp. mays
  misc_feature (1)..(173): Ceres Seq. ID no. 12634669
TKLRSFLYREMSGPIQVGNINVHGAISPVAGSPGGPNLGNDMPMSAYHQASQLATSWHSKDSGGSASGSFDQGSNIIDEIRQGATKRFAVPLVTRSTLEVVIPNSAVASLTMRAGSKLAQISEISGATVTLAEDRPDILEKVVRISGTPEQASKAENLLQGFILSIPDDIPSG

SEQ ID NO: 581 - protein, 163 aa, Zea mays subsp. mays
  misc_feature (1)..(163): Ceres Seq. ID no. 12634670
MSGPIQVGNINVHGAISPVAGSPGGPNLGNDMPMSAYHQASQLATSWHSKDSGGSASGSFDQGSNIIDEIRQGATKRFAVPLVTRSTLEVVIPNSAVASLTMRAGSKLAQISEISGATVTLAEDRPDILEKVVRISGTPEQASKAENLLQGFILSIPDDIPSG

SEQ ID NO: 582 - protein, 132 aa, Zea mays subsp. mays
  misc_feature (1)..(132): Ceres Seq. ID no. 12634671
MPMSAYHQASQLATSWHSKDSGGSASGSFDQGSNIIDEIRQGATKRFAVPLVTRSTLEVVIPNSAVASLTMRAGSKLAQISEISGATVTLAEDRPDILEKVVRISGTPEQASKAENLLQGFILSIPDDIPSG

SEQ ID NO: 583 - DNA, 726 bp, Zea mays subsp. mays
  misc_feature (1)..(726): Ceres Seq. ID no. 12634854
atcctatatataggtgcaagcacacacacaagttttcggtcgaagaacatcaaatacatactggctcactcgtgattccttcacccagcagttcgtaaccacctgctaaatcatcaaaaaaatgcccccctgcaaagtagcagcagccttactcctgttgatcatcacaacaatttctgtcaacaccgtaactgggtcgcgatgtaacgctcaggagaagaaccagattgtgagcttgtgccaaatgtacatccagagaggaaccctcgttcagctcccatcccaaactgggccatgctgtgcggcagtgagagagctggagagggtacacaggggtatgcagatgaagtgcatcgccgatctactgaacgctggagatctacagaaatacgatccaactaagatcaagcatcttgacatttcctgctacacttagcatcgttagtttcattcctctcctccccatgcatcgttgtcatgctgtgaagggcgcgatggcgtggaatggatgctggtagcaaagatgctcagaagatgacatttcgttagttatttaattaagtcttccaaggcgtcaatcttcctgacatgtatctttattcgaaaaaaataaactggattatttttggtaaaaaaaaaaaaaaaaaaaaaaaaaaaaaaaaaaaaaaaaccaaaaaaaaaaaaaaaaaagcttatcgataccgtcgacctcaagggggggcccgg

SEQ ID NO: 584 - protein, 104 aa, Zea mays subsp. mays
  misc_feature (1)..(104): Ceres Seq. ID no. 12634855
MPPCKVAAALLLLIITTISVNTVTGSRCNAQEKNQIVSLCQMYIQRGTLVQLPSQTGPCCAAVRELERVHRGMQMKCIADLLNAGDLQKYDPTKIKHLDISCYT

SEQ ID NO: 585 - protein, 63 aa, Zea mays subsp. mays
  misc_feature (1)..(63): Ceres Seq. ID no. 12634856
MYIQRGTLVQLPSQTGPCCAAVRELERVHRGMQMKCIADLLNAGDLQKYDPTKIKHLDISCYT

SEQ ID NO: 586 - DNA, 846 bp, Zea mays subsp. mays
  misc_feature (1)..(846): Ceres Seq. ID no. 12634889
attaaaaaccatatacgaggccacccagggtacggcggcgctcggttccgtggcggggagtgttttccaggcggcggcgcggtagcgtgaaaccgggcgaccgagcaagcgacggccatggcgttctggcagacgcgcgattttctcttctgtggcatatgcggcaccctcctcaccttcgactccgtccgctccgcctcctgccctctatgcggcttcaagcgcgatgccaaagaaattgaagggaaagaaatacagtacacgatgaccgccgaggatattcgaagagggttaaagacacaaacggaggacgttgttgggcaaagaccagtgacaaataaagcctgtccaaaatgcgaccatccaaaagctgaattttacaacatacaggttagcaactaatccttcagcattggatgaccaatccttccaggttttacgtatccaattattgctcttgacaccggaaattgcagatgcgttcagcagatgagggagagacgacgttctacatgtgtaaaggatgcggctgtaatttcaaagacgaatgaggagttatcctaccacttctacggatatatggcattggtgccgaagaaatttccagcgttgacagactagtactccctccgccctttttttatttatcatcgtctagttcaaaaatgaacggccgataaatattcgagaattgcaatctactccttgacattgttacattacatggatgcgcagatccatgcgttgtgcaaactttcttttgatggaacctgttttgtattttattcgagtgtgtagatgtctacttgcaacctttttacatttattccaaactataagacgttt

SEQ ID NO: 587 - protein, 94 aa, Zea mays subsp. mays
  misc_feature (1)..(94): Ceres Seq. ID no. 12634890
MAFWQTRDFLFCGICGTLLTFDSVRSASCPLCGFKRDAKEIEGKEIQYTMTAEDIRRGLKTQTEDVVGQRPVTNKACPKCDHPKAEFYNIQVSN

SEQ ID NO: 588 - DNA, 886 bp, Zea mays subsp. mays
  misc_feature (1)..(886): Ceres Seq. ID no. 12634921
gaactcggagcttccagcaacctcagctcatagccgcattcgcctctgcagcgggagcgcacaagaacgcaggctcccacggcccacgtgtcctgctttcgacagatggcgcgtcggaacgaccacgtgttatccctcctcggggcaatggcggcgctggtgctgtttgcggccaccgccgccgcagcccagggctgtgcgccgggaaacctccagccaggaaggtcgttcgagcggtgcgccgacctgcccgagctcggcgccagcctgtactggacgtaccacccggcgaacggcacggcggacctggcgttccgggcgccgcagagcagcagcggctgggtggcctggggcatcaacaccgagcgccccagcagcatggcgggcagcagcgtgttcgtcgcctcgctgggcggcgacggcggctcggtgtccgtcctggcgacctacctggagtccacgtcgcccgccctggccaacggcaccctcaagctcgacgtgcccgtcgcgcccctcgccgagtacgcggccggcgcctacaccgtctacgtcacggtggcgctccccgggaactccacgcagcagaacacggtgtggcaggcgggcccgctcagcgccggccagatcgcgccacacccgatcgccgggccaaacgtgcagagcaccatggtgttggacttcctgtctggcggcaaaagcacagcgctacccaacttcgacgtgcaccgtcgtagcttgaggagtttccggggatgaaaggctatcccatgcgatcgtgaacatcgtctagttcaatgtctcaagcatagagatacattagatgtgtttaaattatgtgtcttactttatttattgtatcaatcaaaatattcaataaattaaattg

SEQ ID NO: 589 - protein, 245 aa, Zea mays subsp. mays
  misc_feature (1)..(245): Ceres Seq. ID no. 12634922
NSELPATSAHSRIRLCSGSAQERRLPRPTCPAFDRWRVGTTTCYPSSGQWRRWCCLRPPPPQPRAVRRETSSQEGRSSGAPTCPSSAPACTGRTTRRTARRTWRSGRRRAAAAGWPGASTPSAPAAWRAAACSSPRWAATAARCPSWRPTWSPRRPPWPTAPSSSTCPSRPSPSTRPAPTPSTSRWRSPGTPRSRTRCGRRARSAPARSRHTRSPGQTCRAPWCWTSCLAAKAQRYPTSTCTVVA

SEQ ID NO: 590 - protein, 243 aa, Zea mays subsp. mays
  misc_feature (1)..(243): Ceres Seq. ID no. 12634923
TRSFQQPQLIAAFASAAGAHKNAGSHGPRVLLSTDGASERPRVIPPRGNGGAGAVCGHRRRSPGLCAGKPPARKVVRAVRRPARARRQPVLDVPPGERHGGPGVPGAAEQQRLGGLGHQHRAPQQHGGQQRVRRLAGRRRRLGVRPGDLPGVHVARPGQRHPQARRARRAPRRVRGRRLHRLRHGGAPRELHAAEHGVAGGPAQRRPDRATPDRRAKRAEHHGVGLPVWRQKHSATQLRRAPS

SEQ ID NO: 591 - protein, 216 aa, Zea mays subsp. mays
  misc_feature (1)..(216): Ceres Seq. ID no. 12634924
MARRNDHVLSLLGAMAALVLFAATAAAAQGCAPGNLQPGRSFERCADLPELGASLYWTYHPANGTADLAFRAPQSSSGWVAWGINTERPSSMAGSSVFVASLGGDGGSVSVLATYLESTSPALANGTLKLDVPVAPLAEYAAGAYTVYVTVALPGNSTQQNTVWQAGPLSAGQIAPHPIAGPNVQSTMVLDFLSGGKSTALPNFDVHRRSLRSFRG

SEQ ID NO: 592 - DNA, 664 bp, Zea mays subsp. mays
  misc_feature (1)..(664): Ceres Seq. ID no. 12635152
agattgaaagacccatgtctctgttcccgatcttaaccgcctcgtttctcttcctcttctgcgttccgttcaccaccgcagctgcagacggcgatttgccgacggcgtacaccctcctccaaagctacaacttccccgtcgggattctccccaaaggagtcttgtcgtacgatctggacgaacccacggggaagttccacgcgtatttcgacaagtcgtgtagcttcgccctccaaggctcttaccagttggattacaaatcgaccatctccggcgtcatatcggagaacaagctcacgaagctcaccggcgtgaaggtgaaagttctcttcttgtggctcaacatcgtggaggttatcagggacggagacgagctcgagttctccgtcgggatcacgtcggcgaacttcgcgatcgaggagttttacgagtcgccgcggtgtgggtgcgggttcgattgcaatggattgaagtcgaaaacagataatttgcaaatgatgggactttcttacaaaacctgaactctttggatgcttttttttgttcttgctccaatcattggacaagttctttgtttcaacaattggtttattgttcatctcttcttaggatcgttctatcaatcaacgtatgtattgtacttacaatcaataaaagtacatcg

SEQ ID NO: 593 - protein, 172 aa, Zea mays subsp. mays
  misc_feature (1)..(172): Ceres Seq. ID no. 12635153
IERPMSLFPILTASFLFLFCVPFTTAAADGDLPTAYTLLQSYNFPVGILPKGVLSYDLDEPTGKFHAYFDKSCSFALQGSYQLDYKSTISGVISENKLTKLTGVKVKVLFLWLNIVEVIRDGDELEFSVGITSANFAIEEFYESPRCGCGFDCNGLKSKTDNLQMMGLSYKT

SEQ ID NO: 594 - protein, 168 aa, Zea mays subsp. mays
  misc_feature (1)..(168): Ceres Seq. ID no. 12635154
MSLFPILTASFLFLFCVPFTTAAADGDLPTAYTLLQSYNFPVGILPKGVLSYDLDEPTGKFHAYFDKSCSFALQGSYQLDYKSTISGVISENKLTKLTGVKVKVLFLWLNIVEVIRDGDELEFSVGITSANFAIEEFYESPRCGCGFDCNGLKSKTDNLQMMGLSYKT

SEQ ID NO: 595 - DNA, 797 bp, Zea mays subsp. mays
  misc_feature (1)..(797): Ceres Seq. ID no. 12635162
aatgctctaaacttctctacatcttctctctctaaagccatcatcttggttttggtgtgtgccttgctgtctattttggtgcttcccctagataagtgaccttaagactaatcatcatgagaatgtttctaggtgtcttgcttctcttggccttgaccacatcttcaagtgctatttactgtctctgcaaagatgggataggagacaaccagcttcaaacatcgatagactatgcttgtggaaccttagcagattgtaacccaatccatgacaagggtgcttgttatcaaccaaacaccataaaaaaccactgcgattgggctgttaacagctacttccagaaagcagctcaggcccctggaagctgtaatttctctggaactgccactaccagtcaaaacccaccttcaaatttggttactggatgtatatatccttcaagcgctagctctgcagggtcgcctccttcaactacaccaccaacgggaacaactccaacaacaaacggaaccggaggctttactccatttccgggaactccacctgcgtttggtccaactggaaccggaggctttagcccaagcaaagctgcttcaagtttggtcatttcctctgttttcacgctctgtttctcatcactagcgcttctgatgtaaggttcgtgtagagacaaaagacatccacatgggtccgtcttttgattcccttttgggtagaaaaggaagcttcagtggtcattgtggtttatatttctgttttttcccatttatgtgaaagatgctctaattagaatcttg

SEQ ID NO: 596 - protein, 179 aa, Zea mays subsp. mays
  misc_feature (1)..(179): Ceres Seq. ID no. 12635163
MRMFLGVLLLLALTTSSSAIYCLCKDGIGDNQLQTSIDYACGTLADCNPIHDKGACYQPNTIKNHCDWAVNSYFQKAAQAPGSCNFSGTATTSQNPPSNLVTGCIYPSSASSAGSPPSTTPPTGTTPTTNGTGGFTPFPGTPPAFGPTGTGGFSPSKAASSLVISSVFTLCFSSLALLM

SEQ ID NO: 597 - protein, 177 aa, Zea mays subsp. mays
  misc_feature (1)..(177): Ceres Seq. ID no. 12635164
MFLGVLLLLALTTSSSAIYCLCKDGIGDNQLQTSIDYACGTLADCNPIHDKGACYQPNTIKNHCDWAVNSYFQKAAQAPGSCNFSGTATTSQNPPSNLVTGCIYPSSASSAGSPPSTTPPTGTTPTTNGTGGFTPFPGTPPAFGPTGTGGFSPSKAASSLVISSVFTLCFSSLALLM

SEQ ID NO: 598 - DNA, 1096 bp, Zea mays subsp. mays
  misc_feature (1)..(1096): Ceres Seq. ID no. 12635175
atcgcatcccttgtaaatttttatctcagaaacgtgcagcagagaaaatacaaaatgggactctgccgctttctcttcttcgtcgttgttgtgctgcttttctcctcatcttcctcagttgacgcctgcgaccgatgtcctcaccactctaaggctgcttttttctcctccgcatccgccctatcctccggagcttgttcttatggttccatggctacggctttcttcgccggtcacatcgccgccgccgttccttccatctacaaagacggcgctggctgcggtgcttgctttcaggtcagatgccacaaccccactctttgcagcaccaaaggaaccacggtgatggtcaccgacctcaacatgagcaaccaaaccgatctcgtcctcagcagcagagccttcagggccatggccaaaccggttgtcggggctgacacagatcttctcagacaaggcatcgtcgacgttgaataccacagagttccttgcgattacggaaacaagaagatgttgaatgttagagttgaagaatcaagcaaaaaaccatactacttggctataaagctcttgtaccaaggaggccaaaccgaagtcgtagccatcgacattgctcaggctggttcctccaactggagttacatgacacgaagccacggcgccgtatgggtcactgacaatgtacccaccggacctcttcagttcaggttcgtggtgacagctggctacgacggaaaaatgctctggtctaagaaggttcttcctgccaactgggaagccggcaagacctacgacgccggcgttcagatcaccgacattgctcaggaaggttgtgatccatgcgacgatcacatctggaactgatttacttactctccttttttctttctttcttttcttagaagcatatgtataaataatcaagcatattcattattaagtgagtttgtaccagaactattactaaacaagagaactaagaaagatttttaaaagggtgatggacatatgtatgtgcaaaggaggtctacacatgaccaccattctttctaccgataaccaagttatatgacattacttctttcttttatgtttc

SEQ ID NO: 599 - protein, 287 aa, Zea mays subsp. mays
  misc_feature (1)..(287): Ceres Seq. ID no. 12635176
IASLVNFYLRNVQQRKYKMGLCRFLFFVVVVLLFSSSSSVDACDRCPHHSKAAFFSSASALSSGACSYGSMATAFFAGHIAAAVPSIYKDGAGCGACFQVRCHNPTLCSTKGTTVMVTDLNMSNQTDLVLSSRAFRAMAKPVVGADTDLLRQGIVDVEYHRVPCDYGNKKMLNVRVEESSKKPYYLAIKLLYQGGQTEVVAIDIAQAGSSNWSYMTRSHGAVWVTDNVPTGPLQFRFVVTAGYDGKMLWSKKVLPANWEAGKTYDAGVQITDIAQEGCDPCDDHIWN

SEQ ID NO: 600 - protein, 269 aa, Zea mays subsp. mays
  misc_feature (1)..(269): Ceres Seq. ID no. 12635177
MGLCRFLFFVVVVLLFSSSSSVDACDRCPHHSKAAFFSSASALSSGACSYGSMATAFFAGHIAAAVPSIYKDGAGCGACFQVRCHNPTLCSTKGTTVMVTDLNMSNQTDLVLSSRAFRAMAKPVVGADTDLLRQGIVDVEYHRVPCDYGNKKMLNVRVEESSKKPYYLAIKLLYQGGQTEVVAIDIAQAGSSNWSYMTRSHGAVWVTDNVPTGPLQFRFVVTAGYDGKMLWSKKVLPANWEAGKTYDAGVQITDIAQEGCDPCDDHIWN

SEQ ID NO: 601 - protein, 217 aa, Zea mays subsp. mays
  misc_feature (1)..(217): Ceres Seq. ID no. 12635178
MATAFFAGHIAAAVPSIYKDGAGCGACFQVRCHNPTLCSTKGTTVMVTDLNMSNQTDLVLSSRAFRAMAKPVVGADTDLLRQGIVDVEYHRVPCDYGNKKMLNVRVEESSKKPYYLAIKLLYQGGQTEVVAIDIAQAGSSNWSYMTRSHGAVWVTDNVPTGPLQFRFVVTAGYDGKMLWSKKVLPANWEAGKTYDAGVQITDIAQEGCDPCDDHIWN

SEQ ID NO: 602 - DNA, 623 bp, Zea mays subsp. mays
  misc_feature (1)..(623): Ceres Seq. ID no. 12635463
ataaaaaattaaacccattacttacttaagcaaaagaaaaagaaaaaagtttaagattatggagggcttcataaagctgtcaacattgttgattgtgtgcatgttagtgtcagctccaatggcagaggcagcaatctcgtgtggcgccgtcgccagcaacttggggcaatgcattaactacctgaccaggggcggattcgttcctcgaggatgttgttcgggtgttcagaggctccacagcatggctcggaccacacgtgatcggcaacaagcttgtcgctgcattcaaggagcagctagagccttgggttccagacttaacccaggccgtgctgctcgtcttcctggtgcttgccgtgttaggatctcttaccccatcagcgcaagaaccaactgtaacaacatccggtgagcatgagagcatatatacgttgaagtgttttaatttccataaaaataatgtcactagtataattgtgtatcctttcaatgttatgtgttgttttcagaattggtgtgtttcatttctttctttatatacgaccgtccatttaagtggccatctctgttatgtattcctctaaggcgctaatgatgtatggaattactatatgtattgtttc

SEQ ID NO: 603 - protein, 117 aa, Zea mays subsp. mays
  misc_feature (1)..(117): Ceres Seq. ID no. 12635464
MEGFIKLSTLLIVCMLVSAPMAEAAISCGAVASNLGQCINYLTRGGFVPRGCCSGVQRLHSMARTTRDRQQACRCIQGAARALGSRLNPGRAARLPGACRVRISYPISARTNCNNIR

SEQ ID NO: 604 - protein, 103 aa, Zea mays subsp. mays
  misc_feature (1)..(103): Ceres Seq. ID no. 12635465
MLVSAPMAEAAISCGAVASNLGQCINYLTRGGFVPRGCCSGVQRLHSMARTTRDRQQACRCIQGAARALGSRLNPGRAARLPGACRVRISYPISARTNCNNIR

SEQ ID NO: 605 - protein, 97 aa, Zea mays subsp. mays
  misc_feature (1)..(97): Ceres Seq. ID no. 12635466
MAEAAISCGAVASNLGQCINYLTRGGFVPRGCCSGVQRLHSMARTTRDRQQACRCIQGAARALGSRLNPGRAARLPGACRVRISYPISARTNCNNIR

SEQ ID NO: 606 - DNA, 761 bp, Zea mays subsp. mays
  misc_feature (1)..(761): Ceres Seq. ID no. 12635509
aggtagaaagcgaaactctctctccagcttcagaggcttcagctatggcggccgagaatccttcaaacggtgtagacgtcgacacgagtctcgcttccgattcaaacgataaccgcaaagccagtgatttgaccaatcatgactcttccatggcattgacagtcccttccaccgccgtttgtctcggccgtttcgccggagatgcagcaggcggcgccgtcatggggtctatattcggctatggttctggattgtttaagaaaaaagggtttaagggatcatttgcggatgcgggtcagtctgcaaagaattttgcgattttatctggagtgcacagtttggttgtttgccttctgaagaaactgcgagggaaagatgatgccattaacgttggaattgctggatgctgcactggccttgctcttagttacccaggtgcaccacaagcaatgctacaaagctgtgtcacttttggtgccttttctttcatcctcgaaggactcaacaagaggcaaacagctttggctcactctgtctcctcgagacatgatcaaaccagaagtctgaaagatgatttaccactctccttggctctcccaatccatgaagagatcaaaggagctttctcatccttctgcaaatctttaacaaaacccaagaagctcgcgttccctagctcacgttgatcgaagttttttttgtatcctactacttccttttgtagatgttaaaagaacagatgaaaacaagaatcatgtttc

SEQ ID NO: 607 - protein, 227 aa, Zea mays subsp. mays
  misc_feature (1)..(227): Ceres Seq. ID no. 12635510
VESETLSPASEASAMAAENPSNGVDVDTSLASDSNDNRKASDLTNHDSSMALTVPSTAVCLGRFAGDAAGGAVMGSIFGYGSGLFKKKGFKGSFADAGQSAKNFAILSGVHSLVVCLLKKLRGKDDAINVGIAGCCTGLALSYPGAPQAMLQSCVTFGAFSFILEGLNKRQTALAHSVSSRHDQTRSLKDDLPLSLALPIHEEIKGAFSSFCKSLTKPKKLAFPSSR

SEQ ID NO: 608 - protein, 213 aa, Zea mays subsp. mays
  misc_feature (1)..(213): Ceres Seq. ID no. 12635511
MAAENPSNGVDVDTSLASDSNDNRKASDLTNHDSSMALTVPSTAVCLGRFAGDAAGGAVMGSIFGYGSGLFKKKGFKGSFADAGQSAKNFAILSGVHSLVVCLLKKLRGKDDAINVGIAGCCTGLALSYPGAPQAMLQSCVTFGAFSFILEGLNKRQTALAHSVSSRHDQTRSLKDDLPLSLALPIHEEIKGAFSSFCKSLTKPKKLAFPSSR

SEQ ID NO: 609 - protein, 178 aa, Zea mays subsp. mays
  misc_feature (1)..(178): Ceres Seq. ID no. 12635512
MALTVPSTAVCLGRFAGDAAGGAVMGSIFGYGSGLFKKKGFKGSFADAGQSAKNFAILSGVHSLVVCLLKKLRGKDDAINVGIAGCCTGLALSYPGAPQAMLQSCVTFGAFSFILEGLNKRQTALAHSVSSRHDQTRSLKDDLPLSLALPIHEEIKGAFSSFCKSLTKPKKLAFPSSR

SEQ ID NO: 610 - DNA, 550 bp, Zea mays subsp. mays
  misc_feature (1)..(550): Ceres Seq. ID no. 12635533
aattcaattgtgctcatcatcatccccgataccaaagctcatcttcttctccttgaaatctttttgggttcacagatttggaggatgtcttgcaactgtggatccggttgcagctgcggctcagactgcaagtgcgggaagatgtaccctgatctgacggagcagggcagcgccgccgcccaggtcgccgccgtggtcgtcctcggcgtggcgcctgagaacaaggcggggcagttcgaggtggccgccgggcagtccggcgagggctgcagctgcggcgacaactgcaagtgcaacccctgcaactgttaagctgcatgcactcgtacgtacgtgtgttggtgtgagagtatacgtgaataacgagcgtctgatctgatggagtcgagcaagggtgcgtgtgcgtgtgcgtgtggtttgcttgctcgctctcccatgctctgcccatggtgtccttgtgtgtatgtgtgtgtgcatgtgtccctgtaattgcttcatctatccccactatggatggagtgatgaatatgtaagaatgaaagatttacct

SEQ ID NO: 611 - protein, 103 aa, Zea mays subsp. mays
  misc_feature (1)..(103): Ceres Seq. ID no. 12635534
NSIVLIIIPDTKAHLLLLEIFLGSQIWRMSCNCGSGCSCGSDCKCGKMYPDLTEQGSAAAQVAAVVVLGVAPENKAGQFEVAAGQSGEGCSCGDNCKCNPCNC

SEQ ID NO: 612 - protein, 75 aa, Zea mays subsp. mays
  misc_feature (1)..(75): Ceres Seq. ID no. 12635535
MSCNCGSGCSCGSDCKCGKMYPDLTEQGSAAAQVAAVVVLGVAPENKAGQFEVAAGQSGEGCSCGDNCKCNPCNC

SEQ ID NO: 613 - protein, 56 aa, Zea mays subsp. mays
  misc_feature (1)..(56): Ceres Seq. ID no. 12635536
MYPDLTEQGSAAAQVAAVVVLGVAPENKAGQFEVAAGQSGEGCSCGDNCKCNPCNC

SEQ ID NO: 614 - DNA, 877 bp, Zea mays subsp. mays
  misc_feature (1)..(877): Ceres Seq. ID no. 12635572
gtttcttcttcttcttcccttggctcgccgtctcaccgatcgaatcattttctctgtttgttcgtttactcgcgcgcttcgaagctctgattttgacagagaaaaagaagtaagagatgggctcacgacagggaccaccgaagcatcagaacaaattcgcatgggtacccaacgccggcgtgaagatcaacgaaaccgaagtgggcgggaggttccgaccgctgtcggagataaccggagtttgccatcgctgtcgggagcagatcgcttggaagcgaaaatacggcaaatacaaaaagctaaccgaacccgccaaatgtcagaagtgtttaaagcgtaatgttcgtcaagcatatcacaagttatgcactggttgtgccaaagagcagaaagtgtgtgcaaagtgttactcttcttctgagcaaatcatgggaagggatatatatgaagtagaacctgaacagaagctgctcgatgagactatcaagaatgctagggaaagagatcgaaggacacttttgcgtgctatgaacaaagatagcaacccaaagaagtcagatgaagaagcaacgaggagcgatagcagcaaggttggtgatgtgtttccatcaacatcccttgaagaatatgcaaacaagtctggaagagttagcgggattgttggtcatggccatgtcgttgacgatgaagaagatgatgatgatgttgctagtgaacctgaactagatgaggaccacagtggtgatgatgatgacgaactgcaaaagtaatcgtagtttcggttgtagtagttctgtcaattttgataggcttgtgagattttgcaaaactcgttatgcttttaatgttttgataaagttttactttgttacctgct

SEQ ID NO: 615 - protein, 217 aa, Zea mays subsp. mays
  misc_feature (1)..(217): Ceres Seq. ID no. 12635573
MGSRQGPPKHQNKFAWVPNAGVKINETEVGGRFRPLSEITGVCHRCREQIAWKRKYGKYKKLTEPAKCQKCLKRNVRQAYHKLCTGCAKEQKVCAKCYSSSEQIMGRDIYEVEPEQKLLDETIKNARERDRRTLLRAMNKDSNPKKSDEEATRSDSSKVGDVFPSTSLEEYANKSGRVSGIVGHGHVVDDEEDDDDVASEPELDEDHSGDDDDELQK

SEQ ID NO: 616 - protein, 113 aa, Zea mays subsp. mays
  misc_feature (1)..(113): Ceres Seq. ID no. 12635574
MGRDIYEVEPEQKLLDETIKNARERDRRTLLRAMNKDSNPKKSDEEATRSDSSKVGDVFPSTSLEEYANKSGRVSGIVGHGHVVDDEEDDDDVASEPELDEDHSGDDDDELQK

SEQ ID NO: 617 - protein, 112 aa, Zea mays subsp. mays
  misc_feature (1)..(112): Ceres Seq. ID no. 12635575
FLLLLPLARRLTDRIIFSVCSFTRALRSSDFDREKEVRDGLTTGTTEASEQIRMGTQRRREDQRNRSGREVPTAVGDNRSLPSLSGADRLEAKIRQIQKANRTRQMSEVFKA

SEQ ID NO: 618 - DNA, 879 bp, Zea mays subsp. mays
  misc_feature (1)..(879): Ceres Seq. ID no. 12635608
actacaccagtcggcatggaggaggagctgacgctggtgggatactggtcgagcccgttcgcgctgcgcgcgcgcttcgccctcaacctcaagggcctcccctacgcgtacgtggaggaggtgggcctcttcgacggcaagagcccgctcctcctcgcctccaaccccgtgcacaagagggtgccggtgctcatccacaacggcaagcccgtccccgagtcgcagctcatcgtgcagtacgtcgaagaggctttcccggccagctccccgcgcttcctccctcccgacccgcacgagcgcgccgtcgctcgcttctgggcctcctacgtcgacggcgagctgctcagcgcgtggctgcccgtctacggcggacgcaccggcgaggagagggcagaggcggcggggcgggtcggcgccgccctggagacgctggagcgagcgttcggggagtgctccaaggggaagggcttcttcggcggggacacggtggggctcgtggacgtcgtgctcggcggcttcgtcgggtggctgcagacgtccgaggccatgtgcggcgtgaggctgctcgacgccgccgcgacgccgctgctggcggcctgggcggagcggtttcgcgcgctcgacggcgtcaaggaggtgatgccggatgcgcagaggctgctcgagtacaacctgatgaggcgagctcgcctcgggctgccgctgacccagccgccgccgccacagcatcaatagaatcagggctggctaatacaccacgtgcaaatagcctgtaccaataactgagcacgtatacctaccctgtgtatgtatttctaccttctgtaatgcactttctctaccgtaaaacgtgaaatttagtgaataccttttgcccct

SEQ ID NO: 619 - protein, 259 aa, Zea mays subsp. mays
  misc_feature (1)..(259): Ceres Seq. ID no. 12635609
YTSRHGGGADAGGILVEPVRAARALRPQPQGPPLRVRGGGGPLRRQEPAPPRLQPRAQEGAGAHPQRQARPRVAAHRAVRRRGFPGQLPALPPSRPARARRRSLLGLLRRRRAAQRVAARLRRTHRRGEGRGGGAGRRRPGDAGASVRGVLQGEGLLRRGHGGARGRRARRLRRVAADVRGHVRREAARRRRDAAAGGLGGAVSRARRRQGGDAGCAEAARVQPDEASSPRAAADPAAAATASIESGLANTPRANSLYQ

SEQ ID NO: 620 - protein, 244 aa, Zea mays subsp. mays
  misc_feature (1)..(244): Ceres Seq. ID no. 12635610
TTPVGMEEELTLVGYWSSPFALRARFALNLKGLPYAYVEEVGLFDGKSPLLLASNPVHKRVPVLIHNGKPVPESQLIVQYVEEAFPASSPRFLPPDPHERAVARFWASYVDGELLSAWLPVYGGRTGEERAEAAGRVGAALETLERAFGECSKGKGFFGGDTVGLVDVVLGGFVGWLQTSEAMCGVRLLDAAATPLLAAWAERFRALDGVKEVMPDAQRLLEYNLMRRARLGLPLTQPPPPQHQ

SEQ ID NO: 621 - protein, 239 aa, Zea mays subsp. mays
  misc_feature (1)..(239): Ceres Seq. ID no. 12635611
MEEELTLVGYWSSPFALRARFALNLKGLPYAYVEEVGLFDGKSPLLLASNPVHKRVPVLIHNGKPVPESQLIVQYVEEAFPASSPRFLPPDPHERAVARFWASYVDGELLSAWLPVYGGRTGEERAEAAGRVGAALETLERAFGECSKGKGFFGGDTVGLVDVVLGGFVGWLQTSEAMCGVRLLDAAATPLLAAWAERFRALDGVKEVMPDAQRLLEYNLMRRARLGLPLTQPPPPQHQ

SEQ ID NO: 622 - DNA, 856 bp, Zea mays subsp. mays
  misc_feature (1)..(856): Ceres Seq. ID no. 12635763
aaaaaccccaagcccatacatccacactgcttagtctatagactctataccatagtttcaccaccatctagctttaccagaaatggagggtcagagatcacaacgctggggttacttgaaagacaaggctatagccaccagccttgctgaagaagaaatggaaaatagcatggatggagaggaggatgatactggagatgaagacaaaaggaagagagtgatggagagagctagaggtcctaacacagaacgtgttcccttgcggctgtgcctggtcgataggtgcactgctaacttaactgaggccaagcagtattaccgcagacacaaagtctgtgaggttcatgcaaaggcatcttctgcaactgttgctggagtcaagcaacgtttttgtcaacaatgcagcaggttccatgagctagcagagtttgatgaaactaaaagaagttgcaggaggcgcttagctggacacaatgagaggaggcggaagatatctggtgacagttacggagaagggtcaggccggagagcggttagcttgacacagactcaagaaagaaacaggatagacatgaaacttcctatgactaactcaccattcaagcgaccacagatcagataaaacaacatcaacacacccaaccgctctctctcttctgtcatctacttatgttatatatctacgttctctagctatccaaataatgacatctaagtaccatgtcaagaaaagtggatcgtggtattgaatcctccaacaatatataactacaaaactctagtaccctctatgttatcatctaaaggatgcatatccaccaatgtataagacttgtcatcctcttgtattgtctaa

SEQ ID NO: 623 - protein, 179 aa, Zea mays subsp. mays
  misc_feature (1)..(179): Ceres Seq. ID no. 12635764
MEGQRSQRWGYLKDKAIATSLAEEEMENSMDGEEDDTGDEDKRKRVMERARGPNTERVPLRLCLVDRCTANLTEAKQYYRRHKVCEVHAKASSATVAGVKQRFCQQCSRFHELAEFDETKRSCRRRLAGHNERRRKISGDSYGEGSGRRAVSLTQTQERNRIDMKLPMTNSPFKRPQIR

SEQ ID NO: 624 - protein, 154 aa, Zea mays subsp. mays
  misc_feature (1)..(154): Ceres Seq. ID no. 12635765
MENSMDGEEDDTGDEDKRKRVMERARGPNTERVPLRLCLVDRCTANLTEAKQYYRRHKVCEVHAKASSATVAGVKQRFCQQCSRFHELAEFDETKRSCRRRLAGHNERRRKISGDSYGEGSGRRAVSLTQTQERNRIDMKLPMTNSPFKRPQIR

SEQ ID NO: 625 - protein, 150 aa, Zea mays subsp. mays
  misc_feature (1)..(150): Ceres Seq. ID no. 12635766
MDGEEDDTGDEDKRKRVMERARGPNTERVPLRLCLVDRCTANLTEAKQYYRRHKVCEVHAKASSATVAGVKQRFCQQCSRFHELAEFDETKRSCRRRLAGHNERRRKISGDSYGEGSGRRAVSLTQTQERNRIDMKLPMTNSPFKRPQIR

SEQ ID NO: 626 - DNA, 784 bp, Zea mays subsp. mays
  misc_feature (1)..(784): Ceres Seq. ID no. 12635820
aacaaaatcttctctcattgattccttcgtcaagcctcaatcactttcatcactcttctctctctttctcaaaccaacagcgcgaagagatgaagcatctgatccgccgcctctcccgcgtcgccgactccgcaaactacagcctcctccgttccgattcgcagcgacctagccgccgtccaccggcgcctcgccgctcgaagaagcacacatcctccgttcccgagggtcacgtgcctgtctacgtgggagacgagatggagcggttcgtggtgagcgcggagctgctaaaccacccggttttcatcggtttgttgaaccgatcgactcaagagtacggttacgaacagaaaggagttctgcagatcccctgccacgtgttggtattcgagcgaatcatggagtcgcttcggctcggattagcggtgccgagcgacctacaagatgtaatcggcgacgagacgatttgacacgcgagggaatctttggtagttagagagatatggatctggttctttttttttcggctcagatgcagtacgacgtcgtgttgatggtgtacatagctatgtatatttttcatttttctggatgatagatgatgaagaagattgaagttcaaatggggaaggggaaagattagcgatatttttagggcttttctttttgaatttttttttcttttttcaaaatttgtttgttgcaaatttcctgtttttcgccggtttaagaaccggtttgagactcttgtgaaggtttaaatggaaattggttcggtttggtt

SEQ ID NO: 627 - protein, 155 aa, Zea mays subsp. mays
  misc_feature (1)..(155): Ceres Seq. ID no. 12635821
QNLLSLIPSSSLNHFHHSSLSFSNQQREEMKHLIRRLSRVADSANYSLLRSDSQRPSRRPPAPRRSKKHTSSVPEGHVPVYVGDEMERFVVSAELLNHPVFIGLLNRSTQEYGYEQKGVLQIPCHVLVFERIMESLRLGLAVPSDLQDVIGDETI

SEQ ID NO: 628 - protein, 126 aa, Zea mays subsp. mays
  misc_feature (1)..(126): Ceres Seq. ID no. 12635822
MKHLIRRLSRVADSANYSLLRSDSQRPSRRPPAPRRSKKHTSSVPEGHVPVYVGDEMERFVVSAELLNHPVFIGLLNRSTQEYGYEQKGVLQIPCHVLVFERIMESLRLGLAVPSDLQDVIGDETI

SEQ ID NO: 629 - DNA, 795 bp, Zea mays subsp. mays
  misc_feature (1)..(795): Ceres Seq. ID no. 12635868
  misc_feature (781)..(781): n is a, c, t, g, unknown, or other
attttctttacactgaaccatcactgagagagtgcgcttcacacaataaacaaaaaaaaatggctaggcaatttgctattgttgcgatctgcatcgtcctcatcgccggcgtcggaggtcaagctccgtcggcaccaccaaccaccacaccagcaccacccaccacaacaactcccccgccagcagccactcctcctcctgtctcagctcctccaccagtcacaacttctcctcctccagccaccaccgctcctcctcctgctactcctcctccagtcgcttctcctcctccggccactcctcctccagtggcaactcctcctccagcaactccccctcccgtcgcatctcctcctccagcaactcctccacccgtcgcatctcctcctccagcaacgcctcctccagctcctcttgcatctcctcccgctcaggttccagctcttgctcctacgacgccagacgctccctctacatctccgtcgtctagcccgcctctcccggccactgatggccctggaccgagcgccgaagggccaggaccttccacagattcgaatgaccagaatggagcaagcaagacagtttcaagcttggtacttggatctgttctcgtttggtttatgatctaagcgcgggagcctttcgctcggtgttccttgcatttgttttcatgttgatgtttgtttgttccattgttattactttcggaaccgtattcttttggattattatcttttggagaggatattattgagacttgagatggagatatcaggantatatttcgtttgg

SEQ ID NO: 630 - protein, 209 aa, Zea mays subsp. mays
  misc_feature (1)..(209): Ceres Seq. ID no. 12635869
FLYTEPSLRECASHNKQKKMARQFAIVAICIVLIAGVGGQAPSAPPTTTPAPPTTTTPPPAATPPPVSAPPPVTTSPPPATTAPPPATPPPVASPPPATPPPVATPPPATPPPVASPPPATPPPVASPPPATPPPAPLASPPAQVPALAPTTPDAPSTSPSSSPPLPATDGPGPSAEGPGPSTDSNDQNGASKTVSSLVLGSVLVWFMI

SEQ ID NO: 631 - protein, 190 aa, Zea mays subsp. mays
  misc_feature (1)..(190): Ceres Seq. ID no. 12635870
MARQFAIVAICIVLIAGVGGQAPSAPPTTTPAPPTTTTPPPAATPPPVSAPPPVTTSPPPATTAPPPATPPPVASPPPATPPPVATPPPATPPPVASPPPATPPPVASPPPATPPPAPLASPPAQVPALAPTTPDAPSTSPSSSPPLPATDGPGPSAEGPGPSTDSNDQNGASKTVSSLVLGSVLVWFMI

SEQ ID NO: 632 - DNA, 721 bp, Zea mays subsp. mays
  misc_feature (1)..(721): Ceres Seq. ID no. 12635879
aaacatcaccaccacttctaacacagcctcctcctcctcttcgatctctctctctctcgatcaaaatggctaacccaagagtcttcttcgacatgaccctcgacggcgcccccgccggccgcatcgtgatggagctttacaaagacacgaccccgaacaccgccgagaacttccgagccctctgcaccggcgagaaaggtgtcggaaagaaggggaagcctctccacttcaagggatcggccttccaccgcgtgatccccgggttcatgtgccagggaggcgatttcaccgccgggaacgggaccggcggggagtcgatctacggcgataagttcaaggacgagaacttcgcgaagaagcacaccggggcggggatcctctccatggcgaactctggtcccaacactaacggatctcagttttttatctgcaccgcggagacgtcgtggctcgatgggaagcacgtggtgtttgggaaggttgttgaaggtatggaggttgtgaaggcgatcgagaaggttggatcgtcttctgggacgacgaagaagaaggttgttgttgctgattgtggtcaggttgcttagatctgagtgatctgatgatgatgaatgttatcttttgcttttttaatgtttttttttctgatcgttcgagtttgtaaaaccctgagggttttttggatttgactgcctttgaataattatgaataactatgagcttg

SEQ ID NO: 633 - protein, 193 aa, Zea mays subsp. mays
  misc_feature (1)..(193): Ceres Seq. ID no. 12635880
TSPPLLTQPPPPLRSLSLSIKMANPRVFFDMTLDGAPAGRIVMELYKDTTPNTAENFRALCTGEKGVGKKGKPLHFKGSAFHRVIPGFMCQGGDFTAGNGTGGESIYGDKFKDENFAKKHTGAGILSMANSGPNTNGSQFFICTAETSWLDGKHVVFGKVVEGMEVVKAIEKVGSSSGTTKKKVVVADCGQVA

SEQ ID NO: 634 - protein, 172 aa, Zea mays subsp. mays
  misc_feature (1)..(172): Ceres Seq. ID no. 12635881
MANPRVFFDMTLDGAPAGRIVMELYKDTTPNTAENFRALCTGEKGVGKKGKPLHFKGSAFHRVIPGFMCQGGDFTAGNGTGGESIYGDKFKDENFAKKHTGAGILSMANSGPNTNGSQFFICTAETSWLDGKHVVFGKVVEGMEVVKAIEKVGSSSGTTKKKVVVADCGQVA

SEQ ID NO: 635 - protein, 163 aa, Zea mays subsp. mays
  misc_feature (1)..(163): Ceres Seq. ID no. 12635882
MTLDGAPAGRIVMELYKDTTPNTAENFRALCTGEKGVGKKGKPLHFKGSAFHRVIPGFMCQGGDFTAGNGTGGESIYGDKFKDENFAKKHTGAGILSMANSGPNTNGSQFFICTAETSWLDGKHVVFGKVVEGMEVVKAIEKVGSSSGTTKKKVVVADCGQVA

SEQ ID NO: 636 - DNA, 912 bp, Zea mays subsp. mays
  misc_feature (1)..(912): Ceres Seq. ID no. 12635930
aactgaaagataagaagaagatgaagctgaaagtgtatgcagatcgtatgtcacagccgtctcgtgctgtaatcatattctgcaaggttaatggaatcgaattcgatgaggttctgattatcttggcgaagcgtcagcaattatcccctgaattcaaagagattaacccattggggaaagttccaactattgttgacggcagacttaagctcttcgagagtcacgccatcttgatttatctttcctctgcattcccgagtgtagctgatcattggtacccgaatgatctttccaagagagccaagattcactctgtcttggattggcatcactccaatttacgccctggtgcagctggatatgtaatgaatagtgttctagctccatttcttggcggttctctggactcgaaagcagctgctgaagctgagcagatactaaccaagtctctgtccactctagagactttttggcttaagggcaatgctaaattcttgctcggaagcaaccaaccatccatagctgatctcagccttgtatgcgaacttatgcaactccaggttttggatgagaaagatcgtcttagattgttttctccttacaagaaagttgaggaatggattgagaatacgagaaaggccacgcagcctcactttgatgtggttcataaaaccctttacggagctaaagacaaatttgagaaacagcggaagatggggacaacaaccgtatctaaacctggttttcaatctaagatgtgagaacaaatttgtatcggaggctgtttgtgaaaaccccggtttaggggatcactgtaataactcggttcaacatttacactgtaatcggaaccaaggaatgtatttgtaatcacttatcagggctgtttcaaaataaacatataagtgaggc

SEQ ID NO: 637 - protein, 252 aa, Zea mays subsp. mays
  misc_feature (1)..(252): Ceres Seq. ID no. 12635931
LKDKKKMKLKVYADRMSQPSRAVIIFCKVNGIEFDEVLIILAKRQQLSPEFKEINPLGKVPTIVDGRLKLFESHAILIYLSSAFPSVADHWYPNDLSKRAKIHSVLDWHHSNLRPGAAGYVMNSVLAPFLGGSLDSKAAAEAEQILTKSLSTLETFWLKGNAKFLLGSNQPSIADLSLVCELMQLQVLDEKDRLRLFSPYKKVEEWIENTRKATQPHFDVVHKTLYGAKDKFEKQRKMGTTTVSKPGFQSKM

SEQ ID NO: 638 - protein, 246 aa, Zea mays subsp. mays
  misc_feature (1)..(246): Ceres Seq. ID no. 12635932
MKLKVYADRMSQPSRAVIIFCKVNGIEFDEVLIILAKRQQLSPEFKEINPLGKVPTIVDGRLKLFESHAILIYLSSAFPSVADHWYPNDLSKRAKIHSVLDWHHSNLRPGAAGYVMNSVLAPFLGGSLDSKAAAEAEQILTKSLSTLETFWLKGNAKFLLGSNQPSIADLSLVCELMQLQVLDEKDRLRLFSPYKKVEEWIENTRKATQPHFDVVHKTLYGAKDKFEKQRKMGTTTVSKPGFQSKM

SEQ ID NO: 639 - protein, 237 aa, Zea mays subsp. mays
  misc_feature (1)..(237): Ceres Seq. ID no. 12635933
MSQPSRAVIIFCKVNGIEFDEVLIILAKRQQLSPEFKEINPLGKVPTIVDGRLKLFESHAILIYLSSAFPSVADHWYPNDLSKRAKIHSVLDWHHSNLRPGAAGYVMNSVLAPFLGGSLDSKAAAEAEQILTKSLSTLETFWLKGNAKFLLGSNQPSIADLSLVCELMQLQVLDEKDRLRLFSPYKKVEEWIENTRKATQPHFDVVHKTLYGAKDKFEKQRKMGTTTVSKPGFQSKM

SEQ ID NO: 640 - DNA, 822 bp, Zea mays subsp. mays
  misc_feature (1)..(822): Ceres Seq. ID no. 12635934
actcccacacaagacaagcgtcgattgccccccatccgtggctgcgcgtccgccggtggccgggggttctaatccgagcgattcccaatcccaaccgccgctggaagaccccgcagctccacgacagcgcgggcagacatggcgcccgtgctacctgcgccgccggcggtggcggctcctcccaccttctgccgcgtctctatcccggcccgcagcgctttcccctcctcctcccccgtcagaaaccttcgcaggtttgcggccaggagcggcggcggcggcggcggccgtcccgagcccaaagcaggtgatgatgagagcaaggccgtccttgacgccttcttcctcgggaaggccttggcggaggcgctgacggagcgggccgagtcggtggtgggcgaggtgttcagcgtcgtcgggcagtggcaggcggagcagcagaagcaggtccaggaatttcaggaggaagtagttcagagagcccaaaaggctaaggaaagagctgctgaggaggtcgttgatgataagggaccaaagactctaaagggaccttcaacaacaatcgtgacgcctgcacctacgcctcctccttctcctaatattcccacacaggcagaacagttataagcggcgatgaagagttagtgctgcatgtagactcactttgtgctccaagaaagtgatgaaattctcctatgagatatgtattgatcaagttgtcctttctttgatagtgaatatccagaatatcaactagaaaaatctatggtacaagttccgagatgaatggaataaaaatctgttagtttactacagattctg

SEQ ID NO: 641 - protein, 162 aa, Zea mays subsp. mays
  misc_feature (1)..(162): Ceres Seq. ID no. 12635935
MAPVLPAPPAVAAPPTFCRVSIPARSAFPSSSPVRNLRRFAARSGGGGGGRPEPKAGDDESKAVLDAFFLGKALAEALTERAESVVGEVFSVVGQWQAEQQKQVQEFQEEVVQRAQKAKERAAEEVVDDKGPKTLKGPSTTIVTPAPTPPPSPNIPTQAEQL

SEQ ID NO: 642 - protein, 123 aa, Zea mays subsp. mays
  misc_feature (1)..(123): Ceres Seq. ID no. 12635936
LPHKTSVDCPPSVAARPPVAGGSNPSDSQSQPPLEDPAAPRQRGQTWRPCYLRRRRWRLLPPSAASLSRPAALSPPPPPSETFAGLRPGAAAAAAAVPSPKQVMMRARPSLTPSSSGRPWRRR

SEQ ID NO: 643 - protein, 102 aa, Zea mays subsp. mays
  misc_feature (1)..(102): Ceres Seq. ID no. 12635937
SHTRQASIAPHPWLRVRRWPGVLIRAIPNPNRRWKTPQLHDSAGRHGARATCAAGGGGSSHLLPRLYPGPQRFPLLLPRQKPSQVCGQERRRRRRPSRAQSR

SEQ ID NO: 644 - DNA, 1844 bp, Zea mays subsp. mays
  misc_feature (1)..(1844): Ceres Seq. ID no. 12637271
gtggctagcggtgtggctccgtcagctgctccaggagctccatagttcgctgacatggagcacgctgggctactgtgatgtcagcgtcgtatatctctccatcaacctcgtctaacaccagcgcacgaagcatgtcgagctcgatctccacttcatgcgtgagcgtgtcgccattggagatgtgcgagttcatgtaccaaccacctctcagttcgccgacgtcttcaccaagggccatcccacgccggtgtttgaggagtttcggtccagtctcaacatctatcatggctagagttttgactgcggggggtgttagatgtatttgtgtgtggctgtcattgtattgggccaaggcccacctactctattattaatacatcacccaaccttattgagagagttagggtttcagtcttttccagaatgcaatattatctaagacacatatggatttgcttctctcctcaagttgatagacacatgttttttagaatgctaccttttttaatgaaaagtaggaagtattcctctgatcctataaccctatatattaatatacatgcatataaaagagtgattgtcacagtaagctacatttacattaaaatttgaatctttgtaaggtctactgttggcattggatgtcaagtagtatgatgaaagtttattttgttattatatctaagattgtgcttaaaactggtaggggcatttcacttctaggaaaagaaaaaaaaatcctactttgacctcttttttttatatcctggctggtttaggttatctgagatactgagaccagctagctatcagttagttatacttatgcacattctttgctccataagtattctttatcttcctatgttggcattttcaatttgagttgttgtcacctgaatttcaatacttcatattctataaataccccccccccccccctcaaactaacatatttcaagtatgtttgaacaatgaacagttggtagttctctaaaaaagtttaaggatcttgcaggtttcctgcttctgacaaggcctccaagatgaggaatcttgatgcctcgttgcttccgcaaaccaacaagaatgttcagcagcaaagtgaagtcgatgtgaagcttgcatcaatgctctatgaagctttacttagccttagagaacagataatggaggagtgtaacgaaggattcaatgcgtatcacatattcaaaacagacacgttgaaggaaatgagtatccgagtaccgagaacaaaagaagagcttttggatataaacggcctcggcaagacaaaggtcaagaagtacggggaccgcttgcttgcaaccatcgaggacttcctcagcaaacacccaaatccaaggagaaacagcggcggaggtggcggcggcaacgagcactccgatgcggcaaagaagcgaaggggctccaccgccatctctgcagcgagttacggcgactatgacttcgacgaacgcacgggccagcagtccaagaagcgcgcggccaagacgcgaactgtctctgcccacggcccccgctgcacggacgccgatctcgatgggcctgaggtggtggaggtggacggcgagctgcgcagcgtccggaagcccgtggcgtatggcaatggcagggttcttcccaagtgggcacccctctaacttattccaggaatttgggtacgtcaagtagagtagagtaccgctagggaataggaatgtaggcttgcacatatgtaatctcccaggttggctcgtgcacatgcagcgatgcagtgatgtcaagggttttctgtaaaaaagaaaaaaaaaaaaaaaaaaactcgagggggggcccggtac

SEQ ID NO: 645 - protein, 205 aa, Zea mays subsp. mays
  misc_feature (1)..(205): Ceres Seq. ID no. 12637272
MRNLDASLLPQTNKNVQQQSEVDVKLASMLYEALLSLREQIMEECNEGFNAYHIFKTDTLKEMSIRVPRTKEELLDINGLGKTKVKKYGDRLLATIEDFLSKHPNPRRNSGGGGGGNEHSDAAKKRRGSTAISAASYGDYDFDERTGQQSKKRAAKTRTVSAHGPRCTDADLDGPEVVEVDGELRSVRKPVAYGNGRVLPKWAPL

SEQ ID NO: 646 - protein, 177 aa, Zea mays subsp. mays
  misc_feature (1)..(177): Ceres Seq. ID no. 12637273
MLYEALLSLREQIMEECNEGFNAYHIFKTDTLKEMSIRVPRTKEELLDINGLGKTKVKKYGDRLLATIEDFLSKHPNPRRNSGGGGGGNEHSDAAKKRRGSTAISAASYGDYDFDERTGQQSKKRAAKTRTVSAHGPRCTDADLDGPEVVEVDGELRSVRKPVAYGNGRVLPKWAPL

SEQ ID NO: 647 - protein, 164 aa, Zea mays subsp. mays
  misc_feature (1)..(164): Ceres Seq. ID no. 12637274
MEECNEGFNAYHIFKTDTLKEMSIRVPRTKEELLDINGLGKTKVKKYGDRLLATIEDFLSKHPNPRRNSGGGGGGNEHSDAAKKRRGSTAISAASYGDYDFDERTGQQSKKRAAKTRTVSAHGPRCTDADLDGPEVVEVDGELRSVRKPVAYGNGRVLPKWAPL

SEQ ID NO: 648 - DNA, 718 bp, Zea mays subsp. mays
  misc_feature (1)..(718): Ceres Seq. ID no. 12637617
ccccccccccccccatcataccatcagatagtggatggacaaccaagcgtgcaccgtttcatcatttctgattctttcttagatgactaagataagtgtgaggtctgtactcatattctttccttttcttttcaatgcaggtatgatcttatacgagtggagattggcaacaaagatataaagcttgaatacttagtggaggcatttacaacttcaaatgacgtagcctcctcgacaccttctgcttctgctaactccggtgcaaggtagatccttgctatacttgacaaactaaaggaggaaagggagcaacaagaaggaaaatatggggaggaagatgtggatggttcatgtatatcagaagaagaagatggtgactgggatgtagatgagccagatgaggaggacatcatttacgtaaaatagcccattgtcttctaggaacttggtcatcattcatccagaacacagcaggttgcgttctgcatacataatattgcctatcaaggtagatttgccagagcagacttcgatcttcttaatctacctgacagtttcttaccatcatttgattttattgatggacatgttaagcctgttctagggagaaagattaactggatgaagacagggatcgttgagagtgatctggttctaacagttagtccacattatgttaaggaactcacttatggcccagataaaggtgttgagttgg

SEQ ID NO: 649 - protein, 32 aa, Zea mays subsp. mays
  misc_feature (1)..(32): Ceres Seq. ID no. 12637618
MTKISVRSVLIFFPFLFNAGMILYEWRLATKI

SEQ ID NO: 650 - protein, 32 aa, Zea mays subsp. mays
  misc_feature (1)..(32): Ceres Seq. ID no. 12637619
MKTGIVESDLVLTVSPHYVKELTYGPDKGVEL

SEQ ID NO: 651 - DNA, 534 bp, Zea mays subsp. mays
  misc_feature (1)..(534): Ceres Seq. ID no. 12637673
cacattggatggatacgaacacacaacttattctcagcgaagtttcccaatctatcgtgggcaaccatttcagcagtacaacaacatgacttccagttacatccgaccgatgagggctcatcacaatggtcagcctgtctggtctaattataggctgacagaacctccaccaactacaatgggtgacggaatgctctggggagggaggggtggccattcgtttgcagcgagcggactgccacctacacttaggaaagattttgggagaatcttttagtcctgaatccggaggaatgccgaatgccaccaaattgatggcatcagttgtttgcatctgcaattccgggttggattatttgctgggggtgcctactggtattgcaatttgttgtgttcctccgatgtctcccaggatgttcggttcaaatgattatatggtacgggatatgattacagtgctcgttctttgctatacctgcacgatctagtagaaaaatgtcagttgtgctacttgatgcgaatcttgctagttcg

SEQ ID NO: 652 - protein, 91 aa, Zea mays subsp. mays
  misc_feature (1)..(91): Ceres Seq. ID no. 12637674
TLDGYEHTTYSQRSFPIYRGQPFQQYNNMTSSYIRPMRAHHNGQPVWSNYRLTEPPPTTMGDGMLWGGRGGHSFAASGLPPTLRKDFGRIF

SEQ ID NO: 653 - protein, 64 aa, Zea mays subsp. mays
  misc_feature (1)..(64): Ceres Seq. ID no. 12637675
MPNATKLMASVVCICNSGLDYLLGVPTGIAICCVPPMSPRMFGSNDYMVRDMITVLVLCYTCTI

SEQ ID NO: 654 - protein, 63 aa, Zea mays subsp. mays
  misc_feature (1)..(63): Ceres Seq. ID no. 12637676
MTSSYIRPMRAHHNGQPVWSNYRLTEPPPTTMGDGMLWGGRGGHSFAASGLPPTLRKDFGRIF

SEQ ID NO: 655 - DNA, 963 bp, Zea mays subsp. mays
  misc_feature (1)..(963): Ceres Seq. ID no. 12637705
agcagtccgatagccagcaagccagcgcacgtcggtaggcacgccaccatgccggggctcaccatcggcgacaccgtccccaacctggagctggactccacccacggcaagatccgcatccacgactacgtcggcgacggctacgccatcatcttctcccacccagccgacttcacgcccgtgtgcacaacggagatggcggcgatggcggggtacgccaaggagttcgagaagcgtggcgtgaagctgctgggcatctcgtgcgacgacgtggagtcgcacaggcagtggaccaaggacgtggaggcgtacggcgggaagcagcagcagcagcaggcgacgacgacgaaggtgacgttcccgatcctggcggacccggcgcgggacgccatccggcagctgaacatggtggaccccgacgagaaggacgcggcggggcggagcatgccgtcccgcgcgctccacgtcgtcgggcccgacaaggccgtcaagctgagcttcctgtacccggccaccacggggcggaacatggacgaggtgctgcgcgctgtcgactcgctgctcaccgccgccaagcatggcgggaaggtggccacgcccgccaactggaagcccggggagtgcgccgtcatcgcgcccggcgtctccgacgaggaggccaggaagatgttcccgcaggggttcgagaccgccgacctgccctccaagaagggctacctccgtttcaccaaggtttagctagccgacgtacggcacggacatctagctcgtctgtcagtccgcgtcgaccggggtgcgcggatcttttgtgcctgctggtggtttctctgactagtactagtatatatataggctctatgtatgtgcgtactatgccgtgccgtgttgtctcgtgtagtggtggcaaccggttcgtggcactaccgcgctagtattgtccacccatatcaatgtcctcttctg

SEQ ID NO: 656 - protein, 245 aa, Zea mays subsp. mays
  misc_feature (1)..(245): Ceres Seq. ID no. 12637706
SSPIASKPAHVGRHATMPGLTIGDTVPNLELDSTHGKIRIHDYVGDGYAIIFSHPADFTPVCTTEMAAMAGYAKEFEKRGVKLLGISCDDVESHRQWTKDVEAYGGKQQQQQATTTKVTFPILADPARDAIRQLNMVDPDEKDAAGRSMPSRALHVVGPDKAVKLSFLYPATTGRNMDEVLRAVDSLLTAAKHGGKVATPANWKPGECAVIAPGVSDEEARKMFPQGFETADLPSKKGYLRFTKV

SEQ ID NO: 657 - protein, 229 aa, Zea mays subsp. mays
  misc_feature (1)..(229): Ceres Seq. ID no. 12637707
MPGLTIGDTVPNLELDSTHGKIRIHDYVGDGYAIIFSHPADFTPVCTTEMAAMAGYAKEFEKRGVKLLGISCDDVESHRQWTKDVEAYGGKQQQQQATTTKVTFPILADPARDAIRQLNMVDPDEKDAAGRSMPSRALHVVGPDKAVKLSFLYPATTGRNMDEVLRAVDSLLTAAKHGGKVATPANWKPGECAVIAPGVSDEEARKMFPQGFETADLPSKKGYLRFTKV

SEQ ID NO: 658 - protein, 180 aa, Zea mays subsp. mays
  misc_feature (1)..(180): Ceres Seq. ID no. 12637708
MAAMAGYAKEFEKRGVKLLGISCDDVESHRQWTKDVEAYGGKQQQQQATTTKVTFPILADPARDAIRQLNMVDPDEKDAAGRSMPSRALHVVGPDKAVKLSFLYPATTGRNMDEVLRAVDSLLTAAKHGGKVATPANWKPGECAVIAPGVSDEEARKMFPQGFETADLPSKKGYLRFTKV

SEQ ID NO: 659 - DNA, 734 bp, Zea mays subsp. mays
  misc_feature (1)..(734): Ceres Seq. ID no. 12637827
catatgaagatgacctaccctcgccaaaacctgctccaaaacttgtacccaaaagtgaaccagatgatagcagccctgctaaaccaacaccatcagggcacgctcagagcgctacaccttcatccaaatccactcaaaagaggaaatcagggggtggtgatgcaaatatttctaatggtgcaccctcgaaaaagataaagatggaacatgaaaccggaacattggctgtcaaggatgaaaatccgtcttatttggaaccaacttcgaaagcatctctttcagcaagaagagaatcatcacccattacagaggaagaagtcaggacagtacttcgtgcaatttcacccacgacaagccaagatctggtgtcgaggttcaagactcgtctaataactcaagaggacaagaaagcatttttgggcattgtgacgaaaatatctcgcatacttaagcacaacggcggtaggtatatcgttcttcggcacgaacatatgtgaacagacaaattactctacctgtatagtgcaacagattctttaatgccacaaggcaacagcatgagtttttccccctagcttagagcttagggtttaggtattaggtatattgggtactggcaaccaagatgctcagcaagaggcctctgcagtttttctcccttataatgtacttcctgagagctgagaatgaaatgagaaaacgagaatggaatctatggtagattcttataatcc

SEQ ID NO: 660 - protein, 164 aa, Zea mays subsp. mays
  misc_feature (1)..(164): Ceres Seq. ID no. 12637828
YEDDLPSPKPAPKLVPKSEPDDSSPAKPTPSGHAQSATPSSKSTQKRKSGGGDANISNGAPSKKIKMEHETGTLAVKDENPSYLEPTSKASLSARRESSPITEEEVRTVLRAISPTTSQDLVSRFKTRLITQEDKKAFLGIVTKISRILKHNGGRYIVLRHEHM

SEQ ID NO: 661 - protein, 98 aa, Zea mays subsp. mays
  misc_feature (1)..(98): Ceres Seq. ID no. 12637829
MEHETGTLAVKDENPSYLEPTSKASLSARRESSPITEEEVRTVLRAISPTTSQDLVSRFKTRLITQEDKKAFLGIVTKISRILKHNGGRYIVLRHEHM

SEQ ID NO: 662 - DNA, 777 bp, Zea mays subsp. mays
  misc_feature (1)..(777): Ceres Seq. ID no. 12637935
gagagcagggtgtactcgagacagacaggactgacggccacatccgccatattcaggcatggaagcaccggctgcgaagcgcgtcctccgcgtggcctccatcagcggctccattcgcaaggcctcctggcacagcggactcatccgcgccgccgcggaggtgtgcgaggactgcatcccggggctgcgcgtcgaccacctcgacgtcgccgacctgccgatgctcaacaccgacctcgagacgaacggcggcacgggcttcccgcccgccgtcgaggcgttccgcgccaaggtccgccacgccgactgcttcctcttcgcctcgcccgaatacaactactccatcaccagcccactgaagaacgcgcttgactgggcttctagaggagtgaactgctgggcagacaagccggccgccatcgtcagcgcgggaggcaacttcggcggcggcaggtccagctaccatctgcgccaggtcggggtgttcttggacatccatttcatcaacaagccggaactgttcgtcttcgccttcttcgagccggccaagtttttcgacagcgacgggaacctcatcgacgccgacaccagggagcgcctcaagcaggtgctcctgtcccttgaggccttcacgcgcaggctccagaacaacaaggactgaagcagcagctcccgggatcgtcgtgctaataataatagggacatttacatttcacccactagtttggatgcgctgctcaaatctatccccgtctaaattctctacttagtttttcc

SEQ ID NO: 663 - protein, 200 aa, Zea mays subsp. mays
  misc_feature (1)..(200): Ceres Seq. ID no. 12637936
MEAPAAKRVLRVASISGSIRKASWHSGLIRAAAEVCEDCIPGLRVDHLDVADLPMLNTDLETNGGTGFPPAVEAFRAKVRHADCFLFASPEYNYSITSPLKNALDWASRGVNCWADKPAAIVSAGGNFGGGRSSYHLRQVGVFLDIHFINKPELFVFAFFEPAKFFDSDGNLIDADTRERLKQVLLSLEAFTRRLQNNKD

SEQ ID NO: 664 - protein, 146 aa, Zea mays subsp. mays
  misc_feature (1)..(146): Ceres Seq. ID no. 12637937
MLNTDLETNGGTGFPPAVEAFRAKVRHADCFLFASPEYNYSITSPLKNALDWASRGVNCWADKPAAIVSAGGNFGGGRSSYHLRQVGVFLDIHFINKPELFVFAFFEPAKFFDSDGNLIDADTRERLKQVLLSLEAFTRRLQNNKD

SEQ ID NO: 665 - protein, 123 aa, Zea mays subsp. mays
  misc_feature (1)..(123): Ceres Seq. ID no. 12637938
ESRVYSRQTGLTATSAIFRHGSTGCEARPPRGLHQRLHSQGLLAQRTHPRRRGGVRGLHPGAARRPPRRRRPADAQHRPRDERRHGLPARRRGVPRQGPPRRLLPLRLARIQLLHHQPTEERA

SEQ ID NO: 666 - DNA, 980 bp, Zea mays subsp. mays
  misc_feature (1)..(980): Ceres Seq. ID no. 12638136
atcagtagtagtcatcactgagtagactgcagagcaggaggagatgttcacttacgtgctcgcggccgccgccgtgcttatcgtgttcctctacgccgtcgaagcagcaacagcaagctccctccgtcgcccccgtcgctgccgctgatcggccacctccaacgcggtggtcactcgcgcggccaccaggggccgccggggcaacagcaggatgtgctgccggacgcggcgctgatggtgggcttccaaccgcaggatgtgctgccggacgcgccagcgaggtttgtgagatgggcgacgggccttgataagaagctcgccgacatggccgaggcgtgggacaggttgctgtccgagatggtggccgcgcacaaggaggggaccgggcggccggccacgcaggggaggaggatgaggacttcttggacgtgctgctgcggcttagggaagatggcgcggatgggctcgagctcacagacgaccgcatcaaaggcatcctcgaggacatgataggcggtgggactgaaacaaccatccaaacgctggaatgggccatggctgcatggcagagctcatagccaacccgtgggtgatggccaagctcaaggacgagatcgcgcgagtggtcgccgccgatcagcctaccatctcggagtcggatctcggcagaatggaatacctaaaagcagagcaagatgttcaaaaaaattatgaacttctgttacctctttagatgcggctacaagagctagctataattgatgagcaaagcagtgaacacaatatgcataagggcactcttctgcaaactttgcctgaagtccatttcactctccacgcatattactagcaccatcatatccttgtctacgaatattttgaacatctaatttatgatgtgacaaaacaaagtccaactcctttttaagagtggtagatgatgtatcatgaacatgaataagatcaagaaagcgctctcg

SEQ ID NO: 667 - protein, 91 aa, Zea mays subsp. mays
  misc_feature (1)..(91): Ceres Seq. ID no. 12638137
MVGFQPQDVLPDAPARFVRWATGLDKKLADMAEAWDRLLSEMVAAHKEGTGRPATQGRRMRTSWTCCCGLGKMARMGSSSQTTASKASSRT

SEQ ID NO: 668 - protein, 61 aa, Zea mays subsp. mays
  misc_feature (1)..(61): Ceres Seq. ID no. 12638138
MAEAWDRLLSEMVAAHKEGTGRPATQGRRMRTSWTCCCGLGKMARMGSSSQTTASKASSRT

SEQ ID NO: 669 - protein, 61 aa, Zea mays subsp. mays
  misc_feature (1)..(61): Ceres Seq. ID no. 12638139
MGHGCMAELIANPWVMAKLKDEIARVVAADQPTISESDLGRMEYLKAEQDVQKNYELLLPL

SEQ ID NO: 670 - DNA, 598 bp, Zea mays subsp. mays
  misc_feature (1)..(598): Ceres Seq. ID no. 12638185
atcaacacaaacaggcatcagttcaggcagtccacaaaaaacgaacaagcatcagcacactttcttcactaccgcaagttcagtagctctacagacacagagatcacaattcagtatcttctctccagcaacttgggaacaagaaggggaggagatggctggtccagcgaaggcttcgtggatggtggcgatgggcgtgggcgccgtggaggcgctcaaggaccaggccgggctctgccgctggaactatgccctcaggtccatccatcggacagccaaggcaaaggccaacgtccgcggcggcggcggcgtctcgcaaggcaagaagcagcttccgacctctgcggcggcagtgacggagaggcggcgagcagacaaggccgaggaggggctgaggacggtcatgtacctcagctgctggggcccaaactaggagtactatagtagctagaggtgttgtgttcgtcggagcaaagtatgcagccatggcctgagacctggctgattgccctttccccaccgttgtaagataccacggtgatgatgatggtgatgatgatgaaagtttcggcctcaatttacgactgtatatcaccct

SEQ ID NO: 671 - protein, 147 aa, Zea mays subsp. mays
  misc_feature (1)..(147): Ceres Seq. ID no. 12638186
INTNRHQFRQSTKNEQASAHFLHYRKFSSSTDTEITIQYLLSSNLGTRRGGDGWSSEGFVDGGDGRGRRGGAQGPGRALPLELCPQVHPSDSQGKGQRPRRRRRLARQEAASDLCGGSDGEAASRQGRGGAEDGHVPQLLGPKLGVL

SEQ ID NO: 672 - protein, 143 aa, Zea mays subsp. mays
  misc_feature (1)..(143): Ceres Seq. ID no. 12638187
STQTGISSGSPQKTNKHQHTFFTTASSVALQTQRSQFSIFSPATWEQEGEEMAGPAKASWMVAMGVGAVEALKDQAGLCRWNYALRSIHRTAKAKANVRGGGGVSQGKKQLPTSAAAVTERRRADKAEEGLRTVMYLSCWGPN

SEQ ID NO: 673 - protein, 92 aa, Zea mays subsp. mays
  misc_feature (1)..(92): Ceres Seq. ID no. 12638188
MAGPAKASWMVAMGVGAVEALKDQAGLCRWNYALRSIHRTAKAKANVRGGGGVSQGKKQLPTSAAAVTERRRADKAEEGLRTVMYLSCWGPN

SEQ ID NO: 674 - DNA, 831 bp, Zea mays subsp. mays
  misc_feature (1)..(831): Ceres Seq. ID no. 12638203
agttttcgggttcttggataggagaaagcggggcgctcaattccccccctcctgatccttgttccttgatcgccgccatgagcaacacgctgcttcgagtctacccttccgacctgaagatgccattcgagctcaggaagcagaactcagcgtgtcttgagctcgtcaacaagaccgaccggtgggtggctttcaaggtcaagacgacgaaccctaggaagtactcggtgcgctctgcctccggtgtcgtgccgcccaggggatcctgtggcatcacaataacgatgcaagcgcccaaggagatgcccccggactaccactgcaaggacaagtttcttgttcagagcattgctgtggaggaggggacgacgcagaaggacattgtccctgacatggatgattctacatccaagttggaactggaaagaagatacgcacaggaaaacaagaagattcagaaagagctggatctcctccggaaaacaaaggcgtctcctcggggcttctctgcgtttgtgctgcttgtcttcttgttatcttcacttcttggatacctgatgttcggaagcagagcttagcaagttagcagctaatggctgcacatcatttgcggcaccggcagcggtacggctctatcggcttttgtctattgctccttttagtacagtgtacagatatatacattaatagtgaagtagtcagtacataacagatatatagggcgttcttgggtttcaagtgtccataagaacatatcttcagttttgaaatatgtgtgtgtttgctagtaccgttcatgtttatactctatccaaatatatgatgtttact

SEQ ID NO: 675 - protein, 191 aa, Zea mays subsp. mays
  misc_feature (1)..(191): Ceres Seq. ID no. 12638204
FSGSWIGESGALNSPPPDPCSLIAAMSNTLLRVYPSDLKMPFELRKQNSACLELVNKTDRWVAFKVKTTNPRKYSVRSASGVVPPRGSCGITITMQAPKEMPPDYHCKDKFLVQSIAVEEGTTQKDIVPDMDDSTSKLELERRYAQENKKIQKELDLLRKTKASPRGFSAFVLLVFLLSSLLGYLMFGSRA

SEQ ID NO: 676 - protein, 166 aa, Zea mays subsp. mays
  misc_feature (1)..(166): Ceres Seq. ID no. 12638205
MSNTLLRVYPSDLKMPFELRKQNSACLELVNKTDRWVAFKVKTTNPRKYSVRSASGVVPPRGSCGITITMQAPKEMPPDYHCKDKFLVQSIAVEEGTTQKDIVPDMDDSTSKLELERRYAQENKKIQKELDLLRKTKASPRGFSAFVLLVFLLSSLLGYLMFGSRA

SEQ ID NO: 677 - protein, 152 aa, Zea mays subsp. mays
  misc_feature (1)..(152): Ceres Seq. ID no. 12638206
MPFELRKQNSACLELVNKTDRWVAFKVKTTNPRKYSVRSASGVVPPRGSCGITITMQAPKEMPPDYHCKDKFLVQSIAVEEGTTQKDIVPDMDDSTSKLELERRYAQENKKIQKELDLLRKTKASPRGFSAFVLLVFLLSSLLGYLMFGSRA

SEQ ID NO: 678 - DNA, 926 bp, Zea mays subsp. mays
  misc_feature (1)..(926): Ceres Seq. ID no. 12638274
gtcgagagagagaagatggaggattcgtcggcatcgtttgtaggaaacagatattgggtgctccgacatggaaagagcattccaaacgagagaggcctcatcgtctcttcaatggaaaatggagtgctaccagagtaccagttagcgcctgatggtgtcgctcaggctcagctcgctggccaatccttcctcaagcaactcgaggaaagtaagatatcactggacaaggtccgcatttgctactcccccttctctagaaccactcacaccgctaaggttgtcgctcaggtcctcaatatcccttttgattcccctcaatgcaagatgatggaaactctgcgagaacgctactttggacctacatttgaactcaagtcacatgataagtacccggagatatgggatcttgatgagaaagatccattcatgggaccagaaggaggtgaaagcgctgatgacgttgtatccagacttgccactgccatgttatccatggaagcagaatttcaaaggtgcgcaattctggtggtgagccatggagatccactgcagatgctgcagaacataatgcattcagcaaagcaacaaagcggaggagatggtggtttagctgagagaattcagatgagcagagttgcttctgtcttgtcacagcaccgcaagtttgctttgctcactggtgaactccgacccctcgtctgattgattgcaaaccagaaaaagtattcaactttgggatgttggtcctatctgccaatgacaattcttgcaatttttaaacttttatatggaataagcaagctgtttttgttagaaagacaaaggtttattcttctgtttggaataaatcatgattcatatgcatcttcaaatctgtacacgacctgagagctaccaaaaaaaaaaaaaaaaaagcttatcgatac

SEQ ID NO: 679 - protein, 233 aa, Zea mays subsp. mays
  misc_feature (1)..(233): Ceres Seq. ID no. 12638275
VEREKMEDSSASFVGNRYWVLRHGKSIPNERGLIVSSMENGVLPEYQLAPDGVAQAQLAGQSFLKQLEESKISLDKVRICYSPFSRTTHTAKVVAQVLNIPFDSPQCKMMETLRERYFGPTFELKSHDKYPEIWDLDEKDPFMGPEGGESADDVVSRLATAMLSMEAEFQRCAILVVSHGDPLQMLQNIMHSAKQQSGGDGGLAERIQMSRVASVLSQHRKFALLTGELRPLV

SEQ ID NO: 680 - protein, 228 aa, Zea mays subsp. mays
  misc_feature (1)..(228): Ceres Seq. ID no. 12638276
MEDSSASFVGNRYWVLRHGKSIPNERGLIVSSMENGVLPEYQLAPDGVAQAQLAGQSFLKQLEESKISLDKVRICYSPFSRTTHTAKVVAQVLNIPFDSPQCKMMETLRERYFGPTFELKSHDKYPEIWDLDEKDPFMGPEGGESADDVVSRLATAMLSMEAEFQRCAILVVSHGDPLQMLQNIMHSAKQQSGGDGGLAERIQMSRVASVLSQHRKFALLTGELRPLV

SEQ ID NO: 681 - protein, 196 aa, Zea mays subsp. mays
  misc_feature (1)..(196): Ceres Seq. ID no. 12638277
MENGVLPEYQLAPDGVAQAQLAGQSFLKQLEESKISLDKVRICYSPFSRTTHTAKVVAQVLNIPFDSPQCKMMETLRERYFGPTFELKSHDKYPEIWDLDEKDPFMGPEGGESADDVVSRLATAMLSMEAEFQRCAILVVSHGDPLQMLQNIMHSAKQQSGGDGGLAERIQMSRVASVLSQHRKFALLTGELRPLV

SEQ ID NO: 682 - DNA, 1723 bp, Zea mays subsp. mays
  misc_feature (1)..(1723): Ceres Seq. ID no. 12782785
actgtcttgactcttcctcgtctccactctccaccaccatcattgattcctgtctccgcagcttgacccacagacgcgactagggcagtcaccgcggcgtagctgccgcgtcttgccccgaaacacagccgtcaacgccgccccggaccgcagcagcgcggcgcaaccccaatcggagccggagccagcgaagcgagcgcctcgcttccacaagtcgctagctgcatctggagcgccgccggcccgaccaacgcccgagccaaccgtgggcgttcggccgccgattcctctgggctctggtggatgtcttgtaggaacacacttggatgaggttacaatacgcgtgaaacgccatacccttcatcttgctattttgtgctatctcaacaaataaaatcttctccaacaacaaacctttcagcttcaccatagtgtctgctaggtcgttgcttgagatcgaccccaattcaggactcgttcaggacaaggtaaaagttggacaaactttggaagaggacacccaaaacattatcaatatgactatgaatgtgtcgtctggatggagcattgtgaaagaagaattcatacttcctgctagaggtgcccctttcaatagttgccatgcttctactattgtacagattgaggaagacaattttttggtagcatattttggtggatccagggaaggtgctccggatgttaaaatctggttacagagatatagtgatggtcactggcatcctccagtggtggctgatgaacaagatggggtgcccatgtggaatcctgttttgtttcagcttccctcccgtgagctgcttctcttctacaagattggtcaagaagttcagaagtggagcggtgccatgaaaagatcgttagatggcggtgtaacctggtcaccgagagagcagttacctcctggcatccttggtcctattaaaaataagcctttcttgcttgaagatgggcgcctactgtgtggatcatcagttgaaagttggaattcttggggtgcatggcttgaggttacgaaagatgccggatggacctggagaaagtatggccctatatgtataaaaggtcaaccacttggggtaattcagccagttccctacaggactgacgatggaactattcgagtgttgctgcgatcatttgaaacaattggtcatgtatgtatggccgattccattgatgaaggtgtgacatggagttatgtccgtgagactgagcttccaaacccaaattctgggattgatggagttaagatgaaggatggaagagtactgcttgcctacaacaccttctccagaggaacgctcaagcttgcagtatccttaaacgacggtgattcatgggacgaagtaatgacactagaggacacgaaaggtatggagttttcgtatcctgcagtgatccagtctatggatgagctcatacatgttacctatacatacaatcggacacaggttaagcatgttgttcttcgacctagttcgatggtgaagttgtgagcctgctgcaactgatgaaggcctatggctggcaacttcaggacacccaaatttatcaccaaatgtttaggagaggggggtcattgcatcggattggctagattatgctcagttgatgtcaaataaatgctttcaggtgctacttaatggactttttccgaggttcatctaaaaaggtatatactgtttaaaatgttctgctc

SEQ ID NO: 683 - protein, 327 aa, Zea mays subsp. mays
  misc_feature (1)..(327): Ceres Seq. ID no. 12782786
MTMNVSSGWSIVKEEFILPARGAPFNSCHASTIVQIEEDNFLVAYFGGSREGAPDVKIWLQRYSDGHWHPPVVADEQDGVPMWNPVLFQLPSRELLLFYKIGQEVQKWSGAMKRSLDGGVTWSPREQLPPGILGPIKNKPFLLEDGRLLCGSSVESWNSWGAWLEVTKDAGWTWRKYGPICIKGQPLGVIQPVPYRTDDGTIRVLLRSFETIGHVCMADSIDEGVTWSYVRETELPNPNSGIDGVKMKDGRVLLAYNTFSRGTLKLAVSLNDGDSWDEVMTLEDTKGMEFSYPAVIQSMDELIHVTYTYNRTQVKHVVLRPSSMVKL

SEQ ID NO: 684 - protein, 325 aa, Zea mays subsp. mays
  misc_feature (1)..(325): Ceres Seq. ID no. 12782787
MNVSSGWSIVKEEFILPARGAPFNSCHASTIVQIEEDNFLVAYFGGSREGAPDVKIWLQRYSDGHWHPPVVADEQDGVPMWNPVLFQLPSRELLLFYKIGQEVQKWSGAMKRSLDGGVTWSPREQLPPGILGPIKNKPFLLEDGRLLCGSSVESWNSWGAWLEVTKDAGWTWRKYGPICIKGQPLGVIQPVPYRTDDGTIRVLLRSFETIGHVCMADSIDEGVTWSYVRETELPNPNSGIDGVKMKDGRVLLAYNTFSRGTLKLAVSLNDGDSWDEVMTLEDTKGMEFSYPAVIQSMDELIHVTYTYNRTQVKHVVLRPSSMVKL

SEQ ID NO: 685 - protein, 246 aa, Zea mays subsp. mays
  misc_feature (1)..(246): Ceres Seq. ID no. 12782788
MWNPVLFQLPSRELLLFYKIGQEVQKWSGAMKRSLDGGVTWSPREQLPPGILGPIKNKPFLLEDGRLLCGSSVESWNSWGAWLEVTKDAGWTWRKYGPICIKGQPLGVIQPVPYRTDDGTIRVLLRSFETIGHVCMADSIDEGVTWSYVRETELPNPNSGIDGVKMKDGRVLLAYNTFSRGTLKLAVSLNDGDSWDEVMTLEDTKGMEFSYPAVIQSMDELIHVTYTYNRTQVKHVVLRPSSMVKL

SEQ ID NO: 686 - DNA, 1533 bp, Zea mays subsp. mays
  misc_feature (1)..(1533): Ceres Seq. ID no. 13573778
cctaatcgaaaaactccactcctaaatccaaagcaaatccgaaagcaccacgaaacacggcggcagcagcctgcgtgcctgcctgcctatccaccccctcctccagcctccgcctccgacacccccgcgcgccctcgcgcggacaaagccgtaaggggcagagccgagggaggcggggctgtgccggcctcgcaatgcagcagccggagcctgccgatctgccgggctgggccttccagccacgggcggcgccggcgcctgccgccgcgcgcggggcgcaccaccgccgggccagatctgaggttgccttccgcctgccggacgacctcggcctcggcggcggcgccggccccgatggcgacgccttcgacgagatcggctcggaggacgacctcttctccaccttcatggacatcgagaagatctccacctccgggccctccgaccgcgccgccgagaactcgtctccgccgcgccccaagcaccgccacagcagctccgtcgatggctcgggcttcttcttctcacccggcgccggcggtggcgcggggaaggatgcagcggcgtcgctggctgaggtcttggaggccaagaagtccatgactcccgagcaactggccgagctcgccgccatcgaccccaagcgcgccaagagaattctagccaacagacaatcagcagctagatcaaaagaaagaaaggctcgttatatgacagaccttgagcggaaggtccaaactcttcagactgaagccaccaccctgtcagctcaacttacactatttcagagggacacgaccggactttctacagaaaatgcagagcttaagataaggttacaggccatggaacaacaggctcaactccgtgatgctctgaatgatgcactaaagcaggagctggagaggcttaaacatgctactggtgagatgaccaattccagcgaggcatataacatgagattccaacatgttccatacaattcttccttcttcccgctttcccagcaaaatgcatccccacaccttggtagcacccagctgccactgccgttccacccaccccatcccaacgtgccaaaccaccagatgcgaaacactctcccggacataatgcagcaagagtctctcggacggctgcagggtttggacattgggaaggggcctctggttgtgaagttagagagcagctcgatctctgcaagtgaaagcagcagcaccttctaacgaggcctacaagtgaaaacccaccgtttcagtaggttccattgttcatagtagcctgacatccttgtgctgcttcctgctctgtaagcccatttgttatttaattcattcatttagttgaaattatacgctgtcgcactggctgatcaatcatgttgtagaatggtccaggaacccttcaattatgtttgttttgggctcgtttcctgtttctgtgactggtatcatcagggcatttgggttttggagtgaaattctctagtggtaacaactaaaaaaaaaaagcttatctataccgtcaacctct

SEQ ID NO: 687 - protein, 343 aa, Zea mays subsp. mays
  misc_feature (1)..(343): Ceres Seq. ID no. 13573779
MQQPEPADLPGWAFQPRAAPAPAAARGAHHRRARSEVAFRLPDDLGLGGGAGPDGDAFDEIGSEDDLFSTFMDIEKISTSGPSDRAAENSSPPRPKHRHSSSVDGSGFFFSPGAGGGAGKDAAASLAEVLEAKKSMTPEQLAELAAIDPKRAKRILANRQSAARSKERKARYMTDLERKVQTLQTEATTLSAQLTLFQRDTTGLSTENAELKIRLQAMEQQAQLRDALNDALKQELERLKHATGEMTNSSEAYNMRFQHVPYNSSFFPLSQQNASPHLGSTQLPLPFHPPHPNVPNHQMRNTLPDIMQQESLGRLQGLDIGKGPLVVKLESSSISASESSSTF

SEQ ID NO: 688 - protein, 272 aa, Zea mays subsp. mays
  misc_feature (1)..(272): Ceres Seq. ID no. 13573780
MDIEKISTSGPSDRAAENSSPPRPKHRHSSSVDGSGFFFSPGAGGGAGKDAAASLAEVLEAKKSMTPEQLAELAAIDPKRAKRILANRQSAARSKERKARYMTDLERKVQTLQTEATTLSAQLTLFQRDTTGLSTENAELKIRLQAMEQQAQLRDALNDALKQELERLKHATGEMTNSSEAYNMRFQHVPYNSSFFPLSQQNASPHLGSTQLPLPFHPPHPNVPNHQMRNTLPDIMQQESLGRLQGLDIGKGPLVVKLESSSISASESSSTF

SEQ ID NO: 689 - protein, 208 aa, Zea mays subsp. mays
  misc_feature (1)..(208): Ceres Seq. ID no. 13573781
MTPEQLAELAAIDPKRAKRILANRQSAARSKERKARYMTDLERKVQTLQTEATTLSAQLTLFQRDTTGLSTENAELKIRLQAMEQQAQLRDALNDALKQELERLKHATGEMTNSSEAYNMRFQHVPYNSSFFPLSQQNASPHLGSTQLPLPFHPPHPNVPNHQMRNTLPDIMQQESLGRLQGLDIGKGPLVVKLESSSISASESSSTF

SEQ ID NO: 690 - DNA, 2069 bp, Zea mays subsp. mays
  misc_feature (1)..(2069): Ceres Seq. ID no. 13574370
gctcactagtcccccccccccccccatgatacagaagtttgtttgggccatctgaagcggtatgctttcaaggagctccgtgcagctactaataattttaactcaaagaacatcttaggtgaaggtggatatggcatagtatacaagggttatttacgcgatggctccgttgttgctgtcaaaaggctgaaggattataatgccgtcggtggggaagttcaattccaaactgaagttgaagtcataagcttggctgttcatcggaatctcctacgtcttattggattctgcactacagagagtgagaggttacttgtttatccatacatgccaaatggaagcgttgcttctcaattgcggggttagtcgctcttcttgctcttgacttccatgtccatatgctgttgcaagctggaccaattttgaaagtacactggtccagaaaatgcattttttgtcacaagagggggaaagtggctataaaaaagcaattataaaaatgtccactcagaaaacctttgagtggtaaaacggctatcaaagcctgatgaaaattttgaatttaaaaatgtgttaacacttctgcatatctgttaaataagtttcttgtatctaacataaaatagttaccctatttctggatgcatcatagttgatgtgaagcgtgttggctttccaacatttgcttagtgcttctgcatagtgcattgagtagtactaaatttagttttgtgtggtctaggccacaccttatgctttgtacaaacaagcaagctaccatgatttctattggtgtgttgcagctggtctatgcatcacagttgttgtccttccattgaacgccgttgaattaattatgtcgatcaaatcaaaccctactcatgttcctgctgtggagctctgccataacgttgtatgtccatgtgatatattgctttcaagtccagttttggactgcccaatctctatctgtcctcaactcaagccgtgtggtatcaggttaattgatagcagcaaaacaccatacaagggcctcgcccacgtatgctgtccaccatgcatgcaaattaactctcttccattttatccagaacatatcaatgccaagccggctctagactggtcaaggagaaagagggtagcgctaggcacagcgaggggtctgctctaccttcacgagcaatgcgacccgaagataatccaccgagacgtgaaggcctccaacgtactcctcgacgagtacttcgaagcgatcgtgggggacttcggactggcgaagctcctggaccacagggagtcccatgtcacgaccgcggtgcgcgggaccgtcgggcatatagcgccggagtacctgtcgaccgggcagtcgtcggagaagaccgacgtgtttgggttcggggttctgctagtcgagctggtcaccggacagaaggcgctggatttcggaagagtcgcgaaccagaagggcggagtgctggactgggtcaagaagctccatcaggagaagcagctaggcgtgatggtggacaaggacctgggcagcagctacgacggggtcgagctggaggaaatggtccagctggctctgctatgcacgcagtaccacccgtcccaccggcccagaatgtccgaggtgatcaggatgctggaaggcgagcccgggctcgcggagagatgggaagcgtcgcagggcaacgtggacacgccgaagtccgtctcgtcggagctcctgcctcccaagtacgtggatttcgccgccgcggacgagtcctcgcttggcctggaagccatggagctgtccgggccaaggtgaccgaccatctggtcgcacaggacaggacgcataggaaagcctatggttgtattgcattggagtcggttaggtgtagagagccccccgacacaagggaaggcgtcaaattttctggtgggttgtagggtgtgatctgtctgtatatagctgtggtggcattcattgtagtgttgtacatacagcagctacttggtcttggtggcaaagagatgagatgaatgagtgtatagaaattaaagttctcagtgcagtgcgg

SEQ ID NO: 691 - protein, 318 aa, Zea mays subsp. mays
  misc_feature (1)..(318): Ceres Seq. ID no. 13574371
MSIKSNPTHVPAVELCHNVVCPCDILLSSPVLDCPISICPQLKPCGIRLIDSSKTPYKGLAHVCCPPCMQINSLPFYPEHINAKPALDWSRRKRVALGTARGLLYLHEQCDPKIIHRDVKASNVLLDEYFEAIVGDFGLAKLLDHRESHVTTAVRGTVGHIAPEYLSTGQSSEKTDVFGFGVLLVELVTGQKALDFGRVANQKGGVLDWVKKLHQEKQLGVMVDKDLGSSYDGVELEEMVQLALLCTQYHPSHRPRMSEVIRMLEGEPGLAERWEASQGNVDTPKSVSSELLPPKYVDFAAADESSLGLEAMELSGPR

SEQ ID NO: 692 - protein, 251 aa, Zea mays subsp. mays
  misc_feature (1)..(251): Ceres Seq. ID no. 13574372
MRPEDNPPRREGLQRTPRRVLRSDRGGLRTGEAPGPQGVPCHDRGARDRRAYSAGVPVDRAVVGEDRRVWVRGSASRAGHRTEGAGFRKSREPEGRSAGLGQEAPSGEAARRDGGQGPGQQLRRGRAGGNGPAGSAMHAVPPVPPAQNVRGDQDAGRRARARGEMGSVAGQRGHAEVRLVGAPASQVRGFRRRGRVLAWPGSHGAVRAKVTDHLVAQDRTHRKAYGCIALESVRCREPPDTREGVKFSGGL

SEQ ID NO: 693 - protein, 250 aa, Zea mays subsp. mays
  misc_feature (1)..(250): Ceres Seq. ID no. 13574373
MQINSLPFYPEHINAKPALDWSRRKRVALGTARGLLYLHEQCDPKIIHRDVKASNVLLDEYFEAIVGDFGLAKLLDHRESHVTTAVRGTVGHIAPEYLSTGQSSEKTDVFGFGVLLVELVTGQKALDFGRVANQKGGVLDWVKKLHQEKQLGVMVDKDLGSSYDGVELEEMVQLALLCTQYHPSHRPRMSEVIRMLEGEPGLAERWEASQGNVDTPKSVSSELLPPKYVDFAAADESSLGLEAMELSGPR

SEQ ID NO: 694 - DNA, 1936 bp, Zea mays subsp. mays
  misc_feature (1)..(1936): Ceres Seq. ID no. 13574398
ggatcggcggagaatgaagatgaaggcgctggcgtgctgccggcggcggccccaggacttgagcatcgacatggaccaagagcccgacagggtgatgacatataatggcctggagacctgcattatcaactgttccgcctatgacgatgatagtggcatcagtgcaacaacatgcggagatggctgtgtcaccgctgattcccttgatgatgaagtctctagctgctttagtaaagatgcttctggttcttccttctcttcacactgccttagcaagcaggaggagcattcgctagatgagttgggtacacccatcgcaattcatctactccctttcaaagcgaagaaaccaatcacatataccttgagtgcttcagatattgaaaacatgaagaaaaaatttgcgaagcttttgctcggttatgatacttcaggaggcgctaggggcgtttgtgcggctctggccttgtctaatggcataatcaatctctctgctactgtttttggagaactctggaagctggaaccattgtgcgaagataaaaagatcaggtggagaaaagaaatggactggttgatgtctcctacaacttatatagtggagctggttccaaggaaacaaagcggagcagatggatgcacatttgagattatgactccaaaggcccgctcagatgttcatgtgaaccttcctgcccttcagaagcttgatacgatgctcattgaagtaatggactctatgatagatacagagttctggtatgaggagagtggtagcagagctgatggtccggtgaaaattaccggcccaaggaagagtaaaaagtggtggctcccatctcctcgtgtccctgagcaagggctatctcgatttcagcggaaaaggcttgtttttcaggctaagcttgttcaccagatcctcaaagccgcaaaatccatcaacgaacaagtcctgttccacatgcctattccggcagctgttatggatgcccttccaaagtctgggagagctagcttgggtgaagatttgtaccaggctataacgaccgagtatattcccatagaggaaatatttgtttccctcagtttgaaaactgagcatagtgtgctcgagactatgaaccagttggagggggcaatgtttgcatggaaccaaagaatcttagaggagcgaagcaagaggtcaccgggacgtcattcctggagcttcatgaaggacagctcgtcagaactcgacaagatgtctgcatgcatcgaaagggtcgacacccttgtgcagcttctgaaagccagatatccgaacctgcctccaacttttatagatgttctaaaggtccagtacaatgtggatgtggggaatgcaatcgtggaggcatactctagggttcttgtcggggtagcattcagcatactgtcgcgcgtggcggagatactgctggaggatgacctggtcaagaggcccaacacccccatggcctcactgaagttcgacctctcctccgacgtgtacttggccggcataacagagacgccgccgggacacgtccggaggtcccttatggatcagatcagcatggtcgacgggcgcttcaacgctgctgtgaagaagaaaggagcgaagcagctgaggtggtgaggacagtcggctgttgtgtgaaatcttttggccatgtacagggtgggtgatgcagagcccagtgtccgctccacaaggacacaaggcaaggttaccatagcaatagcgccagtgtaatgtatttggcaacgagtttatagcttactgtaagagcaagcattaggcgaatcctgcctgtcgaagtctccggatgttgctgttccgtctgaacatctgatgctcttggtcagcctctgctgcatttcttgctggcaacaaagaaaacctaaaaaaaaaatgagaaaacttctacaaagctct

SEQ ID NO: 695 - protein, 544 aa, Zea mays subsp. mays
  misc_feature (1)..(544): Ceres Seq. ID no. 13574399
DRRRMKMKALACCRRRPQDLSIDMDQEPDRVMTYNGLETCIINCSAYDDDSGISATTCGDGCVTADSLDDEVSSCFSKDASGSSFSSHCLSKQEEHSLDELGTPIAIHLLPFKAKKPITYTLSASDIENMKKKFAKLLLGYDTSGGARGVCAALALSNGIINLSATVFGELWKLEPLCEDKKIRWRKEMDWLMSPTTYIVELVPRKQSGADGCTFEIMTPKARSDVHVNLPALQKLDTMLIEVMDSMIDTEFWYEESGSRADGPVKITGPRKSKKWWLPSPRVPEQGLSRFQRKRLVFQAKLVHQILKAAKSINEQVLFHMPIPAAVMDALPKSGRASLGEDLYQAITTEYIPIEEIFVSLSLKTEHSVLETMNQLEGAMFAWNQRILEERSKRSPGRHSWSFMKDSSSELDKMSACIERVDTLVQLLKARYPNLPPTFIDVLKVQYNVDVGNAIVEAYSRVLVGVAFSILSRVAEILLEDDLVKRPNTPMASLKFDLSSDVYLAGITETPPGHVRRSLMDQISMVDGRFNAAVKKKGAKQLRW

SEQ ID NO: 696 - protein, 540 aa, Zea mays subsp. mays
  misc_feature (1)..(540): Ceres Seq. ID no. 13574400
MKMKALACCRRRPQDLSIDMDQEPDRVMTYNGLETCIINCSAYDDDSGISATTCGDGCVTADSLDDEVSSCFSKDASGSSFSSHCLSKQEEHSLDELGTPIAIHLLPFKAKKPITYTLSASDIENMKKKFAKLLLGYDTSGGARGVCAALALSNGIINLSATVFGELWKLEPLCEDKKIRWRKEMDWLMSPTTYIVELVPRKQSGADGCTFEIMTPKARSDVHVNLPALQKLDTMLIEVMDSMIDTEFWYEESGSRADGPVKITGPRKSKKWWLPSPRVPEQGLSRFQRKRLVFQAKLVHQILKAAKSINEQVLFHMPIPAAVMDALPKSGRASLGEDLYQAITTEYIPIEEIFVSLSLKTEHSVLETMNQLEGAMFAWNQRILEERSKRSPGRHSWSFMKDSSSELDKMSACIERVDTLVQLLKARYPNLPPTFIDVLKVQYNVDVGNAIVEAYSRVLVGVAFSILSRVAEILLEDDLVKRPNTPMASLKFDLSSDVYLAGITETPPGHVRRSLMDQISMVDGRFNAAVKKKGAKQLRW

SEQ ID NO: 697 - protein, 538 aa, Zea mays subsp. mays
  misc_feature (1)..(538): Ceres Seq. ID no. 13574401
MKALACCRRRPQDLSIDMDQEPDRVMTYNGLETCIINCSAYDDDSGISATTCGDGCVTADSLDDEVSSCFSKDASGSSFSSHCLSKQEEHSLDELGTPIAIHLLPFKAKKPITYTLSASDIENMKKKFAKLLLGYDTSGGARGVCAALALSNGIINLSATVFGELWKLEPLCEDKKIRWRKEMDWLMSPTTYIVELVPRKQSGADGCTFEIMTPKARSDVHVNLPALQKLDTMLIEVMDSMIDTEFWYEESGSRADGPVKITGPRKSKKWWLPSPRVPEQGLSRFQRKRLVFQAKLVHQILKAAKSINEQVLFHMPIPAAVMDALPKSGRASLGEDLYQAITTEYIPIEEIFVSLSLKTEHSVLETMNQLEGAMFAWNQRILEERSKRSPGRHSWSFMKDSSSELDKMSACIERVDTLVQLLKARYPNLPPTFIDVLKVQYNVDVGNAIVEAYSRVLVGVAFSILSRVAEILLEDDLVKRPNTPMASLKFDLSSDVYLAGITETPPGHVRRSLMDQISMVDGRFNAAVKKKGAKQLRW

SEQ ID NO: 698 - DNA, 1786 bp, Zea mays subsp. mays
  misc_feature (1)..(1786): Ceres Seq. ID no. 13574418
gcgttcggtggtgactccgggctccgggcgccctgcgcccctggatttcgaaccgagaaagaaagctgctgcccaccgtttcccaagtcccatcgccgcccaagaaccggagccacgccgcagatccgccaaaatcacacctcctagcccgtcctccgtcccaatctcttctcgggccagggaggcggcgggacttggtgcctgcatccgagccctagacatggatcaacctgaggaaaaccctgaattcccaagctgtgatgcctactttgaagctatccagtccaagaagaagttgccactgactttgcaagaatcactaactgctgcctttgctcagattccagtctcatccttccctgaggttccagctggtcgagtaattgaaattcctggtgatacttctgttattgatgctgtaaggactctctctgaacagaacataagggcagcaccagtactgaatccagaacctggggctcctactgattggcaggggaggtaccttggtgtcatcgattactcggcaatcatcctttgggtactagaaaatgctgagcttgctgctgttgcactctcggctgcatcggcaactgctgctggagttggcatgggtgctgttggtgctgttggggtggcagctttgggaacaactggcccagctgctgtagctggcttaactgcagctgcaattggggcttctgttgctggtggattaactgctgaaaagggtgtggcgaaggatgggctaactgctgcagatcatttaggggaggatttctacaaagttttacttcagcaggaacctttcagatcaacaacagttcgatcgattgttgagtcgtaccgctggtctccttttgtccccattacactggacacttccatgctgactgtacttctgttgctctctaagtacagattgcgaaatgtccctgtgattgagcctgaaaagcctatcatcaggaatttcattactcagactggtgttgtcaaagggctgcagcaatgtaaaggaagggactggtttgactacatttctgcacttcctctttcagacttaggacttccatttatgtccattgatgaggttatcaccgtcaacagtgatgatcttatcttagaagctttcaagtgcatgaaggataacaagattggtggtgtcccagtagtagaaggccccaaaagaaaacttgttggcagtgttagcataagggacatccgctttctgttgcttagacccaacttattttcaaatttcaggcagttgacagtcattgaattcatgaagactctaggctccactcttcctgattcagagagcaattgcctggtgaagccaccacccacttgcactcctgacgcttcccttggtagtgttattgacagcattgcatcaagaataacacacaggatatatgtagtggatgatgaccttgaggttgttggtgttgtgactctgcgtgatgtgatctcatgctttattcatgagccacccggttattgcgacaactatttggcttcagcgatggagaagcttgaggggaaaggagtcagatcagtggagaaaatttgagcttttctgtagcgtgaatgttgataataacaggtcagtatgtgaggaaggtttatttggttggaacggtgcattcgtgtcgtgttaatccagcaaatcctgtgtaggttaagtaacaaggcttctgtgctgttaaaaatattttactatgtcatttctttggacggttttctgaacaaatgtgtggtaaccattaggccttgttcggtt

SEQ ID NO: 699 - protein, 524 aa, Zea mays subsp. mays
  misc_feature (1)..(524): Ceres Seq. ID no. 15222589
RSVVTPGSGRPAPLDFEPRKKAAAHRFPSPIAAQEPEPRRRSAKITPPSPSSVPISSRAREAAGLGACIRALDMDQPEENPEFPSCDAYFEAIQSKKKLPLTLQESLTAAFAQIPVSSFPEVPAGRVIEIPGDTSVIDAVRTLSEQNIRAAPVLNPEPGAPTDWQGRYLGVIDYSAIILWVLENAELAAVALSAASATAAGVGMGAVGAVGVAALGTTGPAAVAGLTAAAIGASVAGGLTAEKGVAKDGLTAADHLGEDFYKVLLQQEPFRSTTVRSIVESYRWSPFVPITLDTSMLTVLLLLSKYRLRNVPVIEPEKPIIRNFITQTGVVKGLQQCKGRDWFDYISALPLSDLGLPFMSIDEVITVNSDDLILEAFKCMKDNKIGGVPVVEGPKRKLVGSVSIRDIRFLLLRPNLFSNFRQLTVIEFMKTLGSTLPDSESNCLVKPPPTCTPDASLGSVIDSIASRITHRIYVVDDDLEVVGVVTLRDVISCFIHEPPGYCDNYLASAMEKLEGKGVRSVEKI

SEQ ID NO: 700 - protein, 451 aa, Zea mays subsp. mays
  misc_feature (1)..(451): Ceres Seq. ID no. 15222590
MDQPEENPEFPSCDAYFEAIQSKKKLPLTLQESLTAAFAQIPVSSFPEVPAGRVIEIPGDTSVIDAVRTLSEQNIRAAPVLNPEPGAPTDWQGRYLGVIDYSAIILWVLENAELAAVALSAASATAAGVGMGAVGAVGVAALGTTGPAAVAGLTAAAIGASVAGGLTAEKGVAKDGLTAADHLGEDFYKVLLQQEPFRSTTVRSIVESYRWSPFVPITLDTSMLTVLLLLSKYRLRNVPVIEPEKPIIRNFITQTGVVKGLQQCKGRDWFDYISALPLSDLGLPFMSIDEVITVNSDDLILEAFKCMKDNKIGGVPVVEGPKRKLVGSVSIRDIRFLLLRPNLFSNFRQLTVIEFMKTLGSTLPDSESNCLVKPPPTCTPDASLGSVIDSIASRITHRIYVVDDDLEVVGVVTLRDVISCFIHEPPGYCDNYLASAMEKLEGKGVRSVEKI

SEQ ID NO: 701 - protein, 321 aa, Zea mays subsp. mays
  misc_feature (1)..(321): Ceres Seq. ID no. 15222591
MGAVGAVGVAALGTTGPAAVAGLTAAAIGASVAGGLTAEKGVAKDGLTAADHLGEDFYKVLLQQEPFRSTTVRSIVESYRWSPFVPITLDTSMLTVLLLLSKYRLRNVPVIEPEKPIIRNFITQTGVVKGLQQCKGRDWFDYISALPLSDLGLPFMSIDEVITVNSDDLILEAFKCMKDNKIGGVPVVEGPKRKLVGSVSIRDIRFLLLRPNLFSNFRQLTVIEFMKTLGSTLPDSESNCLVKPPPTCTPDASLGSVIDSIASRITHRIYVVDDDLEVVGVVTLRDVISCFIHEPPGYCDNYLASAMEKLEGKGVRSVEKI

SEQ ID NO: 702 - DNA, 2625 bp, Zea mays subsp. mays
  misc_feature (1)..(2625): Ceres Seq. ID no. 13586013
gcagcgaagcaggcctccttcttcacaagcgcttctgctaacaggcatcgtcgcatctctgtataggtatttctgaaaccagccgtcgtacgtccatcccaccgggagcaccggcgacgatgccgccgcgaacggtgtccgatgggggagacgacaacggcaccgacgttgctagccgaacgtcgtcgcaccgccgcacggagcacgggcatgggtacaaagtcggcgtcccaccggagaagaacctcctcgccgagatctctgacgcggtgaaggagacgttcttcgccgacgacccgctgcggcagtacaaggaccagcccaggtccaagaagatctggctcggcctgcagcacatcttcccggtgctcgactggagcaggcattactccctcggcaagttcaagggtgacttcatcgctgggctcaccattgccagcctctgcataccccaggacatcgggtattctaagcttgctaacttgccagcagaggtgggactatacagtagcttcgtgccgcctctgatatacgcagtgatgggcagctccagggacatagccatcggcccagtggccgtggtgtcgctgctgctcggtactctccttcagaatgagatcgaccccaagacacacccgctcgagtacaggcgcctagccttcacagcaacctttttcgcaggggtcactcaggcagccctcggattcttcaggctagggtttatcatagagttcttgtctcatgctgccattgtcggattcatggccggcgctgccatcaccattgcgcttcagcagctgaaaggattccttggaattgcaaacttcaccaagaaatccgatattgtatctgttatgaaatcagtttggggaaatgttcaccatgggtggaattggcagacaatactgataggagcgaccttcctggcattccttctggttgccaagtacattgggaaaaggaataaaaagctcttctgggtgtccgcaatcgcacctctcacttcggtgatcatatccacattttttgtgtacatcactcgtgcagataagcatggcgttgcaattgtcaagaacataaggaaaggcatcaacccaccttcagctagtctaatatacttcaccggcccatacttggcgacaggattcaaaattgggatagtagctggaatgataggcctaacggaagcgattgcaattggaagaacatttgcagccctcaaggattaccggatagatgggaacaaagaaatgatggctctagggaccatgaacattgttggttcactgacttcttgctacgtagccacaggttctttctcgcggtcagcagttaattacatggctggctgcaaaacagcagtgtcaaacgttgttatgtcaattgtcgtaatgcttactttgctactgatcaccccattgttcaagtacactccaaatgccatcctttcctcgatcatcatatcagcagtgcttggtttaattgactatgaatcggcttaccttatctggaaagttgacaaactggactttctagcatgcatgggagcattttttggagtcatattttcatcggtggagtatggcttgctcattgcggttgcaatatctcttgctaaaattcttctccaagtaacacggccaagaacagttttacttggaaaccttccacaaacaactatatacaggaatgtagaacagtatcctgatgctaccaaggttccaggggtgctgattgttagagtggactcagctatatacttcacaaactctaactatgttaaagagagaatcctgaggtggctaagagatgaggaggagcaacaacaggaccagaagttaacaaaaactgagtttctaattgttgacctgtctcctgtaattgatatcgacacaagtggaatccatgctttggaggagttggcgaaagctcttgaaaaacgcaaaattcagctggttcttaccaatcccgggccggcggtgatccagaagctccgctcagcgaaattcacggacatgattggtgaagacaacatattcctcacggtcggcgacgctgtgaagaaatttgctcctaagatggtcgataatgtctgatggagtttctgggtcatgacagtacgagcgagaagtctatctattttgtggcaaagttcagtggcaattatggatttatagagcagaaacaaaacagaacagaacgggagtaaataacatggttcgcggaatggtaaataaagaagatgctccggagttggagtgcatcacgtttgcgaggtgtggttggatagaaaacagatggtggcctagttgggcgtctatgtcagtccttgtggttgtggagtctgttccgcgttggcaagcactcagtgatggagatcaaatgcttcatggatcagcagatatgggtgcctgatgattaacatatcatcattgatcgtgaaagaagagttacctcgttggggtttcaggctttgtgtatatcttacagtacttagcccctttccttgtagtttatgtttttatgacgagcttttacatttggcttatatatgtatattctgtaatgttgatgcattgttaactgttaagtgttcctgaccaaaaaaaagggatgcaaaaacgt

SEQ ID NO: 703 - protein, 658 aa, Zea mays subsp. mays
  misc_feature (1)..(658): Ceres Seq. ID no. 13586014
MPPRTVSDGGDDNGTDVASRTSSHRRTEHGHGYKVGVPPEKNLLAEISDAVKETFFADDPLRQYKDQPRSKKIWLGLQHIFPVLDWSRHYSLGKFKGDFIAGLTIASLCIPQDIGYSKLANLPAEVGLYSSFVPPLIYAVMGSSRDIAIGPVAVVSLLLGTLLQNEIDPKTHPLEYRRLAFTATFFAGVTQAALGFFRLGFIIEFLSHAAIVGFMAGAAITIALQQLKGFLGIANFTKKSDIVSVMKSVWGNVHHGWNWQTILIGATFLAFLLVAKYIGKRNKKLFWVSAIAPLTSVIISTFFVYITRADKHGVAIVKNIRKGINPPSASLIYFTGPYLATGFKIGIVAGMIGLTEAIAIGRTFAALKDYRIDGNKEMMALGTMNIVGSLTSCYVATGSFSRSAVNYMAGCKTAVSNVVMSIVVMLTLLLITPLFKYTPNAILSSIIISAVLGLIDYESAYLIWKVDKLDFLACMGAFFGVIFSSVEYGLLIAVAISLAKILLQVTRPRTVLLGNLPQTTIYRNVEQYPDATKVPGVLIVRVDSAIYFTNSNYVKERILRWLRDEEEQQQDQKLTKTEFLIVDLSPVIDIDTSGIHALEELAKALEKRKIQLVLTNPGPAVIQKLRSAKFTDMIGEDNIFLTVGDAVKKFAPKMVDNV

SEQ ID NO: 704 - protein, 518 aa, Zea mays subsp. mays
  misc_feature (1)..(518): Ceres Seq. ID no. 13586015
MGSSRDIAIGPVAVVSLLLGTLLQNEIDPKTHPLEYRRLAFTATFFAGVTQAALGFFRLGFIIEFLSHAAIVGFMAGAAITIALQQLKGFLGIANFTKKSDIVSVMKSVWGNVHHGWNWQTILIGATFLAFLLVAKYIGKRNKKLFWVSAIAPLTSVIISTFFVYITRADKHGVAIVKNIRKGINPPSASLIYFTGPYLATGFKIGIVAGMIGLTEAIAIGRTFAALKDYRIDGNKEMMALGTMNIVGSLTSCYVATGSFSRSAVNYMAGCKTAVSNVVMSIVVMLTLLLITPLFKYTPNAILSSIIISAVLGLIDYESAYLIWKVDKLDFLACMGAFFGVIFSSVEYGLLIAVAISLAKILLQVTRPRTVLLGNLPQTTIYRNVEQYPDATKVPGVLIVRVDSAIYFTNSNYVKERILRWLRDEEEQQQDQKLTKTEFLIVDLSPVIDIDTSGIHALEELAKALEKRKIQLVLTNPGPAVIQKLRSAKFTDMIGEDNIFLTVGDAVKKFAPKMVDNV

SEQ ID NO: 705 - protein, 444 aa, Zea mays subsp. mays
  misc_feature (1)..(444): Ceres Seq. ID no. 13586016
MAGAAITIALQQLKGFLGIANFTKKSDIVSVMKSVWGNVHHGWNWQTILIGATFLAFLLVAKYIGKRNKKLFWVSAIAPLTSVIISTFFVYITRADKHGVAIVKNIRKGINPPSASLIYFTGPYLATGFKIGIVAGMIGLTEAIAIGRTFAALKDYRIDGNKEMMALGTMNIVGSLTSCYVATGSFSRSAVNYMAGCKTAVSNVVMSIVVMLTLLLITPLFKYTPNAILSSIIISAVLGLIDYESAYLIWKVDKLDFLACMGAFFGVIFSSVEYGLLIAVAISLAKILLQVTRPRTVLLGNLPQTTIYRNVEQYPDATKVPGVLIVRVDSAIYFTNSNYVKERILRWLRDEEEQQQDQKLTKTEFLIVDLSPVIDIDTSGIHALEELAKALEKRKIQLVLTNPGPAVIQKLRSAKFTDMIGEDNIFLTVGDAVKKFAPKMVDNV

SEQ ID NO: 706 - DNA, 807 bp, Zea mays subsp. mays
  misc_feature (1)..(807): Ceres Seq. ID no. 13586102
ggggttggcggttttgaaaaacctttttttttttttttttttttttttttttttttttttttttttttttttttttttttttttttttttttttttttttttttttttcatctagtatttaattttatataatgattaattagttctaatagcaaataattaatacaaatcatattacaccttttgcatggtattctcattcttaattttctgcaacatagttctaatagcaaacttccaaaacaggcacacagataaaagtactagtgcttcacatcatcacctcttgtgtggaactgaaggggaacatgtgatgctggcgacgaaatctcggaactagcgcagcaggaatcgaaccgcagccacggcatcacccttgtgctcacggagcgttctctccgcgatcttcttgtccagctcaagctcactagcgataatttcgacatcggcagggttgatcttgacagcagccaattctttctccctcagcctcatcgcgttccagtcagcctccttggatgaagcaagtgccgccatggcggattggacacgggatgaatcgagctgccggtcctcgacatgatcagtgagcttgtcgagcgccttgctctgctgctgaaggtccttggagtccaccgcgccctcgccctcggcggcaccggcccccgcggctgcagcggacgcagccatcgcagccttctcgtcgcccgccgcacccatcgccgtctaaaaccctaacccggatctacttttctccgatgagacgagtgtgtgcactgtgccacaggcggctgacgagatggccgt

SEQ ID NO: 707 - protein, 52 aa, Zea mays subsp. mays
  misc_feature (1)..(52): Ceres Seq. ID no. 13586103
MISELVERLALLLKVLGVHRALALGGTGPRGCSGRSHRSLLVARRTHRRLKP

SEQ ID NO: 708 - protein, 50 aa, Zea mays subsp. mays
  misc_feature (1)..(50): Ceres Seq. ID no. 13586104
MVFSFLIFCNIVLIANFQNRHTDKSTSASHHHLLCGTEGEHVMLATKSRN

SEQ ID NO: 709 - protein, 43 aa, Zea mays subsp. mays
  misc_feature (1)..(43): Ceres Seq. ID no. 13586105
GVGGFEKPFFFFFFFFFFFFFFFFFFFFFFFFFFFFHLVFNFI

SEQ ID NO: 710 - DNA, 942 bp, Zea mays subsp. mays
  misc_feature (1)..(942): Ceres Seq. ID no. 13586114
tagaacatcctaatcgaaaacgaagattcagaataccaacaagctgatctagttaagatggatatccttcttaatggtcaacctgttgatgctatggcaactatagtgcataaccagaaggctcagcgggttggaaaggatttagtggagaagctcaagaaatttatagaaaggcaaatgtttgagatcaccatacaagcagcaattggttcaaaagttattgcaagggaaaccctgtccgcaatgaggaagaatgtcctggccaagtgctatggcggtgatattactcggaagaagaagttgctagagaagcaaaaggaaggcaagaagcgcatgaaacgtgtgggatctgtcgacattcctcaggaagccttccatgagctactgaaggtctccaatttaaaatagatggtgatccactgcaattttagtttctgtagctgtccaaattttataagtagctgtgtggtgatgagtagcagcaaccttttctagtcatcttctgacagatcttgacagaatgatcgattccattgagtacataatggcctctcctgcgccttgtcagacgagccaacttgtgctggaagttgctcctcctgtagtcctgtcatccatcctgtggtgattgatatacacacaaggcttctcagctggccgcagacggatttcagtagagccaccatctttgtatttgttgattgattgatggagaaccatcctttgagcacttgctaaacccagttttctctgctgacctgatagtctgccttgtcacgttacactctattttttttgttagataatgcttttgagcaaaaataataggtcatacacattaattggtcactgaaacaatgtggtacatgtaataagaggagctgcattgtataaagacatagtagtatcatgtttttggagtttcgggctatctccttttcg

SEQ ID NO: 711 - protein, 116 aa, Zea mays subsp. mays
  misc_feature (1)..(116): Ceres Seq. ID no. 13586115
MDILLNGQPVDAMATIVHNQKAQRVGKDLVEKLKKFIERQMFEITIQAAIGSKVIARETLSAMRKNVLAKCYGGDITRKKKLLEKQKEGKKRMKRVGSVDIPQEAFHELLKVSNLK

SEQ ID NO: 712 - protein, 104 aa, Zea mays subsp. mays
  misc_feature (1)..(104): Ceres Seq. ID no. 13586116
MATIVHNQKAQRVGKDLVEKLKKFIERQMFEITIQAAIGSKVIARETLSAMRKNVLAKCYGGDITRKKKLLEKQKEGKKRMKRVGSVDIPQEAFHELLKVSNLK

SEQ ID NO: 713 - protein, 76 aa, Zea mays subsp. mays
  misc_feature (1)..(76): Ceres Seq. ID no. 13586117
MFEITIQAAIGSKVIARETLSAMRKNVLAKCYGGDITRKKKLLEKQKEGKKRMKRVGSVDIPQEAFHELLKVSNLK

SEQ ID NO: 714 - DNA, 1571 bp, Zea mays subsp. mays
  misc_feature (1)..(1571): Ceres Seq. ID no. 13586135
attaatttagtcagcatcacatcgcaatcacaagactcctatacccaaacccacgccccccgcccccctattattctatatatataatacacacactagtgtggagtagtacttcaattggcgttggccgaagaagaggagaagcgaagcaagcaggcttcgagaacaagactgcagggggagggggaggaccaagcgaaaggggaactagagcaagatgggcggcgcactgctgcttgcgctcctcctcgtctctgctgctgccgcccctcaggtacttggagttggcaatggagacaatcacatgagaatcatccaggaggacatcatcgagacagtcaacaaccatcccagtgctgggtggacagcctcacgtaatccttacttttcaaactataccattgcgcaatttaagcacatacttggagtgaaaccagcaccacagaatgcactaagcaatgttcctgtcaaaacttattcaagatcactggaacttccaaaagagtttgacgctagatctgcatggtcccgttgcagcacaattgggaacatacttgatcaaggtcactgtggctcttgttgggcttttggtgctgtggagtgcctccaggaccgtttttgcattcacctcaacatgagcattttactttcagtcaatgacctactggcatgctgcggttttatgtgcggcgatgggtgtgatggaggctatcctatagaggcatggcgctactttgttcaaaatggtgttgttacggatgagtgtgatccatacttcgacccggtcggttgcaagcatcctggatgcgaacctgcttatcctacaccaaagtgtgaaaagaaatgcaaggagcagaaccaagtttggcaggaaaagaagcatttcagcattgatgcgtacagaataaattcagatccacatgacataatggcagaggtctacaaaaatggtcctgtagaagttgctttcacagtttacgaggatttcgcacactacaaatctggagtgtacaagcacatcaccggtggcattatgggtggccatgccgtcaagttgattggatggggaaccagtgatgctggagaagattactggcttctggcaaatcagtggaatagaggctggggcgatgatggatacttcaagatcataaggggcaaaaatgaatgtggcatcgaggagggcgttgttgctggaatgccatccacaaagaatatggttccaaacttcggcggtgccgttggaagagctatagtttaatggttacgtttgcatggcctcaaatgctgttggaattagctaaagtaattttaaaatgcaattgttaaagggccacgatggtgtatgtattttgtacactagctcatttcaaaggtcgttatgttgctggtgccacatcactttggtcaagtggaataatattaataagaactagaatttcgattcgaaaaaaaaaaaaaaaaaaaaaaaaaaaaaaaaaaaaaaaaaaaaaaaaaaaaaaaaaaaaaaaaaaaaaaaaaaaaaaaaaaaaaaaaaaaaaaaaaaaaaaaaaaaaaaaaaattttttttt

SEQ ID NO: 715 - protein, 347 aa, Zea mays subsp. mays
  misc_feature (1)..(347): Ceres Seq. ID no. 15220786
MGGALLLALLLVSAAAAPQVLGVGNGDNHMRIIQEDIIETVNNHPSAGWTASRNPYFSNYTIAQFKHILGVKPAPQNALSNVPVKTYSRSLELPKEFDARSAWSRCSTIGNILDQGHCGSCWAFGAVECLQDRFCIHLNMSILLSVNDLLACCGFMCGDGCDGGYPIEAWRYFVQNGVVTDECDPYFDPVGCKHPGCEPAYPTPKCEKKCKEQNQVWQEKKHFSIDAYRINSDPHDIMAEVYKNGPVEVAFTVYEDFAHYKSGVYKHITGGIMGGHAVKLIGWGTSDAGEDYWLLANQWNRGWGDDGYFKIIRGKNECGIEEGVVAGMPSTKNMVPNFGGAVGRAIV

SEQ ID NO: 716 - protein, 318 aa, Zea mays subsp. mays
  misc_feature (1)..(318): Ceres Seq. ID no. 15220787
MRIIQEDIIETVNNHPSAGWTASRNPYFSNYTIAQFKHILGVKPAPQNALSNVPVKTYSRSLELPKEFDARSAWSRCSTIGNILDQGHCGSCWAFGAVECLQDRFCIHLNMSILLSVNDLLACCGFMCGDGCDGGYPIEAWRYFVQNGVVTDECDPYFDPVGCKHPGCEPAYPTPKCEKKCKEQNQVWQEKKHFSIDAYRINSDPHDIMAEVYKNGPVEVAFTVYEDFAHYKSGVYKHITGGIMGGHAVKLIGWGTSDAGEDYWLLANQWNRGWGDDGYFKIIRGKNECGIEEGVVAGMPSTKNMVPNFGGAVGRAIV

SEQ ID NO: 717 - protein, 208 aa, Zea mays subsp. mays
  misc_feature (1)..(208): Ceres Seq. ID no. 15220788
MSILLSVNDLLACCGFMCGDGCDGGYPIEAWRYFVQNGVVTDECDPYFDPVGCKHPGCEPAYPTPKCEKKCKEQNQVWQEKKHFSIDAYRINSDPHDIMAEVYKNGPVEVAFTVYEDFAHYKSGVYKHITGGIMGGHAVKLIGWGTSDAGEDYWLLANQWNRGWGDDGYFKIIRGKNECGIEEGVVAGMPSTKNMVPNFGGAVGRAIV

SEQ ID NO: 718 - DNA, 478 bp, Zea mays subsp. mays
  misc_feature (1)..(478): Ceres Seq. ID no. 13586701
gttcctgcggatgaggagcaaacagcctgtgcattatgtcaagagccatttgaagatttctacagtgatgagactgatgagtggatgtatagaggtgcggtctacatgaatgcaccagacggtaatattgatggtctagaaaggtcacggttgggacctattgtccatgctaaatgtcgatctgggcccagcaatacttagggtgggcatggctggtgagtatctatctatttccttgtgctataacaaacatctatggactttaaggtggacataatgttttttagagctagtttgggaacctcattttcccaagggattttcattttcccaagggaaattgtatcttgaggttaaccccactgtaaatagaggatagtctccttgctagtatttggctgtatgcaacatgtttttggctacgattatatatgttatctgactaaataaaaatgctggatgtgagttgttgttcatt

SEQ ID NO: 719 - protein, 66 aa, Zea mays subsp. mays
  misc_feature (1)..(66): Ceres Seq. ID no. 13586702
VPADEEQTACALCQEPFEDFYSDETDEWMYRGAVYMNAPDGNIDGLERSRLGPIVHAKCRSGPSNT

SEQ ID NO: 720 - protein, 38 aa, Zea mays subsp. mays
  misc_feature (1)..(38): Ceres Seq. ID no. 13586703
MYRGAVYMNAPDGNIDGLERSRLGPIVHAKCRSGPSNT

SEQ ID NO: 721 - protein, 36 aa, Zea mays subsp. mays
  misc_feature (1)..(36): Ceres Seq. ID no. 13586704
MLNVDLGPAILRVGMAGEYLSISLCYNKHLWTLRWT

SEQ ID NO: 722 - DNA, 1507 bp, Zea mays subsp. mays
  misc_feature (1)..(1507): Ceres Seq. ID no. 13586716
tcagctacgtaggccccccccccacctgctctgctcctcagccccagcccaggccttcgctctcgctgccctgagccctccgcgttccccgcccgccacgcgatgccggcgtgggccgaagcggcgctcgtgctcgcctcaccatcccccgccaccgcctcctcgaccacgtcatcatgtggcgccaggccgcgcgccgccgtggggtccgtcaggctcttctgcaagggattcccttgtagcattcgttccaaagctggattccagattcataattaccgtacaaggatgtttaagattaaagcaaaagcagaatctggtgatggctacacacggcttgctccacttagatttgaatctccaagtggccagcttctgattcaaatactacaatcacaccctcatcttatccctgcaacagttgatcagcaacttggaaatcttcaatcagagaaatctgcccaaagtgaagaagcctcaaaagttccccaggacctcctctacaagagaattgcagaagtcaaagagaaggaaaggcaaaatgccttagaagagattatctactgttgggttacatataggttcatggaaaatgacatatatatgacacctgcattatcaccagggggtggccctgtacgtgacatatccgcattgcctaatcaagaagacaaattgcgaaacatacactccgcagacgcctttgagatgatacaaaaccatctcaatcttatcatgggagaaaagatagcatcaccgcccgatactgttgttgagatcagcaacttgaatcttggaaagctgtatgcagcatccatcatgtatggttactttctgaagagagtggatgagcgattccaacttgagaaaactatgaagactctcccaccaaagcccaaccagcagatagtatttgaaaacctacagcctaatccattctgggatatggagtccttagtacagattacacctgatggggaggagataagtttggacgatgaaaaatcaaatccaaacaagttgaggtcttatgtctcacaactggatgctgacacattgcaaagatatgctactatcagatcgaaggaagccgtctcactgatcgagaagcaaactcaggcgttgtttggacggccagacatcaaagtattggacgatggttcggtcaatgcaaaggatggcagaatgataacaatcacatttacagagctcaatcatctggtcttggaggcagttgctttcggttccttcctttgggaagctgagagttacgtagaatcaaaataccattttgtcaacagttgaatgtgccttttcttatttgaattttggaaatggtttgtgtacatgtgatagggtaggatccatatctgatctattttttcagtgtattcatggttcttgctcgctatcagtaacagccaaagcatcaccacccatgaaccatgcctgtaacaggtttgagatttttcatcaaaggaagcgggcctgatccatagtgtaatct

SEQ ID NO: 723 - protein, 400 aa, Zea mays subsp. mays
  misc_feature (1)..(400): Ceres Seq. ID no. 13586717
MPAWAEAALVLASPSPATASSTTSSCGARPRAAVGSVRLFCKGFPCSIRSKAGFQIHNYRTRMFKIKAKAESGDGYTRLAPLRFESPSGQLLIQILQSHPHLIPATVDQQLGNLQSEKSAQSEEASKVPQDLLYKRIAEVKEKERQNALEEIIYCWVTYRFMENDIYMTPALSPGGGPVRDISALPNQEDKLRNIHSADAFEMIQNHLNLIMGEKIASPPDTVVEISNLNLGKLYAASIMYGYFLKRVDERFQLEKTMKTLPPKPNQQIVFENLQPNPFWDMESLVQITPDGEEISLDDEKSNPNKLRSYVSQLDADTLQRYATIRSKEAVSLIEKQTQALFGRPDIKVLDDGSVNAKDGRMITITFTELNHLVLEAVAFGSFLWEAESYVESKYHFVNS

SEQ ID NO: 724 - protein, 338 aa, Zea mays subsp. mays
  misc_feature (1)..(338): Ceres Seq. ID no. 13586718
MFKIKAKAESGDGYTRLAPLRFESPSGQLLIQILQSHPHLIPATVDQQLGNLQSEKSAQSEEASKVPQDLLYKRIAEVKEKERQNALEEIIYCWVTYRFMENDIYMTPALSPGGGPVRDISALPNQEDKLRNIHSADAFEMIQNHLNLIMGEKIASPPDTVVEISNLNLGKLYAASIMYGYFLKRVDERFQLEKTMKTLPPKPNQQIVFENLQPNPFWDMESLVQITPDGEEISLDDEKSNPNKLRSYVSQLDADTLQRYATIRSKEAVSLIEKQTQALFGRPDIKVLDDGSVNAKDGRMITITFTELNHLVLEAVAFGSFLWEAESYVESKYHFVNS

SEQ ID NO: 725 - protein, 239 aa, Zea mays subsp. mays
  misc_feature (1)..(239): Ceres Seq. ID no. 13586719
MENDIYMTPALSPGGGPVRDISALPNQEDKLRNIHSADAFEMIQNHLNLIMGEKIASPPDTVVEISNLNLGKLYAASIMYGYFLKRVDERFQLEKTMKTLPPKPNQQIVFENLQPNPFWDMESLVQITPDGEEISLDDEKSNPNKLRSYVSQLDADTLQRYATIRSKEAVSLIEKQTQALFGRPDIKVLDDGSVNAKDGRMITITFTELNHLVLEAVAFGSFLWEAESYVESKYHFVNS

SEQ ID NO: 726 - DNA, 873 bp, Zea mays subsp. mays
  misc_feature (1)..(873): Ceres Seq. ID no. 13586729
cagctacgtaggccccccccccggtgtctatggaaagcctgcaaatgaagattttgaggcagataatgcccactggaaacgggttgtaagtaaatcgtatgtgaatggcatgggaattgactggtccaaagtgagaaatgtcatggacatgagagctgtctatggaggttttgctgcagctctgagggaccaaaaggtctgggtcatgaatatcgtgccgatcgattcaccagacacgctgcccatcatctacgagcgcggtttgtttggcatgtaccatgactggtgcgagtctttcagcacttacccaagaacgtatgaccttctgcacgcggaccatctgttctcaaagctcagaaagagatgcaaactggctgcagttttcgccgaggtcgaccgtgtactgaggccacagggcaagctgatcgtgagggacaccgcggacacgataaatgagctggagagcatggccaagtccgtgcagtgggaggtgcggatgacctacaccaagggcagcgagggcctgctctgcgtcgagaagtcgatgtggcggcccaaagaactcgacgctagcacgtgaactgtgttgaggaggaactgctaccacgtaggggtgaaattagaggaattttgtcttctagatatgcgtatggctcttgttggtgctgaaaggaccagaaaatatttggtgtaactgtagaacaatacatctgttttttctgccgtttgttttcgtttttgttttttcacaacgttgctgtaagttagtgctggaaatcacaggtacattcagttctactgggcacgttgttggcttgtcggatagcagtcgaacgatcttgtgctgcatatgttatatttgaactgttgtgc

SEQ ID NO: 727 - protein, 192 aa, Zea mays subsp. mays
  misc_feature (1)..(192): Ceres Seq. ID no. 13586730
SYVGPPPGVYGKPANEDFEADNAHWKRVVSKSYVNGMGIDWSKVRNVMDMRAVYGGFAAALRDQKVWVMNIVPIDSPDTLPIIYERGLFGMYHDWCESFSTYPRTYDLLHADHLFSKLRKRCKLAAVFAEVDRVLRPQGKLIVRDTADTINELESMAKSVQWEVRMTYTKGSEGLLCVEKSMWRPKELDAST

SEQ ID NO: 728 - protein, 156 aa, Zea mays subsp. mays
  misc_feature (1)..(156): Ceres Seq. ID no. 13586731
MGIDWSKVRNVMDMRAVYGGFAAALRDQKVWVMNIVPIDSPDTLPIIYERGLFGMYHDWCESFSTYPRTYDLLHADHLFSKLRKRCKLAAVFAEVDRVLRPQGKLIVRDTADTINELESMAKSVQWEVRMTYTKGSEGLLCVEKSMWRPKELDAST

SEQ ID NO: 729 - protein, 145 aa, Zea mays subsp. mays
  misc_feature (1)..(145): Ceres Seq. ID no. 13586732
MDMRAVYGGFAAALRDQKVWVMNIVPIDSPDTLPIIYERGLFGMYHDWCESFSTYPRTYDLLHADHLFSKLRKRCKLAAVFAEVDRVLRPQGKLIVRDTADTINELESMAKSVQWEVRMTYTKGSEGLLCVEKSMWRPKELDAST

SEQ ID NO: 730 - DNA, 615 bp, Zea mays subsp. mays
  misc_feature (1)..(615): Ceres Seq. ID no. 13586784
cagctacgtaggccccccccccaataatggatttttcgagattgtatgaagtgtcaaatactgtagatgagcatagagatatgcgtctagatatagacagcatgacgtatgaggagcttttagcattagaagagcagattggagatgtcaatactggtctgacaaaaagtcacattgtagataaattgaggactagcctatatgttccaggaatatcgagcatgtctgatcagccatctaaatcttctctagagaatgatgcttgcataatatgccaggaggagtaccaggctagagactgcgttggcacccttgactgcggtcacaggtaccacgcggagtgcgtgaagcagtggctgatggtgaagaacttgtgccccatctgcaagacgacagcattgtctgccaacagaagacaaggacagtgagcgggaatggagaagcctgttggttatttgctttgacaaacgttcagctcaattttgtatataaagaagtggtagacaatggcgctacctgtatttgttgttcactttgttgtgactgggagtactcagcttcctgaaactgtacagccataacatttgttatttttcttcaaatgtagaatgtttt

SEQ ID NO: 731 - protein, 133 aa, Zea mays subsp. mays
  misc_feature (1)..(133): Ceres Seq. ID no. 13586785
MDFSRLYEVSNTVDEHRDMRLDIDSMTYEELLALEEQIGDVNTGLTKSHIVDKLRTSLYVPGISSMSDQPSKSSLENDACIICQEEYQARDCVGTLDCGHRYHAECVKQWLMVKNLCPICKTTALSANRRQGQ

SEQ ID NO: 732 - protein, 115 aa, Zea mays subsp. mays
  misc_feature (1)..(115): Ceres Seq. ID no. 13586786
MRLDIDSMTYEELLALEEQIGDVNTGLTKSHIVDKLRTSLYVPGISSMSDQPSKSSLENDACIICQEEYQARDCVGTLDCGHRYHAECVKQWLMVKNLCPICKTTALSANRRQGQ

SEQ ID NO: 733 - protein, 108 aa, Zea mays subsp. mays
  misc_feature (1)..(108): Ceres Seq. ID no. 13586787
MTYEELLALEEQIGDVNTGLTKSHIVDKLRTSLYVPGISSMSDQPSKSSLENDACIICQEEYQARDCVGTLDCGHRYHAECVKQWLMVKNLCPICKTTALSANRRQGQ

SEQ ID NO: 734 - DNA, 542 bp, Zea mays subsp. mays
  misc_feature (1)..(542): Ceres Seq. ID no. 13586807
atttttatggagatttgtagcatcattcaggcaaatgcaaatcgagatcatatagacatgaacttgtgaaatagctacacctaactatagacaggtttacataattacatgtacttcaagacacaccatactaatatatggtagagccagttctatcgcaagtttttagtcagttggatgctaatggaagctgcatccattagcacagttggtaaagcgtttttagtcagttgggatgctttgggagttgcatccagaaaggttcatatggcttgctgtctaatcacttttttcccttcagatgagcttgtgcctgctgactctacgccgaagctggacctgcaaagcgacaagaagaaaggttcccatacttgctgggcatatggtgcctatccatccctctgaattcactgcacctaacttcccggtaacctcatctgcttccaggaatccaagtgcagcttgacctgaagagcaatggggatggcccgcgcgggaagaaggcgcctgctgccaggtcaagarcaaccgggtcaggtggg

SEQ ID NO: 735 - protein, 75 aa, Zea mays subsp. mays
  misc_feature (1)..(75): Ceres Seq. ID no. 13586808
MLMEAASISTVGKAFLVSWDALGVASRKVHMACCLITFFPSDELVPADSTPKLDLQSDKKKGSHTCWAYGAYPSL

SEQ ID NO: 736 - protein, 73 aa, Zea mays subsp. mays
  misc_feature (1)..(73): Ceres Seq. ID no. 13586809
MEAASISTVGKAFLVSWDALGVASRKVHMACCLITFFPSDELVPADSTPKLDLQSDKKKGSHTCWAYGAYPSL

SEQ ID NO: 737 - protein, 54 aa, Zea mays subsp. mays
  misc_feature (1)..(54): Ceres Seq. ID no. 13586810
MSLCLLTLRRSWTCKATRRKVPILAGHMVPIHPSEFTAPNFPVTSSASRNPSAA

SEQ ID NO: 738 - DNA, 647 bp, Zea mays subsp. mays
  misc_feature (1)..(647): Ceres Seq. ID no. 13586811
atatttttttcctaaaattctgcctccacaatcccgctgttcgcgagccactccctctgacgagtgacgacgaaaccctaggccatggcttggcgcggcgccgcctcccgctccattatcgccgccgtccgtgctcgcgcggcatccccgtcttccaccgccgcctcgcgcctccgctcgacagctccacttcccgccccctcgcgcctccgctcgacagctccacttcccgccccctcgcgccggtccgtccccgccttcgctttcgcgaccgcgaggccgttggcggcgatgtcggggtccccggcggcggccgtggtgaagctcaccgggcacgcggcgacgagcgtgcgggcgtgctgcacttaatgcgcacttttgtccttaaatgcaagggttggattctttggaggttgcatcccttgaaactcgtcgggcttgcgtccttttccatgcattttgcagagtacttagcacctcgtgtgtcggcaaacggacagtatatctgctgtaacttacataaataatcatatgttagcctgctgctactcactgccccacatcgattggaactaagttgatgtttggttcacgttatacaattaaatcatatttgtttaagtctaacattaatcggattccacgct

SEQ ID NO: 739 - protein, 174 aa, Zea mays subsp. mays
  misc_feature (1)..(174): Ceres Seq. ID no. 13586812
IFFLKFCLHNPAVREPLPLTSDDETLGHGLARRRLPLHYRRRPCSRGIPVFHRRLAPPLDSSTSRPLAPPLDSSTSRPLAPVRPRLRFRDREAVGGDVGVPGGGRGEAHRARGDERAGVLHLMRTFVLKCKGWILWRLHPLKLVGLASFSMHFAEYLAPRVSANGQYICCNLHK

SEQ ID NO: 740 - protein, 94 aa, Zea mays subsp. mays
  misc_feature (1)..(94): Ceres Seq. ID no. 13586813
MAWRGAASRSIIAAVRARAASPSSTAASRLRSTAPLPAPSRLRSTAPLPAPSRRSVPAFAFATARPLAAMSGSPAAAVVKLTGHAATSVRACCT

SEQ ID NO: 741 - DNA, 736 bp, Zea mays subsp. mays
  misc_feature (1)..(736): Ceres Seq. ID no. 13586818
atcggcctcctctctctcggtctccgccagatctccccacggaaccctacccgagcatcagccatggcaatcgcggcgcgcgccctgcgccgcctcccgcttcacctctccccctcgatctcccgctctttctgcgcagtttccccggccgccgcctcggcccccgccgccgcgtccgccaaggtcgctgaccgcatcgtgcgcgtcctcgccatccagggcagggcgcaggaggccggcgccgggggaggtgcaggtgccggcgctggcggcggcggcagggcttcctcgtaagcaagtcatccatgcatggattatggatagatgcgcgcgtgcgtgtctatcagtatcagcagccagcagggtcgtcgcggaatgctgtgttcctgtacgtgtgggtgaccgtccttccgtccttcgtctttctccccccgagtgtgtgttacgtatgtcctggtgttcgtcgtgtgtgttcatcgccgctccagttgaattccggtgtctgttcatcgccgctccaggtcgtagatgtgaatatactttgctaggggaataagtgataagtctgtctggaaggtaatgtttgagctttgctagtgtggctgggcactctggtcactggttgtgttgtgcatgcatcagctgtatgatcgtcgtctgttgtggaaaattggtcaatgtattctcttgctgaataatttgtgacatctaattgttatgtatcgtctctttgctc

SEQ ID NO: 742 - protein, 184 aa, Zea mays subsp. mays
  misc_feature (1)..(184): Ceres Seq. ID no. 13586819
SASSLSVSARSPHGTLPEHQPWQSRRAPCAASRFTSPPRSPALSAQFPRPPPRPPPPRPPRSLTASCASSPSRAGRRRPAPGEVQVPALAAAAGLPRKQVIHAWIMDRCARACLSVSAASRVVAECCVPVRVGDRPSVLRLSPPECVLRMSWCSSCVFIAAPVEFRCLFIAAPGRRCEYTLLGE

SEQ ID NO: 743 - protein, 97 aa, Zea mays subsp. mays
  misc_feature (1)..(97): Ceres Seq. ID no. 13586820
IGLLSLGLRQISPRNPTRASAMAIAARALRRLPLHLSPSISRSFCAVSPAAASAPAAASAKVADRIVRVLAIQGRAQEAGAGGGAGAGAGGGGRASS

SEQ ID NO: 744 - DNA, 1226 bp, Zea mays subsp. mays
  misc_feature (1)..(1226): Ceres Seq. ID no. 13586843
agtgcgtgccagtcctccggcccaaaccccccgcacccaacccccagccccggcaaccgatggcggggtccgcggccgacgcggagcaggagcaaaagcgggcagcggcggcggcgtacgactacgagggcgacgcgcgctgggccgagtactggtccaacgtactcgtcccgccgaacctcgcctcccgccccgacgtcgtcgaccacttgaagcgcaagttctaccagcgctacatcgaccatgatctggtcgttgagccaaggtcattcaccagttccactcaggccagcaggccagatgtaaggtcttcgtcttcgtcatccaccgagaacgtcagggagcgtaattcaggatctactgcaaggtcagcgcctccaccaccgccaccaacacatacagacagtgccgtcaaccctttacggttcgacgcacgcactatacatttctccatcaacgcatggatacttgtggttgctggtctgggaatgcttcctattttgccaaaacaccttgccgacagagcttgcaaactttcacttctgggaacaatattgtcatcagggtattctctatacagtacttatgggaaaccaagagcatggaacatgccagcaattcaagcttggttgcagtctatacttgcaacaaaggattttatccatttaatgttctcttctatgctcttcacatcccaattgcacttgaagattgctgcactacctgtgttttgctgggcgcttgaccatgttgccagattcttaaggcgtaattttgcgcgatcctctttctataggagatacctggaagaaccttgtctttgggtagagacaaataacactacactaagcctccttagttcgaatgcggagattgccttgggttttcttctgatcatatcactgttctcgtggcgccgtagcatagttcagacattcatgtactggcaggtgttgaagctgatgtaccatgctcccgtgacatccagctatcaccagagtacctgggcgaaaatcggccggattgtgaacccgtacatccaccgctacgctccgttcctccagacgcccatttctgcgatccaaagatggtggttcaggtagagagacaggccgagctgcaaacatagcacagtcgagtcgccgcgttcttatgtaatgctgtaaccttttcccagaattctggagggccattatcataacaagaaggtttttagctgcagggcc

SEQ ID NO: 745 - protein, 366 aa, Zea mays subsp. mays
  misc_feature (1)..(366): Ceres Seq. ID no. 13586844
CVPVLRPKPPAPNPQPRQPMAGSAADAEQEQKRAAAAAYDYEGDARWAEYWSNVLVPPNLASRPDVVDHLKRKFYQRYIDHDLVVEPRSFTSSTQASRPDVRSSSSSSTENVRERNSGSTARSAPPPPPPTHTDSAVNPLRFDARTIHFSINAWILVVAGLGMLPILPKHLADRACKLSLLGTILSSGYSLYSTYGKPRAWNMPAIQAWLQSILATKDFIHLMFSSMLFTSQLHLKIAALPVFCWALDHVARFLRRNFARSSFYRRYLEEPCLWVETNNTTLSLLSSNAEIALGFLLIISLFSWRRSIVQTFMYWQVLKLMYHAPVTSSYHQSTWAKIGRIVNPYIHRYAPFLQTPISAIQRWWFR

SEQ ID NO: 746 - protein, 347 aa, Zea mays subsp. mays
  misc_feature (1)..(347): Ceres Seq. ID no. 13586845
MAGSAADAEQEQKRAAAAAYDYEGDARWAEYWSNVLVPPNLASRPDVVDHLKRKFYQRYIDHDLVVEPRSFTSSTQASRPDVRSSSSSSTENVRERNSGSTARSAPPPPPPTHTDSAVNPLRFDARTIHFSINAWILVVAGLGMLPILPKHLADRACKLSLLGTILSSGYSLYSTYGKPRAWNMPAIQAWLQSILATKDFIHLMFSSMLFTSQLHLKIAALPVFCWALDHVARFLRRNFARSSFYRRYLEEPCLWVETNNTTLSLLSSNAEIALGFLLIISLFSWRRSIVQTFMYWQVLKLMYHAPVTSSYHQSTWAKIGRIVNPYIHRYAPFLQTPISAIQRWWFR

SEQ ID NO: 747 - protein, 204 aa, Zea mays subsp. mays
  misc_feature (1)..(204): Ceres Seq. ID no. 13586846
MLPILPKHLADRACKLSLLGTILSSGYSLYSTYGKPRAWNMPAIQAWLQSILATKDFIHLMFSSMLFTSQLHLKIAALPVFCWALDHVARFLRRNFARSSFYRRYLEEPCLWVETNNTTLSLLSSNAEIALGFLLIISLFSWRRSIVQTFMYWQVLKLMYHAPVTSSYHQSTWAKIGRIVNPYIHRYAPFLQTPISAIQRWWFR

SEQ ID NO: 748 - DNA, 529 bp, Zea mays subsp. mays
  misc_feature (1)..(529): Ceres Seq. ID no. 13586884
cctttttgttgttgagcggcggggctagccgtttatacctggcaaccactacacgacgagggcaatgaggcgaacggcggcgttgctatcggcccactgcggccgcagcatcccgttggcgctcgccgacgtgctcgtctgcccactctctaagcaacctcttaggtactgcgaggtcaacgggtctttggtcagcgactccgctggggtggcctttccagtacttgatgggattccttctcttgtaccaaaagatggaaagttactcgacgaccaagaagtgaaatcagaacaagagtccagcactagggattcttctggttgaatccttgtctatgcaacatctaattgaagcaatatgttgtagtaaatcgacggtaataaaaccaagtgcttcttgtcggaaatcgtcaccatattgccctagaggatgaggtgcaccgtttctgttgagaaggctaatatggttgtcttgaaagacaacaatgaaattggcaaacatagtttctgctttattttcttttactgg

SEQ ID NO: 749 - protein, 86 aa, Zea mays subsp. mays
  misc_feature (1)..(86): Ceres Seq. ID no. 13586885
MRRTAALLSAHCGRSIPLALADVLVCPLSKQPLRYCEVNGSLVSDSAGVAFPVLDGIPSLVPKDGKLLDDQEVKSEQESSTRDSSG

SEQ ID NO: 750 - DNA, 1094 bp, Zea mays subsp. mays
  misc_feature (1)..(1094): Ceres Seq. ID no. 13586895
ttgaaaaggttgatcctgttgttgcacttcatcgagtacttggcattctaaaaggtatctatggcccaaaaggcgttactgttcctgatccggttcaatcagtttgcacgagatggggcagtgatcctttttgctcaggttcatactcgcacatcagagttgggtcttccggtgctgactatgacattctttccgagagtgtgaatgaccgactcttcttcgctggagaagctacgaaccgagcgtaccctgcaaccatgcacggggccctattgagcgggttaagagaagcttccaaaatctatcgtgcctcagatagcttagtgaattatgaccagaagaagaattcactgccaaaaagcctcaaaccaccagatggtgcccttctagatctcttcttggagccggacctagcattcgggagattctcgttcgtgttctcctcactgacacccgacgatccagcggctccagggttacttcgggtttcgctcgacaagcgtttccttctgcagcccaattataatacagagctaaagggcgaccaaaaggatcacagccacagccacgcatctggggccttccatctgtacgccgctgtctctcgggagcaggcagatcggctacaaaggtcaagcgaagatgacagaactaggttaggagtgttatgcaaggatcgtactgtaaagctaatgggttacgatagtacttgcgacgtaggtagcgatctgatctcgagcatcttgggtgcgcggaaagccaggaaactcctgcagcacccaaagaactccaagatcccgcgttgatgtgtacccagttcctctttttttttcccctttgtagaacagaatgcatttttttgttatgtacacaaggtacgaagggccggccgccggctggtggagctcagattttgctgtggcgtgtacaggctacgaactgtgacgcttcggcaggaacgtaactgagatcctccatgttctggtcctcacttgtaaaaattgccgttcatgtgacttcagacttcagttgattagatattgttctgtggatttaactgcaggcaccattgtgatcttgctctatctatcttt

SEQ ID NO: 751 - protein, 267 aa, Zea mays subsp. mays
  misc_feature (1)..(267): Ceres Seq. ID no. 13586896
EKVDPVVALHRVLGILKGIYGPKGVTVPDPVQSVCTRWGSDPFCSGSYSHIRVGSSGADYDILSESVNDRLFFAGEATNRAYPATMHGALLSGLREASKIYRASDSLVNYDQKKNSLPKSLKPPDGALLDLFLEPDLAFGRFSFVFSSLTPDDPAAPGLLRVSLDKRFLLQPNYNTELKGDQKDHSHSHASGAFHLYAAVSREQADRLQRSSEDDRTRLGVLCKDRTVKLMGYDSTCDVGSDLISSILGARKARKLLQHPKNSKIPR

SEQ ID NO: 752 - protein, 182 aa, Zea mays subsp. mays
  misc_feature (1)..(182): Ceres Seq. ID no. 13586897
MHGALLSGLREASKIYRASDSLVNYDQKKNSLPKSLKPPDGALLDLFLEPDLAFGRFSFVFSSLTPDDPAAPGLLRVSLDKRFLLQPNYNTELKGDQKDHSHSHASGAFHLYAAVSREQADRLQRSSEDDRTRLGVLCKDRTVKLMGYDSTCDVGSDLISSILGARKARKLLQHPKNSKIPR

SEQ ID NO: 753 - DNA, 991 bp, Zea mays subsp. mays
  misc_feature (1)..(991): Ceres Seq. ID no. 13586919
aggcttcacccgttttgctctcgagtctctcccggttcggatccaaattcagcaatccgacctgagaccaagaccgcgcaccacgcggctcgccgccgatggcgaacgccgacgccgacgaagcgccgctgctctctgtggaacacctccgtccaggatcctgcagccgcgagctcgagctgcgggagttccgcgaccgctacgtgatccgttcgctcgacggcgccgccgctttcgccgtccttcgctccggcggctccatccgccctctctccccagaggaagccgtagctgagagcgactgcaaggtttccagaatatacggcgtggtcggcaccataagattgctcgctggaagctatgtactcgttatcacttctcagaaagatgctggctcttatctgggctcccctgtgtaccaagtgaactcaatgaaattcttatgctgcaacgaggctatcaagcacttgactccacaggaaagaagggatgaggcatacttcatgtctctcctgagaattgcagaaactacttgtggattgtattattcatatgacagggatttgacactaaagtaagtgctttgtcatgcatgtatctgaataaggcaaccaaaagacattggcttaatattcagaaaaggccaacaacctttgtgtagtgattatgcacatccttaagatatttttttttctcaaacaacacatgagaactgtgtgcatttcattaagtagagaaaaaaaaccaaaggagaagcagtgtgtggcgctgttagccttgtactaggtggcctagggaagttggcctcctggaaaaaagccgaaacagtcagagcaccctgaatgtcctggatccagagattctgatctaaatcctcctgtaccgttcatctcctcgtcgacatttgtaactaatcgattgcctgttagttccattattccttgcagatgtgtagtaggttcttgaagtatggatctattgagcacttctt

SEQ ID NO: 754 - protein, 159 aa, Zea mays subsp. mays
  misc_feature (1)..(159): Ceres Seq. ID no. 13586920
MANADADEAPLLSVEHLRPGSCSRELELREFRDRYVIRSLDGAAAFAVLRSGGSIRPLSPEEAVAESDCKVSRIYGVVGTIRLLAGSYVLVITSQKDAGSYLGSPVYQVNSMKFLCCNEAIKHLTPQERRDEAYFMSLLRIAETTCGLYYSYDRDLTLK

SEQ ID NO: 755 - protein, 97 aa, Zea mays subsp. mays
  misc_feature (1)..(97): Ceres Seq. ID no. 13586921
GFTRFALESLPVRIQIQQSDLRPRPRTTRLAADGERRRRRSAAALCGTPPSRILQPRARAAGVPRPLRDPFARRRRRFRRPSLRRLHPPSLPRGSRS

SEQ ID NO: 756 - DNA, 1021 bp, Zea mays subsp. mays
  misc_feature (1)..(1021): Ceres Seq. ID no. 13586947
acctgctgctctatatcctacgactagctagctagctagctactgtgtagctactagcgtactctacgctgcagctgggcaagaatcgacgacgccacacgatgacgacgacgatggcttatttgctcgccagtaataagtgcgtgctgctgtccctctccgtcgtcgtggtcctctgtctcggcggcggcgcctccgccatgggcagcctgcccccgccaccgccgatggtgaacttcagcatcggcgtgcagggcgtggtgtggtgcaacacgtgcaggtaccccggctacttcgcgcccatggacgcgtccccgctcccaggtatatatatatacgacagccagtagcagctagcccagtcgtctgtccattgttgccagtgctcctggacgtcgagacgcatatatacacattgcattgcaggcgcgaaggtgtacctgcggtgcaaacacgggctacgcgcgctgacggtggcggggcagtgcggcccgggcggctacttcctgatccagacgtcgcagcaggtgtcggcgttcacgagccagcagtgccgggtgtacgtgccgcgctcgcccgtgcgcgcctgcggggtgcccgcctacccggcggggcgcagggggatgccgctcaagttccaggagttcgtcaagcgcgacaacggcttgcaggggatgtactccgtcggcaaccgcctcttccgccccaagaaccccgccaagtgctagctatctactcaccgatcgacccagatcgtccctgtccatgctccatgcgtacgtacgtgtatctgttgatgcaagccagagccagctgcatgcagggacatgaatagttttctttaaaagaaaaataagcaagctaggttaattggctgttgagatcgttcatcagttagtcgggtaattttagttgcagttggtcgttagaccgtttctgttatagactgaatcagtgaaactagtttcgctgctgctcggtcgattggatatattgatgtactcataatcaagaacgattg

SEQ ID NO: 757 - protein, 82 aa, Zea mays subsp. mays
  misc_feature (1)..(82): Ceres Seq. ID no. 13586948
MTTTMAYLLASNKCVLLSLSVVVVLCLGGGASAMGSLPPPPPMVNFSIGVQGVVWCNTCRYPGYFAPMDASPLPGIYIYDSQ

SEQ ID NO: 758 - protein, 78 aa, Zea mays subsp. mays
  misc_feature (1)..(78): Ceres Seq. ID no. 13586949
MAYLLASNKCVLLSLSVVVVLCLGGGASAMGSLPPPPPMVNFSIGVQGVVWCNTCRYPGYFAPMDASPLPGIYIYDSQ

SEQ ID NO: 759 - protein, 49 aa, Zea mays subsp. mays
  misc_feature (1)..(49): Ceres Seq. ID no. 13586950
MGSLPPPPPMVNFSIGVQGVVWCNTCRYPGYFAPMDASPLPGIYIYDSQ

SEQ ID NO: 760 - DNA, 625 bp, Zea mays subsp. mays
  misc_feature (1)..(625): Ceres Seq. ID no. 13586974
cacttctgctagcaggcagccatctgcagctagggttcatagttcatagtcagtgaccaacatgagtgaccgaaggtacgggtactcgtacccacacaaccaagggtattacaacggaccgccggtgatggcgccgccgcagtacgccccgccgccgagacggcagacgggattcctcgaaggatgcctggctgctctgtgctgctgctgcctcgtcgacgagtgctgctgcgacccgtccatcatattcgtgagctgatcgaaacacgtacgcggtccagacgacggccgaccgatcgaccgaccgacgaaccatccgagccgagctacgtacctaacgtactggtagtagtacatgtgcgatttatatatgcgtgtcgtgtgtatgtgtgcttcccttgagctgttgctttcagctatagcaatagcatatgcccctagaggcctagaacagagtagaactgcagaaagaatagccagcccgtcctgccgttcggttcagctctccagcggcacgacgggtgggtggtgtgtgttgcatgtatgtatgtatctgatgtgatcccctaaaaaaaagtatctgatgtgagtctacgaataagatgaggaaaaagaaaagttcggc

SEQ ID NO: 761 - protein, 72 aa, Zea mays subsp. mays
  misc_feature (1)..(72): Ceres Seq. ID no. 13586975
MPGCSVLLLPRRRVLLRPVHHIRELIETRTRSRRRPTDRPTDEPSEPSYVPNVLVVVHVRFIYACRVYVCFP

SEQ ID NO: 762 - protein, 68 aa, Zea mays subsp. mays
  misc_feature (1)..(68): Ceres Seq. ID no. 13586976
MCDLYMRVVCMCASLELLLSAIAIAYAPRGLEQSRTAERIASPSCRSVQLSSGTTGGWCVLHVCMYLM

SEQ ID NO: 763 - protein, 65 aa, Zea mays subsp. mays
  misc_feature (1)..(65): Ceres Seq. ID no. 13586977
MSDRRYGYSYPHNQGYYNGPPVMAPPQYAPPPRRQTGFLEGCLAALCCCCLVDECCCDPSIIFVS

SEQ ID NO: 764 - DNA, 1326 bp, Zea mays subsp. mays
  misc_feature (1)..(1326): Ceres Seq. ID no. 13587054
agtataatcatggccggcggcgtgagctaggctttccctcctataaataccggccgcccggcattcctccaccatccagcaaacaagctctcaagccactatctatctagctagctactagctagataacacacttgactcgatcgatcatcagcaacgtaaacccatagatcgatcatggcggcgcgcgccattgtcgtcctggtctcgctcatccttgcggtggtcgccggcggcgcgtcggcgcagctgtcgtcgggcttctactcccgctcgtgcccgggcatgctcaaagccgtgcgctcggcgctgcggccggcgatcgccagggagcggcgcgtgggcgcctccatcgtccgcctcttcttccacgactgcttcgtccagggctgcgacgcctcgctgctgctggacgacgccccgggcctgagcggcgagaagaacgccaagcccaacaagaactccgtcagggggttcgacgtcatcgacgccatcaagacggccgtcgagaaggagtgtcccggcgtcgtctcctgtgccgacatcctcgccatcgccgccgaggagagcgtcgtcttgctgggtggcccgagttgggaggtgaagatgggacggagggactcgacgacggcgagcttcaacggcgccgagaacaacatcccaccaccgacatcggggctcgcaaaccttacgtcgctcttcgccgcgcaggggctctcccagaaagacatggtcgccctctcaggagcccacacgatcggccaagcacgctgcacattcttccgggaccacatctacaacgacacaaacatcgactccggcttcgccaggagccgccagtcaggctgccctcgtaccgccggctccggcgacaacaacctggcgccactggacctgcagaccccgaccaccttcgagaacgactactacaagaatctcgtccagaagaggggcatcctgcactcggaccaggagctcttcaatggcggcgccgctgacgcgctggtccggcagtacatcggcagccagagcaccttcttcaaggacttcgtggtggggatggtcaagatgggggacatcacgccgctgacgggatccaacggacagatcaggaagaactgcaggaggatcaactaagaaaagatcctccactttctgcgcagacagttgtgaaatccctagaaatgcagcacaatccgtagcaatccaggatgtgtttggtcgcgcccatgcttgcaagcaagcttgtggtttcctctcgttcgactctgtttatgcaattgtgaaatcaatgtacgttgtgcctggtggattaataaaaggtcg

SEQ ID NO: 765 - protein, 319 aa, Zea mays subsp. mays
  misc_feature (1)..(319): Ceres Seq. ID no. 15220810
MAARAIVVLVSLILAVVAGGASAQLSSGFYSRSCPGMLKAVRSALRPAIARERRVGASIVRLFFHDCFVQGCDASLLLDDAPGLSGEKNAKPNKNSVRGFDVIDAIKTAVEKECPGVVSCADILAIAAEESVVLLGGPSWEVKMGRRDSTTASFNGAENNIPPPTSGLANLTSLFAAQGLSQKDMVALSGAHTIGQARCTFFRDHIYNDTNIDSGFARSRQSGCPRTAGSGDNNLAPLDLQTPTTFENDYYKNLVQKRGILHSDQELFNGGAADALVRQYIGSQSTFFKDFVVGMVKMGDITPLTGSNGQIRKNCRRIN

SEQ ID NO: 766 - protein, 283 aa, Zea mays subsp. mays
  misc_feature (1)..(283): Ceres Seq. ID no. 15220811
MLKAVRSALRPAIARERRVGASIVRLFFHDCFVQGCDASLLLDDAPGLSGEKNAKPNKNSVRGFDVIDAIKTAVEKECPGVVSCADILAIAAEESVVLLGGPSWEVKMGRRDSTTASFNGAENNIPPPTSGLANLTSLFAAQGLSQKDMVALSGAHTIGQARCTFFRDHIYNDTNIDSGFARSRQSGCPRTAGSGDNNLAPLDLQTPTTFENDYYKNLVQKRGILHSDQELFNGGAADALVRQYIGSQSTFFKDFVVGMVKMGDITPLTGSNGQIRKNCRRIN

SEQ ID NO: 767 - protein, 176 aa, Zea mays subsp. mays
  misc_feature (1)..(176): Ceres Seq. ID no. 15220812
MGRRDSTTASFNGAENNIPPPTSGLANLTSLFAAQGLSQKDMVALSGAHTIGQARCTFFRDHIYNDTNIDSGFARSRQSGCPRTAGSGDNNLAPLDLQTPTTFENDYYKNLVQKRGILHSDQELFNGGAADALVRQYIGSQSTFFKDFVVGMVKMGDITPLTGSNGQIRKNCRRIN

SEQ ID NO: 768 - DNA, 387 bp, Zea mays subsp. mays
  misc_feature (1)..(387): Ceres Seq. ID no. 13587093
cattgtcccntcaaactcgctnctggcctcgggcccgcccgtcgtgaggtccgagctcgatgcagccgatccggcggcgscaccgaggctttgcactcctctgtctctccgccgccctcctcgctgccgccactctgctccccggcgccgccgtcgcngaaggtgtcamgccctccgaggcgcgccggctccgcgacgaggtgaaagatatgttytatcatgcgtttgatggatacatgaagtatgctttcccactcgatgagctgcggcccttaagttgccaaggtgaagactcccttggtggttatgcgctcactcttatcgattctttggatacyttggctttactgggtgatmaggagaamtttggtgctgctgtggagtggg

SEQ ID NO: 769 - protein, 109 aa, Zea mays subsp. mays
  misc_feature (1)..(109): Ceres Seq. ID no. 13587094
  misc_feature (7)..(7): Xaa is any aa, unknown or other
  misc_feature (33)..(33): Xaa is any aa, unknown or other
  misc_feature (37)..(37): Xaa is any aa, unknown or other
  misc_feature (52)..(52): Xaa is any aa, unknown or other
  misc_feature (93)..(93): Xaa is any aa, unknown or other
  misc_feature (100)..(100): Xaa is any aa, unknown or other
  misc_feature (102)..(102): Xaa is any aa, unknown or other
MQPIRRXHRGFALLCLSAALLAAATLLPGAAVXEGVXPSEARRLRDEVKDMXYHAFDGYMKYAFPLDELRPLSCQGEDSLGGYALTLIDSLDXLALLGDXEXFGAAVEW

SEQ ID NO: 770 - protein, 75 aa, Zea mays subsp. mays
  misc_feature (1)..(75): Ceres Seq. ID no. 13587095
  misc_feature (3)..(3): Xaa is any aa, unknown or other
  misc_feature (7)..(7): Xaa is any aa, unknown or other
  misc_feature (27)..(27): Xaa is any aa, unknown or other
  misc_feature (53)..(53): Xaa is any aa, unknown or other
  misc_feature (56)..(56): Xaa is any aa, unknown or other
  misc_feature (72)..(72): Xaa is any aa, unknown or other
IVXSNSXLASGPPVVRSELDAADPAAXPRLCTPLSLRRPPRCRHSAPRRRRRXRCXALRGAPAPRRGERYVXSCV

SEQ ID NO: 771 - protein, 67 aa, Zea mays subsp. mays
  misc_feature (1)..(67): Ceres Seq. ID no. 13587096
  misc_feature (4)..(4): Xaa is any aa, unknown or other
  misc_feature (8)..(8): Xaa is any aa, unknown or other
  misc_feature (27)..(27): Xaa is any aa, unknown or other
  misc_feature (53)..(53): Xaa is any aa, unknown or other
  misc_feature (57)..(57): Xaa is any aa, unknown or other
HCPXKLAXGLGPARREVRARCSRSGGXTEALHSSVSPPPSSLPPLCSPAPPSXKVSXPPRRAGSATR

SEQ ID NO: 772 - DNA, 796 bp, Zea mays subsp. mays
  misc_feature (1)..(796): Ceres Seq. ID no. 13587097
cccaatcccctcccgccgcgtcacatcgccgccgtcctcgtgccccgttacctctaaaaccctagcggggagccggggatgaagatccagtgcaacgcgtgcggggccgcggaggcgcgggtgctgtgctgcgcggacgaggccccgctctgcgtcgcctgcgacgaggaggtgcacgccgccaacaagctcgccgggaagcaccagcgggtgccgctcctgacggacgccgccgtcgctgccgccgcggcggccccggccgtgcccaagtgcgacatctgtcaggtcaggcacccaggccccgaggcccgagccctcgtctccgctgcctctctctccatccctgtagctcgattgggttggggtgagctggagttgtcgtgcggtagctgccactgccaggctgggaattttctactaaccgtctgatcccaagctaccagggtagtctcgcctaatgatttggctcgcgaagtgaataggcggctgaagcactgcaaagttgttgttgatgcttcgatctgtagcaaactgccttgccttaccttacctgggcagcttcccttgggatgccgagtctgtttctggagcgttggcggaattgctatacgatatacactatgttttactgatgatctgactggaccaggacagcagtgagttcaattttagctcctacaggctttccctatcccggggaaggcatcatgtgtgatctgtggctggtcctgcaggatattgtaattatgaagaaaccgactcggatgttgtactgatgtgccactcttgaggaccc

SEQ ID NO: 773 - protein, 116 aa, Zea mays subsp. mays
  misc_feature (1)..(116): Ceres Seq. ID no. 13587098
MKIQCNACGAAEARVLCCADEAPLCVACDEEVHAANKLAGKHQRVPLLTDAAVAAAAAAPAVPKCDICQVRHPGPEARALVSAASLSIPVARLGWGELELSCGSCHCQAGNFLLTV

SEQ ID NO: 774 - DNA, 604 bp, Zea mays subsp. mays
  misc_feature (1)..(604): Ceres Seq. ID no. 13587117
agaaggatcgtaaccgacctcgccagtcggcatgaagcgtgacgttaatccctctcctccctctcctcccctctgctccccatcaactcttcacctcgcccaacgatccccaattcctccttcggatttcacattcaatgcaactcaagtggtaaagaaagcagacatagaggaatggggctcgcgtttgggaagctcttcagccggctcttcgtcgataaggatatgcagatccttatggtcggcatcgataccactggtaaaaccaccatcctctacaagctcaagcttggcgagatcgccatggtcaaggaacacattggacaaggttttggacactgttgcagaaggaggaggacagatctcaagtaagatggggatgtcgtgtgcttgagacgacaaggatggagatcttttcaagtaatggctagtctttttatcatagattgagtgcttgaatttgtgaaatctttgtcgaacctgatattttcgttccaaagtggaaccaccatgtttgtgaatttgaatagccacatgtatcaaccgataccgaagctggaatattaataatattcccttttctaataaatatatgtttcttttc

SEQ ID NO: 775 - protein, 120 aa, Zea mays subsp. mays
  misc_feature (1)..(120): Ceres Seq. ID no. 13587118
MKRDVNPSPPSPPLCSPSTLHLAQRSPIPPSDFTFNATQVVKKADIEEWGSRLGSSSAGSSSIRICRSLWSASIPLVKPPSSTSSSLARSPWSRNTLDKVLDTVAEGGGQISSKMGMSCA

SEQ ID NO: 776 - protein, 65 aa, Zea mays subsp. mays
  misc_feature (1)..(65): Ceres Seq. ID no. 13587119
MGLAFGKLFSRLFVDKDMQILMVGIDTTGKTTILYKLKLGEIAMVKEHIGQGFGHCCRRRRTDLK

SEQ ID NO: 777 - DNA, 682 bp, Zea mays subsp. mays
  misc_feature (1)..(682): Ceres Seq. ID no. 13587145
gtcgttatgttgatgaggtgatcattggtgctccatgggatgtttcaaaagacatgattaccacgttcaatatctctttagtcgttcatggaacaattgctgagaacatggacttcacagaggacgatttacacccatatgctgttccaatggctatgggcatctaccgccgactggagagccccctggatatcacaacaagtacaatcatcaggaggattgttgctaaccatgaagcttaccagaagcggaatgagaagaaggaagccagcgagaagaagtactacgagggtaaaagctttgtgaacggggagtgaaggtcggagtagcagcaggactcgcgtggagattgctgcctcgttcattttaggtctcccagccttttagcagaggcaacagttggtcgatctacagttgtaccctttcttttttctttttcatcttcttcagtaatctttgatatcttgctgacatagcttaggaagcataggagcatttctcccccgtgtctgcagccaattttcctcactgtgttgtatatgcgccttccagctgttgtttccagctgctggagctgcatttgagatctataggcttttccacacacacacagagacagacacatacacattttgaaattgtgcgctgcagtatgaagaagatcatgaatgttagcgtgatt

SEQ ID NO: 778 - protein, 104 aa, Zea mays subsp. mays
  misc_feature (1)..(104): Ceres Seq. ID no. 13587146
RYVDEVIIGAPWDVSKDMITTFNISLVVHGTIAENMDFTEDDLHPYAVPMAMGIYRRLESPLDITTSTIIRRIVANHEAYQKRNEKKEASEKKYYEGKSFVNGE

SEQ ID NO: 779 - protein, 87 aa, Zea mays subsp. mays
  misc_feature (1)..(87): Ceres Seq. ID no. 13587147
MITTFNISLVVHGTIAENMDFTEDDLHPYAVPMAMGIYRRLESPLDITTSTIIRRIVANHEAYQKRNEKKEASEKKYYEGKSFVNGE

SEQ ID NO: 780 - protein, 72 aa, Zea mays subsp. mays
  misc_feature (1)..(72): Ceres Seq. ID no. 13587148
MEQLLRTWTSQRTIYTHMLFQWLWASTADWRAPWISQQVQSSGGLLLTMKLTRSGMRRRKPARRSTTRVKAL

SEQ ID NO: 781 - DNA, 902 bp, Zea mays subsp. mays
  misc_feature (1)..(902): Ceres Seq. ID no. 13587149
aacctactcacaaagcaaccagacaacacatacatctctcatctctctattctctctcactgtaaacttcaaataatgatgggataccaaacaaacgctaatttctccatgttgtacgaccaagaccaccctcataattatgattatgatgacctctcttcatcaacttctgttgattgcactctctcccttggaacaccatctactcgtctcgacaaacaccgtagattttcttctgccaattctaacaacatctccggcgacttcttctttcacggaggaagcgcaaaaacgacgtcttacaaaaagagcggtagtgagcacaacctgcctcgccgttgtgctagctgcgacacttcttctactcctctatggagaaacggaccaaaagggcctaagtcgttatgcaatgcgtgtggaatcagattcaagaaggaagagaagcgtgcagctgccagaaactcaataacgtccggtggtggttcatcagtggcagaagttccggcagagaacccgtacaacggaggtggaaactattacactcatcatcaccatgcttcctcgtcaccgtcgtgggctcatcagaacacacaaagagttcagtatttctcgccggcaccggagatggaatatccgttcgttgatgacgtcacggctgcctcgtttatgtcttggaattaacgtcacggaaaccactggccttctccaccatttttgacgagatgaatgaagaaacgttacctatggaaggtcttgtcatagattctcacccaaagtaaatcagtcctggtcaaattcattataaagtttctttttatttatttatttcttacatcgacactatctccttgtgttttctttttatgtctttttgaaagatatatatacgtactgtagtgttt

SEQ ID NO: 782 - protein, 226 aa, Zea mays subsp. mays
  misc_feature (1)..(226): Ceres Seq. ID no. 13587150
NLLTKQPDNTYISHLSILSHCKLQIMMGYQTNANFSMLYDQDHPHNYDYDDLSSSTSVDCTLSLGTPSTRLDKHRRFSSANSNNISGDFFFHGGSAKTTSYKKSGSEHNLPRRCASCDTSSTPLWRNGPKGPKSLCNACGIRFKKEEKRAAARNSITSGGGSSVAEVPAENPYNGGGNYYTHHHHASSSPSWAHQNTQRVQYFSPAPEMEYPFVDDVTAASFMSWN

SEQ ID NO: 783 - protein, 201 aa, Zea mays subsp. mays
  misc_feature (1)..(201): Ceres Seq. ID no. 13587151
MMGYQTNANFSMLYDQDHPHNYDYDDLSSSTSVDCTLSLGTPSTRLDKHRRFSSANSNNISGDFFFHGGSAKTTSYKKSGSEHNLPRRCASCDTSSTPLWRNGPKGPKSLCNACGIRFKKEEKRAAARNSITSGGGSSVAEVPAENPYNGGGNYYTHHHHASSSPSWAHQNTQRVQYFSPAPEMEYPFVDDVTAASFMSWN

SEQ ID NO: 784 - protein, 200 aa, Zea mays subsp. mays
  misc_feature (1)..(200): Ceres Seq. ID no. 13587152
MGYQTNANFSMLYDQDHPHNYDYDDLSSSTSVDCTLSLGTPSTRLDKHRRFSSANSNNISGDFFFHGGSAKTTSYKKSGSEHNLPRRCASCDTSSTPLWRNGPKGPKSLCNACGIRFKKEEKRAAARNSITSGGGSSVAEVPAENPYNGGGNYYTHHHHASSSPSWAHQNTQRVQYFSPAPEMEYPFVDDVTAASFMSWN

SEQ ID NO: 785 - DNA, 649 bp, Zea mays subsp. mays
  misc_feature (1)..(649): Ceres Seq. ID no. 13587153
atggttagcaataaagcagtgaccaagagaacgaaggaaccgaagaaagaaagctacaccagagggaggacggagatcagctactagcgtaccatagtctctcgtttcgggtagtcaagccacaacggtatgcacgggagaaccgccatggcagtggcctgccttctgtgcatgacggctctgctgctagtccaggatgtccagtccaggaggctactgtggacggagcaggagaagaaacaatcccatggtggccttggcaaccatggcgccgctgaccggcgaagcacctccctggaaccgtgcagtggcgctatgggaggaggcggcacaggaagtgcagacaagcagggcgaattcccgtgtgatgatgatacgtcaaaatggacagaactgcacacggattacatatacacccaagacttcaagcacccataaactgttagctagctggctcgatcgcgtgtgccaagtttctgaagattattagttttgtctgtaggcgttgcgcgttcaatgctgtagtataggtgtataattaattagctagccagtcatcagtgactactgtagttaagacttaagagtacgctgaatgagtatcatgtatggacgcattagatggtttaatatatgcatgcatgtttgt

SEQ ID NO: 786 - protein, 102 aa, Zea mays subsp. mays
  misc_feature (1)..(102): Ceres Seq. ID no. 13587154
MHGRTAMAVACLLCMTALLLVQDVQSRRLLWTEQEKKQSHGGLGNHGAADRRSTSLEPCSGAMGGGGTGSADKQGEFPCDDDTSKWTELHTDYIYTQDFKHP

SEQ ID NO: 787 - protein, 97 aa, Zea mays subsp. mays
  misc_feature (1)..(97): Ceres Seq. ID no. 13587155
MSSPGGYCGRSRRRNNPMVALATMAPLTGEAPPWNRAVALWEEAAQEVQTSRANSRVMMIRQNGQNCTRITYTPKTSSTHKLLASWLDRVCQVSEDY

SEQ ID NO: 788 - protein, 96 aa, Zea mays subsp. mays
  misc_feature (1)..(96): Ceres Seq. ID no. 13587156
MAVACLLCMTALLLVQDVQSRRLLWTEQEKKQSHGGLGNHGAADRRSTSLEPCSGAMGGGGTGSADKQGEFPCDDDTSKWTELHTDYIYTQDFKHP

SEQ ID NO: 789 - DNA, 1152 bp, Zea mays subsp. mays
  misc_feature (1)..(1152): Ceres Seq. ID no. 13587174
aaattcccacgttgctctcccgtcttccctcctcccctccccaaacccccaccccaacgcccagatctaccctccccatttacagctttctctccggccctgcgccccagggcaccgcgccgcccgaaaccgtcggcgccggcgcgatgcgcgtgccatgctgctcgttatgcaacgtcagatatgacgaggaggagcggacgccgctgctcctccactgcggccatggattctgccgcgcgtgcctctcccgcatgctagcggcagcccccggagccacgctgccgtgcccgcgatgtcgccatccgaccgccgtaggcaactcagtctctgcgctgcggaagaacttccccattctatcgctcctctccgcatccccctcatccccgtctttcctccactccgactcggggtcatcctccgacggctccgaagatgaggatgacttcttcgcacggcccactcgccgccccgcgcccgcgcccgccgccgcgtcgcccggatgcagctccttcgacctcgcctcgcacccggacctcaagctcgcccgtcgcatcgggagcggcccgcctgggcccgccgggcaggacgtgtgggtcggcacgctgtctcgtggcggcggcggggtcaagcggtgcaagcaccaggtggcagtgaagagggtgccccaaaccgcgggggatgggctcgaggttgttcaagaggaggtggagcggctgaggcgtgcctccacatggtgtcggaacgtgtgcaccttccatggtgctgtgagggtcggcggccacctctgtttcgtgatggatcattatgtcgggtctgtgcaggcggagatgcggcagaatggtggacgcctcacgctggagcagattctcaggtgtggcattgcatcaaaatgtcggtacttagtaatattgtgcggctattctttctgctgctgtcttaccaataatcgctgcaaacatattacattgcaacatagctgctctcttttattattactcagtagtcagcaagaagcatgcctagctagaaccttcactaaatgtggcaaattgtgtacgtgtagtgtatgatagcttgctttgtgacatgtaaagtggttgccttgttaatggcgttatgcagtttgaactttgatttcattggttctgc

SEQ ID NO: 790 - protein, 356 aa, Zea mays subsp. mays
  misc_feature (1)..(356): Ceres Seq. ID no. 13587175
IPTLLSRLPSSPPQTPTPTPRSTLPIYSFLSGPAPQGTAPPETVGAGAMRVPCCSLCNVRYDEEERTPLLLHCGHGFCRACLSRMLAAAPGATLPCPRCRHPTAVGNSVSALRKNFPILSLLSASPSSPSFLHSDSGSSSDGSEDEDDFFARPTRRPAPAPAAASPGCSSFDLASHPDLKLARRIGSGPPGPAGQDVWVGTLSRGGGGVKRCKHQVAVKRVPQTAGDGLEVVQEEVERLRRASTWCRNVCTFHGAVRVGGHLCFVMDHYVGSVQAEMRQNGGRLTLEQILRCGIASKCRYLVILCGYSFCCCLTNNRCKHITLQHSCSLLLLLSSQQEACLARTFTKCGKLCTCSV

SEQ ID NO: 791 - protein, 308 aa, Zea mays subsp. mays
  misc_feature (1)..(308): Ceres Seq. ID no. 13587176
MRVPCCSLCNVRYDEEERTPLLLHCGHGFCRACLSRMLAAAPGATLPCPRCRHPTAVGNSVSALRKNFPILSLLSASPSSPSFLHSDSGSSSDGSEDEDDFFARPTRRPAPAPAAASPGCSSFDLASHPDLKLARRIGSGPPGPAGQDVWVGTLSRGGGGVKRCKHQVAVKRVPQTAGDGLEVVQEEVERLRRASTWCRNVCTFHGAVRVGGHLCFVMDHYVGSVQAEMRQNGGRLTLEQILRCGIASKCRYLVILCGYSFCCCLTNNRCKHITLQHSCSLLLLLSSQQEACLARTFTKCGKLCTCSV

SEQ ID NO: 792 - protein, 272 aa, Zea mays subsp. mays
  misc_feature (1)..(272): Ceres Seq. ID no. 13587177
MLAAAPGATLPCPRCRHPTAVGNSVSALRKNFPILSLLSASPSSPSFLHSDSGSSSDGSEDEDDFFARPTRRPAPAPAAASPGCSSFDLASHPDLKLARRIGSGPPGPAGQDVWVGTLSRGGGGVKRCKHQVAVKRVPQTAGDGLEVVQEEVERLRRASTWCRNVCTFHGAVRVGGHLCFVMDHYVGSVQAEMRQNGGRLTLEQILRCGIASKCRYLVILCGYSFCCCLTNNRCKHITLQHSCSLLLLLSSQQEACLARTFTKCGKLCTCSV

SEQ ID NO: 793 - DNA, 615 bp, Zea mays subsp. mays
  misc_feature (1)..(615): Ceres Seq. ID no. 13587188
attcaattcacagtcgagagacacttcttgtcgtttcaaccaagatgggaagggtttttatcgtggatctggaagggcaaatctatagttgcaaacactgtaacacccatcttacaaaagaacaagacatcatgtccaagtcatttcaatgcaggtatggacaagcttatctcttcaatgaagttgtaaccatttcaactggaaatgaagaagacagaatgttgatgacgggacttcatacggtaactgacatcttctgtgttggttgtggatcaaacgttggctggaaatacgtgactgcccatgatattaaccaaaaatacaaggaaggaaaatcagttcttgaattgtataagattgtgggtccttacgatagcaacgacttggtctgtcaagaaatttcacgacttgagatataataatcacatgattctgatgactctgcttgagcttttttccttcgctttttgagatttctcttagaatgtacattcttcaattttagcttatttttatttatttctttttggaattagtacatttggtacctgaaatgacgcgtagtttcataggttttaatttagagtttaatctcatttgggcttttgagctttt

SEQ ID NO: 794 - protein, 138 aa, Zea mays subsp. mays
  misc_feature (1)..(138): Ceres Seq. ID no. 13587189
SIHSRETLLVVSTKMGRVFIVDLEGQIYSCKHCNTHLTKEQDIMSKSFQCRYGQAYLFNEVVTISTGNEEDRMLMTGLHTVTDIFCVGCGSNVGWKYVTAHDINQKYKEGKSVLELYKIVGPYDSNDLVCQEISRLEI

SEQ ID NO: 795 - protein, 124 aa, Zea mays subsp. mays
  misc_feature (1)..(124): Ceres Seq. ID no. 13587190
MGRVFIVDLEGQIYSCKHCNTHLTKEQDIMSKSFQCRYGQAYLFNEVVTISTGNEEDRMLMTGLHTVTDIFCVGCGSNVGWKYVTAHDINQKYKEGKSVLELYKIVGPYDSNDLVCQEISRLEI

SEQ ID NO: 796 - protein, 95 aa, Zea mays subsp. mays
  misc_feature (1)..(95): Ceres Seq. ID no. 13587191
MSKSFQCRYGQAYLFNEVVTISTGNEEDRMLMTGLHTVTDIFCVGCGSNVGWKYVTAHDINQKYKEGKSVLELYKIVGPYDSNDLVCQEISRLEI

SEQ ID NO: 797 - DNA, 437 bp, Zea mays subsp. mays
  misc_feature (1)..(437): Ceres Seq. ID no. 13587212
atacttggagcaaagaagagtacaggcaaatgatagagtcaaacaagctgaaaggcacattcggcctccctcgaagtccatgccatctcgaccagtctcctctaatggaattcgcgatgatcatgcaaagagaaagcaagtggtaaaaagaagatttgatgacgacgacgatgaggacgaccccttggcaatgatcagaaatatgttcgggtatgatcctagtagatatgcagggagagatgaggatgtcagtgacatggaagcagattttgctactatagaaatggaagagaaaagaagtgcgaggatagctaggcaggaggacgaagagcaacttcgcttgattgaggaagaagagagacgcgagcaggagaggaagaggcgaaagatggcacgaggccgatagtccaacacgcgtcatatttgggtgttataat

SEQ ID NO: 798 - protein, 134 aa, Zea mays subsp. mays
  misc_feature (1)..(134): Ceres Seq. ID no. 13587213
YLEQRRVQANDRVKQAERHIRPPSKSMPSRPVSSNGIRDDHAKRKQVVKRRFDDDDDEDDPLAMIRNMFGYDPSRYAGRDEDVSDMEADFATIEMEEKRSARIARQEDEEQLRLIEEEERREQERKRRKMARGR

SEQ ID NO: 799 - protein, 108 aa, Zea mays subsp. mays
  misc_feature (1)..(108): Ceres Seq. ID no. 13587214
MPSRPVSSNGIRDDHAKRKQVVKRRFDDDDDEDDPLAMIRNMFGYDPSRYAGRDEDVSDMEADFATIEMEEKRSARIARQEDEEQLRLIEEEERREQERKRRKMARGR

SEQ ID NO: 800 - protein, 71 aa, Zea mays subsp. mays
  misc_feature (1)..(71): Ceres Seq. ID no. 13587215
MIRNMFGYDPSRYAGRDEDVSDMEADFATIEMEEKRSARIARQEDEEQLRLIEEEERREQERKRRKMARGR

SEQ ID NO: 801 - DNA, 1094 bp, Zea mays subsp. mays
  misc_feature (1)..(1094): Ceres Seq. ID no. 13587495
ctttctctcctctcttctcttctctcctctccccgtggccacaccacagccgccggaagctcctcctcctcctccatgagagagatctagcaaagcatagcctccttcctgctggcgggatctccttttgattcgtaacttataacagaagaggaggaggcacagcaccttgtcaaatgatgaactctcagaagctgcagctgcccgttcaggatctgatgagtctgagagggagatcattcatcatcagcaaggtgatgatgcaccagtgcactgcagctgcttcgtcgtcgtcttcacctgctcctgctgctagaggcctgcaggttgctgcccatcccagtcccagcaggaggcggcgtcctcgtggcctcgttgccgcggccggcagtgacgacgacgaatgcgcttcagatggtggtgagtccgagtcgtcgtcgtcgggcgggaaagacgacggcggcggattgtcccgagaggatctggaacgcctggtcgggagtgacgacgatgccaagttcaatgggttggatcttgcaaacctcatcaggaagaagtacggtagatcgtacgatgtgacgctgataaagaaagagttcatggggaggaatctgctggccatgaatgtgatgtggaagtacagggagcaaagatcgttcccgctgagcgaggaggagtacctgctgcggctggacgatgtcgccaacacgctcaagtgctggggagccgtggcgcacgtgcgcaacacgctggagaagctcaaggagaggccgcgcatcggcaaggccgtcagcatcttcatcgacatggaccagaccggaggccgctccaacgaatggatttacaagtagcttcccactccatcgatcatgtatatgcatccatcgcccatgaacaaacacattcatcaggtgtatggagaatgaatgtgggtaccaatttcatctccaacaatcaagcacatcgcaaagatcataccatcacatgatcttattgattcttagatcgcacctaagcatgtctcttgatattctcacatatgacaccatgcatgtatacaacgagctccttcatcaatactagttaagtattgc

SEQ ID NO: 802 - protein, 224 aa, Zea mays subsp. mays
  misc_feature (1)..(224): Ceres Seq. ID no. 13587496
MMNSQKLQLPVQDLMSLRGRSFIISKVMMHQCTAAASSSSSPAPAARGLQVAAHPSPSRRRRPRGLVAAAGSDDDECASDGGESESSSSGGKDDGGGLSREDLERLVGSDDDAKFNGLDLANLIRKKYGRSYDVTLIKKEFMGRNLLAMNVMWKYREQRSFPLSEEEYLLRLDDVANTLKCWGAVAHVRNTLEKLKERPRIGKAVSIFIDMDQTGGRSNEWIYK

SEQ ID NO: 803 - protein, 223 aa, Zea mays subsp. mays
  misc_feature (1)..(223): Ceres Seq. ID no. 13587497
MNSQKLQLPVQDLMSLRGRSFIISKVMMHQCTAAASSSSSPAPAARGLQVAAHPSPSRRRRPRGLVAAAGSDDDECASDGGESESSSSGGKDDGGGLSREDLERLVGSDDDAKFNGLDLANLIRKKYGRSYDVTLIKKEFMGRNLLAMNVMWKYREQRSFPLSEEEYLLRLDDVANTLKCWGAVAHVRNTLEKLKERPRIGKAVSIFIDMDQTGGRSNEWIYK

SEQ ID NO: 804 - protein, 210 aa, Zea mays subsp. mays
  misc_feature (1)..(210): Ceres Seq. ID no. 13587498
MSLRGRSFIISKVMMHQCTAAASSSSSPAPAARGLQVAAHPSPSRRRRPRGLVAAAGSDDDECASDGGESESSSSGGKDDGGGLSREDLERLVGSDDDAKFNGLDLANLIRKKYGRSYDVTLIKKEFMGRNLLAMNVMWKYREQRSFPLSEEEYLLRLDDVANTLKCWGAVAHVRNTLEKLKERPRIGKAVSIFIDMDQTGGRSNEWIYK

SEQ ID NO: 805 - DNA, 1483 bp, Zea mays subsp. mays
  misc_feature (1)..(1483): Ceres Seq. ID no. 13587581
acccgattcggatccgattccgcggcaggcggcattcccagcctcccaaacccatttccctctccgatcaaatcaaatcaaactcaaaccgacacgggacccacgccgcatctccgcctccgcagatcgccgccgcctactcgcgcccctccgcgcgccgatggccgccgcggacccgccgccgcgcggggaggccgcgcccgcgctgaagcggagcgccagcatcgaccggataccggcggacgcgcgccgcatcctgcaccgcctcgccggggacctctggggcggcgacgtggaccccggcgcgctggccgtgtcccagctcaggggcgccatgaccaacgaggtcttccggatcacctggcccggcggcgaggccgagggcaacggcccgcgcaaggtgctcgtgcgcatctacggccggggcgtcgaggtcttcttcgaccgcgccgacgaggtccgcaccttcgagtgcatgtcgcgccacggccagaggccccgcctcctgggccgcttcgccaacggccgcgtcgaggagttcatcaacgccaggaccctctccgccgcggatctgcgcgacccggagatgtccgcgctgattgccaggaagctgcgcgagtttcacgatctcgacatgcctggacctagggacgtgtcattgtggcagaggctcaagcggtggcttggggaggctcgtgacaggtgttctgaggaagagtctaaccaatttcagctgaataaactaggtgatgagatttcagtgctggagaagacgctctcggggctccaacagtcagtaggattctgccataacgatctgcagtatggaaatattatgatatatgaagagaccagacaagtcaccttgatagactatgaatatgcgagttttaacccagtcgcattcgacattgctaatcacttctgtgagatggctgctgattaccatacatcaacaccacatgtgttggattttacgaaatatcctgacactggggagcagagaagattcgttgaggcataccttagctctgcaggtaaaaagccaacggatggggaagttgaagaactgctagggttgatagcaaagtacactcttgcgagccatctcttctggggcctgtggggaataatctcggcgcacgtgaacgaaaatatcgacttcgcgtacaaggagtatgcaaggcagcgcttggatcagtactggcaaacaaaacctcgaattcttggacccaagtgatgagtcgttgctttttgtagggggtccttggccagctagtcatgtgaattctgtttgtcagtagcggctagtagctgccagtttttgactgcagattgttcagctcgctgtgacctgtgtcgtgaccatattcttgacttacggggtgtaattattttgcctggtcttaggctaaggtaaccagtctttctatcctaatgtaaatagtacagtctataatgaccttatcctcacatggttctg

SEQ ID NO: 806 - protein, 412 aa, Zea mays subsp. mays
  misc_feature (1)..(412): Ceres Seq. ID no. 13587582
PDSDPIPRQAAFPASQTHFPLRSNQIKLKPTRDPRRISASADRRRLLAPLRAPMAAADPPPRGEAAPALKRSASIDRIPADARRILHRLAGDLWGGDVDPGALAVSQLRGAMTNEVFRITWPGGEAEGNGPRKVLVRIYGRGVEVFFDRADEVRTFECMSRHGQRPRLLGRFANGRVEEFINARTLSAADLRDPEMSALIARKLREFHDLDMPGPRDVSLWQRLKRWLGEARDRCSEEESNQFQLNKLGDEISVLEKTLSGLQQSVGFCHNDLQYGNIMIYEETRQVTLIDYEYASFNPVAFDIANHFCEMAADYHTSTPHVLDFTKYPDTGEQRRFVEAYLSSAGKKPTDGEVEELLGLIAKYTLASHLFWGLWGIISAHVNENIDFAYKEYARQRLDQYWQTKPRILGPK

SEQ ID NO: 807 - protein, 359 aa, Zea mays subsp. mays
  misc_feature (1)..(359): Ceres Seq. ID no. 13587583
MAAADPPPRGEAAPALKRSASIDRIPADARRILHRLAGDLWGGDVDPGALAVSQLRGAMTNEVFRITWPGGEAEGNGPRKVLVRIYGRGVEVFFDRADEVRTFECMSRHGQRPRLLGRFANGRVEEFINARTLSAADLRDPEMSALIARKLREFHDLDMPGPRDVSLWQRLKRWLGEARDRCSEEESNQFQLNKLGDEISVLEKTLSGLQQSVGFCHNDLQYGNIMIYEETRQVTLIDYEYASFNPVAFDIANHFCEMAADYHTSTPHVLDFTKYPDTGEQRRFVEAYLSSAGKKPTDGEVEELLGLIAKYTLASHLFWGLWGIISAHVNENIDFAYKEYARQRLDQYWQTKPRILGPK

SEQ ID NO: 808 - protein, 301 aa, Zea mays subsp. mays
  misc_feature (1)..(301): Ceres Seq. ID no. 13587584
MTNEVFRITWPGGEAEGNGPRKVLVRIYGRGVEVFFDRADEVRTFECMSRHGQRPRLLGRFANGRVEEFINARTLSAADLRDPEMSALIARKLREFHDLDMPGPRDVSLWQRLKRWLGEARDRCSEEESNQFQLNKLGDEISVLEKTLSGLQQSVGFCHNDLQYGNIMIYEETRQVTLIDYEYASFNPVAFDIANHFCEMAADYHTSTPHVLDFTKYPDTGEQRRFVEAYLSSAGKKPTDGEVEELLGLIAKYTLASHLFWGLWGIISAHVNENIDFAYKEYARQRLDQYWQTKPRILGPK

SEQ ID NO: 809 - DNA, 548 bp, Zea mays subsp. mays
  misc_feature (1)..(548): Ceres Seq. ID no. 13587636
aaaagaagggagtgaagcgtgtacacgtacggccctataatatatatagatagcaagacagagcattcccttgcaccaccacaaccagtcctcacataatcatcttcattcactcactctcttcgatcactgtactgaagataccatggccaagtcgaccgcgatgtttgtagccgccctggccctggtggtggtgatggcgacgacgagcacaggcggtggcagggcggcagcggcgtgcgatcccaagccgctggtggtgtgcgatccggcgttcatggacggagcgaaacccgcggcagcatgctgctccaccctgcgtgcgcaggaggcatgcttgtgcgtgtacgccaaagaccccaagtttgcaaaatacatcaacaaccccaacaccgccaaaacctttacctcatgcggcatagccatccccaaatgctaagcaagcgctctgcgtcgtcgcttcgcttgctcttgctcttgtgtgtaacatatccagcttatgaataaattatgtggatcagttaattaaaaaaaaaaaaaaaaaagct

SEQ ID NO: 810 - protein, 97 aa, Zea mays subsp. mays
  misc_feature (1)..(97): Ceres Seq. ID no. 13587637
MAKSTAMFVAALALVVVMATTSTGGGRAAAACDPKPLVVCDPAFMDGAKPAAACCSTLRAQEACLCVYAKDPKFAKYINNPNTAKTFTSCGIAIPKC

SEQ ID NO: 811 - protein, 91 aa, Zea mays subsp. mays
  misc_feature (1)..(91): Ceres Seq. ID no. 13587638
MFVAALALVVVMATTSTGGGRAAAACDPKPLVVCDPAFMDGAKPAAACCSTLRAQEACLCVYAKDPKFAKYINNPNTAKTFTSCGIAIPKC

SEQ ID NO: 812 - protein, 80 aa, Zea mays subsp. mays
  misc_feature (1)..(80): Ceres Seq. ID no. 13587639
MATTSTGGGRAAAACDPKPLVVCDPAFMDGAKPAAACCSTLRAQEACLCVYAKDPKFAKYINNPNTAKTFTSCGIAIPKC

SEQ ID NO: 813 - DNA, 850 bp, Zea mays subsp. mays
  misc_feature (1)..(850): Ceres Seq. ID no. 13589109
ccsssctscaggaatttgcackwkayyrtgtttamcwagaacatcctaatcgaaaaaaattaaaagcgcgttttagagtttaactgccgcttgccggaggagaaaactcaactcgccgttacctaccccgaacaccagttttattcccgcctgacatccaccgcgccgtttctgaactccgattaagttgatgtcaggattcgcagctcacctagtgttgttactcctggttcttgtctctgtctccttgtcgccgtcggtcaggtgtttaggtaaagagagaacattggctatgataaagccagatggagtctctggtaactacactgaagaaatcaaaaggctcattgtcgaggctggttttaatatcgtcaaggagaggcttactcagctggagaaggaggcagcctctgcgttctacgacgagcattcgtcaaggagcttttttcctcatcttgtttcttacatgacaagtggtcctgtggtggtgatggtgttggagaaaggagacgctgtttctgattggcgtggtttaatcgggcctactgattcgcaaaaggctaagatatctcatcctcacagcatcagagcattgtgtggtaaggactctcagagaaactgtgtgcacggctccgattcaacttcatcagctgagagagaaattaactttttcttcaaggatgtagtttcaggtgacatcgcttcacaacatgatgaactataagatacaccaatatatattctcwwtgtaawsttgkaactgkwggkkgatctatctatagtcacctaaamrmaaaraaaamrargcttatcgrtaccgkcracctcgaggggrsgctccggtacccaw

SEQ ID NO: 814 - protein, 177 aa, Zea mays subsp. mays
  misc_feature (1)..(177): Ceres Seq. ID no. 15220936
MSGFAAHLVLLLLVLVSVSLSPSVRCLGKERTLAMIKPDGVSGNYTEEIKRLIVEAGFNIVKERLTQLEKEAASAFYDEHSSRSFFPHLVSYMTSGPVVVMVLEKGDAVSDWRGLIGPTDSQKAKISHPHSIRALCGKDSQRNCVHGSDSTSSAEREINFFFKDVVSGDIASQHDEL

SEQ ID NO: 815 - protein, 143 aa, Zea mays subsp. mays
  misc_feature (1)..(143): Ceres Seq. ID no. 15220937
MIKPDGVSGNYTEEIKRLIVEAGFNIVKERLTQLEKEAASAFYDEHSSRSFFPHLVSYMTSGPVVVMVLEKGDAVSDWRGLIGPTDSQKAKISHPHSIRALCGKDSQRNCVHGSDSTSSAEREINFFFKDVVSGDIASQHDEL

SEQ ID NO: 816 - DNA, 530 bp, Zea mays subsp. mays
  misc_feature (1)..(530): Ceres Seq. ID no. 13589319
agctcgccatagttgattcatacacaatacaagcatcctctctactactgaagagatcaaattccattcagggtagatagaaatggcatcctccagcttttatcttctcagcgttcttctcatcgtgatcgcttctggcgcctgggctacggatcctagtcctctccaggacttctgcgttgcagacaaagaatcgcctgtacttgtcaatgggtttgcctgcaaggatgctaaggatgtcaaggtcgacgacttcttcctagcagccgacctcgacaagccaagggatacgacgatgagcaaggtcaagtcaaatgtcacattgatcaatgtgatgaagctggccggcctaaacaccttgggcatctccatggctagaattgactatgcccctcaaggacagaacccaccacatacgcatccccgtgccactgcgatcttaactgttcttgaaggatcactctatgttggttttgtcacttctaacccagacaacaaattcattagcaagctactcaacaagggagatg

SEQ ID NO: 817 - protein, 149 aa, Zea mays subsp. mays
  misc_feature (1)..(149): Ceres Seq. ID no. 13589320
MASSSFYLLSVLLIVIASGAWATDPSPLQDFCVADKESPVLVNGFACKDAKDVKVDDFFLAADLDKPRDTTMSKVKSNVTLINVMKLAGLNTLGISMARIDYAPQGQNPPHTHPRATAILTVLEGSLYVGFVTSNPDNKFISKLLNKGD

SEQ ID NO: 818 - protein, 78 aa, Zea mays subsp. mays
  misc_feature (1)..(78): Ceres Seq. ID no. 13589321
MSKVKSNVTLINVMKLAGLNTLGISMARIDYAPQGQNPPHTHPRATAILTVLEGSLYVGFVTSNPDNKFISKLLNKGD

SEQ ID NO: 819 - DNA, 844 bp, Zea mays subsp. mays
  misc_feature (1)..(844): Ceres Seq. ID no. 13598823
accaacgccgagctgtgagataggatgggcaagctgtggacgatcctcactcacctccactcccttgcagggccaacggtgatgctgctgtaccctctgtacgcgtccgtgcgggcgatggagagcccgtccaagctggacgacgagcagtggctcgcctactggatcctctactccttcgtcacgctcatggagatgctcctcgagtccctcatatactggatccccatctggtacgagctcaagctgctgttcatcgcgtggctcgtgctccccaacttcaggggcgccgccttcatctacgacaagttcgtgcgcgagcagctccggaagcacggcctcaccgccgccggctccgtcaagtcgtcgtcgccgtcgtccaaggacaaggacaagcccaagaacaagttcctcgccttcgtcacgcccaagaaggatcatgaagcttactgaagtgggttgcagtgatcccattcctggaccatgtcccggcaacctgtagctgtagtgcactccactagatttctgttgtgtttgttctcgacttgaaatagagcctgtacgatgtgtgtatggccattctgtatgtgtgagcatcaactctaacatggaatggagacaagagccaawwgtttaaamamaawaaagtkggaactggaggggggaaaaaaaaaaaaaaaaaaaaaaaaaaaaaaaaaaaaaaaaaaaaaaaaaaaaaaaaaaaattaaaaaaaaaaaaaaaaattttcgaaccsgssaaccccgggggggggcccggaccccaattcccccaaaagggggccgaataacgcccgcccccgggccgccgtttaacaacgccggg

SEQ ID NO: 820 - protein, 142 aa, Zea mays subsp. mays
  misc_feature (1)..(142): Ceres Seq. ID no. 15222429
MGKLWTILTHLHSLAGPTVMLLYPLYASVRAMESPSKLDDEQWLAYWILYSFVTLMEMLLESLIYWIPIWYELKLLFIAWLVLPNFRGAAFIYDKFVREQLRKHGLTAAGSVKSSSPSSKDKDKPKNKFLAFVTPKKDHEAY

SEQ ID NO: 821 - protein, 123 aa, Zea mays subsp. mays
  misc_feature (1)..(123): Ceres Seq. ID no. 15222430
MLLYPLYASVRAMESPSKLDDEQWLAYWILYSFVTLMEMLLESLIYWIPIWYELKLLFIAWLVLPNFRGAAFIYDKFVREQLRKHGLTAAGSVKSSSPSSKDKDKPKNKFLAFVTPKKDHEAY

SEQ ID NO: 822 - protein, 111 aa, Zea mays subsp. mays
  misc_feature (1)..(111): Ceres Seq. ID no. 15222431
MESPSKLDDEQWLAYWILYSFVTLMEMLLESLIYWIPIWYELKLLFIAWLVLPNFRGAAFIYDKFVREQLRKHGLTAAGSVKSSSPSSKDKDKPKNKFLAFVTPKKDHEAY

SEQ ID NO: 823 - DNA, 1018 bp, Zea mays subsp. mays
  misc_feature (1)..(1018): Ceres Seq. ID no. 13598869
aagtgccaagtccggagcaacagcaaccaaccaaccacctcctcccctctccgtctcccagtccggcctcgctcgccactcggagtctcggagtcaaccgccagcgcctcgatccggcgaagccagcccagcccatggcctccggcgccgtaccaccgcagcgggtcgccctgctggcgctcgccgtcctctccgtcgtctcattcccgcacctgtccctccccgcctcgtcccatccgctcccgcaggaagctgctgctgctgctgctgcgggtgcggcggcgggaggcgaggcgtccgagcctcacggcaccgccgccgatggtgccgccgtggcgcggcgcgcgtgcacgtacacggtgcagatcaagacgagctgcgcgtccccgcggagctccgcggacgcggtgagcctcgcgttcggggacgcgtaccgcaacgaggtgtacgcggcgacggtgacgccgcggcgcgggttcgagcgctgcgccacggacacgttccgcgtcgccgggccctgcggctacggcgtctgctacctctacatgcgccggtcgggccgcgccgccgggtggacgcccgagtgggtcagggtgtacgagccggcgtccggcgcgccctccaccttctactacggcgacccgctccccgacggcgtctggtacggcttcgaccgctgcgtcaaggccggggccggcgcctctgccgagcatggtgccgcggcgcggacgctgtgacggacggacgcggacgccgccggtctctgggcgacagggcgaggtagcagagcgccactcgtggcgcgcggtcctgctgccgtgtcaagcgatgattgctggggcacggcgtctctttctgtgcaagtggagagtattcatttcgggtggctgctagtagtaatagcttctctattgggtctatttgcgttacgtgtagtacgtgccacgcataataaaaagtagtatggccaaamamaawaaagttggaactggarrrgsktatcgataccgtcgacctc

SEQ ID NO: 824 - protein, 260 aa, Zea mays subsp. mays
  misc_feature (1)..(260): Ceres Seq. ID no. 15222441
SAKSGATATNQPPPPLSVSQSGLARHSESRSQPPAPRSGEASPAHGLRRRTTAAGRPAGARRPLRRLIPAPVPPRLVPSAPAGSCCCCCCGCGGGRRGVRASRHRRRWCRRGAARVHVHGADQDELRVPAELRGRGEPRVRGRVPQRGVRGDGDAAARVRALRHGHVPRRRALRLRRLLPLHAPVGPRRRVDARVGQGVRAGVRRALHLLLRRPAPRRRLVRLRPLRQGRGRRLCRAWCRGADAVTDGRGRRRSLGDRAR

SEQ ID NO: 825 - protein, 244 aa, Zea mays subsp. mays
  misc_feature (1)..(244): Ceres Seq. ID no. 15222442
VPSPEQQQPTNHLLPSPSPSPASLATRSLGVNRQRLDPAKPAQPMASGAVPPQRVALLALAVLSVVSFPHLSLPASSHPLPQEAAAAAAAGAAAGGEASEPHGTAADGAAVARRACTYTVQIKTSCASPRSSADAVSLAFGDAYRNEVYAATVTPRRGFERCATDTFRVAGPCGYGVCYLYMRRSGRAAGWTPEWVRVYEPASGAPSTFYYGDPLPDGVWYGFDRCVKAGAGASAEHGAAARTL

SEQ ID NO: 826 - protein, 200 aa, Zea mays subsp. mays
  misc_feature (1)..(200): Ceres Seq. ID no. 15222443
MASGAVPPQRVALLALAVLSVVSFPHLSLPASSHPLPQEAAAAAAAGAAAGGEASEPHGTAADGAAVARRACTYTVQIKTSCASPRSSADAVSLAFGDAYRNEVYAATVTPRRGFERCATDTFRVAGPCGYGVCYLYMRRSGRAAGWTPEWVRVYEPASGAPSTFYYGDPLPDGVWYGFDRCVKAGAGASAEHGAAARTL

SEQ ID NO: 827 - DNA, 1315 bp, Zea mays subsp. mays
  misc_feature (1)..(1315): Ceres Seq. ID no. 13598890
cacctggagttctctccgaggaaacaatcgagaagatggaatttgaggtcgagaggttaacaagactaaagaccagcagactgaaggaaatcgtcatgaaaaggagggcagagttagaagcgatctgccagaatgcacacatagaacctgatgtcagcacggcccctgaacagactgattctttgatcgattctggcctcatcgacccttctgagctcctggcgaatattgagtcacaaatattaaaagcgaaagaagagtctcttagtcggaaagatataatggacaggataaatagatggattgctgcttgcgatgaagaggcttggcttgaagaatataaccaggacccaaagaggtacagtgctggaaggggtgctcatataaaccttaaacgggcagaaaaggcacggattttggttagaaaaatcccaagtatggtggacgacttgataaaccgaacctttgcttgggaaaacgcaagaaataaaccctttctctatgatgggggacgcctaatatctgtactagaagagtacaggcttagccggcatcagaaagaagaggaaaatcgacggtaccgggaccagaagaagctggagagcatcctacttgcagagaaagaagcgatcttcggatctagaccaagcccaaggaagacgagcagcttaagtaggaaggcaaatgggtaccggccaaatgggaacaccaacggactcaagactccaactcctcgccgattgtctctcggcagtgctactcctgagcttttgacgcccagatcgtactctggccataatagatactttggcgatgtgaggcgtctatcgacttcccatctgaacttcggtgatgattcgctgtcaacgtttacatccatcagtggctctgaaccagaatccccctctattggatgaacaccgtactgctggatgactggatggtcagtattgcgtattgtaaatgggcaccatgttaccaagttcttgcactagcatgtacattcctgatgtcatatatttagctcatattggagtactaagtattggacgggttgacttggtttgggttgggtgtggagttgaattgtttcaagttgatggctttgtagattgacaattaggcggaaagatgtaggggagcgatctggatttgggcagtcagctgtaacatatcataacttatgtgtttggtttgtgtgtgcaaaaaaaaaaaaaaaaaaaaaaaaaaaaaaaaaaaaaaaaaaaaaaaaaaaaaaaaaaaaataaaaaaaaaaaaaaaaaatatcgataccgtcgacctcgagggggggccc

SEQ ID NO: 828 - protein, 304 aa, Zea mays subsp. mays
  misc_feature (1)..(304): Ceres Seq. ID no. 13598891
PGVLSEETIEKMEFEVERLTRLKTSRLKEIVMKRRAELEAICQNAHIEPDVSTAPEQTDSLIDSGLIDPSELLANIESQILKAKEESLSRKDIMDRINRWIAACDEEAWLEEYNQDPKRYSAGRGAHINLKRAEKARILVRKIPSMVDDLINRTFAWENARNKPFLYDGGRLISVLEEYRLSRHQKEEENRRYRDQKKLESILLAEKEAIFGSRPSPRKTSSLSRKANGYRPNGNTNGLKTPTPRRLSLGSATPELLTPRSYSGHNRYFGDVRRLSTSHLNFGDDSLSTFTSISGSEPESPSIG

SEQ ID NO: 829 - protein, 293 aa, Zea mays subsp. mays
  misc_feature (1)..(293): Ceres Seq. ID no. 13598892
MEFEVERLTRLKTSRLKEIVMKRRAELEAICQNAHIEPDVSTAPEQTDSLIDSGLIDPSELLANIESQILKAKEESLSRKDIMDRINRWIAACDEEAWLEEYNQDPKRYSAGRGAHINLKRAEKARILVRKIPSMVDDLINRTFAWENARNKPFLYDGGRLISVLEEYRLSRHQKEEENRRYRDQKKLESILLAEKEAIFGSRPSPRKTSSLSRKANGYRPNGNTNGLKTPTPRRLSLGSATPELLTPRSYSGHNRYFGDVRRLSTSHLNFGDDSLSTFTSISGSEPESPSIG

SEQ ID NO: 830 - protein, 273 aa, Zea mays subsp. mays
  misc_feature (1)..(273): Ceres Seq. ID no. 13598893
MKRRAELEAICQNAHIEPDVSTAPEQTDSLIDSGLIDPSELLANIESQILKAKEESLSRKDIMDRINRWIAACDEEAWLEEYNQDPKRYSAGRGAHINLKRAEKARILVRKIPSMVDDLINRTFAWENARNKPFLYDGGRLISVLEEYRLSRHQKEEENRRYRDQKKLESILLAEKEAIFGSRPSPRKTSSLSRKANGYRPNGNTNGLKTPTPRRLSLGSATPELLTPRSYSGHNRYFGDVRRLSTSHLNFGDDSLSTFTSISGSEPESPSIG

SEQ ID NO: 831 - DNA, 780 bp, Zea mays subsp. mays
  misc_feature (1)..(780): Ceres Seq. ID no. 13598906
atatctattgtcactaatgtttgttctgaggaatacctttgtaagtttgaacgagtctagccatcttttctattttaattatttgtgagatattggaggtcaccaaacttggaaatagaccggttcatataacaaccatcaaaatccaatatcttgattcgttatcttctttccttaccatgcaaacactaaatacatgtagacctacgacaaaggcccccacatttttctaggcaaccaaaatccgtgacatatacagggatacgaagtgtcttcggttatatacagtgataacttctatgctggctggttgagacggacacgcttgacacatggtgcttccactcatccacgactccatagtcactgtcaggtcgggatcgagccatctagacccatgagaagcaaggatgcgaaggactcttcaacaattatttaattggacttgctagatttagttacttatattcaatcccagttgctctctatattaatttggtaactcgataggcacttactaaatatggttgacgccgatttcttcaaaaaaaaaaaaaaaaaaaaaaaaaaaaaaaaaaaaaaaaaaaaaaaaaaaaaaaaaaaaaaaaaaaaaaaaaaaaaaggaaaaaaaaaaaaaaaaaggtttatcgatcccgccgaccccgagggggggcccggaacccaattccccctaaagggggtcgaattacgcgcgctcccgggccgccgttttacaacgccgggacgggaaaaacccgggggttacccaatttaatcgcc

SEQ ID NO: 832 - protein, 83 aa, Zea mays subsp. mays
  misc_feature (1)..(83): Ceres Seq. ID no. 13598907
MVDADFFKKKKKKKKKKKKKKKKKKKKKKKKKKGKKKKKRFIDPADPEGGPGTQFPLKGVELRALPGRRFTTPGREKPGGYPI

SEQ ID NO: 833 - DNA, 1043 bp, Zea mays subsp. mays
  misc_feature (1)..(1043): Ceres Seq. ID no. 13598922
cttccatttyccatttcttcggcaatcttccctcaggaaaagacagcatcaagagaagaaaagaagagatactttctcagtggcttctggaagtcgtggactttgctgccttgcctggcaaagggattcaatgctggatcaatgggaagaaaattttggtagggaatcgtgctttgataactgaaaatggggtaaacattcctgaagaagctgaacgtttcctgatagacatggagctgaatgcaaagactggtattctcgtagcgtatgatggtgacttcattggcttggttgggataaccgatcctttgaaaagggaggctgctgtggtcatacaaggtctaaaaaagatgggtgttcatccagttatggtcactggggataactggaggactgcacgagcagttgcaaaggaggttggcatagatgatgtcagagccgaggttatgccggccggaaaagccgatgtaatccactccctgcaaaaggatggcagtgttgtcgcaatggtcggagatggcatcaacgactcgcccgcccttgctgccgccgatgtcggcatggccatcggcgcaggcactgacatcgctatcgaggcggctgactatgtgctcgtccggaacaacctggaggatgtgatcacggctattgacctctcacggaagacgttcatccggatccggtggaactacttctttgccatggcctacaacgtgatcgccatccccgtagctgctggcgcgttgtttcccttcaccggggtccagatgccgccttggttagccggcgcgtgcatggcgttctcgtccgtcagcgtggtgtcgtcgtcgctgctgctgaggaggtataggaaacccaggctcaccaccgtgcttcagataacagtggaataagttcctttttttttggcaatctgttgtatctcactttatcggagagaaatagatacaaacgtgaatgctggtgtggtgcagtattgagggtcaaacacttgtacatatcgaacagtttgcaattgcaaccgagttatacatgcagggggg

SEQ ID NO: 834 - protein, 296 aa, Zea mays subsp. mays
  misc_feature (1)..(296): Ceres Seq. ID no. 15222446
  misc_feature (3)..(3): Xaa is any aa, unknown or other
SIXHFFGNLPSGKDSIKRRKEEILSQWLLEVVDFAALPGKGIQCWINGKKILVGNRALITENGVNIPEEAERFLIDMELNAKTGILVAYDGDFIGLVGITDPLKREAAVVIQGLKKMGVHPVMVTGDNWRTARAVAKEVGIDDVRAEVMPAGKADVIHSLQKDGSVVAMVGDGINDSPALAAADVGMAIGAGTDIAIEAADYVLVRNNLEDVITAIDLSRKTFIRIRWNYFFAMAYNVIAIPVAAGALFPFTGVQMPPWLAGACMAFSSVSVVSSSLLLRRYRKPRLTTVLQITVE

SEQ ID NO: 835 - protein, 220 aa, Zea mays subsp. mays
  misc_feature (1)..(220): Ceres Seq. ID no. 15222447
MELNAKTGILVAYDGDFIGLVGITDPLKREAAVVIQGLKKMGVHPVMVTGDNWRTARAVAKEVGIDDVRAEVMPAGKADVIHSLQKDGSVVAMVGDGINDSPALAAADVGMAIGAGTDIAIEAADYVLVRNNLEDVITAIDLSRKTFIRIRWNYFFAMAYNVIAIPVAAGALFPFTGVQMPPWLAGACMAFSSVSVVSSSLLLRRYRKPRLTTVLQITVE

SEQ ID NO: 836 - protein, 180 aa, Zea mays subsp. mays
  misc_feature (1)..(180): Ceres Seq. ID no. 15222448
MGVHPVMVTGDNWRTARAVAKEVGIDDVRAEVMPAGKADVIHSLQKDGSVVAMVGDGINDSPALAAADVGMAIGAGTDIAIEAADYVLVRNNLEDVITAIDLSRKTFIRIRWNYFFAMAYNVIAIPVAAGALFPFTGVQMPPWLAGACMAFSSVSVVSSSLLLRRYRKPRLTTVLQITVE

SEQ ID NO: 837 - DNA, 1644 bp, Zea mays subsp. mays
  misc_feature (1)..(1644): Ceres Seq. ID no. 13598923
aaccgcgccgctctctctctctctctcgcacgagccgcgccggcgccgccaccacgcgcgcgggagacagagaccacagccgcagccaccggcgggcggaataggaatggtggcgccggggggaggagcaggaggaggtccgtcgcggtggccggcggcggaggagcttgacactgtacggaagaaggtggtggagattagtggaagggatgaacaagaggttatggttgctgcttgcccctacagaatttgccctttgggggctcatattgatcatcagggtggagtagtcacagctatgaccataaattatggagtactccttggtttcgttccctctaatggttctgaggttttacttcattctggtcagtttgaaggtgctataagattcagagttgatgacttgcaaaagcctattgataaacctgagaacataaactggggaagttatgcaaaaggtgctgttagtgcactgcagaatagtggatatgatctaaggaagggtatcataggatatatttctggtgtgaaaggtcttgatagttcagggctcagttcttctgcggcggttggcatcgcctacttgctggctttagaacatgtaaatgatctggttatatcaccagtagataacattcagttagacaagtacattgaaaataaatacttgggtctcgaaaatggcattctagatccatctgccattttgctttcacggtatggctatctcaccttcatggactgcaagactgcttcaccttcctacgtctgcttctcggagctgaataaaagccaacagcctcagggacagctaccattcaagattttgttggcattttcaggactccaacataatctgccaaagaagcgtggatataatacacgagtttctgagtgcaaagaggctgcccgtgctcttttgcatgcttcaggctgtgaagatacaccaaatatactttgcaatgttgacccagttgtatatgagacccagaagtgtgtattggaagaaaatctttccaggagagctgaacactacttttttgaaatgaagcgggttacaaagggcagggatgcatgggctcatgggaacctacaagaacttggacagctgatctctgaatctggtcgcagctccatactcaactacgaatgtgggagcaaagagatgatccagctgtacgagatcctgctgaaggcccccggcgccctcggcgcccggttcagcggcgccggcttcaggggctgctgcctggccatcgtggagagcgaccgcgcggaggatgcggctgcatacgtccgtgccgagtacgaaaaggcccagcccgagctggtctccaggatccccgcggatcgccgtgttctggtctgcgagcccggggactccgcgcgcgtcatattgcctgatcctcacctgagctcctgatgccatttcgtggcccggacagacggaatgatgactctactagtccattcgctgcgtttggattcgtttttagttaagccccttttgagcatcggatattttcctttcctttattgtttctaataaaaataaattaatttctgtaaactttatataagcttctagcttttttagataaaagtatataatatctatctacttctctactacamtammgt

SEQ ID NO: 838 - protein, 474 aa, Zea mays subsp. mays
  misc_feature (1)..(474): Ceres Seq. ID no. 15222449
TAPLSLSLSHEPRRRRHHARGRQRPQPQPPAGGIGMVAPGGGAGGGPSRWPAAEELDTVRKKVVEISGRDEQEVMVAACPYRICPLGAHIDHQGGVVTAMTINYGVLLGFVPSNGSEVLLHSGQFEGAIRFRVDDLQKPIDKPENINWGSYAKGAVSALQNSGYDLRKGIIGYISGVKGLDSSGLSSSAAVGIAYLLALEHVNDLVISPVDNIQLDKYIENKYLGLENGILDPSAILLSRYGYLTFMDCKTASPSYVCFSELNKSQQPQGQLPFKILLAFSGLQHNLPKKRGYNTRVSECKEAARALLHASGCEDTPNILCNVDPVVYETQKCVLEENLSRRAEHYFFEMKRVTKGRDAWAHGNLQELGQLISESGRSSILNYECGSKEMIQLYEILLKAPGALGARFSGAGFRGCCLAIVESDRAEDAAAYVRAEYEKAQPELVSRIPADRRVLVCEPGDSARVILPDPHLSS

SEQ ID NO: 839 - protein, 439 aa, Zea mays subsp. mays
  misc_feature (1)..(439): Ceres Seq. ID no. 15222450
MVAPGGGAGGGPSRWPAAEELDTVRKKVVEISGRDEQEVMVAACPYRICPLGAHIDHQGGVVTAMTINYGVLLGFVPSNGSEVLLHSGQFEGAIRFRVDDLQKPIDKPENINWGSYAKGAVSALQNSGYDLRKGIIGYISGVKGLDSSGLSSSAAVGIAYLLALEHVNDLVISPVDNIQLDKYIENKYLGLENGILDPSAILLSRYGYLTFMDCKTASPSYVCFSELNKSQQPQGQLPFKILLAFSGLQHNLPKKRGYNTRVSECKEAARALLHASGCEDTPNILCNVDPVVYETQKCVLEENLSRRAEHYFFEMKRVTKGRDAWAHGNLQELGQLISESGRSSILNYECGSKEMIQLYEILLKAPGALGARFSGAGFRGCCLAIVESDRAEDAAAYVRAEYEKAQPELVSRIPADRRVLVCEPGDSARVILPDPHLSS

SEQ ID NO: 840 - protein, 400 aa, Zea mays subsp. mays
  misc_feature (1)..(400): Ceres Seq. ID no. 15222451
MVAACPYRICPLGAHIDHQGGVVTAMTINYGVLLGFVPSNGSEVLLHSGQFEGAIRFRVDDLQKPIDKPENINWGSYAKGAVSALQNSGYDLRKGIIGYISGVKGLDSSGLSSSAAVGIAYLLALEHVNDLVISPVDNIQLDKYIENKYLGLENGILDPSAILLSRYGYLTFMDCKTASPSYVCFSELNKSQQPQGQLPFKILLAFSGLQHNLPKKRGYNTRVSECKEAARALLHASGCEDTPNILCNVDPVVYETQKCVLEENLSRRAEHYFFEMKRVTKGRDAWAHGNLQELGQLISESGRSSILNYECGSKEMIQLYEILLKAPGALGARFSGAGFRGCCLAIVESDRAEDAAAYVRAEYEKAQPELVSRIPADRRVLVCEPGDSARVILPDPHLSS

SEQ ID NO: 841 - DNA, 860 bp, Zea mays subsp. mays
  misc_feature (1)..(860): Ceres Seq. ID no. 13598924
acctagaacatcctaatcaaaaattgtaatcgagtatgttggtgaagtcattgatgatgcgacatgtgaacaaaggctttgggatataagacggcgtggtgacaaaaacttctacatgtgtgaaatcagcaaagattttacaatagatgcgacatttaaaggcaatgtgtcacgttttctaaatcacagttgtgagcccaactgtaaactcgaaaaatggcaggttgatggtgagacaagagttggtgtctttgcctctcgttccatcgaagttggagagcccttaacttatgattacaggtttgtgcattttggagagaaagtgaagtgccattgcgaagcagtgaactgccagggatacctgggcagccaaataaagaacccaattcaaagcattcttgccactgtagcaccgcaagtgcagttgcgagagtattcgcccatgcaccacgaagctccaagattgaagccaataaatcacttgttaccctggaccaactgtatagaggtctcttttaacctgagaagcaaaaggaaaattgaccggctatgctgggcccgcaagaagaagagaacatccctcgtgccatcttcaacaagcatgccagcatcgccgagtgaagttcctgccgcggatttctaactgcccttcgttgaagagcaagcctgccctgtataataatttcatggtacattctttacatgcattggttggaaacgattctttcacattgctcatcaatggtgttgtaacctgcaacattctttatttggtttcatagggcattcagtcagtttacgggtggtagtttgtcggaacatgtacccaatttttctgatgaaacaaatgtttgagcttc

SEQ ID NO: 842 - protein, 175 aa, Zea mays subsp. mays
  misc_feature (1)..(175): Ceres Seq. ID no. 13598925
MCEISKDFTIDATFKGNVSRFLNHSCEPNCKLEKWQVDGETRVGVFASRSIEVGEPLTYDYRFVHFGEKVKCHCEAVNCQGYLGSQIKNPIQSILATVAPQVQLREYSPMHHEAPRLKPINHLLPWTNCIEVSFNLRSKRKIDRLCWARKKKRTSLVPSSTSMPASPSEVPAADF

SEQ ID NO: 843 - DNA, 587 bp, Zea mays subsp. mays
  misc_feature (1)..(587): Ceres Seq. ID no. 13598930
acccaagtcgcgtgcttccattcccagcccaaccgaagcgaagcacgccaccggcctcgaagggatcagcttctctagcactcatcctcgtggccttgttcctcctcttctatatgggactgcgtcggagtggagatccgtgccgacatagtccgactttgtcgctcgctgcctacgattgatggcctcaccttcaccaaccgagttcagtagggaagcagctcgtcagtctctcatcgcaatctcccagaccattccggagacaccttcacccgagacggtgaaggcaccgatctccattgcagaaaacgggaagctgggcgatggggcggataagttcagatcaaagctgatgtccatcacagacctgtcttctgatgcccaacctgcgcagtgccctcccgaggatattgctgcttgatcgtgtgattttcctgctcgacttgcggacataatgtatcagtgcttgctgatgctctgggcatttaactgtcgtgcattaaactgaacgtccttgtgttactagtcgtttttctttgttaaaatattcagggaaaccggtggaaatatattgtgcaagttttttt

SEQ ID NO: 844 - protein, 79 aa, Zea mays subsp. mays
  misc_feature (1)..(79): Ceres Seq. ID no. 13598931
MASPSPTEFSREAARQSLIAISQTIPETPSPETVKAPISIAENGKLGDGADKFRSKLMSITDLSSDAQPAQCPPEDIAA

SEQ ID NO: 845 - protein, 59 aa, Zea mays subsp. mays
  misc_feature (1)..(59): Ceres Seq. ID no. 13598932
PSRVLPFPAQPKRSTPPASKGSASLALILVALFLLFYMGLRRSGDPCRHSPTLSLAAYD

SEQ ID NO: 846 - protein, 49 aa, Zea mays subsp. mays
  misc_feature (1)..(49): Ceres Seq. ID no. 13598933
PKSRASIPSPTEAKHATGLEGISFSSTHPRGLVPPLLYGTASEWRSVPT

SEQ ID NO: 847 - DNA, 893 bp, Zea mays subsp. mays
  misc_feature (1)..(893): Ceres Seq. ID no. 13598935
atgagcacaccacactgcacgcccacaccacggaatagacctctcaacccagaacccagcaggcaccatggccgccgccgtgcccctcctcctccagctgctgctactgccactcctggtcgcgtcagcggcgggcggcggcggcggcgagaagagcacgcacatgaagctgtactggcacgacgtggtgagcgggccgagcccgacggcggtgcaggtggcgcgggcggcggtgaccaacacctccaagaccgccttcggcgtggtggtggtgatcgacgacccgctgacggagggcccggacctcaagtcctcgaagcccctcggccgcgctcagggcacgtacatcggcgccggcaaggacgagctgtccctcatgatgagcatgaacttcgtgttccaggccggcaagtacaacggtagcaccgtggccatcatgggccggaacgcggtgttcgacgccgtccgcgagatggctgtggtgggcggcaccggcgcgttcaggatggcgcgcggctacgcgcaggcccgcacgcacgccctcgacctcaacaccggcgacgccaccgtcgagtacaacctctacatcaagcactgaagtgaactgactgatcagttggtattgggaatgatacacaataataaatgaactggaaaagaataacctgatgatttttttgcttgggaaggaccagttgttcccacgtttgtgtcgatctacagtgtggcgactgttgcggtaacactacgtaaagaataatgacctgatggctttttttgtttaggaaaaaaaaaaaaaaaaaaaaaaaaaaaaaaaaaaaaaaaaaaaaaaaaaaattaaaaaaaaaaaaaaaaaggcttatcgataccgccaacctcragggggggcccgg

SEQ ID NO: 848 - protein, 176 aa, Zea mays subsp. mays
  misc_feature (1)..(176): Ceres Seq. ID no. 15222455
MAAAVPLLLQLLLLPLLVASAAGGGGGEKSTHMKLYWHDVVSGPSPTAVQVARAAVTNTSKTAFGVVVVIDDPLTEGPDLKSSKPLGRAQGTYIGAGKDELSLMMSMNFVFQAGKYNGSTVAIMGRNAVFDAVREMAVVGGTGAFRMARGYAQARTHALDLNTGDATVEYNLYIKH

SEQ ID NO: 849 - protein, 144 aa, Zea mays subsp. mays
  misc_feature (1)..(144): Ceres Seq. ID no. 15222456
MKLYWHDVVSGPSPTAVQVARAAVTNTSKTAFGVVVVIDDPLTEGPDLKSSKPLGRAQGTYIGAGKDELSLMMSMNFVFQAGKYNGSTVAIMGRNAVFDAVREMAVVGGTGAFRMARGYAQARTHALDLNTGDATVEYNLYIKH

SEQ ID NO: 850 - protein, 140 aa, Zea mays subsp. mays
  misc_feature (1)..(140): Ceres Seq. ID no. 15222457
MSTPHCTPTPRNRPLNPEPSRHHGRRRAPPPPAAATATPGRVSGGRRRRREEHAHEAVLARRGERAEPDGGAGGAGGGDQHLQDRLRRGGGDRRPADGGPGPQVLEAPRPRSGHVHRRRQGRAVPHDEHELRVPGRQVQR

SEQ ID NO: 851 - DNA, 1793 bp, Zea mays subsp. mays
  misc_feature (1)..(1793): Ceres Seq. ID no. 13598941
acagatcctacccaaaccacaatctcgccgcggtctccaatgggagccgagccggtggacttctcgccgccgccgccgccggagccgacgctttcgccggagccggagatctccggcaaggacagaggagggaactggaaggcggacatgatgtcagctctcggggagtcggtttccttcggccgcttcctctcggagccgctcgaatgggggaagaggtccgccttcgcgcacaaccgctacctcgaggaggcggcggtgcaggcgcgcccgggctcagtcgcgcagaagaaggcattcttcgaggcgcactacgctaggaagaagcgcaagagcgaggaccacgccgccgccgccagtgatgatgttgcaggcggtgatggcgagctcgaggcggcagaggatggtggtgccgcgtcgtggtcgttgtctgctactgagtcttcctgcatgacggatgaaccaccggcaccagcagaggaagtgtgctgcggttgggaggaggacagagtggtggattgtggtggcagcgccagcgacaagccagtacacgtgccggaggagctcgcggacatcaccgatgccgttgggccctgttgcaggatggatgcgcccacggatgagacacagcacatggagggcggcgacgaagtggttggagcagttttgcccttgcagaagcaggatttgtgcatggatagtttgacggctgttgatgccactttgaaggaaatctctattttgaatcaggatatcacagattctgtcaagagaaggaggatccagatggcgtccttgcttccaaagccggcaaagctcagctctccccccacagcaaagaaagggcagaattcctcagctaaaagaaggtcaatgcggcattctgcaaaggagaataactcacctcctagtgcaggcagtaacaagctaagaacaacttcgacccccaaaaagaggtcaacgctgtcagccttgcatatgtctatgagtttcccgagatgtgaatctggcaatacttccatggcgtcaagaaatcttggtaccacaatcgctgctaggattagcgagttggaacatgcaaatgcaaccaagcctgcagaaaaaaacactaagcctcatgatttgaggctaccaagaaagaaattttccagcgctttaccagaaattgctccaaggacatctcaagtcgatgaagaaagatcatcacatataatgaaaatcaaagaaaagctatttggttcaacatttccaacactgcatcagaaatatggtataaccaaagaaaaagagagaaagatcaacaatgaacatgggtttaaagaatcacgacatagcttttgcttcaaagccacgctgttgccaaatttctatcgaagcaataaacaaccaaaggatacaagtcatcaggctactcaagaaatcctaagttcttcgaagtctggccatctatcaagggatattaatcaagcacaccaaacgggtaaagatgcacaaacgagtaaagatgcatctgatgccaaacaaatatgttgtttcccccttagaaagatgtattagatctattttatttagtgtttccattatatattagcctattcttttcattcatattcagtgacctatttgggacacctaatatgtagcaaggttatcttttaagccagcttggaggataacattctcaatccatccaatctcatggcataatgtttgtggtggtaatctagactaacttttcatggctttgaagtgtaaaaaaaaaaaaaaaaaatatcgataccgtcgacctcgag

SEQ ID NO: 852 - protein, 518 aa, Zea mays subsp. mays
  misc_feature (1)..(518): Ceres Seq. ID no. 13598942
TDPTQTTISPRSPMGAEPVDFSPPPPPEPTLSPEPEISGKDRGGNWKADMMSALGESVSFGRFLSEPLEWGKRSAFAHNRYLEEAAVQARPGSVAQKKAFFEAHYARKKRKSEDHAAAASDDVAGGDGELEAAEDGGAASWSLSATESSCMTDEPPAPAEEVCCGWEEDRVVDCGGSASDKPVHVPEELADITDAVGPCCRMDAPTDETQHMEGGDEVVGAVLPLQKQDLCMDSLTAVDATLKEISILNQDITDSVKRRRIQMASLLPKPAKLSSPPTAKKGQNSSAKRRSMRHSAKENNSPPSAGSNKLRTTSTPKKRSTLSALHMSMSFPRCESGNTSMASRNLGTTIAARISELEHANATKPAEKNTKPHDLRLPRKKFSSALPEIAPRTSQVDEERSSHIMKIKEKLFGSTFPTLHQKYGITKEKERKINNEHGFKESRHSFCFKATLLPNFYRSNKQPKDTSHQATQEILSSSKSGHLSRDINQAHQTGKDAQTSKDASDAKQICCFPLRKMY

SEQ ID NO: 853 - protein, 505 aa, Zea mays subsp. mays
  misc_feature (1)..(505): Ceres Seq. ID no. 13598943
MGAEPVDFSPPPPPEPTLSPEPEISGKDRGGNWKADMMSALGESVSFGRFLSEPLEWGKRSAFAHNRYLEEAAVQARPGSVAQKKAFFEAHYARKKRKSEDHAAAASDDVAGGDGELEAAEDGGAASWSLSATESSCMTDEPPAPAEEVCCGWEEDRVVDCGGSASDKPVHVPEELADITDAVGPCCRMDAPTDETQHMEGGDEVVGAVLPLQKQDLCMDSLTAVDATLKEISILNQDITDSVKRRRIQMASLLPKPAKLSSPPTAKKGQNSSAKRRSMRHSAKENNSPPSAGSNKLRTTSTPKKRSTLSALHMSMSFPRCESGNTSMASRNLGTTIAARISELEHANATKPAEKNTKPHDLRLPRKKFSSALPEIAPRTSQVDEERSSHIMKIKEKLFGSTFPTLHQKYGITKEKERKINNEHGFKESRHSFCFKATLLPNFYRSNKQPKDTSHQATQEILSSSKSGHLSRDINQAHQTGKDAQTSKDASDAKQICCFPLRKMY

SEQ ID NO: 854 - protein, 469 aa, Zea mays subsp. mays
  misc_feature (1)..(469): Ceres Seq. ID no. 13598944
MMSALGESVSFGRFLSEPLEWGKRSAFAHNRYLEEAAVQARPGSVAQKKAFFEAHYARKKRKSEDHAAAASDDVAGGDGELEAAEDGGAASWSLSATESSCMTDEPPAPAEEVCCGWEEDRVVDCGGSASDKPVHVPEELADITDAVGPCCRMDAPTDETQHMEGGDEVVGAVLPLQKQDLCMDSLTAVDATLKEISILNQDITDSVKRRRIQMASLLPKPAKLSSPPTAKKGQNSSAKRRSMRHSAKENNSPPSAGSNKLRTTSTPKKRSTLSALHMSMSFPRCESGNTSMASRNLGTTIAARISELEHANATKPAEKNTKPHDLRLPRKKFSSALPEIAPRTSQVDEERSSHIMKIKEKLFGSTFPTLHQKYGITKEKERKINNEHGFKESRHSFCFKATLLPNFYRSNKQPKDTSHQATQEILSSSKSGHLSRDINQAHQTGKDAQTSKDASDAKQICCFPLRKMY

SEQ ID NO: 855 - DNA, 780 bp, Zea mays subsp. mays
  misc_feature (1)..(780): Ceres Seq. ID no. 13598946
aaactagagatgatgcggcatgtctttgaacaaagtggtattaaaggagcaattgctgcagtggcaaagctacctgacaatgctgttcaagcagatgttgttagtgctctcaaaggaaagcttgatcttttcaacctggaatttttctcaaattttctgcctgttcttgctgggttactgtgtagcaagactgaaaggcatgctatggtctctttggaaatgttgttggatcttataaagatttttggaccagtaattcattcagcattatcagcaaatttaggcgttggagttgacattcaggctgagcagaggttgcaacgttgttcacggtgctttaaccatttgcaaaagatccaacagagtctgaatccattgattctgcggggtggtcaaacagcacaacttgcacaagaactacgtctttcattgcaagatttggtggtgatctaggcaagatgatgtacaatgtatacgacagagtagataccattggttttggcgaaaagtgcccacagttgtgtagcttgtaattttgtcatagctttgcaagtgggttttgcaactgtgttttaacattgggctggcattcagcctggtcccctgttgtaaatgtgagcctagccgtgaatgagtctgtaattagccagccacatctgctgtgtgagcagccctgaacaaaaagactagttgaaaggaaacaaccgcaaaggggatcattttggttaaaaaaaaaaaaaaaaaagcttatcgataccgtcggtgttaaacacaataaag

SEQ ID NO: 856 - protein, 150 aa, Zea mays subsp. mays
  misc_feature (1)..(150): Ceres Seq. ID no. 13598947
KLEMMRHVFEQSGIKGAIAAVAKLPDNAVQADVVSALKGKLDLFNLEFFSNFLPVLAGLLCSKTERHAMVSLEMLLDLIKIFGPVIHSALSANLGVGVDIQAEQRLQRCSRCFNHLQKIQQSLNPLILRGGQTAQLAQELRLSLQDLVVI

SEQ ID NO: 857 - protein, 147 aa, Zea mays subsp. mays
  misc_feature (1)..(147): Ceres Seq. ID no. 13598948
MMRHVFEQSGIKGAIAAVAKLPDNAVQADVVSALKGKLDLFNLEFFSNFLPVLAGLLCSKTERHAMVSLEMLLDLIKIFGPVIHSALSANLGVGVDIQAEQRLQRCSRCFNHLQKIQQSLNPLILRGGQTAQLAQELRLSLQDLVVI

SEQ ID NO: 858 - protein, 146 aa, Zea mays subsp. mays
  misc_feature (1)..(146): Ceres Seq. ID no. 13598949
MRHVFEQSGIKGAIAAVAKLPDNAVQADVVSALKGKLDLFNLEFFSNFLPVLAGLLCSKTERHAMVSLEMLLDLIKIFGPVIHSALSANLGVGVDIQAEQRLQRCSRCFNHLQKIQQSLNPLILRGGQTAQLAQELRLSLQDLVVI

SEQ ID NO: 859 - DNA, 749 bp, Zea mays subsp. mays
  misc_feature (1)..(749): Ceres Seq. ID no. 13598962
accacactccactgctctcctccactccactgcctcccatccctgctgctccctctcccatcccggttccatcatgggcggcctctcggtgatcgcaccgcccgcgcgggactcggcttccccgcagcaccggcgcgcgcgccgcgcgttcctcgtgtccaactacctcatcctgggctgcgcctccgggtgcggcttcctcacgctctcgctccgcctggccccctccgtcgacggcttcctcctcatcctgctgcacgcgctcacggtggccgggcggagcgagagcgagcaggaccgcaagaggcggacacagcttcaggaagaatgggactcatgggttgccaagtggaagcagatgcatgaggaggagcgtgcttacaggagggagctcagggatggggaggccagcgacgacgaggaagagtatgaggccaaggaagttgaggtggaggaagtcgttgatgtccgtcaagaagttcttgcattcgacctagatcaggagtgaaaacacttattatagaatctgttgatttctttcctgttggtgttaaagttcattggggtcgcattgcataataggccctagtgatcaagtgcgcaatttactgatcgttgtactgcttatttgtacacttgctgcttgaattgttggatcatgtgtttagatatcaaattttgctgctggattactaaaaaaaaaaaaaaaaaatatcgataccnnncgacnntcgagggggggcccnnnt

SEQ ID NO: 860 - protein, 168 aa, Zea mays subsp. mays
  misc_feature (1)..(168): Ceres Seq. ID no. 15222467
PHSTALLHSTASHPCCSLSHPGSIMGGLSVIAPPARDSASPQHRRARRAFLVSNYLILGCASGCGFLTLSLRLAPSVDGFLLILLHALTVAGRSESEQDRKRRTQLQEEWDSWVAKWKQMHEEERAYRRELRDGEASDDEEEYEAKEVEVEEVVDVRQEVLAFDLDQE

SEQ ID NO: 861 - protein, 144 aa, Zea mays subsp. mays
  misc_feature (1)..(144): Ceres Seq. ID no. 15222468
MGGLSVIAPPARDSASPQHRRARRAFLVSNYLILGCASGCGFLTLSLRLAPSVDGFLLILLHALTVAGRSESEQDRKRRTQLQEEWDSWVAKWKQMHEEERAYRRELRDGEASDDEEEYEAKEVEVEEVVDVRQEVLAFDLDQE

SEQ ID NO: 862 - protein, 121 aa, Zea mays subsp. mays
  misc_feature (1)..(121): Ceres Seq. ID no. 15222469
TTLHCSPPLHCLPSLLLPLPSRFHHGRPLGDRTARAGLGFPAAPARAPRVPRVQLPHPGLRLRVRLPHALAPPGPLRRRLPPHPAARAHGGRAERERAGPQEADTASGRMGLMGCQVEADA

SEQ ID NO: 863 - DNA, 1011 bp, Zea mays subsp. mays
  misc_feature (1)..(1011): Ceres Seq. ID no. 13598968
tagataatgctattgttcctgttgatgaacctgcagcaccttccggccctccactacctgtcttactgccttcgactacaggtcaagggctgcaaattagtgcacaactaacacggcgtgatggccagatatactatgacatatcttttgagaatggcacccaaggtgtcctagatggatttatgattcagtttaacaagaacacatttggtcttgctgctggtgaagcacttcaggttactccactgcaaccaggccaatcaacaaggacacttttacaaatgaccccgttccagaatatcagccctggtgcaccaaactcgctactacaggttgctgtgaaaaataatcagcagccagtgtggtacttcaatgacaaaattccgctgcatgttttctttggtgaagatggaaaaatggaacgagctggttttcttgaggcctggaaatctttgcctgatgacaatgaatttacaaaggaattcccgggctctgtcatcagcagcatagatgctactgttgagcgcctcgtagcatcaaatgtgttcttcatagccaagcggaaaaatgcgaacatggatgttctgtatctctccgcgaagatgccccgtggaatccccttccttatagaggttacagccgtggttggtgttcctggtgtgaagtgtgcagtcaaaacaccaaatagggagatggttcctctcttctttgaagctatggaggctctcaccaagtgacgacaaatttaatggatctggatcggtggttctaaaaaaataaataaaaaaaataaaaaaaaatcaatcgatgagctgctataggtgtttggacgtggcatttatttttgacggaagctggtgtgaattgtagttttttttggtattagattacagtatttaaactgctagtttcctggtttcaaagttttttcaccagaaatactggatgtgttcatgccttgcatgatttgtacatcttaccatgttgtatgaagcgatggaattgtaggtg

SEQ ID NO: 864 - protein, 244 aa, Zea mays subsp. mays
  misc_feature (1)..(244): Ceres Seq. ID no. 13598969
DNAIVPVDEPAAPSGPPLPVLLPSTTGQGLQISAQLTRRDGQIYYDISFENGTQGVLDGFMIQFNKNTFGLAAGEALQVTPLQPGQSTRTLLQMTPFQNISPGAPNSLLQVAVKNNQQPVWYFNDKIPLHVFFGEDGKMERAGFLEAWKSLPDDNEFTKEFPGSVISSIDATVERLVASNVFFIAKRKNANMDVLYLSAKMPRGIPFLIEVTAVVGVPGVKCAVKTPNREMVPLFFEAMEALTK

SEQ ID NO: 865 - protein, 184 aa, Zea mays subsp. mays
  misc_feature (1)..(184): Ceres Seq. ID no. 13598970
MIQFNKNTFGLAAGEALQVTPLQPGQSTRTLLQMTPFQNISPGAPNSLLQVAVKNNQQPVWYFNDKIPLHVFFGEDGKMERAGFLEAWKSLPDDNEFTKEFPGSVISSIDATVERLVASNVFFIAKRKNANMDVLYLSAKMPRGIPFLIEVTAVVGVPGVKCAVKTPNREMVPLFFEAMEALTK

SEQ ID NO: 866 - protein, 151 aa, Zea mays subsp. mays
  misc_feature (1)..(151): Ceres Seq. ID no. 13598971
MTPFQNISPGAPNSLLQVAVKNNQQPVWYFNDKIPLHVFFGEDGKMERAGFLEAWKSLPDDNEFTKEFPGSVISSIDATVERLVASNVFFIAKRKNANMDVLYLSAKMPRGIPFLIEVTAVVGVPGVKCAVKTPNREMVPLFFEAMEALTK

SEQ ID NO: 867 - DNA, 781 bp, Zea mays subsp. mays
  misc_feature (1)..(781): Ceres Seq. ID no. 13598985
gtaaaatttcagtggcggaagagacagctataggttccattctcaagtggccagataggctgtctaaaccttctgctagggcatcagttatcaacaatggagcaaacttgtttgaagtagatagtcagaagtgggttaggagagtgtcatattataagaaatcgcttggtgtgaagcttgggagcacaaacatacgcaatgtcatggacatgaatgcattctttggaggattcgcagccgctataatatctgatcctgtatgggttatgaatgttgttcctggtcagaagccattgacacttggagttatttatgataggggccttataggggtttatcatgactggtgtgaaccattctcaacgtatcctcgtacctatgatcttattcatgctgatgcaattgactccttgataagtggcccgatttcaggcactagcagatgtgacctgtttgatgtcatgttggagatggatcgcatactgcgcccagaaggaactgccgttatacgggcctcgccagacgtagtagccaaggcagcacagatcgctcagtcgattcggtggaaggcacaggtgcatgacagtgaaccagaatcaggcagtaccgagaaaatacttgtggctaccaaaacattttggaagctgccactaacaaaacaataggctaatgcgagtttgaactttgaacccttttcacttgcgctcccttaattttgtattcttttggggtgcgctgaagggatatagcaggctaatgggattgctggagtagtttagtc

SEQ ID NO: 868 - protein, 220 aa, Zea mays subsp. mays
  misc_feature (1)..(220): Ceres Seq. ID no. 13598986
KISVAEETAIGSILKWPDRLSKPSARASVINNGANLFEVDSQKWVRRVSYYKKSLGVKLGSTNIRNVMDMNAFFGGFAAAIISDPVWVMNVVPGQKPLTLGVIYDRGLIGVYHDWCEPFSTYPRTYDLIHADAIDSLISGPISGTSRCDLFDVMLEMDRILRPEGTAVIRASPDVVAKAAQIAQSIRWKAQVHDSEPESGSTEKILVATKTFWKLPLTKQ

SEQ ID NO: 869 - protein, 153 aa, Zea mays subsp. mays
  misc_feature (1)..(153): Ceres Seq. ID no. 13598987
MDMNAFFGGFAAAIISDPVWVMNVVPGQKPLTLGVIYDRGLIGVYHDWCEPFSTYPRTYDLIHADAIDSLISGPISGTSRCDLFDVMLEMDRILRPEGTAVIRASPDVVAKAAQIAQSIRWKAQVHDSEPESGSTEKILVATKTFWKLPLTKQ

SEQ ID NO: 870 - protein, 151 aa, Zea mays subsp. mays
  misc_feature (1)..(151): Ceres Seq. ID no. 13598988
MNAFFGGFAAAIISDPVWVMNVVPGQKPLTLGVIYDRGLIGVYHDWCEPFSTYPRTYDLIHADAIDSLISGPISGTSRCDLFDVMLEMDRILRPEGTAVIRASPDVVAKAAQIAQSIRWKAQVHDSEPESGSTEKILVATKTFWKLPLTKQ

SEQ ID NO: 871 - DNA, 479 bp, Zea mays subsp. mays
  misc_feature (1)..(479): Ceres Seq. ID no. 13598991
cataagccattgcgtgatggtaaatgggctgttacttatgaggaatggccagaagaggattahcccatctatgcaaatggtcctggatatgttatatcctctgatattgcagactccattctatcagaatttttaaaccttaaattaaggcttttcaaaatggaggatgtcagcatgggcatgtgggtcgagcggttcaacagcaccagacttgttaaatacgtccacagcgtcaaattttgtcaatttggatgcatagatgattattacactgcacactaccaatcaccgaggcagatgttgtgtttgtgggacaagctgcaggctggaaaagctcaatgttgcaatatgagatagcaacattggaggtggtggtactggtaggcgtttctgtggtggtagtgcctatccttattcatgaaggagaacctagaagccttgaaaataaattaaaccctcgagatgactaacaaattgtc

SEQ ID NO: 872 - protein, 118 aa, Zea mays subsp. mays
  misc_feature (1)..(118): Ceres Seq. ID no. 15222480
  misc_feature (21)..(21): Xaa is any aa, unknown or other
HKPLRDGKWAVTYEEWPEEDXPIYANGPGYVISSDIADSILSEFLNLKLRLFKMEDVSMGMWVERFNSTRLVKYVHSVKFCQFGCIDDYYTAHYQSPRQMLCLWDKLQAGKAQCCNMR

SEQ ID NO: 873 - protein, 65 aa, Zea mays subsp. mays
  misc_feature (1)..(65): Ceres Seq. ID no. 15222481
MEDVSMGMWVERFNSTRLVKYVHSVKFCQFGCIDDYYTAHYQSPRQMLCLWDKLQAGKAQCCNMR

SEQ ID NO: 874 - protein, 60 aa, Zea mays subsp. mays
  misc_feature (1)..(60): Ceres Seq. ID no. 15222482
MGMWVERFNSTRLVKYVHSVKFCQFGCIDDYYTAHYQSPRQMLCLWDKLQAGKAQCCNMR

SEQ ID NO: 875 - DNA, 1182 bp, Zea mays subsp. mays
  misc_feature (1)..(1182): Ceres Seq. ID no. 13599003
cccccctccagwwcmtccthtrckgcggcggtatactcggttccctgccccccccacgaccacgccgccgcctcctccccacgcccgcccggcgctcccggaaccgccgcattcacatgatgtatcatgcgaagaatttttctgtgccctttgctccgcagagggcacaggataatgagcatgcaggtaatattggaggtattggtggacccaacataagcaaccctgctaatcctgtaggaagtgggaaacaacgtctacggtggacatcggatcttcataatcgctttgtggatgccatcgcccagcttggtggaccagacagagctacacctaaaggggttctcactgtgatgggtgtaccagggatcacaatttatcatgtgaagagccatctgcagaagtatcgccttgcaaagtatatacccgactctcctgctgaaggttccaaggacgaaaagaaagattcgagtgattccctctcgaacacggattctgcaccaggattgcaaatcaatgaggcactaaagatgcaaatggaggttcagaagcgactacatgagcaactcgaggttcaaagacaactgcaactaagaattgaagcacaaggaagatacttgcagatgatcattgaggagcaacaaaagcttggtggatcaattaaagcttctgaggatcagaagctttctgattcacctccaagcttagatgactacccagagagcatgcaaccttctcccaagaaaccaaggatagatgcattatcaccagattcagagcgcgatacaacacaacctgaattcgaatcccatttgatcggtccgtgggatcacggcattgcattcccagtggaggagttcaaagcagaccctgctatgagcaagtcataaggcaaacttcaccttgacagaaaattttcagagttgacctctccacgagatgatcattctcatgtgaatatatattatcttaacaacagaatgttgtacgggtttttgaccctgcacctgatcccttcagccacgtccagttattcttatcactgtagtatccatcaacaagtcctgtaattatgaggatggtgttacagagtttctagcaagcatttccatcgagggaatggccctgagttgatccatgtagcaagaaagagaacatgcttacaagcaatatatttgctgc

SEQ ID NO: 876 - protein, 295 aa, Zea mays subsp. mays
  misc_feature (1)..(295): Ceres Seq. ID no. 15222483
  misc_feature (4)..(4): Xaa is any aa, unknown or other
  misc_feature (5)..(5): Xaa is any aa, unknown or other
  misc_feature (6)..(6): Xaa is any aa, unknown or other
  misc_feature (7)..(7): Xaa is any aa, unknown or other
  misc_feature (8)..(8): Xaa is any aa, unknown or other
PLQXXXXXGGILGSLPPPRPRRRLLPTPARRSRNRRIHMMYHAKNFSVPFAPQRAQDNEHAGNIGGIGGPNISNPANPVGSGKQRLRWTSDLHNRFVDAIAQLGGPDRATPKGVLTVMGVPGITIYHVKSHLQKYRLAKYIPDSPAEGSKDEKKDSSDSLSNTDSAPGLQINEALKMQMEVQKRLHEQLEVQRQLQLRIEAQGRYLQMIIEEQQKLGGSIKASEDQKLSDSPPSLDDYPESMQPSPKKPRIDALSPDSERDTTQPEFESHLIGPWDHGIAFPVEEFKADPAMSKS

SEQ ID NO: 877 - protein, 257 aa, Zea mays subsp. mays
  misc_feature (1)..(257): Ceres Seq. ID no. 15222484
MMYHAKNFSVPFAPQRAQDNEHAGNIGGIGGPNISNPANPVGSGKQRLRWTSDLHNRFVDAIAQLGGPDRATPKGVLTVMGVPGITIYHVKSHLQKYRLAKYIPDSPAEGSKDEKKDSSDSLSNTDSAPGLQINEALKMQMEVQKRLHEQLEVQRQLQLRIEAQGRYLQMIIEEQQKLGGSIKASEDQKLSDSPPSLDDYPESMQPSPKKPRIDALSPDSERDTTQPEFESHLIGPWDHGIAFPVEEFKADPAMSKS

SEQ ID NO: 878 - protein, 256 aa, Zea mays subsp. mays
  misc_feature (1)..(256): Ceres Seq. ID no. 15222485
MYHAKNFSVPFAPQRAQDNEHAGNIGGIGGPNISNPANPVGSGKQRLRWTSDLHNRFVDAIAQLGGPDRATPKGVLTVMGVPGITIYHVKSHLQKYRLAKYIPDSPAEGSKDEKKDSSDSLSNTDSAPGLQINEALKMQMEVQKRLHEQLEVQRQLQLRIEAQGRYLQMIIEEQQKLGGSIKASEDQKLSDSPPSLDDYPESMQPSPKKPRIDALSPDSERDTTQPEFESHLIGPWDHGIAFPVEEFKADPAMSKS

SEQ ID NO: 879 - DNA, 648 bp, Zea mays subsp. mays
  misc_feature (1)..(648): Ceres Seq. ID no. 13599008
gtgggatggtttccatccatcggaagctgcatacaaagccattgcaatgggccttttgcgcgggacatacacacaaccatctattgcttccaccaccagttcctgtccacagctcactgagctcggctcttctgttgaatacaagagctgcggtactgtactgcacttctcggctgtggcccaagcgattggttgggttttgttttaccttctctttttcagtcacagtgctagaattaggaattgaaaggtggtgcttttaccatccatagaaggtaccaagaggaaccacagaattatacttggggggtccggaaactcatcggtacctctcaatgacttcaaaatggctgattaagaggagtggatgccaattctttgatcatattggctggtacagcgtagatgctatctacttcatttccatttcttgtaaatgtaaccatcagttcttccgatgcacgtgatacttagctgagcttctgcactatcaggaagtaagcagctttttagtatttcagagtcttcttgctgtcactgtctttcccttggcaactcccttattttgtgctcaatcgcacaatgagcaatttctatacaaaaaaaaaaaaaaaaaaatcgataccgtcgacctcgagggggggcccg

SEQ ID NO: 880 - protein, 89 aa, Zea mays subsp. mays
  misc_feature (1)..(89): Ceres Seq. ID no. 13599009
GMVSIHRKLHTKPLQWAFCAGHTHNHLLLPPPVPVHSSLSSALLLNTRAAVLYCTSRLWPKRLVGFCFTFSFSVTVLELGIERWCFYHP

SEQ ID NO: 881 - protein, 88 aa, Zea mays subsp. mays
  misc_feature (1)..(88): Ceres Seq. ID no. 13599010
MVSIHRKLHTKPLQWAFCAGHTHNHLLLPPPVPVHSSLSSALLLNTRAAVLYCTSRLWPKRLVGFCFTFSFSVTVLELGIERWCFYHP

SEQ ID NO: 882 - protein, 81 aa, Zea mays subsp. mays
  misc_feature (1)..(81): Ceres Seq. ID no. 13599011
WDGFHPSEAAYKAIAMGLLRGTYTQPSIASTTSSCPQLTELGSSVEYKSCGTVLHFSAVAQAIGWVLFYLLFFSHSARIRN

SEQ ID NO: 883 - protein, 66 aa, Zea mays subsp. mays
  misc_feature (1)..(66): Ceres Seq. ID no. 13599012
MGLLRGTYTQPSIASTTSSCPQLTELGSSVEYKSCGTVLHFSAVAQAIGWVLFYLLFFSHSARIRN

SEQ ID NO: 884 - DNA, 620 bp, Zea mays subsp. mays
  misc_feature (1)..(620): Ceres Seq. ID no. 13599018
tgcaggaattcgcacgagaccattacctagaacatcctaatcgaaaaaatcaattctccagaccctccccggcaaccgcgtccggccgtccgcttccgtttccttggataaccacgacgcccgcccgccccccggcaagcgaaagcgaagcgagccaacccagccatggagaaggcgatcgatcggcagcgggtcctcctggcgcacctcctcccctccccctccgccgcctcctcgcagcctcagcttgcggcgtcggcgtgcgcggccggggacagcgccgcctaccagaggtcctcctccttcggggacgatgtcgtcgtcggcgcgtgcgtgcgagcaaggagcaagagcaacggtggcgtcgtatcttcctcgcgtgcagtgtgcataataactagcccgacttcttcagctagggttcgtaatcgtagctcttagtaacagcagcatctcagttggtttatgtttgtttagtgatcagggtctgtcacgactcacgacgactttggcggtgtcggtcatgcgtgtgtgatatatagattggaacgtgtacgtgtccaccaagccgcgatctggtgtacatatactaatctacgtagcacgtacgtacctaccgt

SEQ ID NO: 885 - protein, 132 aa, Zea mays subsp. mays
  misc_feature (1)..(132): Ceres Seq. ID no. 13599019
QEFARDHYLEHPNRKNQFSRPSPATASGRPLPFPWITTTPARPPASESEASQPSHGEGDRSAAGPPGAPPPLPLRRLLAASACGVGVRGRGQRRLPEVLLLRGRCRRRRVRASKEQEQRWRRIFLACSVHNN

SEQ ID NO: 886 - protein, 91 aa, Zea mays subsp. mays
  misc_feature (1)..(91): Ceres Seq. ID no. 13599020
MEKAIDRQRVLLAHLLPSPSAASSQPQLAASACAAGDSAAYQRSSSFGDDVVVGACVRARSKSNGGVVSSSRAVCIITSPTSSARVRNRSS

SEQ ID NO: 887 - DNA, 827 bp, Zea mays subsp. mays
  misc_feature (1)..(827): Ceres Seq. ID no. 13599022
ttttcttttccatgtggactaacttgcctatttcaggttaagcaaattaagcatggcaaagaggtaaagattgacttgatggttatggaaaatcttctctttggccacaatatttcacgaatttatgacctcaaaggtgctattttttcgcgacgcatcactgactcaaacgatcatgatactgtttacctagatcaaaattatgttgaggacatgagcttttctccaatctatattggtggaagaacaaagcatcttttgcagcgtgcaatctggaatgacacgtctttcctcacttcggtgaatgttatggactattctctacttgtgggagtggacaaagagaagcatgaacttgtgtttggcatcattgattatctgaggcaatatacttaggacaaacaactggagacatgggtgaagacttctctggtagtacccaaaaatgttttaccaactgtaatttcccccaaggaatacaaaaaaaggtttaggaagttcatggcgaagtactttctgtcagttccagacacatggagtcttgataatccgtctaagccatgcaaatcccttggtcagagcaatcgcaagttggcggaagtccagattggtgataacctgtcagagcacccaaatgaagttgaggggtgtgcctaatcatgtgcaagatttcctggcaattttgttgaaccctatcatgttgttgtttggctatatttcactttgtaaaatggtgtacataggaggaccttgcggtttttaggcaaattgttgggcaagtgaggtccacatgacgtgtacctatacaaatgttcattgttgatttc

SEQ ID NO: 888 - protein, 131 aa, Zea mays subsp. mays
  misc_feature (1)..(131): Ceres Seq. ID no. 13599023
FSFPCGLTCLFQVKQIKHGKEVKIDLMVMENLLFGHNISRIYDLKGAIFSRRITDSNDHDTVYLDQNYVEDMSFSPIYIGGRTKHLLQRAIWNDTSFLTSVNVMDYSLLVGVDKEKHELVFGIIDYLRQYT

SEQ ID NO: 889 - protein, 105 aa, Zea mays subsp. mays
  misc_feature (1)..(105): Ceres Seq. ID no. 13599024
MVMENLLFGHNISRIYDLKGAIFSRRITDSNDHDTVYLDQNYVEDMSFSPIYIGGRTKHLLQRAIWNDTSFLTSVNVMDYSLLVGVDKEKHELVFGIIDYLRQYT

SEQ ID NO: 890 - protein, 103 aa, Zea mays subsp. mays
  misc_feature (1)..(103): Ceres Seq. ID no. 13599025
MENLLFGHNISRIYDLKGAIFSRRITDSNDHDTVYLDQNYVEDMSFSPIYIGGRTKHLLQRAIWNDTSFLTSVNVMDYSLLVGVDKEKHELVFGIIDYLRQYT

SEQ ID NO: 891 - DNA, 593 bp, Zea mays subsp. mays
  misc_feature (1)..(593): Ceres Seq. ID no. 13599038
agctacttgcatctcaacttcgtgcgtgcataataaaacctaatcatcggcacttcccgttcctctagctaggctctatagcttccgcctttaattcccccatcagaccagtcatcgtcccctcggccgccggcgagctcttcgtcttcccgtgtgatccttccttcccatccggtccggcctagactagatctgagagacacaaggagggatggggagggggaagatagtgataaggaggatagacaactccacgagcaggcaggttaccttctccaagaggcggagcgggctgctgaagaaggcgaaggagctctctatcctctgcgacgcggaggttggcctcatcatcttctccagcaccggcaggctctacgatttctccaacaccaacatgaaagctgtgatagaccgatatgggaaggcaaaagacgagcagcttggcaagaacgatgcaacttcagaactcatggtacggtgaggaaaatgtacctatttctagctaactagcagttggtagtacacacgtgccatatgatgtatgtggtcggaccaagatcaggagtttagtcctttattactcacaaatactg

SEQ ID NO: 892 - protein, 89 aa, Zea mays subsp. mays
  misc_feature (1)..(89): Ceres Seq. ID no. 13599039
MGRGKIVIRRIDNSTSRQVTFSKRRSGLLKKAKELSILCDAEVGLIIFSSTGRLYDFSNTNMKAVIDRYGKAKDEQLGKNDATSELMVR

SEQ ID NO: 893 - DNA, 997 bp, Zea mays subsp. mays
  misc_feature (1)..(997): Ceres Seq. ID no. 13599044
tacgtaggcccccccccagttagtgctgtttcaattagaaggattccaagggttccttcagacatgcctctgtatgatatactgaatgagtttcagaaaggaagtagtcatatggctgctgttgtgaaggctaaacccaaaactgaaccaccccttgacaaaactgaaccaaacagggaagcagttggaccaacacaattgactgttcccttgttatctaatgctgaagaaagtgcagacaatgtggttgtggatatcgaaagaccacataacaggcagattaatgggaacacagcatcaaacgcagtgcctaggtcatcagaggatattgaggatggtgaggtcgttggaatcatcacacttgaggatgtattcgaagaactcctacaggaggaaatcgtggacgagactgatgaatatgttgatgtccataaaaggatccgagtagctgctgctgctgccgcatcatcggttgcaagggctccatccgttaggagattaacgggccaaaaggctgcaaaccttcagggagcacagaatcgccaaggacagcaacctcctggaattctcaagaaacctactgagggtgattcaaacccatcaaaacaagtgaaccttatggaacctcttctggaaaaggggaggtaactctaatggaacctcttctggaaaagaggaactctaaaatgcattgcgcaacgtagggaaccatgctggaagagcctatggttcttgctatattgtagcaagaggtaaatagagatgaactcattgttgcaaattccaacatgagcgaccgagcgatgtggttttggtgtcattatggacattacattagtgttgaattctttggatccccctccctttttttttgtgttttgggcttcgaaagtagagtcgccatttttgaatgtcaccgctaaccgcagtagcaagttagcaactgctttatatatatgtgcttcaaattcacaataaagttggaactggaggggtg

SEQ ID NO: 894 - protein, 215 aa, Zea mays subsp. mays
  misc_feature (1)..(215): Ceres Seq. ID no. 15222498
YVGPPPVSAVSIRRIPRVPSDMPLYDILNEFQKGSSHMAAVVKAKPKTEPPLDKTEPNREAVGPTQLTVPLLSNAEESADNVVVDIERPHNRQINGNTASNAVPRSSEDIEDGEVVGIITLEDVFEELLQEEIVDETDEYVDVHKRIRVAAAAAASSVARAPSVRRLTGQKAANLQGAQNRQGQQPPGILKKPTEGDSNPSKQVNLMEPLLEKGR

SEQ ID NO: 895 - protein, 194 aa, Zea mays subsp. mays
  misc_feature (1)..(194): Ceres Seq. ID no. 15222499
MPLYDILNEFQKGSSHMAAVVKAKPKTEPPLDKTEPNREAVGPTQLTVPLLSNAEESADNVVVDIERPHNRQINGNTASNAVPRSSEDIEDGEVVGIITLEDVFEELLQEEIVDETDEYVDVHKRIRVAAAAAASSVARAPSVRRLTGQKAANLQGAQNRQGQQPPGILKKPTEGDSNPSKQVNLMEPLLEKGR

SEQ ID NO: 896 - protein, 178 aa, Zea mays subsp. mays
  misc_feature (1)..(178): Ceres Seq. ID no. 15222500
MAAVVKAKPKTEPPLDKTEPNREAVGPTQLTVPLLSNAEESADNVVVDIERPHNRQINGNTASNAVPRSSEDIEDGEVVGIITLEDVFEELLQEEIVDETDEYVDVHKRIRVAAAAAASSVARAPSVRRLTGQKAANLQGAQNRQGQQPPGILKKPTEGDSNPSKQVNLMEPLLEKGR

SEQ ID NO: 897 - DNA, 896 bp, Zea mays subsp. mays
  misc_feature (1)..(896): Ceres Seq. ID no. 13599045
cccgctctgttgatcctgtaacaatgtcaataacgattttcctgagacattttgacattggcattgatgttgcactgttatctcagtacatatctttgatgttcatagggatgttggttgtcatatctgttcgaggtttcttggcaaatgttatgaagttcttcttcgctgtttctagagtcgggagtgggtcgacaaccaatgttgtcctcttcctatcagagatcatgggaatgtacttcatatcttccattcttcttataagaaaaagcctggcaaatgaatatagggtgatcattactgatgtcttgggtggtgatattcaatttgacttctaccatcgctggtttgatgctatatttgtggctagtgcgttcctgtccttgcttctgatatctgcccaatacaccactaggcaaacagacaagcatccgattgactgatgcatcttgcccacatgtgtgcatgttgtctttttaaccactattcatccaaggttgacccattctttgtaccgcagtttccaaaggcactgtttctccatacacttccatacacagttacaaagcataatacgtcagttaacttgaacaaagtctctattttgtaatatgtttcccgattgcattggtttatggtaaacagttcctccaacagcgactatctgagtcacgtctggtgatgcagtgacgggacacgggattcattgtaacgcagtctgcacgatactacattttgactaggacaattgtggaagcccatattaggaattgattttgactttgtaaaatagcttgaaactagtgtcctaggaccgtagcacggtatgttggtgtatcttatatattattttggcaaaaaaaaaaaaaaaaaagaattcctgcagcccgggggat

SEQ ID NO: 898 - protein, 146 aa, Zea mays subsp. mays
  misc_feature (1)..(146): Ceres Seq. ID no. 15222501
RSVDPVTMSITIFLRHFDIGIDVALLSQYISLMFIGMLVVISVRGFLANVMKFFFAVSRVGSGSTTNVVLFLSEIMGMYFISSILLIRKSLANEYRVIITDVLGGDIQFDFYHRWFDAIFVASAFLSLLLISAQYTTRQTDKHPID

SEQ ID NO: 899 - protein, 139 aa, Zea mays subsp. mays
  misc_feature (1)..(139): Ceres Seq. ID no. 15222502
MSITIFLRHFDIGIDVALLSQYISLMFIGMLVVISVRGFLANVMKFFFAVSRVGSGSTTNVVLFLSEIMGMYFISSILLIRKSLANEYRVIITDVLGGDIQFDFYHRWFDAIFVASAFLSLLLISAQYTTRQTDKHPID

SEQ ID NO: 900 - protein, 114 aa, Zea mays subsp. mays
  misc_feature (1)..(114): Ceres Seq. ID no. 15222503
MFIGMLVVISVRGFLANVMKFFFAVSRVGSGSTTNVVLFLSEIMGMYFISSILLIRKSLANEYRVIITDVLGGDIQFDFYHRWFDAIFVASAFLSLLLISAQYTTRQTDKHPID

SEQ ID NO: 901 - DNA, 545 bp, Zea mays subsp. mays
  misc_feature (1)..(545): Ceres Seq. ID no. 13599046
tggagcttttaactggccgctcagtttttcatgttgcgacacaatgtggcccgaggagcgcagttagatgggtacatatgccagcattcacttttctagttttcttataggacgcagcagctaatttgcttatcctaaggtgcaggctaaaccaatgcttagtcaagacaaggtggaacagtgcatagatccaaggcttggaggagggtacctactaaacgatgtcagaaagatggcttctgttgctgcactgtgtttacaagacgagccagagttccggcctgaaatgagcatcgtcgtcgaggctctgagcctgttactgaacagcaagtgaacaagtaaccgtccctgcattggtgaagcacgtggaatgtgatttccttgcatgtcattgcgagctcaagatcacgggtttcgtgaaggcgattggcccccaacagaaagttatgattactgcattcatctaggcttggaacttgtgctttctttgtctgtgcacatgtaatactcaaaattctaaataaagaatatagagagatcttctc

SEQ ID NO: 902 - protein, 59 aa, Zea mays subsp. mays
  misc_feature (1)..(59): Ceres Seq. ID no. 13599047
MLSQDKVEQCIDPRLGGGYLLNDVRKMASVAALCLQDEPEFRPEMSIVVEALSLLLNSK

SEQ ID NO: 903 - protein, 39 aa, Zea mays subsp. mays
  misc_feature (1)..(39): Ceres Seq. ID no. 13599048
MSLRAQDHGFREGDWPPTESYDYCIHLGLELVLSLSVHM

SEQ ID NO: 904 - protein, 35 aa, Zea mays subsp. mays
  misc_feature (1)..(35): Ceres Seq. ID no. 13599049
ELLTGRSVFHVATQCGPRSAVRWVHMPAFTFLVFL

SEQ ID NO: 905 - DNA, 895 bp, Zea mays subsp. mays
  misc_feature (1)..(895): Ceres Seq. ID no. 13599062
aatttggttgccttggtatgtcagaggtttggtcatgtctatcacaaccttcaaaatcggttaactaaaacattgatccatgcatttcttgatcctgccaaatcactgacacaacattatggtgctgtccaagggatatctgcactggggcccagcgcgattagactccttcttttgcccaaccttgtgacatatatgcaacttctggagccggaactgcagcttgagaagcagaaaaacgagatgaaaaggaaggaagcttggcgtgtttatggtgccttgctgtgtgctgcaggcaaatgcttgtatgatcggttgaaactatttcctggtttgctttctccgtcgatgcggcctcttttacagagcaacaaaagggtcttaaccaacaacccaaataagcgaaaatctagcacagatctctctgcaactcagccacctctgaagaagatggcaacggacgcaacagccaactccatggcctcagcttccatgggaggaaacatgcaaggtgccatggatggctttcccaaccagttaggcaaccctggcatgatgcaggcctcgtcctctgggcagacggtggagagcatcccatcagctgcggtccggagggatcagggcagtgatctcgcgcagagagtttctgcagtgcttaggcaagcctggaaggaggaccaggacaccggtcatctcttggggtctctgtacgaggtcttcggggaagccatcttctcctttgtccaaccaccagagatatccttgtttgtgtagagagagagagagagaggaaatgcatagactctaggttttattattctacgctgttgtacaactagggatgttttgaagagttcacgaaacccggtttgacattgtcaaagtaatgtgactg

SEQ ID NO: 906 - protein, 257 aa, Zea mays subsp. mays
  misc_feature (1)..(257): Ceres Seq. ID no. 13599063
NLVALVCQRFGHVYHNLQNRLTKTLIHAFLDPAKSLTQHYGAVQGISALGPSAIRLLLLPNLVTYMQLLEPELQLEKQKNEMKRKEAWRVYGALLCAAGKCLYDRLKLFPGLLSPSMRPLLQSNKRVLTNNPNKRKSSTDLSATQPPLKKMATDATANSMASASMGGNMQGAMDGFPNQLGNPGMMQASSSGQTVESIPSAAVRRDQGSDLAQRVSAVLRQAWKEDQDTGHLLGSLYEVFGEAIFSFVQPPEISLFV

SEQ ID NO: 907 - protein, 192 aa, Zea mays subsp. mays
  misc_feature (1)..(192): Ceres Seq. ID no. 13599064
MQLLEPELQLEKQKNEMKRKEAWRVYGALLCAAGKCLYDRLKLFPGLLSPSMRPLLQSNKRVLTNNPNKRKSSTDLSATQPPLKKMATDATANSMASASMGGNMQGAMDGFPNQLGNPGMMQASSSGQTVESIPSAAVRRDQGSDLAQRVSAVLRQAWKEDQDTGHLLGSLYEVFGEAIFSFVQPPEISLFV

SEQ ID NO: 908 - protein, 176 aa, Zea mays subsp. mays
  misc_feature (1)..(176): Ceres Seq. ID no. 13599065
MKRKEAWRVYGALLCAAGKCLYDRLKLFPGLLSPSMRPLLQSNKRVLTNNPNKRKSSTDLSATQPPLKKMATDATANSMASASMGGNMQGAMDGFPNQLGNPGMMQASSSGQTVESIPSAAVRRDQGSDLAQRVSAVLRQAWKEDQDTGHLLGSLYEVFGEAIFSFVQPPEISLFV

SEQ ID NO: 909 - DNA, 1453 bp, Zea mays subsp. mays
  misc_feature (1)..(1453): Ceres Seq. ID no. 13599066
agacttttctggaaggaataggggcaagcagcaagtcctatcccaaccctaaccctaacttcgaaccttcgtcctttctctcttcttccttcagattcatccgtaccgttagttactactggattcgcggttgattgctgctaccgggtttctcctctttcacgtataagatgcacttccggtcatcattttaccaacatgcagattttgagttggtttctgaatataaatggacgccaaacggttcatccagctggttgaggagaagaagaagaaaattatggagagaaaggaagctcctttgaaatgggagcagaagctggaagctgctgctgaagctaaagagaggaagctgaaggttgcaaagcatacaaaaagatctggctctgatagtgacagcgattattacagtgatgatgagagtagaaagacaagtaaaagatctcacaggaagcacagaaagcattctcactacgactctggtgaccatgagaaaaggaaagaaaaaagttccaaacggaaaacaaagaaatggtcctctgaatctagtgattatagtagtgatgactctgagagtagctttgaggaggagagaagaagaaagaagaagcaaagcaagaagctgagagatcggggttcaagatcagattctagcaactatgattctactgctgatgaattaagcaagaggaaaagacagcacaaacggcaacgcccatcaaaatttagtggatcagactactctactgatgaaggagatagtctagttcagaaaagaaatcatggaatgcatagcaaacgccatcgacaatcagaatctagtgaatctgacttgtcaagtgatgacgctccccataagaaaggccacagaaagcaccataaacatcacaagcgatcacataatgtggagctgaggttgtctgattctgattatcgcagtcatggtcaaagaagcagatcaaagtcattggaagaaaattctgaagatgaaagcaaaaaaagatcaatggataagaagtctggtcgccatcaccaccatcgtcaccaccaccatcgccaccaccaccatcgccaccacttggatgatgagagaaactacatgcagcaacactctcctaaattcaatggaaagcatggcgaggagttagacaaaactgaaactgagaaaaaggatggtggtcatcatgaaagtagagctatggttgagaataatgatggtcaaattttttgatttttgagaatctgtcctgctatctgtttgtggtgcttttgtactggaattggtaacttactatttgatattcaaattaaagttaaaggaacaatttcattatttatgtcggttgtaatattggcggcagttattgacactattgaaactttgttgggtcattgttggctgatgacattaagttgatccttattcatctataaacagttgtatttgaagttc

SEQ ID NO: 910 - protein, 333 aa, Zea mays subsp. mays
  misc_feature (1)..(333): Ceres Seq. ID no. 15222504
MDAKRFIQLVEEKKKKIMERKEAPLKWEQKLEAAAEAKERKLKVAKHTKRSGSDSDSDYYSDDESRKTSKRSHRKHRKHSHYDSGDHEKRKEKSSKRKTKKWSSESSDYSSDDSESSFEEERRRKKKQSKKLRDRGSRSDSSNYDSTADELSKRKRQHKRQRPSKFSGSDYSTDEGDSLVQKRNHGMHSKRHRQSESSESDLSSDDAPHKKGHRKHHKHHKRSHNVELRLSDSDYRSHGQRSRSKSLEENSEDESKKRSMDKKSGRHHHHRHHHHRHHHHRHHLDDERNYMQQHSPKFNGKHGEELDKTETEKKDGGHHESRAMVENNDGQIF

SEQ ID NO: 911 - protein, 316 aa, Zea mays subsp. mays
  misc_feature (1)..(316): Ceres Seq. ID no. 15222505
MERKEAPLKWEQKLEAAAEAKERKLKVAKHTKRSGSDSDSDYYSDDESRKTSKRSHRKHRKHSHYDSGDHEKRKEKSSKRKTKKWSSESSDYSSDDSESSFEEERRRKKKQSKKLRDRGSRSDSSNYDSTADELSKRKRQHKRQRPSKFSGSDYSTDEGDSLVQKRNHGMHSKRHRQSESSESDLSSDDAPHKKGHRKHHKHHKRSHNVELRLSDSDYRSHGQRSRSKSLEENSEDESKKRSMDKKSGRHHHHRHHHHRHHHHRHHLDDERNYMQQHSPKFNGKHGEELDKTETEKKDGGHHESRAMVENNDGQIF

SEQ ID NO: 912 - DNA, 604 bp, Zea mays subsp. mays
  misc_feature (1)..(604): Ceres Seq. ID no. 13599067
cgaaataaatgccaaagcagccccagatttggccaagtgcctagcggcaatgcagtcactcaagaagctgactttggctgaaaatgaactgaaggatgatggtgccgtgataatcgcaaaatcattggaagatggccacatagatctcaaggagcttgatgttagcgtgaacatgctgcagagggttggagctcggtgctttgcgcgggcagtcgctaataaaccggcttttgagctgctgaacatcaatggaaatttcatctctggtgaagggatcgatgaggtggaggaaatcttgaaggctggtaagaaacccctgaaagtgctgggcccactagatgagaatgagcctgatggagagcctgatgatgacgatgaagaggttgaggataatgaggacgagctgaattcgaagctgcagagtgtgaaggttgagcaggatgattgaccgagttggtatcgagatataagcctgtcgcagggtcttgataactgagttatctacaatgctgttgatctttggttttgtagtcggtttttgttatgaaaaaccagaaccagctatcttgtgacttgtgcaatctgattatagattagaactgct

SEQ ID NO: 913 - protein, 148 aa, Zea mays subsp. mays
  misc_feature (1)..(148): Ceres Seq. ID no. 13599068
EINAKAAPDLAKCLAAMQSLKKLTLAENELKDDGAVIIAKSLEDGHIDLKELDVSVNMLQRVGARCFARAVANKPAFELLNINGNFISGEGIDEVEEILKAGKKPLKVLGPLDENEPDGEPDDDDEEVEDNEDELNSKLQSVKVEQDD

SEQ ID NO: 914 - protein, 132 aa, Zea mays subsp. mays
  misc_feature (1)..(132): Ceres Seq. ID no. 13599069
MQSLKKLTLAENELKDDGAVIIAKSLEDGHIDLKELDVSVNMLQRVGARCFARAVANKPAFELLNINGNFISGEGIDEVEEILKAGKKPLKVLGPLDENEPDGEPDDDDEEVEDNEDELNSKLQSVKVEQDD

SEQ ID NO: 915 - protein, 91 aa, Zea mays subsp. mays
  misc_feature (1)..(91): Ceres Seq. ID no. 13599070
MLQRVGARCFARAVANKPAFELLNINGNFISGEGIDEVEEILKAGKKPLKVLGPLDENEPDGEPDDDDEEVEDNEDELNSKLQSVKVEQDD

SEQ ID NO: 916 - DNA, 898 bp, Zea mays subsp. mays
  misc_feature (1)..(898): Ceres Seq. ID no. 13599083
aaaagtagggctagaaaagctatatatacctggcgtgaaatctcactccagtcctctctcgatctaccttgatctttgatttcatttgtttctcaattctttgttaatttatatggctaatcgtacagtgttttgcaggtgagtgtcccggggaacagcatgctcagcatggtgacagttcggtgtgggcactgcacaaatctactgtcagtgaatctgagagcactcatgcactcagtcccagaacaagatcagctccagcaggagaacatcagggtccatggcacgttgcgtgagcatcatcagtgcggcggcggccaccatctggagctgggctcttcgtcgtcctcaaggttccggctgccgatgatgatgtcgtacgcgccgcagaacgagcacttgctgcaggaacagacactgaacaacgctcgtccggctcctgagaagaggcagcgggttccgtcggcgtataacagattcatcaaggaagagattcgcaggatcaaggcgaacaaccccgacattagccacagggaagccttcagcacagcagccaagaactgggcacattatccgaacatccatttcgacttaaactccggccgagagggtggcaagaataagctcgtggacgaggctgtcgcggcggtggcggtggctccgaagaagatccaaggtttctactgatcgatgccggtcgatcgagggatcagcgctcgtcgtcatcaactggccggccgggtgtggaagaattaataataccacacaaattataaatgtactgtgatgagtaaattaaagagttatagtggggaatgaagggagagagagatatatagcaatacgtatattaccttaccttattaatgagtgcaaaaaaacacttgtgaaggtttct

SEQ ID NO: 917 - protein, 175 aa, Zea mays subsp. mays
  misc_feature (1)..(175): Ceres Seq. ID no. 13599084
MLSMVTVRCGHCTNLLSVNLRALMHSVPEQDQLQQENIRVHGTLREHHQCGGGHHLELGSSSSSRFRLPMMMSYAPQNEHLLQEQTLNNARPAPEKRQRVPSAYNRFIKEEIRRIKANNPDISHREAFSTAAKNWAHYPNIHFDLNSGREGGKNKLVDEAVAAVAVAPKKIQGFY

SEQ ID NO: 918 - protein, 172 aa, Zea mays subsp. mays
  misc_feature (1)..(172): Ceres Seq. ID no. 13599085
MVTVRCGHCTNLLSVNLRALMHSVPEQDQLQQENIRVHGTLREHHQCGGGHHLELGSSSSSRFRLPMMMSYAPQNEHLLQEQTLNNARPAPEKRQRVPSAYNRFIKEEIRRIKANNPDISHREAFSTAAKNWAHYPNIHFDLNSGREGGKNKLVDEAVAAVAVAPKKIQGFY

SEQ ID NO: 919 - protein, 152 aa, Zea mays subsp. mays
  misc_feature (1)..(152): Ceres Seq. ID no. 13599086
MHSVPEQDQLQQENIRVHGTLREHHQCGGGHHLELGSSSSSRFRLPMMMSYAPQNEHLLQEQTLNNARPAPEKRQRVPSAYNRFIKEEIRRIKANNPDISHREAFSTAAKNWAHYPNIHFDLNSGREGGKNKLVDEAVAAVAVAPKKIQGFY

SEQ ID NO: 920 - DNA, 608 bp, Zea mays subsp. mays
  misc_feature (1)..(608): Ceres Seq. ID no. 13599095
gtccgcgaatccgtaaatggaaggggacgaaatgctcagggtgaagctcggcaggcagggccttgaggtgtccaagcttggcttcgggtgcatgggcctcactggagtgtacaacgccccagttcctgaccaagctgggatcgacataatcaagcacgcgtttgaggccggcatcaccttcttcgacaccgctgatgcctatgggccacacaccaacgaggtcctgctcggaaaggtaaccttcagagcaacatattggtgccgcttctggtctcagcttcagcctagaagggaggaccaagagttaataaagtcttcatgtcgtaatgtggagagggtgctactacagttctttagcaattttggatgggggtctgtgttgcgtttaaatatgtagtagctgtggttcggtagctgaagttctttaatttggctagttggggttctctgaagtggtcataggaggagctttggcaatatgcctccgttccttgtaataaatggccgtaacctcatttgaggccaaggtcggatgatttttccattatctaaaaaaaacaaccccttgaactcaaggtggatcaatcacactgagtttagggagatgg

SEQ ID NO: 921 - protein, 126 aa, Zea mays subsp. mays
  misc_feature (1)..(126): Ceres Seq. ID no. 15222506
MEGDEMLRVKLGRQGLEVSKLGFGCMGLTGVYNAPVPDQAGIDIIKHAFEAGITFFDTADAYGPHTNEVLLGKVTFRATYWCRFWSQLQPRREDQELIKSSCRNVERVLLQFFSNFGWGSVLRLNM

SEQ ID NO: 922 - protein, 121 aa, Zea mays subsp. mays
  misc_feature (1)..(121): Ceres Seq. ID no. 15222507
MLRVKLGRQGLEVSKLGFGCMGLTGVYNAPVPDQAGIDIIKHAFEAGITFFDTADAYGPHTNEVLLGKVTFRATYWCRFWSQLQPRREDQELIKSSCRNVERVLLQFFSNFGWGSVLRLNM

SEQ ID NO: 923 - protein, 101 aa, Zea mays subsp. mays
  misc_feature (1)..(101): Ceres Seq. ID no. 15222508
MGLTGVYNAPVPDQAGIDIIKHAFEAGITFFDTADAYGPHTNEVLLGKVTFRATYWCRFWSQLQPRREDQELIKSSCRNVERVLLQFFSNFGWGSVLRLNM

SEQ ID NO: 924 - DNA, 617 bp, Zea mays subsp. mays
  misc_feature (1)..(617): Ceres Seq. ID no. 13599101
aaaaacaaccgaaccgaggaatgggtttcacaagcaagctaaagcgctcgaggcatggtgtgtccatgaagctccgagtccgtgatccgaggccaacgcagacagtccaagatggactcagtttcgtggcgagcttgaagcgcgtgttcgcctgcgagcctgacaagtacgacgagatcatcgccaccatgcgccagttcaagtccgggagcattcgtagtgcggttgtggttgagcgtgtgaaggtgcttctggaaggtcaccctggtctcctccgccacttcaaccagttcctgccatggggttacataagggctcatggaccagtcgggaggatcagcgtctgatgcagccagggcagggaagcgcgtgtggctacctaaacaagcctaaacctactagctggtgctttccatcgcatgaatggcagaatgggacaagagtatctggttggcccgtcatgactgctattctgcattggcagtaccattaagaacatgtaatgctaaacatcagaccggccgtatctttcttgcattatgtcatgtctgttccataatggtgaagccacctgactggcatcttctatatatcatgtatatatgcatgttcttgtc

SEQ ID NO: 925 - protein, 114 aa, Zea mays subsp. mays
  misc_feature (1)..(114): Ceres Seq. ID no. 15222512
KQPNRGMGFTSKLKRSRHGVSMKLRVRDPRPTQTVQDGLSFVASLKRVFACEPDKYDEIIATMRQFKSGSIRSAVVVERVKVLLEGHPGLLRHFNQFLPWGYIRAHGPVGRISV

SEQ ID NO: 926 - protein, 108 aa, Zea mays subsp. mays
  misc_feature (1)..(108): Ceres Seq. ID no. 15222513
MGFTSKLKRSRHGVSMKLRVRDPRPTQTVQDGLSFVASLKRVFACEPDKYDEIIATMRQFKSGSIRSAVVVERVKVLLEGHPGLLRHFNQFLPWGYIRAHGPVGRISV

SEQ ID NO: 927 - protein, 93 aa, Zea mays subsp. mays
  misc_feature (1)..(93): Ceres Seq. ID no. 15222514
MKLRVRDPRPTQTVQDGLSFVASLKRVFACEPDKYDEIIATMRQFKSGSIRSAVVVERVKVLLEGHPGLLRHFNQFLPWGYIRAHGPVGRISV

SEQ ID NO: 928 - DNA, 1079 bp, Zea mays subsp. mays
  misc_feature (1)..(1079): Ceres Seq. ID no. 13599102
accgcagcccgccccactaactattgactgtcggattccctacccgtcggcgacaatccgctgcccccaatctgcctggtaggtctcgcacctccggtcatggctgccgaagctggcccaatctccaaggtcctcatcgtcatagcaatgcagaaggaggcgacgccgctcgtccacaagttcaatctcgtcgaggcgcccgcccaccaatccacttttcctaaaggtgccccatgggtttggtaccatggcagctacaaaggcctccacattgaccttgtattgcctggaatggatgctgttcttggagtcgacagtgttggtacagtaccagtagctgttgtgactagtttctccattcaaacattgaagccagaccttatcattaatgcgggcactgctggtggcttcaaggccaaaggagcaagcattactgatgtattccttgcatcagatgttgcattccatgacaggaggataccaatacctatttttgacatgtatggaactggagcacgcaaaacttttgcagctcctaatatcttgaaggagctcaatttgaaggttggcaagttgtcgactggggattctctggatatgtgtccccaggataaggagttgatactgcgcaatgatgctacaataaaggacatggagggagctgctgtagcatatgtcgctgacatgttctcgacaccagcgatctttgtgaaagctgtgactgatatcgtggatggggtgaagccaacgtatgaggagtttctgcagaacctgattgccgtgacgacggcactggagctggcagtcaccaaagtggtggatttcatcagcgggaaacgcatctccgatctttgaaagctcgtggtcacgaaatccaacatccccctgctctgatgcacgatgctaggctaggatacaatacaacgttgggtcaatgattttttttggaggtgttctatacgtgaggttttaccccttttgcaatggctcttgatctattcctgaataccgaccagagcagttgtctcttgctaaacagaaggaatgtaaagtgagcaaacatgccattgatcgttgcg

SEQ ID NO: 929 - protein, 251 aa, Zea mays subsp. mays
  misc_feature (1)..(251): Ceres Seq. ID no. 13599103
MAAEAGPISKVLIVIAMQKEATPLVHKFNLVEAPAHQSTFPKGAPWVWYHGSYKGLHIDLVLPGMDAVLGVDSVGTVPVAVVTSFSIQTLKPDLIINAGTAGGFKAKGASITDVFLASDVAFHDRRIPIPIFDMYGTGARKTFAAPNILKELNLKVGKLSTGDSLDMCPQDKELILRNDATIKDMEGAAVAYVADMFSTPAIFVKAVTDIVDGVKPTYEEFLQNLIAVTTALELAVTKVVDFISGKRISDL

SEQ ID NO: 930 - protein, 235 aa, Zea mays subsp. mays
  misc_feature (1)..(235): Ceres Seq. ID no. 13599104
MQKEATPLVHKFNLVEAPAHQSTFPKGAPWVWYHGSYKGLHIDLVLPGMDAVLGVDSVGTVPVAVVTSFSIQTLKPDLIINAGTAGGFKAKGASITDVFLASDVAFHDRRIPIPIFDMYGTGARKTFAAPNILKELNLKVGKLSTGDSLDMCPQDKELILRNDATIKDMEGAAVAYVADMFSTPAIFVKAVTDIVDGVKPTYEEFLQNLIAVTTALELAVTKVVDFISGKRISDL

SEQ ID NO: 931 - protein, 187 aa, Zea mays subsp. mays
  misc_feature (1)..(187): Ceres Seq. ID no. 13599105
MDAVLGVDSVGTVPVAVVTSFSIQTLKPDLIINAGTAGGFKAKGASITDVFLASDVAFHDRRIPIPIFDMYGTGARKTFAAPNILKELNLKVGKLSTGDSLDMCPQDKELILRNDATIKDMEGAAVAYVADMFSTPAIFVKAVTDIVDGVKPTYEEFLQNLIAVTTALELAVTKVVDFISGKRISDL

SEQ ID NO: 932 - DNA, 789 bp, Zea mays subsp. mays
  misc_feature (1)..(789): Ceres Seq. ID no. 13599127
acaagaaaccaaaccgtgacgcagcacagccatggggaagcagctctgcgacatgcaccgctcgcgccgccgcgcccgcatcgtcgccgccgccctcctctccgccttcgccgccgccgccgccgcgctcacggtgtacctcgtcttccgtccgctgaagccgcaggcctccgtggtgcgcgtcgccgtgtaccgcatggccacggccgccgggaactcctcggaggggcgggccccgccgccgtacacgctcgcggcgagcgcgcggttcacggcgctgctgcacaacccgagcgaccgcgccgtggtgttctacgacggcctcttcgcctacgtgacgtaccgcggggagatggtggcgccccccgcgccgctgcccggggtggcccagggccgcggcgccgacgtggcgctgtcgccgcatttcggccttcgcggcgcggtgcccgtgccggtgtcggcagacgcggcacaagcgctggagggagactgcgcggcgggccgcgtggagctacgcctcgtcgtcatgggccgggtcaagtacatgagcgggccattcaggaccggatggcgcgggctatacctgcgctgcgatgtcaccgtcggcctcggggtggacgccaccgcgggcgacgacggagccggggacgtgccactgctcgagtaccccaagtgctccgtcgacgcttgagttgatccttgatcggcgcaatgcatgagcgctcagatgatcagattttcagaattctggtggagaataaggaattgggaaaagcatttttctgtgtc

SEQ ID NO: 933 - protein, 231 aa, Zea mays subsp. mays
  misc_feature (1)..(231): Ceres Seq. ID no. 13599128
TRNQTVTQHSHGEAALRHAPLAPPRPHRRRRPPLRLRRRRRRAHGVPRLPSAEAAGLRGARRRVPHGHGRRELLGGAGPAAVHARGERAVHGAAAQPERPRRGVLRRPLRLRDVPRGDGGAPRAAARGGPGPRRRRGAVAAFRPSRRGARAGVGRRGTSAGGRLRGGPRGATPRRHGPGQVHERAIQDRMARAIPALRCHRRPRGGRHRGRRRSRGRATARVPQVLRRRLS

SEQ ID NO: 934 - protein, 219 aa, Zea mays subsp. mays
  misc_feature (1)..(219): Ceres Seq. ID no. 13599129
MGKQLCDMHRSRRRARIVAAALLSAFAAAAAALTVYLVFRPLKPQASVVRVAVYRMATAAGNSSEGRAPPPYTLAASARFTALLHNPSDRAVVFYDGLFAYVTYRGEMVAPPAPLPGVAQGRGADVALSPHFGLRGAVPVPVSADAAQALEGDCAAGRVELRLVVMGRVKYMSGPFRTGWRGLYLRCDVTVGLGVDATAGDDGAGDVPLLEYPKCSVDA

SEQ ID NO: 935 - protein, 212 aa, Zea mays subsp. mays
  misc_feature (1)..(212): Ceres Seq. ID no. 13599130
MHRSRRRARIVAAALLSAFAAAAAALTVYLVFRPLKPQASVVRVAVYRMATAAGNSSEGRAPPPYTLAASARFTALLHNPSDRAVVFYDGLFAYVTYRGEMVAPPAPLPGVAQGRGADVALSPHFGLRGAVPVPVSADAAQALEGDCAAGRVELRLVVMGRVKYMSGPFRTGWRGLYLRCDVTVGLGVDATAGDDGAGDVPLLEYPKCSVDA

SEQ ID NO: 936 - DNA, 1223 bp, Zea mays subsp. mays
  misc_feature (1)..(1223): Ceres Seq. ID no. 13599131
ataacccccaccccagccgaagccatccgatacgggagggcccatccagcggcccaggtcacgctctcacgccacgcacgcatgctcccccgcctgctcaacgggccccaccgcctgctccttggcgggccccacgcctcgggcgccgcgcccctccaccgccgccgcgtcctcgccggccgccgggccatgtccgcctccgcctcgcccgcgcccgcgcccgggcagaagcgtccgctgcgcggggtggtcttcgacatggacggcaccctcacggtgccagtcatcgatttcccggccatgtaccgcgaggtgctcggcggggacgccgcctacgccgcggcgcgcggcgcggggggaggctccgtcgacatcctccactgcatcgaggactgggcgcccgacaagcagcgccacgcgtacgaggtcatcgcgcgcttcgagcgggagggcctcgaccgcctccagatcatgcccggggcctcggagctgtgtggcttcctggacgcgaagcagatcagaagaggtttgatcacccgtaatgtgaaggacgcagttgatttgttccaccaaagatttggtatgacgttcactcctgcactgagcagagaatttcgcccctataaaccaaatcctgctccactgcttcacatatgctccgcttggaacattccaccacacgaagtgatcatggttggcgacagtctcaaggatgatgttgtttgtggaaagagggcaggagctttcacttgcttgcttgatgaaacggggcgatatggtcctcacgattctttacctgaggaagtaaaacctgacttcaaggtgtcctcactgacagaagtattcgctgtgctggaggagcacttcgatttggcaccagtgcctgacgagagtagaatatgacagggaagttttattggacctcccttctaaggtgaaatcggctacccaaccaacagcttgaataatgtggatgacgttgatgggactttcaagtatcagaagcccctgctagatgagcctgcagccagagcccagaaggacgatggctgttccaaaggtggattgaatgtatttggaaaggcaatgaagtgattcagttcgttgtaaatctattatattatgttgccccagactaaaccagcttgtgtggtttagtgactgaaatgaccacacgtatctggagattcagaatataacaatcgatttccacgggagggggg

SEQ ID NO: 937 - protein, 300 aa, Zea mays subsp. mays
  misc_feature (1)..(300): Ceres Seq. ID no. 15222518
ITPTPAEAIRYGRAHPAAQVTLSRHARMLPRLLNGPHRLLLGGPHASGAAPLHRRRVLAGRRAMSASASPAPAPGQKRPLRGVVFDMDGTLTVPVIDFPAMYREVLGGDAAYAAARGAGGGSVDILHCIEDWAPDKQRHAYEVIARFEREGLDRLQIMPGASELCGFLDAKQIRRGLITRNVKDAVDLFHQRFGMTFTPALSREFRPYKPNPAPLLHICSAWNIPPHEVIMVGDSLKDDVVCGKRAGAFTCLLDETGRYGPHDSLPEEVKPDFKVSSLTEVFAVLEEHFDLAPVPDESRI

SEQ ID NO: 938 - protein, 273 aa, Zea mays subsp. mays
  misc_feature (1)..(273): Ceres Seq. ID no. 15222519
MLPRLLNGPHRLLLGGPHASGAAPLHRRRVLAGRRAMSASASPAPAPGQKRPLRGVVFDMDGTLTVPVIDFPAMYREVLGGDAAYAAARGAGGGSVDILHCIEDWAPDKQRHAYEVIARFEREGLDRLQIMPGASELCGFLDAKQIRRGLITRNVKDAVDLFHQRFGMTFTPALSREFRPYKPNPAPLLHICSAWNIPPHEVIMVGDSLKDDVVCGKRAGAFTCLLDETGRYGPHDSLPEEVKPDFKVSSLTEVFAVLEEHFDLAPVPDESRI

SEQ ID NO: 939 - protein, 237 aa, Zea mays subsp. mays
  misc_feature (1)..(237): Ceres Seq. ID no. 15222520
MSASASPAPAPGQKRPLRGVVFDMDGTLTVPVIDFPAMYREVLGGDAAYAAARGAGGGSVDILHCIEDWAPDKQRHAYEVIARFEREGLDRLQIMPGASELCGFLDAKQIRRGLITRNVKDAVDLFHQRFGMTFTPALSREFRPYKPNPAPLLHICSAWNIPPHEVIMVGDSLKDDVVCGKRAGAFTCLLDETGRYGPHDSLPEEVKPDFKVSSLTEVFAVLEEHFDLAPVPDESRI

SEQ ID NO: 940 - DNA, 1024 bp, Zea mays subsp. mays
  misc_feature (1)..(1024): Ceres Seq. ID no. 13599133
ttttttccccgattctctaatcgcccgcccccacctagtattctggaattgcggacacaaggagatgctgtccgtgcaggaagcccttgagcttgcgtcgtccagctgcggcacgacgatggacgttaccacgtgcgggttcacgccgtgggggcccgagtcgtgccctggcctggagcaggtgatggcgtcgacgccggccgcggcagcgaggcacccggaccccgaggaggaggagaggcgccggcggcagcgccgcaagctgtcgaaccggctgtcggcgcgccggtcgcgagcgcggaagcagcagcggctggaggagctccgcgcggaggcggcgcggctccgcggccagaagcgggagctggaggccaggctgcaggccctggcgcggcacggcctcgccgtgcgctgccagaacgcgcggctccgcgccgaggccgccgcgctcgcgcgcaggctcctcgcgatcgcgtcgtacgcccagcagccgcagcataaggccggagtcgcgcccgcgccggcggcggcgctgctggggctggcgtcgctgacgacgtaggcggctggcgagagggacgttcttctgcccggtggaacgaagtctcgcgcccactcgcagttgcagtctcgcgctctcgcatgctatggtgaactggaaacatgcatgggctgagggcagttgggcacacacaccgaggcttgctagtacggtgcatgcagcggtcagccggtagcactatactattagtccctgtttgggaacaaagtttttgaaaactacagtttttgaaatattatactatactttagttatgacaataccgtagtttataataccgcagttttgaaaactgaggtccagagctaagtttagaatgccttaaaacaactatagtatttgcaatacttcagttttgaaaacagagattttacccagcttgccaaacaccattatgtatataatactgcagtatttgagaatactgcagtattcttccaaaactgcagaaaaactttgttc

SEQ ID NO: 941 - protein, 186 aa, Zea mays subsp. mays
  misc_feature (1)..(186): Ceres Seq. ID no. 13599134
FFPDSLIARPHLVFWNCGHKEMLSVQEALELASSSCGTTMDVTTCGFTPWGPESCPGLEQVMASTPAAAARHPDPEEEERRRRQRRKLSNRLSARRSRARKQQRLEELRAEAARLRGQKRELEARLQALARHGLAVRCQNARLRAEAAALARRLLAIASYAQQPQHKAGVAPAPAAALLGLASLTT

SEQ ID NO: 942 - protein, 165 aa, Zea mays subsp. mays
  misc_feature (1)..(165): Ceres Seq. ID no. 13599135
MLSVQEALELASSSCGTTMDVTTCGFTPWGPESCPGLEQVMASTPAAAARHPDPEEEERRRRQRRKLSNRLSARRSRARKQQRLEELRAEAARLRGQKRELEARLQALARHGLAVRCQNARLRAEAAALARRLLAIASYAQQPQHKAGVAPAPAAALLGLASLTT

SEQ ID NO: 943 - protein, 147 aa, Zea mays subsp. mays
  misc_feature (1)..(147): Ceres Seq. ID no. 13599136
MDVTTCGFTPWGPESCPGLEQVMASTPAAAARHPDPEEEERRRRQRRKLSNRLSARRSRARKQQRLEELRAEAARLRGQKRELEARLQALARHGLAVRCQNARLRAEAAALARRLLAIASYAQQPQHKAGVAPAPAAALLGLASLTT

SEQ ID NO: 944 - DNA, 536 bp, Zea mays subsp. mays
  misc_feature (1)..(536): Ceres Seq. ID no. 13599141
aatcgaaaaaacatcgcaggcagagctatcccccaacacgatgctgatccgcccattcacgagatccttctcactggagcccggtcggctcgtttcactagttgacagcgacgggaaggaggttggcaggggcaagatattccaagcgccagggaagagcccagccccagtggagagccgcatctgcacggttgatgtcaccgagctcaggaccgagaagtggagggagctcccacacccttctgaggcatctgggaggaccttccaggaggcggaggcgaggaatggtggaatcatgagggtctcttgggactccggcaggctgttgcctgtagtgtagcaaggcagaaacttttcgtcaggttgctgtataccgctaggcacaaggtgagcagagggagcctttggtttagggcgagagactggatcatgggattcttgggggcctaagtaacactgttaaaacctgtggttaactgtggtgtatccatcaactaattgtctcaagcaatgcaggtagagtagttactaatttt

SEQ ID NO: 945 - protein, 112 aa, Zea mays subsp. mays
  misc_feature (1)..(112): Ceres Seq. ID no. 13599142
IEKTSQAELSPNTMLIRPFTRSFSLEPGRLVSLVDSDGKEVGRGKIFQAPGKSPAPVESRICTVDVTELRTEKWRELPHPSEASGRTFQEAEARNGGIMRVSWDSGRLLPVV

SEQ ID NO: 946 - protein, 99 aa, Zea mays subsp. mays
  misc_feature (1)..(99): Ceres Seq. ID no. 13599143
MLIRPFTRSFSLEPGRLVSLVDSDGKEVGRGKIFQAPGKSPAPVESRICTVDVTELRTEKWRELPHPSEASGRTFQEAEARNGGIMRVSWDSGRLLPVV

SEQ ID NO: 947 - DNA, 645 bp, Zea mays subsp. mays
  misc_feature (1)..(645): Ceres Seq. ID no. 13599152
atgtgattgattctctcctgctccttctttcttccatctctcctgtctctcttctctctctctctctgtctgtctgtctggcaaagggcactgacggccgcggcggtgtcgatggagtggtggcagaaggcggtggtggtgccggtgaagcgcgcgtggatcgccgccgccgcccggctgacgacgcgacataagaaagaagacggcggccacggcgtcctggtgaagctccacgacgacgtccagacgtgcgcgtacgaggacgtgcaggtgatgtgggagatgctgcagcgggccgagacggagaggctggcacgcgagccctcgacaaagggcgcccgcgcgctcgtctggctgcgccgccaccacaagatggacccgcgccggcgctgctgaggaggaggacgacgacgacaccctgatgcttttccttcctcctgctgccttcggctttgcttgccagctgccgtgccaccctgtgcagccttgccctgtgatgcgagagccgctcatctgcggctgtgtgtacatattacatgctacatacagggtacagccctgctgctgtgcctttcgtttccttcgcccggatgtaaatattcacagtttcatctttccaaggaagagaagagagatagagagacc

SEQ ID NO: 948 - protein, 94 aa, Zea mays subsp. mays
  misc_feature (1)..(94): Ceres Seq. ID no. 13599153
MEWWQKAVVVPVKRAWIAAAARLTTRHKKEDGGHGVLVKLHDDVQTCAYEDVQVMWEMLQRAETERLAREPSTKGARALVWLRRHHKMDPRRRC

SEQ ID NO: 949 - protein, 74 aa, Zea mays subsp. mays
  misc_feature (1)..(74): Ceres Seq. ID no. 13599154
MLFLPPAAFGFACQLPCHPVQPCPVMREPLICGCVYILHATYRVQPCCCAFRFLRPDVNIHSFIFPRKRREIER

SEQ ID NO: 950 - protein, 63 aa, Zea mays subsp. mays
  misc_feature (1)..(63): Ceres Seq. ID no. 13599155
VIDSLLLLLSSISPVSLLSLSLSVCLAKGTDGRGGVDGVVAEGGGGAGEARVDRRRRPADDAT

SEQ ID NO: 951 - DNA, 502 bp, Zea mays subsp. mays
  misc_feature (1)..(502): Ceres Seq. ID no. 13599161
atcgaaaaataaactcattgttggtgttagctcttatcggtcatccatcatggcgagatgcctcaagtcctgcagtgtacatggactctggctgctctccatgatccttcttgcatcgtgtgtcgttcatgctcacattattaatgggcggcaaagcaacaccgggagcctcactatgaccacgacgggggaagcaagcatgataattggagatgagaaagatgcaatttgctatataaaagccgcattgtattgctgcaaaaggactatacagtgctatcaggacatagcgcaatgcttgaggaactgccgtaaaaatgtctaacaagaggctatgctttctccaactcgtagatggagatcataaagatgttacgttagacctaatcatgcatagaccggaggagaaatataagctaattagcccatccataattaataacttcgtattgtttcaaaagctataaaaaaaaaaaaaaaaaagcttatcgataccgtcgac

SEQ ID NO: 952 - protein, 107 aa, Zea mays subsp. mays
  misc_feature (1)..(107): Ceres Seq. ID no. 15222530
SKNKLIVGVSSYRSSIMARCLKSCSVHGLWLLSMILLASCVVHAHIINGRQSNTGSLTMTTTGEASMIIGDEKDAICYIKAALYCCKRTIQCYQDIAQCLRNCRKNV

SEQ ID NO: 953 - protein, 91 aa, Zea mays subsp. mays
  misc_feature (1)..(91): Ceres Seq. ID no. 15222531
MARCLKSCSVHGLWLLSMILLASCVVHAHIINGRQSNTGSLTMTTTGEASMIIGDEKDAICYIKAALYCCKRTIQCYQDIAQCLRNCRKNV

SEQ ID NO: 954 - protein, 74 aa, Zea mays subsp. mays
  misc_feature (1)..(74): Ceres Seq. ID no. 15222532
MILLASCVVHAHIINGRQSNTGSLTMTTTGEASMIIGDEKDAICYIKAALYCCKRTIQCYQDIAQCLRNCRKNV

SEQ ID NO: 955 - DNA, 685 bp, Zea mays subsp. mays
  misc_feature (1)..(685): Ceres Seq. ID no. 13599166
tattacttatccgtctcaaagcagcctagtgccgcaaagtcagtccagtccacaggccttcttcaagcagatatatagcagtaccgtccatgggcaactgcacggcgtcgcagcgcgcagcggagtcgtgggccgacgacggcgagtgggaggaggcggcgtcatcgtcgccgttgtcgtcggagggcgaccaccaccaccatcatcatcaccgcgacgagaggagagaggatcaccacgactccgaggtgaccatcaggatcaccaagaggcagctgcacgagctgattgagaagaacggcggcggccacgggttaccgctaccggggtccgggaggcgccggcggtcgtccgcggagcagctgctggccgacatcatggactccggcgaggtgcaccaccgcgaccaccacagggaggaccactggcactggaagcccgcgctgcagagcatccccgagaccgtcgagtcatcatgactgtcatgcatgatctttcttggtgtttggtggttcagtagctcgatcaggggtcgttattttcgcctcttgttcggtgtgcaagtgtagtcgctagctaatcggtgacacggtgtacatatcaaagttttcagacatgtacatataggtctagggaggtgggagttcattgttaggttaggtccattatatttcagatgtgtggg

SEQ ID NO: 956 - protein, 129 aa, Zea mays subsp. mays
  misc_feature (1)..(129): Ceres Seq. ID no. 13599167
MGNCTASQRAAESWADDGEWEEAASSSPLSSEGDHHHHHHHRDERREDHHDSEVTIRITKRQLHELIEKNGGGHGLPLPGSGRRRRSSAEQLLADIMDSGEVHHRDHHREDHWHWKPALQSIPETVESS

SEQ ID NO: 957 - protein, 96 aa, Zea mays subsp. mays
  misc_feature (1)..(96): Ceres Seq. ID no. 13599168
ITYPSQSSLVPQSQSSPQAFFKQIYSSTVHGQLHGVAARSGVVGRRRRVGGGGVIVAVVVGGRPPPPSSSPRREERGSPRLRGDHQDHQEAAARAD

SEQ ID NO: 958 - DNA, 686 bp, Zea mays subsp. mays
  misc_feature (1)..(686): Ceres Seq. ID no. 13599181
atatattagagtagagagcagaaaagaagaagttaaaaaggtagatcgaatgaacagaaatggagaggaggaagtggccgagaagaagaggaggaggagggagggggtgcaggtgtccctcagaggaggctgcttggctgcttcagccactgctatagcggtaatgctgatggcaacagagaagggtgtggctgacatctatggcttgccgctccctctcaactccagctggtctttttctccctcctaccagtatgtggtgggggcatgcacggtgaccattctctactccctgttccacctctgtctaggaatttacaggctcctcactggatcacccatcacaccctcccgttcccaagcttggctttgtttcatcttcgatcagctcttcagctatttgataatgagcgctggatcagccggtattggagttacaaacctcaacaagaccggcatcaaacacactcctctccctgacttctgcaagaccctttcttatttctgcaatcacgtcgccctctccctcctcctagtcttgctctccttcatctttctcgcctcctcttccctctttaatgtccttgtgctctccactctctagtctcatggattctctattgttggtgctctatataatctaagacagactctaattattattatttatgatcacttgcattccc

SEQ ID NO: 959 - protein, 200 aa, Zea mays subsp. mays
  misc_feature (1)..(200): Ceres Seq. ID no. 13599182
YIRVESRKEEVKKVDRMNRNGEEEVAEKKRRRREGVQVSLRGGCLAASATAIAVMLMATEKGVADIYGLPLPLNSSWSFSPSYQYVVGACTVTILYSLFHLCLGIYRLLTGSPITPSRSQAWLCFIFDQLFSYLIMSAGSAGIGVTNLNKTGIKHTPLPDFCKTLSYFCNHVALSLLLVLLSFIFLASSSLFNVLVLSTL

SEQ ID NO: 960 - protein, 184 aa, Zea mays subsp. mays
  misc_feature (1)..(184): Ceres Seq. ID no. 13599183
MNRNGEEEVAEKKRRRREGVQVSLRGGCLAASATAIAVMLMATEKGVADIYGLPLPLNSSWSFSPSYQYVVGACTVTILYSLFHLCLGIYRLLTGSPITPSRSQAWLCFIFDQLFSYLIMSAGSAGIGVTNLNKTGIKHTPLPDFCKTLSYFCNHVALSLLLVLLSFIFLASSSLFNVLVLSTL

SEQ ID NO: 961 - protein, 146 aa, Zea mays subsp. mays
  misc_feature (1)..(146): Ceres Seq. ID no. 13599184
MLMATEKGVADIYGLPLPLNSSWSFSPSYQYVVGACTVTILYSLFHLCLGIYRLLTGSPITPSRSQAWLCFIFDQLFSYLIMSAGSAGIGVTNLNKTGIKHTPLPDFCKTLSYFCNHVALSLLLVLLSFIFLASSSLFNVLVLSTL

SEQ ID NO: 962 - DNA, 686 bp, Zea mays subsp. mays
  misc_feature (1)..(686): Ceres Seq. ID no. 13599195
agatctgatcatttggaagtaaaactagttgaaaggttaagaaaaaaaaaaagacagagaaagaatggcagaaacggagcaaaaggaggtagaagaaaagggatcgttgatctcaggcttgttggataaagccaaaggtttctttgccgagaagcttgctaatattccgacgccggaagccaccgtggacgacgtagacttcaaaggtgtgactcgtcaaggagttgattatcacgccaaggtctccgtcaagaacccttaccctcaggccatccctatttgccagatctcttacatcctcaagagtgacacaaggatgatagcgtctggtacaataccggatccgggttcgttgatcgcgaacgggtcgacggttctggacgtaccggtgaaggtgccttacagcatagcggtgagtttgatgaaggacatgtgtttggactgggacattgactatcaactcgacattggattgaccatcgacattcctattgttggtgacattaccattcctgtctctactcagggtgagatgaagctcccttcccttcgcgacttcttttaatcatctatataagttataatctgatttttcaataagtacgatccgtaaacgacatagacgatcgttggatgtttcagttgtggactcttgtgtttgttggttatatgtatttgttgctttg

SEQ ID NO: 963 - protein, 166 aa, Zea mays subsp. mays
  misc_feature (1)..(166): Ceres Seq. ID no. 13599196
MAETEQKEVEEKGSLISGLLDKAKGFFAEKLANIPTPEATVDDVDFKGVTRQGVDYHAKVSVKNPYPQAIPICQISYILKSDTRMIASGTIPDPGSLIANGSTVLDVPVKVPYSIAVSLMKDMCLDWDIDYQLDIGLTIDIPIVGDITIPVSTQGEMKLPSLRDFF

SEQ ID NO: 964 - DNA, 619 bp, Zea mays subsp. mays
  misc_feature (1)..(619): Ceres Seq. ID no. 13599249
attgaaaattagattttgtccggtggagaagatgggagcagaaacggtcgtggaagctgagaaaattgacgacttgctcgaggcagctagatacaatgatatagatgatctcaaaagcttggcctttgatggtgtctctcttaactctcgcgattcccaaggccgaacagcgcttcatatggccgcggcgaatggacatatgagtatagtggagtatctgatcagtcaaggagtggatattaacgctctgaacgaggagaacaatgctcctctgcattgggcttgtttgaatggccatatcgaggttgtgaagaaaatgatcttggcaggagccagtcttagtcttttgaatcggtacgagcggactcccatggacgaagctattggtgcagggaagatggagattatagatgctatcaacacaactgttacacaaatggaacttgaaaacaccactgtagcctgactttaatggcgtcttcctaaatgcttgttgtctctctctctctctgtagtttacagcgtagtttttataatgtggaagttttgcgttgttatgtagactgatggttagaactggaatcatctgaaatcgaattctaccaaaaagattattgcc

SEQ ID NO: 965 - protein, 154 aa, Zea mays subsp. mays
  misc_feature (1)..(154): Ceres Seq. ID no. 13599250
LKIRFCPVEKMGAETVVEAEKIDDLLEAARYNDIDDLKSLAFDGVSLNSRDSQGRTALHMAAANGHMSIVEYLISQGVDINALNEENNAPLHWACLNGHIEVVKKMILAGASLSLLNRYERTPMDEAIGAGKMEIIDAINTTVTQMELENTTVA

SEQ ID NO: 966 - protein, 144 aa, Zea mays subsp. mays
  misc_feature (1)..(144): Ceres Seq. ID no. 13599251
MGAETVVEAEKIDDLLEAARYNDIDDLKSLAFDGVSLNSRDSQGRTALHMAAANGHMSIVEYLISQGVDINALNEENNAPLHWACLNGHIEVVKKMILAGASLSLLNRYERTPMDEAIGAGKMEIIDAINTTVTQMELENTTVA

SEQ ID NO: 967 - protein, 95 aa, Zea mays subsp. mays
  misc_feature (1)..(95): Ceres Seq. ID no. 13599252
MAAANGHMSIVEYLISQGVDINALNEENNAPLHWACLNGHIEVVKKMILAGASLSLLNRYERTPMDEAIGAGKMEIIDAINTTVTQMELENTTVA

SEQ ID NO: 968 - DNA, 1355 bp, Zea mays subsp. mays
  misc_feature (1)..(1355): Ceres Seq. ID no. 13599254
agaacatcctaatcgaaaaagtgtatgctttggcctttaataatataaaaagaaaaaaagaaaaaaaaactggtatcgagagcgagaccgctgggaactaactaagccctaagattctcaactgccgattcgtcattgacacaaatctcagatcttatttggcgctaatggagttttccttacaagacgacgactttggcggcgatttctccgcttctaacgccaccagagctgcttcaggcagcaaaagaagtttcggtgatcttgaagacgatgaggatgacatcttcggatccaaaaaggttcgtacgaaagctgaggaagctgcccctggtgttgcaactggcatgatcctgtcactccgtgagagtcttcagaactgtaaagatgatcttgcttcatctcagaatgagcttgaatcagcaaaagcagagattctcaaatggaaatcagcgtttcagaacgagtctttcatacctgctggaaaatctcctgagcctagatttttgattgactacatccaaaatctaaaatcttctgagagatctttgaaagaacagttggaaattgcaaagagaaaagaagcttcgtacattgtacaatatgcaaaacgggaacaggaaatggcagagttgaagtctgctgttcgtgatttgaaatctcagctcaagccggcgtcaatgcaagcgaggaggctgttactggatccagctattcatgaagaattttcacgtttgaagaatctagttgaggaaaaagacaagaaggtcaaggaactacaggatagtcttacagcatttacttttacccctctgagtttaaagggtaagatgcttatggaaaagtgcaaaaccctgcaagaggaaaacgaggagattggacaccaagctgctgaaggaaagattcatgaactagcaatgaagctgtcgatgcagaagtctcagaacgcagaacttagaaagcaatttgaaggactgtacaaacacatggaagaactaactaacgatgttgaaagatcaaacgaaacggtgataatactgcaagataaattggaagagaaagacaaggagctagagagagtaaagaaagggatggaggttgttgtgtctgatgtggctgaaaagaaagatgatggtgaagataaagatccaaaatactcggctctccaaacgatgttcacttctatacaatctgagagataattgcaattgtattcattcacgctcttatattgttcaaagagttttctgataaatgcatgaaaacattagtttccattaggaggctttgtaccctttatttttccgatttttcattgatagcccgaaggcaaataagatgcacacaatccagcc

SEQ ID NO: 969 - protein, 344 aa, Zea mays subsp. mays
  misc_feature (1)..(344): Ceres Seq. ID no. 15222549
MEFSLQDDDFGGDFSASNATRAASGSKRSFGDLEDDEDDIFGSKKVRTKAEEAAPGVATGMILSLRESLQNCKDDLASSQNELESAKAEILKWKSAFQNESFIPAGKSPEPRFLIDYIQNLKSSERSLKEQLEIAKRKEASYIVQYAKREQEMAELKSAVRDLKSQLKPASMQARRLLLDPAIHEEFSRLKNLVEEKDKKVKELQDSLTAFTFTPLSLKGKMLMEKCKTLQEENEEIGHQAAEGKIHELAMKLSMQKSQNAELRKQFEGLYKHMEELTNDVERSNETVIILQDKLEEKDKELERVKKGMEVVVSDVAEKKDDGEDKDPKYSALQTMFTSIQSER

SEQ ID NO: 970 - protein, 284 aa, Zea mays subsp. mays
  misc_feature (1)..(284): Ceres Seq. ID no. 15222550
MILSLRESLQNCKDDLASSQNELESAKAEILKWKSAFQNESFIPAGKSPEPRFLIDYIQNLKSSERSLKEQLEIAKRKEASYIVQYAKREQEMAELKSAVRDLKSQLKPASMQARRLLLDPAIHEEFSRLKNLVEEKDKKVKELQDSLTAFTFTPLSLKGKMLMEKCKTLQEENEEIGHQAAEGKIHELAMKLSMQKSQNAELRKQFEGLYKHMEELTNDVERSNETVIILQDKLEEKDKELERVKKGMEVVVSDVAEKKDDGEDKDPKYSALQTMFTSIQSER

SEQ ID NO: 971 - protein, 192 aa, Zea mays subsp. mays
  misc_feature (1)..(192): Ceres Seq. ID no. 15222551
MAELKSAVRDLKSQLKPASMQARRLLLDPAIHEEFSRLKNLVEEKDKKVKELQDSLTAFTFTPLSLKGKMLMEKCKTLQEENEEIGHQAAEGKIHELAMKLSMQKSQNAELRKQFEGLYKHMEELTNDVERSNETVIILQDKLEEKDKELERVKKGMEVVVSDVAEKKDDGEDKDPKYSALQTMFTSIQSER

SEQ ID NO: 972 - DNA, 737 bp, Zea mays subsp. mays
  misc_feature (1)..(737): Ceres Seq. ID no. 13599262
aggatggctcgataccttgcaaacaaatgttccattgcttcacgtattgactgctattcagatatgagtagctccatttttggtgagaagctgcgtgaacaagttgaggagaggctagatttctacgataagggtgttgcaccccgcaagaaccttgatgtgatgaaagctgctattgatggcttgacaaacacagaggatgatgacggcaaagagaatggtgacgcatctgtgaagaaaagcaagaagtccaaagctgaggctaacagtgacgcgatggacgttgagaatgccgcaacagaagctgaaactggaaccgagaagaagaagaaaaagaagcacaagcttgaggagccgcaggatgtggagatgcaagccaatggcgatgatgagacccctaagaagaagaaaaagaagaaccgcgacgccgagtctgttgatcctaagacgggcaccgaggggaaatccaagaaaaagaagaagaaatccaaggctgatgacgacgagtagtagattagtacctaagtacctagcagcgagtgttcaagtcgattgaggatgaaattttttgtaccgactgtttatgtgtgtactgtttgagcctctttgagcccttgacgaggtctgtaatgtagcttcatggactgaagcggcgtatctgtaatacatttgatgttgcagtatgtcgtttcttggggatggcttagctttcctatataaatggaatggcattgttg

SEQ ID NO: 973 - protein, 169 aa, Zea mays subsp. mays
  misc_feature (1)..(169): Ceres Seq. ID no. 13599263
RMARYLANKCSIASRIDCYSDMSSSIFGEKLREQVEERLDFYDKGVAPRKNLDVMKAAIDGLTNTEDDDGKENGDASVKKSKKSKAEANSDAMDVENAATEAETGTEKKKKKKHKLEEPQDVEMQANGDDETPKKKKKKNRDAESVDPKTGTEGKSKKKKKKSKADDDE

SEQ ID NO: 974 - protein, 168 aa, Zea mays subsp. mays
  misc_feature (1)..(168): Ceres Seq. ID no. 13599264
MARYLANKCSIASRIDCYSDMSSSIFGEKLREQVEERLDFYDKGVAPRKNLDVMKAAIDGLTNTEDDDGKENGDASVKKSKKSKAEANSDAMDVENAATEAETGTEKKKKKKHKLEEPQDVEMQANGDDETPKKKKKKNRDAESVDPKTGTEGKSKKKKKKSKADDDE

SEQ ID NO: 975 - protein, 148 aa, Zea mays subsp. mays
  misc_feature (1)..(148): Ceres Seq. ID no. 13599265
MSSSIFGEKLREQVEERLDFYDKGVAPRKNLDVMKAAIDGLTNTEDDDGKENGDASVKKSKKSKAEANSDAMDVENAATEAETGTEKKKKKKHKLEEPQDVEMQANGDDETPKKKKKKNRDAESVDPKTGTEGKSKKKKKKSKADDDE

SEQ ID NO: 976 - DNA, 683 bp, Zea mays subsp. mays
  misc_feature (1)..(683): Ceres Seq. ID no. 13599266
agtttatctctctctctgttgcaatgtcgaagagcggaagatattgcttaggatcaatggaagacatccgagcagtattccagcgcttcgacaaaaacggagacgggaaaatctccatcgacgagctcaaagacgtgatcggagctctcagtcccacggcgtcgccggaagaaacgacgttgatgatgaaagagttcgatctcgacggtaacggatacatcgacatggacgagttcgttgctctgttccaaaccgaagacggtggcgatattcgagatctgaaggaagcgtttgatctgtacgatttggatggaaacggacggatctctgtgaacgagcttcactcggtgatgaagaatctcggcgagaagtgttcggttgaggattgcaagaggatcattagcaaagttgatgctgacggtgacggttgtgttaactttgaagagtttaagaagatgatgatgaacggcagagctactgcttgacttaacggcgaggaatcgtttccttttttttttttttgtatatattcaatttttagttttaggttttatcgattaaactggattaatctttgtttttcctttggttttttaatcttatggattaattagggatttttatttcttaattgtaaggtttaatcgatttttttattttaataattatttattagtatggtt

SEQ ID NO: 977 - protein, 160 aa, Zea mays subsp. mays
  misc_feature (1)..(160): Ceres Seq. ID no. 13599267
FISLSVAMSKSGRYCLGSMEDIRAVFQRFDKNGDGKISIDELKDVIGALSPTASPEETTLMMKEFDLDGNGYIDMDEFVALFQTEDGGDIRDLKEAFDLYDLDGNGRISVNELHSVMKNLGEKCSVEDCKRIISKVDADGDGCVNFEEFKKMMMNGRATA

SEQ ID NO: 978 - protein, 153 aa, Zea mays subsp. mays
  misc_feature (1)..(153): Ceres Seq. ID no. 13599268
MSKSGRYCLGSMEDIRAVFQRFDKNGDGKISIDELKDVIGALSPTASPEETTLMMKEFDLDGNGYIDMDEFVALFQTEDGGDIRDLKEAFDLYDLDGNGRISVNELHSVMKNLGEKCSVEDCKRIISKVDADGDGCVNFEEFKKMMMNGRATA

SEQ ID NO: 979 - protein, 142 aa, Zea mays subsp. mays
  misc_feature (1)..(142): Ceres Seq. ID no. 13599269
MEDIRAVFQRFDKNGDGKISIDELKDVIGALSPTASPEETTLMMKEFDLDGNGYIDMDEFVALFQTEDGGDIRDLKEAFDLYDLDGNGRISVNELHSVMKNLGEKCSVEDCKRIISKVDADGDGCVNFEEFKKMMMNGRATA

SEQ ID NO: 980 - DNA, 588 bp, Zea mays subsp. mays
  misc_feature (1)..(588): Ceres Seq. ID no. 13599275
agaacatcctaatcgaaaaggattaggttttaacttttatacatctcgtcgcgcaaacaacgaatcgagataaaaaaaaatggcgatgagaagagtatacagcgagatcaaaggcaagaaggtgaaggagcttcctgcctatttcaaatcgtcgttttcaacgcagtccgtgaagacgtatgtgaagaaaggtctcgataactacaacgacaagtacatccagaccagctccgtccagcctctcctccatatctgcttcggaggcatggccttctcttacctcgtcgctctccccaacgagcgtcgccacctcgagcaccagcagcatgccaaggagcacggtggccattgatctccagatgttggtttctgcgatgttggtgactgagcattgcacgtcttgttttttttcttcttgattctcctggattgatattattgttgatctaaaggaaaacctttttttttttttttttcaaaactgatggttgatattgatgaataatgaaactgttgttttcttttgatcgtaataagctgtggattcggcattttgttttgtcttatttaagtgtttcagtttgatct

SEQ ID NO: 981 - protein, 90 aa, Zea mays subsp. mays
  misc_feature (1)..(90): Ceres Seq. ID no. 13599276
MAMRRVYSEIKGKKVKELPAYFKSSFSTQSVKTYVKKGLDNYNDKYIQTSSVQPLLHICFGGMAFSYLVALPNERRHLEHQQHAKEHGGH

SEQ ID NO: 982 - protein, 88 aa, Zea mays subsp. mays
  misc_feature (1)..(88): Ceres Seq. ID no. 13599277
MRRVYSEIKGKKVKELPAYFKSSFSTQSVKTYVKKGLDNYNDKYIQTSSVQPLLHICFGGMAFSYLVALPNERRHLEHQQHAKEHGGH

SEQ ID NO: 983 - DNA, 1020 bp, Zea mays subsp. mays
  misc_feature (1)..(1020): Ceres Seq. ID no. 13599278
gtacagatgcttctccctcctcctcctctagaaacttctcccatggcggcttcttctgctctctcctcaccagcgcttctctccaacaaccgctctcctccgtcatgcggctccgtcagacgctcgatctcctcctccccggtgctcatcgctactcccagatcgtctcgtttgagcttcacaatacctgagaggagaagcctcgtcgtgaaatcaaccgtcggcgaggtctcctttcgcgaaccggcaacatcgggagataaggagggaatcgaatcgctgaaactcaaattactgagggtggtttcgggtttgaacagaggacttgtggcgagtgtagatgatctacaaagtgctgaggccgctgctaaattacttgaagccgctggtgggcctgtggatctaaccaatgatcttgacaaactccaagggaaatggaggctgctgtatagcagcgccttctcttctcgctctttaggtggtagccgtcctggtctacccactggtcgcttgattcccgtcactcttggccaggtgtttcagaggattgatgtgtttagcaaagatttcgataacattgccgaagtggagttaggagctccttggccgtttcctcctctggaagccactgcaacactggcacacaaattcgaactcttaggtacttgcaagatcaagatcacatttgagaaaacaactgtgaagacatcgggaaacttagcgcagattcctccgtttgagatcccgaggcttcccgatagtttcaggccaccgtctaaccctggaactggagattttgaagtcacctatgttgatgagaacatgcgcataactcgtggggatagaggtgaacttagggtctttgtcattgcttaagtcaaaaggaggtttgacatgtaaagatcaagtactttctgcttgttgcagcagccttatgacccctatgagttttgtacacatcgtttgaacgttgattatagatgtattttataatgaagtgaatgtcagttatgcttagtg

SEQ ID NO: 984 - protein, 291 aa, Zea mays subsp. mays
  misc_feature (1)..(291): Ceres Seq. ID no. 13599279
VQMLLPPPPLETSPMAASSALSSPALLSNNRSPPSCGSVRRSISSSPVLIATPRSSRLSFTIPERRSLVVKSTVGEVSFREPATSGDKEGIESLKLKLLRVVSGLNRGLVASVDDLQSAEAAAKLLEAAGGPVDLTNDLDKLQGKWRLLYSSAFSSRSLGGSRPGLPTGRLIPVTLGQVFQRIDVFSKDFDNIAEVELGAPWPFPPLEATATLAHKFELLGTCKIKITFEKTTVKTSGNLAQIPPFEIPRLPDSFRPPSNPGTGDFEVTYVDENMRITRGDRGELRVFVIA

SEQ ID NO: 985 - protein, 289 aa, Zea mays subsp. mays
  misc_feature (1)..(289): Ceres Seq. ID no. 13599280
MLLPPPPLETSPMAASSALSSPALLSNNRSPPSCGSVRRSISSSPVLIATPRSSRLSFTIPERRSLVVKSTVGEVSFREPATSGDKEGIESLKLKLLRVVSGLNRGLVASVDDLQSAEAAAKLLEAAGGPVDLTNDLDKLQGKWRLLYSSAFSSRSLGGSRPGLPTGRLIPVTLGQVFQRIDVFSKDFDNIAEVELGAPWPFPPLEATATLAHKFELLGTCKIKITFEKTTVKTSGNLAQIPPFEIPRLPDSFRPPSNPGTGDFEVTYVDENMRITRGDRGELRVFVIA

SEQ ID NO: 986 - protein, 277 aa, Zea mays subsp. mays
  misc_feature (1)..(277): Ceres Seq. ID no. 13599281
MAASSALSSPALLSNNRSPPSCGSVRRSISSSPVLIATPRSSRLSFTIPERRSLVVKSTVGEVSFREPATSGDKEGIESLKLKLLRVVSGLNRGLVASVDDLQSAEAAAKLLEAAGGPVDLTNDLDKLQGKWRLLYSSAFSSRSLGGSRPGLPTGRLIPVTLGQVFQRIDVFSKDFDNIAEVELGAPWPFPPLEATATLAHKFELLGTCKIKITFEKTTVKTSGNLAQIPPFEIPRLPDSFRPPSNPGTGDFEVTYVDENMRITRGDRGELRVFVIA

SEQ ID NO: 987 - DNA, 1220 bp, Zea mays subsp. mays
  misc_feature (1)..(1220): Ceres Seq. ID no. 13599293
acacaccgatcgcgaaactgcttcctagcttcgttccggttccggagcgccagagagagaaagaaagggaaaagaagcgcctttgcccaccgcgcgatcgatcgatccggggtccggcggcctgccatggtgaagctggcgacggccagggaggcgcggctgtacgggccggcgctggcggcgaggcggtgggagtacatcaacgcggggacatacgtgttcgcggcgctgctcctggtcctggcggcggcgctgtccatgtccgtgtccgcggccaggctggggctcgccgtaggcgccgtggcgctggcggccgtggcggccgtcaacgcacacgacctcgccgcgcacctggctggcgtcgactgccgcgtgggactggcgaggtacgatgcccagctcgggctcgtggagttcctcgtgccggccgtgcacgcagccgggtgcgcgctcgccgccgccggcctggcgctgctggcctccccccactcccactcccagtcccagcagcggcacgcggcgaccatgctgctcgtcgcggcgctgctgtgggtgctgggctccgtgctcaactcctgccaggtgtacgagcgcgccgacggccgcgcgcagctgctgcagtcgggcgtgcaggtgcctcagctgctggggagccttctgttcctggtcgccgcggcgctgaaccgcccccgcagcggcggcgagccggcgtggctgtgcctggtcgggagcgtgctgtggctggcggcagcgctgctcaacgtgctgaaggtgttcgccatgcaccagagcgacgcgctgcggctggagaagctccgcggcggcgcgcaggagtggctcagccgcgaccgcgagggccgcgtgccgctcaactgggaggaggccgccaggagacgggcgctgcccaccgagctccggtgatcatcgcccgcgccaggcgccacccatcatttcccgtgccgtaaaatgaggggaaaagggtagataaataaattgtttcagcgccacccttttgggccgttgcttgggctcaatggaggcccgaagccccggattgtagggcccattagctgctggagcttatcgcattccatttcctatgtccgagtcccttgcggctcctttggaaggaaaaggaatgagagaattaagagatggattgaagagggttggaaggattaaatttctttacaawaaarwaaaaaaaagctggagggggg

SEQ ID NO: 988 - protein, 320 aa, Zea mays subsp. mays
  misc_feature (1)..(320): Ceres Seq. ID no. 15222553
TPIAKLLPSFVPVPERQREKEREKKRLCPPRDRSIRGPAACHGEAGDGQGGAAVRAGAGGEAVGVHQRGDIRVRGAAPGPGGGAVHVRVRGQAGARRRRRGAGGRGGRQRTRPRRAPGWRRLPRGTGEVRCPARARGVPRAGRARSRVRARRRRPGAAGLPPLPLPVPAAARGDHAARRGAAVGAGLRAQLLPGVRARRRPRAAAAVGRAGASAAGEPSVPGRRGAEPPPQRRRAGVAVPGRERAVAGGSAAQRAEGVRHAPERRAAAGEAPRRRAGVAQPRPRGPRAAQLGGGRQETGAAHRAPVIIARARRHPSFPVP

SEQ ID NO: 989 - protein, 306 aa, Zea mays subsp. mays
  misc_feature (1)..(306): Ceres Seq. ID no. 15222554
THRSRNCFLASFRFRSARERKKGKRSAFAHRAIDRSGVRRPAMVKLATAREARLYGPALAARRWEYINAGTYVFAALLLVLAAALSMSVSAARLGLAVGAVALAAVAAVNAHDLAAHLAGVDCRVGLARYDAQLGLVEFLVPAVHAAGCALAAAGLALLASPHSHSQSQQRHAATMLLVAALLWVLGSVLNSCQVYERADGRAQLLQSGVQVPQLLGSLLFLVAAALNRPRSGGEPAWLCLVGSVLWLAAALLNVLKVFAMHQSDALRLEKLRGGAQEWLSRDREGRVPLNWEEAARRRALPTELR

SEQ ID NO: 990 - protein, 264 aa, Zea mays subsp. mays
  misc_feature (1)..(264): Ceres Seq. ID no. 15222555
MVKLATAREARLYGPALAARRWEYINAGTYVFAALLLVLAAALSMSVSAARLGLAVGAVALAAVAAVNAHDLAAHLAGVDCRVGLARYDAQLGLVEFLVPAVHAAGCALAAAGLALLASPHSHSQSQQRHAATMLLVAALLWVLGSVLNSCQVYERADGRAQLLQSGVQVPQLLGSLLFLVAAALNRPRSGGEPAWLCLVGSVLWLAAALLNVLKVFAMHQSDALRLEKLRGGAQEWLSRDREGRVPLNWEEAARRRALPTELR

SEQ ID NO: 991 - DNA, 1912 bp, Zea mays subsp. mays
  misc_feature (1)..(1912): Ceres Seq. ID no. 13599322
aatcgccagcgagagccatgccgcctcctcccctgccctcgccgagcctgaccgactgaccccacctcgccactgttctttccctgccacctgggccccacagcgcccctttaccgtcaccaccaaatccccaaatcccggaggcacgaggagggaattcgtcgcctgaccgatcggccgatccactgccgtcggcaccccaatccgccgctgccgccatgttcaacaagatcatcaagaggggaaaccgcaagggcgcgcgcggggacaacgcggaggccgccgcgcgccccgcagcgccctcgtcgtcctccgggagcggcggcggcggcgcgggggcagccgcgcccgtcaccgtcaaccacgcctcccgggccacagcgccttcgccgtcctcgcccacttcgccgcacgtggcgccgtctgcgcttgcgaccaacccggcgggggcggcgtccccgccactcctcgagccgctcccgcttctccgcgacgtcgccgccgcggatcgcccgggcctcttcctccgcaagctccgcatcgtcgccgcgctctttgacctttcggactcgctcaagcacccacgggagaaggaggccaaacgccaggctctcctcgagctcgtcgattacgtgcaggctccagctcaggcagcgggcgccaacgcacccacgcgcctcccggaccacgtccaggtgttaaacacaggcgctcgtcgccgccatctctgccaacatcttccgcccgctaccacccgcgctgcacgaatccgccgccgcgatcgaccccggcgccgcgcccgacgaggaggaggagccatacctcgacccctcctggccacacctccagctcgtctatgagctccttctccgatacgttgtttcgcccgacaccgacaccaaggtcgccaagcggtatgtggaccacgccttcgtcctccgtctcctcgacctctttgactccgaggatccgcgtgagcgcgagtacctcaagaccgtgctccaccgcatctatggcaagttcatggtacaccgaccattcattcgcaaggccatcaacaatgtgttctaccggttcatctttgaaacgcagcgccacaatggcataggggagctccttgagatccttggaagcatcattaatggctttgccttgccaatgaaggaggagcacaaactattccttgcccgtgctctcatccccctgcataagcccaaatctgttgcgatctaccatcagcagctgtcctattgtattgttcagttcgttgagaaggactacaaattagcagatactgtgattaggggtctgctcaaatactggccagtcacaaactgccagaaagaggtgttgtttctgggggagcttgaagaagtgctcgaggcaacacagcctgcagagttccagcggtgcatggtgccactgttcaagcagattggacgatgccttaacagttctcacttccaggttgctgaacgtgctttgttcttgtggaacaatgatcatattgtaagcttgatagcacaaaatcgtgttgttatatttccaattatatttgaagctcttgagaggaatatacagagccactggaatcaagcagttcatggtctcactgcaaatgtgcgcaagatgtttttggacatggacagtgaactatttgaagagtgccagcagcagtacatggagaaacaagcgaaagccaaagagatacaggaacaacgagaatcagcatggagacaattggaagctgttgttgctgccaaggctgctggagatgacatggttttggtcaactaggtaatataacctttcgcttcatttatttgttagtgcttgtgttcgtaagtttttctagtcttgtaacctaaaaccgtactactctgtttatgtcctcttgttcttgctttgtttt

SEQ ID NO: 992 - protein, 257 aa, Zea mays subsp. mays
  misc_feature (1)..(257): Ceres Seq. ID no. 15222562
MVHRPFIRKAINNVFYRFIFETQRHNGIGELLEILGSIINGFALPMKEEHKLFLARALIPLHKPKSVAIYHQQLSYCIVQFVEKDYKLADTVIRGLLKYWPVTNCQKEVLFLGELEEVLEATQPAEFQRCMVPLFKQIGRCLNSSHFQVAERALFLWNNDHIVSLIAQNRVVIFPIIFEALERNIQSHWNQAVHGLTANVRKMFLDMDSELFEECQQQYMEKQAKAKEIQEQRESAWRQLEAVVAAKAAGDDMVLVN

SEQ ID NO: 993 - protein, 213 aa, Zea mays subsp. mays
  misc_feature (1)..(213): Ceres Seq. ID no. 15222563
MFNKIIKRGNRKGARGDNAEAAARPAAPSSSSGSGGGGAGAAAPVTVNHASRATAPSPSSPTSPHVAPSALATNPAGAASPPLLEPLPLLRDVAAADRPGLFLRKLRIVAALFDLSDSLKHPREKEAKRQALLELVDYVQAPAQAAGANAPTRLPDHVQVLNTGARRRHLCQHLPPATTRAARIRRRDRPRRRARRGGGAIPRPLLATPPARL

SEQ ID NO: 994 - protein, 212 aa, Zea mays subsp. mays
  misc_feature (1)..(212): Ceres Seq. ID no. 15222564
MKEEHKLFLARALIPLHKPKSVAIYHQQLSYCIVQFVEKDYKLADTVIRGLLKYWPVTNCQKEVLFLGELEEVLEATQPAEFQRCMVPLFKQIGRCLNSSHFQVAERALFLWNNDHIVSLIAQNRVVIFPIIFEALERNIQSHWNQAVHGLTANVRKMFLDMDSELFEECQQQYMEKQAKAKEIQEQRESAWRQLEAVVAAKAAGDDMVLVN

SEQ ID NO: 995 - DNA, 1110 bp, Zea mays subsp. mays
  misc_feature (1)..(1110): Ceres Seq. ID no. 13599342
acctcctccctcctgttccttcagccaccgtgagcaatggcgcccaagcggaagggtggcaacggccggaagaagaccgtcctcctctcgatcgtcaaggaggacgcccgccatgtatgcttctcaaagcgcaagcggggcctgttcagcaagaccagcgcgctgtccctgctcacgggcgcccaggtggccgccgtcatcttctcgcccggcggcaaggtcttctccttcggccacccctccgtcgacgccgtcgtcaaccgcttcatggcgggggacgccgcggtggtccaggccgccgccgacgacaacgggttgcagacgctgcagctgcagcacggcgacatgcgcaccgagctggcggaccagaagaagcggaagaagcgcgctgaggaggccctggacaaggagcgcgctgggggggaccagattgcctcgtggctccaccccgacgtgcgcgacatggggcatgacgacatggcggccttcgccgccgcgctcttgcaggtccaggccgccgtctccggacgcgccaaccaggttctcgtcgaggcctttcgcgtcgacatcagccgtatgctccaggtgcccccgccgccgccgcctccgctccagctcttcggtgccagcaccattgagttcggtagtagcagcagcagcgccaacgccgggatggagatgcaacagatgcagatggttatggagatgccaccgccgcctgacttccccgcagtgatggggatgcagcagttggttatggagatgccaccacagccaaggttcgaggcagcgatggagatgacgccgctgcaggagttcgtcgccgggatgcagaaggtgcagcggcaggggctcgggccgaacgccgacttcccctactgaggagaagaaagacaccagacagagtccgaccgagtccgagtctcagttactatattctaaataaatcgttcagatccatgtaagatccatctacgtgggtccaagatctatgcattagttggttcaattatcttagtagcaattaaatttatggcattgtaatcttttttgtatcggtagtacaatggctggaaattcgtgaatgaaatactattaagccttttcaag

SEQ ID NO: 996 - protein, 281 aa, Zea mays subsp. mays
  misc_feature (1)..(281): Ceres Seq. ID no. 13599343
MAPKRKGGNGRKKTVLLSIVKEDARHVCFSKRKRGLFSKTSALSLLTGAQVAAVIFSPGGKVFSFGHPSVDAVVNRFMAGDAAVVQAAADDNGLQTLQLQHGDMRTELADQKKRKKRAEEALDKERAGGDQIASWLHPDVRDMGHDDMAAFAAALLQVQAAVSGRANQVLVEAFRVDISRMLQVPPPPPPPLQLFGASTIEFGSSSSSANAGMEMQQMQMVMEMPPPPDFPAVMGMQQLVMEMPPQPRFEAAMEMTPLQEFVAGMQKVQRQGLGPNADFPY

SEQ ID NO: 997 - protein, 244 aa, Zea mays subsp. mays
  misc_feature (1)..(244): Ceres Seq. ID no. 13599344
PPPSCSFSHREQWRPSGRVATAGRRPSSSRSSRRTPAMYASQSASGACSARPARCPCSRAPRWPPSSSRPAARSSPSATPPSTPSSTASWRGTPRWSRPPPTTTGCRRCSCSTATCAPSWRTRRSGRSALRRPWTRSALGGTRLPRGSTPTCATWGMTTWRPSPPRSCRSRPPSPDAPTRFSSRPFASTSAVCSRCPRRRRLRSSSSVPAPLSSVVAAAAPTPGWRCNRCRWLWRCHRRLTSPQ

SEQ ID NO: 998 - protein, 207 aa, Zea mays subsp. mays
  misc_feature (1)..(207): Ceres Seq. ID no. 13599345
MYASQSASGACSARPARCPCSRAPRWPPSSSRPAARSSPSATPPSTPSSTASWRGTPRWSRPPPTTTGCRRCSCSTATCAPSWRTRRSGRSALRRPWTRSALGGTRLPRGSTPTCATWGMTTWRPSPPRSCRSRPPSPDAPTRFSSRPFASTSAVCSRCPRRRRLRSSSSVPAPLSSVVAAAAPTPGWRCNRCRWLWRCHRRLTSPQ

SEQ ID NO: 999 - DNA, 524 bp, Zea mays subsp. mays
  misc_feature (1)..(524): Ceres Seq. ID no. 13599346
acccaacaaaaagagaagaaaaaaacacaagagaaacaaacataaagtaacatgagatctctcttactagccttgttcctagttcttgctttccaccgtggtgaagcagccgtgtcttgcaacgcagtggttggagatctttacccttgtctctcctacgtggttcaaggcggtaacgtcccagcgaactgctgcaacggcatcagaacgctcaacagtcaggcccaaacccctgtggaccgtcagggcgtttgccgttgcatcaaaaatgctatcggaggagtctctttctcttctaacaacgtcaacaatgctcagtctctgcctgctaagtgtggtgtgaatctcccttacagtatcagcccttccaccaactgcgacagtatcaactgagagaaagaagacaaggaagctactactattactacaagaactaagaagtcagtaataaattagaacgtatggtttgctactagctacgttaatgtgtgatgtatcgtcacttctatgttcttgagagttat

SEQ ID NO: 1000 - protein, 113 aa, Zea mays subsp. mays
  misc_feature (1)..(113): Ceres Seq. ID no. 13599347
MRSLLLALFLVLAFHRGEAAVSCNAVVGDLYPCLSYVVQGGNVPANCCNGIRTLNSQAQTPVDRQGVCRCIKNAIGGVSFSSNNVNNAQSLPAKCGVNLPYSISPSTNCDSIN

SEQ ID NO: 1001 - DNA, 1317 bp, Zea mays subsp. mays
  misc_feature (1)..(1317): Ceres Seq. ID no. 13599348
ggacgatcaggatgtctgattgaccaatcagagcccggttaatcgggctggtcgtcaactaatcgtgattagtcagctgatcgcccctctggcgatcaggagcgatcagccgatctgaaaacattgcttctggggctaggggccgagctgccgcagacaacaccaactgcacattgctgcataggaggtcaggagaaggcgctccagcgcagcacggcagcagggatttctggacggctctgattgaataaaccgtgaaggagatgccctggaatagattcatgcccttcctttcaaaatgttgtacttctaccgttcagacatcttcatcatattcatctttttcctcgtccttctccccgatacaaccatggttatttgtgggtcttggcaaccctggtgagaagtatcaatccaccaggcacaacgtgggttttgatatgatagatgcatttgcgcattcccagggtatacccctgactacacattacttcaaagcactctttggtgaagggatggttgatggagtccctgttcttcttgccaagccccagacttatatgaatctcagtggagaatctgtcggcccacttgctgcctattataaactgccacttaatcgtgtcctagtggcgtttgatgacatggacttgccatgtggagttctccgtctacagccaaaaggaggttctggacgacacaatggatcgattcagccgtgagagagggtgtcgatattctgaagatggtggctgcgaggggtttgacagaggcggcaaaactgacaaatgcggaccagaagtataagcatctgagatcacatggtatccagactaacgatgactagacaaagcttactagggggactactcttttcagcacatctcccgatattcagactaaagacgaaactcgttttatggcctgttgtctagagcatggtaggcttgagaaacaggcgctcgatgagcccctttagaccgtcgctgaacgtgaacgcgtccttgttgtcaccgtacatcaacggcatgctggcggttatgtcggcaactcgctgcactgctggaagtagtttgctgttctcaaagcgtgctccgtttatagttttccatgcatcttcaatcagggagcttatctgtgcaaaggcaacctcagctgtgacgccatgctcactgatgtagcattcgaccgagctgtccacgtcgtttttgttctttccacgctgcgaaagaacacatccatttatttattatttattactgggcaacaatccaaaggacaagaatacttaatggtcttattaaagaattaatcaag

SEQ ID NO: 1002 - protein, 152 aa, Zea mays subsp. mays
  misc_feature (1)..(152): Ceres Seq. ID no. 13599349
MPWNRFMPFLSKCCTSTVQTSSSYSSFSSSFSPIQPWLFVGLGNPGEKYQSTRHNVGFDMIDAFAHSQGIPLTTHYFKALFGEGMVDGVPVLLAKPQTYMNLSGESVGPLAAYYKLPLNRVLVAFDDMDLPCGVLRLQPKGGSGRHNGSIQP

SEQ ID NO: 1003 - protein, 146 aa, Zea mays subsp. mays
  misc_feature (1)..(146): Ceres Seq. ID no. 13599350
MPFLSKCCTSTVQTSSSYSSFSSSFSPIQPWLFVGLGNPGEKYQSTRHNVGFDMIDAFAHSQGIPLTTHYFKALFGEGMVDGVPVLLAKPQTYMNLSGESVGPLAAYYKLPLNRVLVAFDDMDLPCGVLRLQPKGGSGRHNGSIQP

SEQ ID NO: 1004 - protein, 93 aa, Zea mays subsp. mays
  misc_feature (1)..(93): Ceres Seq. ID no. 13599351
MIDAFAHSQGIPLTTHYFKALFGEGMVDGVPVLLAKPQTYMNLSGESVGPLAAYYKLPLNRVLVAFDDMDLPCGVLRLQPKGGSGRHNGSIQP

SEQ ID NO: 1005 - DNA, 469 bp, Zea mays subsp. mays
  misc_feature (1)..(469): Ceres Seq. ID no. 13599357
ccacaaaccccgctgcgccaatagctcttccccagaacaatagactagtcaatgaaggggaggtttattaagcagagcagaagaatatagttaatggttcctggatgagaagtggaaatgctactggctgtggaaggaggaggttttttctcatcgtcagcttcaggatacagtcatggcctcgctcttttgctgcttggacggaaagaagaagagaagcctgtcaaggtatcaccatggagtcagtaccgactagtcgatggggaagctgagcatgtttgtcatctggcttccacgaaaaaccaagctccccgtaaatgtgctcccttcatctgcttcggtagcactgctttggagctcgaaggggcgtctcctccgaaactgagttcaagcaacactttggactctttggaggagccatcccgttcaacaaagaagaaggttaccactaatggttccataactggag

SEQ ID NO: 1006 - protein, 117 aa, Zea mays subsp. mays
  misc_feature (1)..(117): Ceres Seq. ID no. 13599358
MLLAVEGGGFFSSSASGYSHGLALLLLGRKEEEKPVKVSPWSQYRLVDGEAEHVCHLASTKNQAPRKCAPFICFGSTALELEGASPPKLSSSNTLDSLEEPSRSTKKKVTTNGSITG

SEQ ID NO: 1007 - DNA, 1022 bp, Zea mays subsp. mays
  misc_feature (1)..(1022): Ceres Seq. ID no. 13599365
agatttgatcccaacgaaaacgcgtcttcatcttcctcctcctcctttcttttctctcgattttggctgaaagcagctttgtcttttttactacaaccaaatatggatgactgggaggatgaacaaattgcaccacttccagcaaaagttgtgcttaaaagcaactgggatgatgaagatgtagatgagaatgagattaaggactcatgggaggatgatgatgacgaacaacctgctcctccgcctccggtaaagcctgctcctccgaagaaagctgttgagaaaaagggcaaagcggctgaggctccaaaagaagaacctttagatcctctctctgagaaacttcgcatgcagaggcttgttgaagaagcggactacagggcaactgccgaactctttggaacgaagggtgaagagaaaagccttgacatgttcatccccaagtctgaatctgattttttggaatatgctgaaatgatttctcataggcttacaccatatgagaaaagttatcactatatcgcattgctgaaagctgtcatgagactttcggtgaccaacatgaaggcagcagatgttaaagatgttgcttcgtccgttacagcaattgcaaatgaaaagcttaaggctgagaaagaagctgctgctggtagaaagaagacgggtggcaagaagaaacagcttattgtagataaggccgatgacgatctagtagctggtccttatgatgccatggacgattttgacttcatgtagattacaagagctttgtgattgtgagggaatacagtttcgattgcctggcgtctgtttcatcattatctctcgggaagaagagcaaaagtttcttagttctgggatatatatagttggaacaaagaagtcttgctttatgggttttggtctgtttggtctggagacattctctaaagagtcatgttttgtttcttttctgttggttaaaaagctaatactttaatcaattctcgtgtaatggtaatacaaatgtcttatctttgctc

SEQ ID NO: 1008 - protein, 251 aa, Zea mays subsp. mays
  misc_feature (1)..(251): Ceres Seq. ID no. 13599366
RFDPNENASSSSSSSFLFSRFWLKAALSFLLQPNMDDWEDEQIAPLPAKVVLKSNWDDEDVDENEIKDSWEDDDDEQPAPPPPVKPAPPKKAVEKKGKAAEAPKEEPLDPLSEKLRMQRLVEEADYRATAELFGTKGEEKSLDMFIPKSESDFLEYAEMISHRLTPYEKSYHYIALLKAVMRLSVTNMKAADVKDVASSVTAIANEKLKAEKEAAAGRKKTGGKKKQLIVDKADDDLVAGPYDAMDDFDFM

SEQ ID NO: 1009 - protein, 217 aa, Zea mays subsp. mays
  misc_feature (1)..(217): Ceres Seq. ID no. 13599367
MDDWEDEQIAPLPAKVVLKSNWDDEDVDENEIKDSWEDDDDEQPAPPPPVKPAPPKKAVEKKGKAAEAPKEEPLDPLSEKLRMQRLVEEADYRATAELFGTKGEEKSLDMFIPKSESDFLEYAEMISHRLTPYEKSYHYIALLKAVMRLSVTNMKAADVKDVASSVTAIANEKLKAEKEAAAGRKKTGGKKKQLIVDKADDDLVAGPYDAMDDFDFM

SEQ ID NO: 1010 - protein, 135 aa, Zea mays subsp. mays
  misc_feature (1)..(135): Ceres Seq. ID no. 13599368
MQRLVEEADYRATAELFGTKGEEKSLDMFIPKSESDFLEYAEMISHRLTPYEKSYHYIALLKAVMRLSVTNMKAADVKDVASSVTAIANEKLKAEKEAAAGRKKTGGKKKQLIVDKADDDLVAGPYDAMDDFDFM

SEQ ID NO: 1011 - DNA, 897 bp, Zea mays subsp. mays
  misc_feature (1)..(897): Ceres Seq. ID no. 13599369
gagaagaaatcgacttggcactgggtcggcgctgcgttagccactgatctcgaggtcctcaagcttctgaacggtgccactgggcccttctcccggacgcggagcagcggcactaccaacaagccaaatgcatcttcggtggaaccgccgaggacagcaagcatgtcgtcgaagaagcaagcgcatggagcttcagccaaggcgcagtctaaggcggcggcggtgtcaccaagctccccgccgaggtgcagcacgtggaacatgggcgagacagctgagctcgccaaggccctgtggcgcgagatgcgcgcgtggttcctgaccttcgtggacgaggcactggacgtggggttccacctgttcgaagatcaacagaacgtcgctggcaaggggaggcagcacggcggcggacacataacgatggtcctctcgcagttcaagaagatcagcgactggctggaccaggtagggaagatcgcggcggcggaggaggaggagcagaggaccaaggaaaagatcgagctcttgaagcgcaagatctacgggtttgtcattagccacatggggtctgcgttggagagcccagcatccgtctcggtttcttcgaggagctgagggctgttagtggatgcttcatgctctgaagctcgctctctctctctgctcgcagtttctgttcgtactggttcttcaactcgtttaagattgaaaaggccacacagtcatgtagcctgttgttggcgcggttcttttgtgttttctttttgggatgcctaatttatgttgtgaataaattaccgtactgtcattttggatacgtgtctgtttgtcgggtaggattatgaatgaaaagttacttggttcaaaaaaaaaaaaaaaaaagcttatcgataccgt

SEQ ID NO: 1012 - protein, 204 aa, Zea mays subsp. mays
  misc_feature (1)..(204): Ceres Seq. ID no. 15218609
EKKSTWHWVGAALATDLEVLKLLNGATGPFSRTRSSGTTNKPNASSVEPPRTASMSSKKQAHGASAKAQSKAAAVSPSSPPRCSTWNMGETAELAKALWREMRAWFLTFVDEALDVGFHLFEDQQNVAGKGRQHGGGHITMVLSQFKKISDWLDQVGKIAAAEEEEQRTKEKIELLKRKIYGFVISHMGSALESPASVSVSSRS

SEQ ID NO: 1013 - protein, 150 aa, Zea mays subsp. mays
  misc_feature (1)..(150): Ceres Seq. ID no. 15218610
MSSKKQAHGASAKAQSKAAAVSPSSPPRCSTWNMGETAELAKALWREMRAWFLTFVDEALDVGFHLFEDQQNVAGKGRQHGGGHITMVLSQFKKISDWLDQVGKIAAAEEEEQRTKEKIELLKRKIYGFVISHMGSALESPASVSVSSRS

SEQ ID NO: 1014 - protein, 117 aa, Zea mays subsp. mays
  misc_feature (1)..(117): Ceres Seq. ID no. 15218611
MGETAELAKALWREMRAWFLTFVDEALDVGFHLFEDQQNVAGKGRQHGGGHITMVLSQFKKISDWLDQVGKIAAAEEEEQRTKEKIELLKRKIYGFVISHMGSALESPASVSVSSRS

SEQ ID NO: 1015 - DNA, 1321 bp, Zea mays subsp. mays
  misc_feature (1)..(1321): Ceres Seq. ID no. 13599377
cnaaatttacgattagcctagcgactcggcatggctactgtcttcccccgtgacgccggcgtctccacgccggaagccgacgaggctaagaaaatctacgatgaagcacggcgagtggtgtccacctacgagactgttcccagtcccagcggaaccctgcaggattactgccgccaccccagcggctggtgcataaccctgccgatcatggtgagctccatggtcgcagagcagcactttgaggcgcgtggcaccgacgtgctccttgttacgatgcccaagtccgggactacctggatcaaggccctcctctatgctgcggcccaccgcactgacgacacatcatcgtccatactccggcagctcgcctcccacaactcccaccagctcgttcctttcctcgaggcccaggtctacaccaaggaccagattccagacctgagctcgcttcccgcgccacggctcttcgccacgcacatcccggctgagtcgctgccaccctccgttgtggcgtccggctgcaaggtggtgtacttgtgccgggaccccaaggactgcttcgtgtctctctggcactttatgaacaagttcaccccatgggacatcgacgaggcacacggccggttctgcgagggtgtctcgttgtatgggccattttgggagcacgtgctgagctactggcgttggcacgtcgaccgaccgggtcaggtgctcttcctgacttacgaggagctcagcgccgacccgctcggccaactgaggcgcctagccgagttcattgggcgccccttcacgccgggggagcaggaggcgggagtggacagggagattgcggaggcatgtgccatgaaaagcatggtcaaccaggaggtgaaccagtccaggacgaccgaaatcgttgagatgccgattcccaacgggatcttcttccggcgaggcgtggtcggagactggaccaactacctcacgccggagatggcaggaaggatcgatgagattaccaagagcaagtttgaaggatccggcctcatgctgccgaaaacaatctcggaaatctcaaagatctagcatccctccgtcgtgtttgatgtttgaaatcgttcaccttttttttctcttgttgtaaactgcaccctgctggcactggcttggctgaataaaaaaagcttgcattgttcttgttgatcaaacgaaataccagctggcgagttgttgatgttacggaaaaggcctgcttagtcttaggtatttttcttatcggtttaattgtgatcaaatgtgtttgtactctgcttaattattaataaaaatgattgtatgc

SEQ ID NO: 1016 - protein, 345 aa, Zea mays subsp. mays
  misc_feature (1)..(345): Ceres Seq. ID no. 15218612
MATVFPRDAGVSTPEADEAKKIYDEARRVVSTYETVPSPSGTLQDYCRHPSGWCITLPIMVSSMVAEQHFEARGTDVLLVTMPKSGTTWIKALLYAAAHRTDDTSSSILRQLASHNSHQLVPFLEAQVYTKDQIPDLSSLPAPRLFATHIPAESLPPSVVASGCKVVYLCRDPKDCFVSLWHFMNKFTPWDIDEAHGRFCEGVSLYGPFWEHVLSYWRWHVDRPGQVLFLTYEELSADPLGQLRRLAEFIGRPFTPGEQEAGVDREIAEACAMKSMVNQEVNQSRTTEIVEMPIPNGIFFRRGVVGDWTNYLTPEMAGRIDEITKSKFEGSGLMLPKTISEISKI

SEQ ID NO: 1017 - protein, 286 aa, Zea mays subsp. mays
  misc_feature (1)..(286): Ceres Seq. ID no. 15218613
MVSSMVAEQHFEARGTDVLLVTMPKSGTTWIKALLYAAAHRTDDTSSSILRQLASHNSHQLVPFLEAQVYTKDQIPDLSSLPAPRLFATHIPAESLPPSVVASGCKVVYLCRDPKDCFVSLWHFMNKFTPWDIDEAHGRFCEGVSLYGPFWEHVLSYWRWHVDRPGQVLFLTYEELSADPLGQLRRLAEFIGRPFTPGEQEAGVDREIAEACAMKSMVNQEVNQSRTTEIVEMPIPNGIFFRRGVVGDWTNYLTPEMAGRIDEITKSKFEGSGLMLPKTISEISKI

SEQ ID NO: 1018 - protein, 282 aa, Zea mays subsp. mays
  misc_feature (1)..(282): Ceres Seq. ID no. 15218614
MVAEQHFEARGTDVLLVTMPKSGTTWIKALLYAAAHRTDDTSSSILRQLASHNSHQLVPFLEAQVYTKDQIPDLSSLPAPRLFATHIPAESLPPSVVASGCKVVYLCRDPKDCFVSLWHFMNKFTPWDIDEAHGRFCEGVSLYGPFWEHVLSYWRWHVDRPGQVLFLTYEELSADPLGQLRRLAEFIGRPFTPGEQEAGVDREIAEACAMKSMVNQEVNQSRTTEIVEMPIPNGIFFRRGVVGDWTNYLTPEMAGRIDEITKSKFEGSGLMLPKTISEISKI

SEQ ID NO: 1019 - DNA, 612 bp, Zea mays subsp. mays
  misc_feature (1)..(612): Ceres Seq. ID no. 13599378
agaggagacaatgacgaagagaggactcaagtcgcggccttcgtcgccgtcgtacggcggtggctctgctcggaacttggagttggttgggaagtcaagcgaggatgtaaggagctctacaagactcagactcaagcctttgaggaagccgaagactagccacaagcagaagaagaagaaagctactaaagtccatgagaagatgcccaagaaacctcccactgctttcttctttttcttggaggatttcaggaagctatatcaagaggagaatcctgaggtcaagtccatgcgtgagattgggaagacatgtggagagaaatggaaaacaatgacttacgaggagaaggtaaagtattatgatatagccactgagaaaagagaagagtttcaccgagcaatgactgaatatactaagcgagtggaatcaggtgaatttgatgaatcagagaccgaatcagacttttctgaatagacccacattagaaaaacatttgttctaagccttctaataacatttagaagtttgtttttggttgagatcttttctttccttgacactcctgttgactgcactttgagattaatagaaattaaccagtttctcaggtt

SEQ ID NO: 1020 - protein, 157 aa, Zea mays subsp. mays
  misc_feature (1)..(157): Ceres Seq. ID no. 15218615
EETMTKRGLKSRPSSPSYGGGSARNLELVGKSSEDVRSSTRLRLKPLRKPKTSHKQKKKKATKVHEKMPKKPPTAFFFFLEDFRKLYQEENPEVKSMREIGKTCGEKWKTMTYEEKVKYYDIATEKREEFHRAMTEYTKRVESGEFDESETESDFSE

SEQ ID NO: 1021 - protein, 154 aa, Zea mays subsp. mays
  misc_feature (1)..(154): Ceres Seq. ID no. 15218616
MTKRGLKSRPSSPSYGGGSARNLELVGKSSEDVRSSTRLRLKPLRKPKTSHKQKKKKATKVHEKMPKKPPTAFFFFLEDFRKLYQEENPEVKSMREIGKTCGEKWKTMTYEEKVKYYDIATEKREEFHRAMTEYTKRVESGEFDESETESDFSE

SEQ ID NO: 1022 - protein, 90 aa, Zea mays subsp. mays
  misc_feature (1)..(90): Ceres Seq. ID no. 15218617
MPKKPPTAFFFFLEDFRKLYQEENPEVKSMREIGKTCGEKWKTMTYEEKVKYYDIATEKREEFHRAMTEYTKRVESGEFDESETESDFSE

SEQ ID NO: 1023 - DNA, 735 bp, Zea mays subsp. mays
  misc_feature (1)..(735): Ceres Seq. ID no. 13599383
ctaacccaacgaccagacgcaacacgacggcgacggccatggcttcgccggacctcgccgccggcgacggcagctacgactttcaccttcgctctctctccgcggcctcacgggactccgctgcggcctccgaccccgcctctgaccccaacctcctccaatctgttaggagggtgtgcgagatgtgccgaacggcgaaggaagcgaaggacgagatggtggcgcgggcgttccccgtgatgggcaagctatttcagcgatgcgccgccgctcccacgcaggccgttgcctccaccggcgtgctgctcctcaccattttgcaattcttcttggattttggggaggctgttttgcatgatgctgatggtagcttgaaaaccttcttccgctcttgcttaagtagggagtttgcagatcctattgttgcagagcgcacagttgaattccttgtaacaaacaagacaaagatccttagctcctttcccaatttgattccacaggaggctgtaggccaaaaaggtagagaaaaaacagaaaaaaccatatttgtatgataagctactcaaccaatcttttgtaagattctttatagaatatctctcttctcttcctattttccatattcgacttaatcttgttaacacatgccaatgcttgtgtatccttgtttatacacagttctatccattgttgataaagcttatcgataccgtcgacctcgagggggcgtccggt

SEQ ID NO: 1024 - protein, 183 aa, Zea mays subsp. mays
  misc_feature (1)..(183): Ceres Seq. ID no. 13599384
NPTTRRNTTATAMASPDLAAGDGSYDFHLRSLSAASRDSAAASDPASDPNLLQSVRRVCEMCRTAKEAKDEMVARAFPVMGKLFQRCAAAPTQAVASTGVLLLTILQFFLDFGEAVLHDADGSLKTFFRSCLSREFADPIVAERTVEFLVTNKTKILSSFPNLIPQEAVGQKGREKTEKTIFV

SEQ ID NO: 1025 - protein, 171 aa, Zea mays subsp. mays
  misc_feature (1)..(171): Ceres Seq. ID no. 13599385
MASPDLAAGDGSYDFHLRSLSAASRDSAAASDPASDPNLLQSVRRVCEMCRTAKEAKDEMVARAFPVMGKLFQRCAAAPTQAVASTGVLLLTILQFFLDFGEAVLHDADGSLKTFFRSCLSREFADPIVAERTVEFLVTNKTKILSSFPNLIPQEAVGQKGREKTEKTIFV

SEQ ID NO: 1026 - protein, 123 aa, Zea mays subsp. mays
  misc_feature (1)..(123): Ceres Seq. ID no. 13599386
MCRTAKEAKDEMVARAFPVMGKLFQRCAAAPTQAVASTGVLLLTILQFFLDFGEAVLHDADGSLKTFFRSCLSREFADPIVAERTVEFLVTNKTKILSSFPNLIPQEAVGQKGREKTEKTIFV

SEQ ID NO: 1027 - DNA, 576 bp, Zea mays subsp. mays
  misc_feature (1)..(576): Ceres Seq. ID no. 13599387
acaacacaacacatatcttttagtaacctttcaataggcgtcccccaagaactagtaaacatggcaaaactgttgagcctgttcttagccctctcctttgtagcagctatgtttgccataggctctcatgctgatggagactgtgagaatgacctccaaagcctgataagtgactgcaagacatacgtgatgttcccagctaatccaaaggtccctccttcggatgcttgctgtggtgtcatcaagaaggcaaacgtttcttgcttgtgctccaaggtcaccaaagaaactgagaaggttgtgtgcatggagaaggttgtgtatgttgctgagcagtgtaagaggccatttgagcatggcttccagtgcggaagctacaaggttccagcaaactgatgatatcgcaagagggaagcgcttgacgtagtctttagatttcaattgttgcagccgatcaaccttcttagggttgtataatatgaagtcaatgttgagactaatgtgaggtgggagaggcctattgatgcatcaaaagtattatgagctaataataaagccttctccacagattttatg

SEQ ID NO: 1028 - protein, 131 aa, Zea mays subsp. mays
  misc_feature (1)..(131): Ceres Seq. ID no. 13599388
TTQHISFSNLSIGVPQELVNMAKLLSLFLALSFVAAMFAIGSHADGDCENDLQSLISDCKTYVMFPANPKVPPSDACCGVIKKANVSCLCSKVTKETEKVVCMEKVVYVAEQCKRPFEHGFQCGSYKVPAN

SEQ ID NO: 1029 - protein, 111 aa, Zea mays subsp. mays
  misc_feature (1)..(111): Ceres Seq. ID no. 13599389
MAKLLSLFLALSFVAAMFAIGSHADGDCENDLQSLISDCKTYVMFPANPKVPPSDACCGVIKKANVSCLCSKVTKETEKVVCMEKVVYVAEQCKRPFEHGFQCGSYKVPAN

SEQ ID NO: 1030 - protein, 95 aa, Zea mays subsp. mays
  misc_feature (1)..(95): Ceres Seq. ID no. 13599390
MFAIGSHADGDCENDLQSLISDCKTYVMFPANPKVPPSDACCGVIKKANVSCLCSKVTKETEKVVCMEKVVYVAEQCKRPFEHGFQCGSYKVPAN

SEQ ID NO: 1031 - DNA, 844 bp, Zea mays subsp. mays
  misc_feature (1)..(844): Ceres Seq. ID no. 13599395
acgtcagagcagagcacccagcaggccagggccagccggccaaaacacagaaaagctaaacccgacctccgctcgccggcgcccggcaggatggcttcgtcggcggcgtaccctgatgcggacgagaacctggaggccatcatcacccgcatagagcagaagtcccgaaagatcgagacccttctcaagcagtcgaagccggtggaggccctaaagacggcgctcgaggggtcaccgctcaagacccgcgacgagcgatgcaaggttcggccttgatatggttcgtctcgtttcttccgtggattcgatctgggtttcatgactgttgatgtcggtcgcgcgcagtcggcgaactggatcgtggtgcaccgcgcgttgatggcgattagggacgtagacggcatgttcaactccctggatcccgagtactacgacatcctcatgaagtacctttatagaggtttatctacaggggataggccaacatgtgaccagtgcctcaaaattcatgaaaaactgactgagaaggcaggcctaggctgtatattgcgatcccttgctgatactgtaaacactgtatgaactttgtctctgctgctgatggtggatattgcaaagttctctcctgctctttacaatcacatcaggcaaactacctgtagttgttaactagttttgcattgtgtctttctttgccattaggcaattttagttagcgtatcattgtaccttactagaatggccgaacaaaatgtgtattatgttgattttcaagtctttgtattaggggtgacaccggactctaaattgtactctataaaatttaaggatgggattatgggct

SEQ ID NO: 1032 - protein, 91 aa, Zea mays subsp. mays
  misc_feature (1)..(91): Ceres Seq. ID no. 15218618
TSEQSTQQARASRPKHRKAKPDLRSPAPGRMASSAAYPDADENLEAIITRIEQKSRKIETLLKQSKPVEALKTALEGSPLKTRDERCKVRP

SEQ ID NO: 1033 - protein, 87 aa, Zea mays subsp. mays
  misc_feature (1)..(87): Ceres Seq. ID no. 15218619
MTVDVGRAQSANWIVVHRALMAIRDVDGMFNSLDPEYYDILMKYLYRGLSTGDRPTCDQCLKIHEKLTEKAGLGCILRSLADTVNTV

SEQ ID NO: 1034 - protein, 67 aa, Zea mays subsp. mays
  misc_feature (1)..(67): Ceres Seq. ID no. 15218620
MAIRDVDGMFNSLDPEYYDILMKYLYRGLSTGDRPTCDQCLKIHEKLTEKAGLGCILRSLADTVNTV

SEQ ID NO: 1035 - protein, 61 aa, Zea mays subsp. mays
  misc_feature (1)..(61): Ceres Seq. ID no. 15218621
MASSAAYPDADENLEAIITRIEQKSRKIETLLKQSKPVEALKTALEGSPLKTRDERCKVRP

SEQ ID NO: 1036 - DNA, 751 bp, Zea mays subsp. mays
  misc_feature (1)..(751): Ceres Seq. ID no. 13599401
aaaaaacgtcttgatagggaacaaaaagacatggcttcttcttcttcttttttcactttctctagtcagaccacactgcattcccatcttcacagaaacacctttctcaccaaaacccaatttccagttcccacaaaatcatcagaatctaacttctttggtctcagactctctccctccacctctcgctctccgctctctccctgttctttcaaaagctcaatctttgctaaggttaacaaggggcagagtgcaccagacttcacactaaaggatcaaaatggaaagccggtgagcttgaagaagtataaagggaagcctgttgttgtatatttctaccctgccgatgaaacccctggctgcaccaagcaggcttgtgcgttcagagactcttatgagaaattcaagaaagccggcgcagaggtcattggcataagtggtgatgattctgcttctcacaaggcctttgcaagcaaatacaagcttccttacacattgttgagtgacgaagggaatagggtgaggaaagattggggagtgccaggagatttatttggggcattgccagggagacagacttatgttctcgacaaaaacggtgtcgttcagctcatctacaacaaccagttccagcctgagaaacacattgatgagaccttaaagttcctcaaagctgcttgatcttgtattcttctcttcttcctcatctggatgactggatatttacaacaacaattcatgacgttcctct

SEQ ID NO: 1037 - protein, 226 aa, Zea mays subsp. mays
  misc_feature (1)..(226): Ceres Seq. ID no. 13599402
KKRLDREQKDMASSSSFFTFSSQTTLHSHLHRNTFLTKTQFPVPTKSSESNFFGLRLSPSTSRSPLSPCSFKSSIFAKVNKGQSAPDFTLKDQNGKPVSLKKYKGKPVVVYFYPADETPGCTKQACAFRDSYEKFKKAGAEVIGISGDDSASHKAFASKYKLPYTLLSDEGNRVRKDWGVPGDLFGALPGRQTYVLDKNGVVQLIYNNQFQPEKHIDETLKFLKAA

SEQ ID NO: 1038 - protein, 216 aa, Zea mays subsp. mays
  misc_feature (1)..(216): Ceres Seq. ID no. 13599403
MASSSSFFTFSSQTTLHSHLHRNTFLTKTQFPVPTKSSESNFFGLRLSPSTSRSPLSPCSFKSSIFAKVNKGQSAPDFTLKDQNGKPVSLKKYKGKPVVVYFYPADETPGCTKQACAFRDSYEKFKKAGAEVIGISGDDSASHKAFASKYKLPYTLLSDEGNRVRKDWGVPGDLFGALPGRQTYVLDKNGVVQLIYNNQFQPEKHIDETLKFLKAA

SEQ ID NO: 1039 - DNA, 672 bp, Zea mays subsp. mays
  misc_feature (1)..(672): Ceres Seq. ID no. 13599418
agatctcccccatttctcctccacgctgccccctccgcatttcccgtgctcctctcgttccggcatggcggagcagacgcagccacaaggggaaggcggcgctagccccaagcacgagtccctgatggagaagctcgccgacaagctccacgtcggcggcggcaaggccgactcctcctcctcctcggactccgacagtgacgagcggccccgcccctcggcaccgcctgccgacgagctcaagcagccctccttctccgacgccgccgccacggcggccgccgaggccaaagccaaggtgttccgccttttcggccgcgagcagcccatccacaaggccctcggtggcggcaagcgtatggttctgtttcccacgctcccgatgctgcttgctattaggcttgagatttctagatcggatctgggtgggcctcggtgctcgggttgcgggctactagatctgactgctggagtacgttttatggaatgcgctagctagggtgttaagaacgaactggccgtttggatcacagattgggatcttgcctgctttgacaaatggaggcgactagtatgcttgatcactctaacgcttgcttcaaatttgatcaatccaagtcagtgcacttgggtacttatctgaactgtatgctgctaatatttctcaatgtt

SEQ ID NO: 1040 - protein, 165 aa, Zea mays subsp. mays
  misc_feature (1)..(165): Ceres Seq. ID no. 13599419
DLPHFSSTLPPPHFPCSSRSGMAEQTQPQGEGGASPKHESLMEKLADKLHVGGGKADSSSSSDSDSDERPRPSAPPADELKQPSFSDAAATAAAEAKAKVFRLFGREQPIHKALGGGKRMVLFPTLPMLLAIRLEISRSDLGGPRCSGCGLLDLTAGVRFMECAS

SEQ ID NO: 1041 - protein, 144 aa, Zea mays subsp. mays
  misc_feature (1)..(144): Ceres Seq. ID no. 13599420
MAEQTQPQGEGGASPKHESLMEKLADKLHVGGGKADSSSSSDSDSDERPRPSAPPADELKQPSFSDAAATAAAEAKAKVFRLFGREQPIHKALGGGKRMVLFPTLPMLLAIRLEISRSDLGGPRCSGCGLLDLTAGVRFMECAS

SEQ ID NO: 1042 - protein, 124 aa, Zea mays subsp. mays
  misc_feature (1)..(124): Ceres Seq. ID no. 13599421
MEKLADKLHVGGGKADSSSSSDSDSDERPRPSAPPADELKQPSFSDAAATAAAEAKAKVFRLFGREQPIHKALGGGKRMVLFPTLPMLLAIRLEISRSDLGGPRCSGCGLLDLTAGVRFMECAS

SEQ ID NO: 1043 - DNA, 493 bp, Zea mays subsp. mays
  misc_feature (1)..(493): Ceres Seq. ID no. 13599430
cttcccatcctgctctgctcagcgcctctactgcttcccctccgtccaccgatcgagtgaaaaagctctccgttcgccggaagatccacgaccatggcgggcacggccaactgcatcgacatcatcctcgccatcatcctcccgcccctcggcgtcttcctcaagttcggatgcgggcacgagttctggatctgcctcttgctgaccttcctcgggtacatcccgggtatcatctacgccatctacgccatcaccaagtaaactagcaagccgtcccgagtgttccgcgacacaatattttcaggatgatttgatctgtctagtccctccttgcctgtgtgggttcttttaattcttttccgtgtgcgttgatgatgcgaattcctctgtggtttccatggaccatgtgaagagcatcagcttctgtatgtatatgtactagtatgatatatgggagtttatatatgcttcccgagtgggaatacttcttgct

SEQ ID NO: 1044 - protein, 87 aa, Zea mays subsp. mays
  misc_feature (1)..(87): Ceres Seq. ID no. 13599431
SHPALLSASTASPPSTDRVKKLSVRRKIHDHGGHGQLHRHHPRHHPPAPRRLPQVRMRARVLDLPLADLPRVHPGYHLRHLRHHQVN

SEQ ID NO: 1045 - protein, 67 aa, Zea mays subsp. mays
  misc_feature (1)..(67): Ceres Seq. ID no. 13599432
FPSCSAQRLYCFPSVHRSSEKALRSPEDPRPWRARPTASTSSSPSSSRPSASSSSSDAGTSSGSASC

SEQ ID NO: 1046 - protein, 55 aa, Zea mays subsp. mays
  misc_feature (1)..(55): Ceres Seq. ID no. 13599433
MAGTANCIDIILAIILPPLGVFLKFGCGHEFWICLLLTFLGYIPGIIYAIYAITK

SEQ ID NO: 1047 - DNA, 941 bp, Zea mays subsp. mays
  misc_feature (1)..(941): Ceres Seq. ID no. 13599434
agaacatcctaatcgaaaaagtggatatttgaagcacacggtcttgtctcgctcacccgggcaatccgcgcgaggtgcggcgcacatagccaggacccagaggcgattaggcgaacgggcggcgcggcacgagtcgagttttgaccgtgcggcgcgccgcgcgcgtatcaggcaacaatggagacgccgcgccttgtagtcgggcggcgtcgcggggccactcctcggttccggcggcggcgcctgccgcatccgcgcggcggggcacattgcttccccttcgcccgcgctcgaccacccgtgcttataacccggtgcttctacttcccctcttccagttgcgttcgaatcccacacccagcaccactccgtgcggccacgctctcacaattgctgcgcacgcgcgtgcgtgtatgcgtggctgttcctcagctgttccggtcctcccattcgtgtttcagggtggggaacacggcgattctcgaagctccagtaacgtcaggtaccaggtttgcttgatgagcaacgtgagggtgatgttggggagctctttagcctggctcaatggaatatcctgtgcattaacaagcagcggcttatggccatgggggagccgaagaaactgcaggatgaaaataatttgcttctcgaggaaatacgagtactacaaacagaaataaaagatgaaggcaataaagtatggatctgtgccagtacagataagctttcccagcgatgaatcaagggagtcggaggagcatgattggcacaatacagcactgtctcagtacatcatctcaacctatggagatccgtctctttctcaagtacttgatgactttgtaagttcacaatctcatgggagaatagctatcttgtcacaagctgttcactgtgcacaatcagttatctcttaatagatawcacaataawgttctggg

SEQ ID NO: 1048 - protein, 113 aa, Zea mays subsp. mays
  misc_feature (1)..(113): Ceres Seq. ID no. 15218606
METPRLVVGRRRGATPRFRRRRLPHPRGGAHCFPFARARPPVLITRCFYFPSSSCVRIPHPAPLRAATLSQLLRTRVRVCVAVPQLFRSSHSCFRVGNTAILEAPVTSGTRFA

SEQ ID NO: 1049 - protein, 88 aa, Zea mays subsp. mays
  misc_feature (1)..(88): Ceres Seq. ID no. 15218607
MRGCSSAVPVLPFVFQGGEHGDSRSSSNVRYQVCLMSNVRVMLGSSLAWLNGISCALTSSGLWPWGSRRNCRMKIICFSRKYEYYKQK

SEQ ID NO: 1050 - protein, 77 aa, Zea mays subsp. mays
  misc_feature (1)..(77): Ceres Seq. ID no. 15218608
MKAIKYGSVPVQISFPSDESRESEEHDWHNTALSQYIISTYGDPSLSQVLDDFVSSQSHGRIAILSQAVHCAQSVIS

SEQ ID NO: 1051 - DNA, 731 bp, Zea mays subsp. mays
  misc_feature (1)..(731): Ceres Seq. ID no. 13599475
aaagcaggttccctctcttctagccattcaaaaatagtgagaatggggttgttgaagaaaaaacacgagaaacattcacatccgacatttaagggtttcttaacggccgttttagctaccatagccgcaatgttcctcttattgctcgccggtttatccctcgctggcacagccgtggcatttatcgccactatgccgctattcgtcgtattcagtccggttctcgtaccagctggtattaccactggtttgctagctatgggtttagccacctcgggcggctccggtttgacggctctcagcatcatgtcgtggctcaagaaattaacggttaaggagctgctaaaaattccgggtcaaacgctcgtcacaggtgttcactcccaaattttgttctccaggtggccatggatcgcactgaataaatgaaaagaagccgtgggcatagccaaatgatgatatgaaataattgatatatagttattataatttcctaaattaaatctagttaacccaacttttcttagtaataattattacgtgggggtggaactagagttttcaaatagcatcttattaatgtatgtcgtggtacacaataatgaaaaatgtatgcgttttcgctacctactgctatactgtactctacaactatgcaagtattgtatatgatatctaatggtatatcattttgaaaacgaaataatgtcattaatatttacctttagacc

SEQ ID NO: 1052 - protein, 142 aa, Zea mays subsp. mays
  misc_feature (1)..(142): Ceres Seq. ID no. 13599476
KAGSLSSSHSKIVRMGLLKKKHEKHSHPTFKGFLTAVLATIAAMFLLLLAGLSLAGTAVAFIATMPLFVVFSPVLVPAGITTGLLAMGLATSGGSGLTALSIMSWLKKLTVKELLKIPGQTLVTGVHSQILFSRWPWIALNK

SEQ ID NO: 1053 - protein, 128 aa, Zea mays subsp. mays
  misc_feature (1)..(128): Ceres Seq. ID no. 13599477
MGLLKKKHEKHSHPTFKGFLTAVLATIAAMFLLLLAGLSLAGTAVAFIATMPLFVVFSPVLVPAGITTGLLAMGLATSGGSGLTALSIMSWLKKLTVKELLKIPGQTLVTGVHSQILFSRWPWIALNK

SEQ ID NO: 1054 - protein, 99 aa, Zea mays subsp. mays
  misc_feature (1)..(99): Ceres Seq. ID no. 13599478
MFLLLLAGLSLAGTAVAFIATMPLFVVFSPVLVPAGITTGLLAMGLATSGGSGLTALSIMSWLKKLTVKELLKIPGQTLVTGVHSQILFSRWPWIALNK

SEQ ID NO: 1055 - DNA, 1243 bp, Zea mays subsp. mays
  misc_feature (1)..(1243): Ceres Seq. ID no. 13599524
agaagaccactatattctgcctctccgttctgttcttgccgtgttctatttttccgctctgctgtacatggcgtcggttgcaggcgaggggaggagccgggtgctggtgataggcggcacgggctacataggccgcttcatcgtcgccgccagcgcacgcgagggccaccccaccgccgtcctcgtccgcgacgccgcgcccgccgacccagccaaggccgccgtcctccagggattccgggatgccggcgtcaccatcgtcaagggtgatatgtatgatcatgagagcctggtgacagccattaaatcagcagatgttgtgatctcggccgtgggttatcaacagctaccggatcaaactctcattatctcggcaattaaggaagttgggcatgtaaagagattcttcccatcagagtatggtaatgatgtggatcgtaaccatgcagttgaacctgcaaagacagtattcggtgggaaagctcatataaggcgtgccattgaggctgaggggattccctacacatatgtctcttccaacttctttgctggtcgtttcttgcgaagccttgcgcagattggggtcacggagcctccaaccgagaaggttctcattatgggtgatggaaatgtaaaaggaatctttgcggcggaggaagacgtgggaacctacactattaaagctgtagatgatccaaggaccctgaacaaaatcctatatctgaggccaccaagtaacactttgtcccataatgagcttgtctcactctgggagaagaaacttggtaagacacttgagagggtgtacctcccagaggacgaactcctgaagaagattcgagagtcatcagcgccgctgaatgtagcactggcaatcagccactctgtctggttgaagggggaccacactaactttgagatcgacccatcatttggagttgaagccactcagctttaccctgatgtgccttacattaccgtggatgaatacctaaataggttcctttaaactcctaaatcctatcgtcgccaatattcatatactttgaataaatgttggaggttatgtatttttactagaatggcacgtgaattacgtaatcagagtgtgagacctcaatcatgtgaggaatgcatcttgcattcccttgagcttagaatatataaactgaggttgtataaatttggaaattttagcttgatggaacatgataccgtatgtaacagcccgggggtttacgcc

SEQ ID NO: 1056 - protein, 335 aa, Zea mays subsp. mays
  misc_feature (1)..(335): Ceres Seq. ID no. 13599525
EDHYILPLRSVLAVFYFSALLYMASVAGEGRSRVLVIGGTGYIGRFIVAASAREGHPTAVLVRDAAPADPAKAAVLQGFRDAGVTIVKGDMYDHESLVTAIKSADVVISAVGYQQLPDQTLIISAIKEVGHVKRFFPSEYGNDVDRNHAVEPAKTVFGGKAHIRRAIEAEGIPYTYVSSNFFAGRFLRSLAQIGVTEPPTEKVLIMGDGNVKGIFAAEEDVGTYTIKAVDDPRTLNKILYLRPPSNTLSHNELVSLWEKKLGKTLERVYLPEDELLKKIRESSAPLNVALAISHSVWLKGDHTNFEIDPSFGVEATQLYPDVPYITVDEYLNRFL

SEQ ID NO: 1057 - protein, 313 aa, Zea mays subsp. mays
  misc_feature (1)..(313): Ceres Seq. ID no. 13599526
MASVAGEGRSRVLVIGGTGYIGRFIVAASAREGHPTAVLVRDAAPADPAKAAVLQGFRDAGVTIVKGDMYDHESLVTAIKSADVVISAVGYQQLPDQTLIISAIKEVGHVKRFFPSEYGNDVDRNHAVEPAKTVFGGKAHIRRAIEAEGIPYTYVSSNFFAGRFLRSLAQIGVTEPPTEKVLIMGDGNVKGIFAAEEDVGTYTIKAVDDPRTLNKILYLRPPSNTLSHNELVSLWEKKLGKTLERVYLPEDELLKKIRESSAPLNVALAISHSVWLKGDHTNFEIDPSFGVEATQLYPDVPYITVDEYLNRFL

SEQ ID NO: 1058 - protein, 245 aa, Zea mays subsp. mays
  misc_feature (1)..(245): Ceres Seq. ID no. 13599527
MYDHESLVTAIKSADVVISAVGYQQLPDQTLIISAIKEVGHVKRFFPSEYGNDVDRNHAVEPAKTVFGGKAHIRRAIEAEGIPYTYVSSNFFAGRFLRSLAQIGVTEPPTEKVLIMGDGNVKGIFAAEEDVGTYTIKAVDDPRTLNKILYLRPPSNTLSHNELVSLWEKKLGKTLERVYLPEDELLKKIRESSAPLNVALAISHSVWLKGDHTNFEIDPSFGVEATQLYPDVPYITVDEYLNRFL

SEQ ID NO: 1059 - DNA, 613 bp, Zea mays subsp. mays
  misc_feature (1)..(613): Ceres Seq. ID no. 13599530
aacaaaagaagaagcttagaacgcaaaagcaaagtgtctctcttttcttagcacacacaaaaagaagagaaaagcaagagacaatggtttcggcactgagattcttcacatgtcttgtcttggcagtgtgcatagttgcctcagtagatgcagcaatctcatgtaacacagtggtaggtagcttgggtacttgttacgtttacctaaggcaaggcgggattgtgccgccttcatgctgtaggggagtaagaaatttgaacggtatggctcaaaccacaccagatcgtcaacaagcatgcaaatgcgtacagtcctttacaaaatctgtccctggtctcaaccaaaatttagcatctgggcttcctggaaagtgcggtgttagccttccctatcccatctccattagcatgaactgcgacaacgtcaagttaagcggaactcatatatcatcgtgaggatgaagagtatggtctacaataagtaaaacgaattaatggtttacatactcgctgattcatcatctccgacttgtcttgtttttatattgttgttgaaaaagtttgtttatgttactttgtaatattttgctctacattgtatcttaattatgttt

SEQ ID NO: 1060 - protein, 150 aa, Zea mays subsp. mays
  misc_feature (1)..(150): Ceres Seq. ID no. 13599531
QKKKLRTQKQSVSLFLAHTKRREKQETMVSALRFFTCLVLAVCIVASVDAAISCNTVVGSLGTCYVYLRQGGIVPPSCCRGVRNLNGMAQTTPDRQQACKCVQSFTKSVPGLNQNLASGLPGKCGVSLPYPISISMNCDNVKLSGTHISS

SEQ ID NO: 1061 - protein, 123 aa, Zea mays subsp. mays
  misc_feature (1)..(123): Ceres Seq. ID no. 13599532
MVSALRFFTCLVLAVCIVASVDAAISCNTVVGSLGTCYVYLRQGGIVPPSCCRGVRNLNGMAQTTPDRQQACKCVQSFTKSVPGLNQNLASGLPGKCGVSLPYPISISMNCDNVKLSGTHISS

SEQ ID NO: 1062 - DNA, 852 bp, Zea mays subsp. mays
  misc_feature (1)..(852): Ceres Seq. ID no. 13599581
atctctcttcatttccctctctcgaacaagaagacaacaactcaaaacgcagagaagatctccagaacgacaccgtttcgtagcaaagatgctttcttcgtctccaacctccttcactcatccattcctctccacgtctccgcctctctcccccatatctccgccgtctcgctcacctcgcctcccgcctcctctcgtctccgcctcttgctcctacacctgcacggaggatccgccgaggctgcaccagatcccgcggcgaacgacgccggcgaacgcttcgctctacgagattctagaggttcctcgcggcgcgacgagccaggatatcaaatcggcttaccggaggttggctaggatctgccaccccgacgtggcggcgggaaccgatcggagtaactcttcggcggatgagttcatgaagatccacgcggcgtactgtacgctctctgatcctgacaaacgctctgtttacgatcggaggatgcttcgtcggagccgtccgttgaccgtcagcacctccgggatgggcagttacgttggacggaactgggaaaccgatcagtgctggtagcgagttgactcggtgaccgagttagctcgagttaattcgaattaataaaacacggttgtaaaaataggaagcgataaaagctggggttagcgatgtaattaacagtagtattagtgtgctaacatacgccaagagctaaacgtacgctccctctccctgcccacggccacgggcgatcagcgccgtttgcatcgtgttacgtaggatctacgtgtgttttttttttaccttctgaatcctgtaatacttatcaatgaaaacaaaataaacactgttat

SEQ ID NO: 1063 - protein, 190 aa, Zea mays subsp. mays
  misc_feature (1)..(190): Ceres Seq. ID no. 13599582
SLFISLSRTRRQQLKTQRRSPERHRFVAKMLSSSPTSFTHPFLSTSPPLSPISPPSRSPRLPPPLVSASCSYTCTEDPPRLHQIPRRTTPANASLYEILEVPRGATSQDIKSAYRRLARICHPDVAAGTDRSNSSADEFMKIHAAYCTLSDPDKRSVYDRRMLRRSRPLTVSTSGMGSYVGRNWETDQCW

SEQ ID NO: 1064 - protein, 161 aa, Zea mays subsp. mays
  misc_feature (1)..(161): Ceres Seq. ID no. 13599583
MLSSSPTSFTHPFLSTSPPLSPISPPSRSPRLPPPLVSASCSYTCTEDPPRLHQIPRRTTPANASLYEILEVPRGATSQDIKSAYRRLARICHPDVAAGTDRSNSSADEFMKIHAAYCTLSDPDKRSVYDRRMLRRSRPLTVSTSGMGSYVGRNWETDQCW

SEQ ID NO: 1065 - protein, 118 aa, Zea mays subsp. mays
  misc_feature (1)..(118): Ceres Seq. ID no. 13599584
ISLHFPLSNKKTTTQNAEKISRTTPFRSKDAFFVSNLLHSSIPLHVSASLPHISAVSLTSPPASSRLRLLLLHLHGGSAEAAPDPAANDAGERFALRDSRGSSRRDEPGYQIGLPEVG

SEQ ID NO: 1066 - DNA, 930 bp, Zea mays subsp. mays
  misc_feature (1)..(930): Ceres Seq. ID no. 13599585
acacattcaaactaataactctcaaaaactgagagcagaagagagtagaggagaaacaaatgtccatatccatggcgctattctctccgccgatctcttcttcagttcaaaaccccaagatctcgttccctctcctctccaccaagcgcttctctctcctctccgtcactcgcgcttcctccgattctgctgcagtctctgcaaccaccgtagagattccgaagcccgcgtcggtttctgtagaggaggtgccatctaaacctcctgcggaaagctcctccgacgagactgatctgccaaccacggcgacgggaatcaagtttcaggatgcgaagtgggttaatggaacctgggatctgaaacagttcgagaaagacgggaaaaccgattgggattctattatcgtcgctgaggcaaagaggagaaagtggcttgaagataacccagaaacaactactaacgctgagcctgttcttttcgacacctcgatcattccatggtgggcgtggatgaagagataccatctaccagaagctgaactcctcaatggtcgtgctgcgatgatagggttcttcatggcttactttgttgacagccttaccggagtaggacttgttgatcaaatgggaaacttcttctgcaaaacactcttgtttgtggctgtagctggagttcttttcatccgcaagaacgaagatttagataagctcaagggtctgatcgaagagacgacgctatatgacaagcaatggcaagcggcttggaaagagccggaatcatcatcatcgacgctttcttcaaagaagtgaacaaaatctttctcgctttttgtttcctcttttctcatgtgatgtttgtgatcagtgaaaaaagtctcaagataaacgcaaaatctatttggctttgaaaaaatctctttaaagtagtccc

SEQ ID NO: 1067 - protein, 249 aa, Zea mays subsp. mays
  misc_feature (1)..(249): Ceres Seq. ID no. 15218600
MSISMALFSPPISSSVQNPKISFPLLSTKRFSLLSVTRASSDSAAVSATTVEIPKPASVSVEEVPSKPPAESSSDETDLPTTATGIKFQDAKWVNGTWDLKQFEKDGKTDWDSIIVAEAKRRKWLEDNPETTTNAEPVLFDTSIIPWWAWMKRYHLPEAELLNGRAAMIGFFMAYFVDSLTGVGLVDQMGNFFCKTLLFVAVAGVLFIRKNEDLDKLKGLIEETTLYDKQWQAAWKEPESSSSTLSSKK

SEQ ID NO: 1068 - protein, 245 aa, Zea mays subsp. mays
  misc_feature (1)..(245): Ceres Seq. ID no. 15218601
MALFSPPISSSVQNPKISFPLLSTKRFSLLSVTRASSDSAAVSATTVEIPKPASVSVEEVPSKPPAESSSDETDLPTTATGIKFQDAKWVNGTWDLKQFEKDGKTDWDSIIVAEAKRRKWLEDNPETTTNAEPVLFDTSIIPWWAWMKRYHLPEAELLNGRAAMIGFFMAYFVDSLTGVGLVDQMGNFFCKTLLFVAVAGVLFIRKNEDLDKLKGLIEETTLYDKQWQAAWKEPESSSSTLSSKK

SEQ ID NO: 1069 - DNA, 744 bp, Zea mays subsp. mays
  misc_feature (1)..(744): Ceres Seq. ID no. 13599587
atcgagagcagaaaacaaagatcgatccatcgagaccgaccgagagcaggattgaagttgaaaggaccgtccgtacgggttacttctccagtcagtctccggtgcgccttcttcgccgatcagcgcgactgctgcttgtacatggccacgagagcggcgctcgtcgccggccgccgtgcggccggtcaggacgggctcgcccttctctcctcgggctgcaggcgcgaaggagctcgtccgagctccccccacaagagcagcagcgccaccgagcgggagggccacggcgacgcgacggcggcgcaggtggaggcggcgctgaaccgcaagaacgcggacgtggtcgacgtcgaccgctccggctccgcgacgctggtcccggccgacgcgcggcgcggcgcgggcgacgagtgggtgcccgaccaggagacgggcgtctttgtcccggccgacgaggagtcgtccgggcccggcgacgggggcgtggccgacgtcggcggcgcgcgcgggcaagccccgtcggtgctggaccaggcggtgttcgtccgcgaggagcacatggaggacgtcgagaggcccgccgtcggcgtggacgatgccggcgccgcctgagcgcggggaccgtgtcctcgggcggcccgccgctgcgaccagcaggcagagtagctgtagcctgtagggcaagcaaagcaaggttttctttgttctagcttccggatcgatagaataatgaagtcagatctc

SEQ ID NO: 1070 - protein, 235 aa, Zea mays subsp. mays
  misc_feature (1)..(235): Ceres Seq. ID no. 13599588
REQKTKIDPSRPTESRIEVERTVRTGYFSSQSPVRLLRRSARLLLVHGHESGARRRPPCGRSGRARPSLLGLQARRSSSELPPQEQQRHRAGGPRRRDGGAGGGGAEPQERGRGRRRPLRLRDAGPGRRAARRGRRVGARPGDGRLCPGRRGVVRARRRGRGRRRRRARASPVGAGPGGVRPRGAHGGRREARRRRGRCRRRLSAGTVSSGGPPLRPAGRVAVACRASKARFSLF

SEQ ID NO: 1071 - protein, 203 aa, Zea mays subsp. mays
  misc_feature (1)..(203): Ceres Seq. ID no. 13599589
IESRKQRSIHRDRPRAGLKLKGPSVRVTSPVSLRCAFFADQRDCCLYMATRAALVAGRRAAGQDGLALLSSGCRREGARPSSPHKSSSATEREGHGDATAAQVEAALNRKNADVVDVDRSGSATLVPADARRGAGDEWVPDQETGVFVPADEESSGPGDGGVADVGGARGQAPSVLDQAVFVREEHMEDVERPAVGVDDAGAA

SEQ ID NO: 1072 - protein, 156 aa, Zea mays subsp. mays
  misc_feature (1)..(156): Ceres Seq. ID no. 13599590
MATRAALVAGRRAAGQDGLALLSSGCRREGARPSSPHKSSSATEREGHGDATAAQVEAALNRKNADVVDVDRSGSATLVPADARRGAGDEWVPDQETGVFVPADEESSGPGDGGVADVGGARGQAPSVLDQAVFVREEHMEDVERPAVGVDDAGAA

SEQ ID NO: 1073 - DNA, 894 bp, Zea mays subsp. mays
  misc_feature (1)..(894): Ceres Seq. ID no. 13599595
aaaacacaaaaccagacctcaacttcaaacagcttctgaacaactcttgaaaccaaaaacttctctaatgccggaagaaatacgagagcacggtggtcacaccgatcctaaaccttctccaccaccgccaaaacgtggcctcatcagccgcaagagacagctcgtgtttctctccttcatgattctactagctgctaaaggactcgttggtatcggagaagtagcgtttgtaatactgtcttatatatacttgtacgagttcatctccaggtttgccttcccacgcaagcaaaacgagcagaggaggagactctcaaaccctaaaaacaaactctttcaagcttacttcctcgccactgccatcatcggcctactcttcccgatttgctacatcggagatggactataccggggagacatccacggtgttagagctgcagctccacatcttttcctcctctccggtcaagccttcaccgaaccaattggtttctccgaccggtttgcaacacccattggtattctcggaccggttttctacaacgctcgtcgtatcttcgctctgttggattgggttaaagccgagttcgcagatattcagcgtccaggtggtccaataagattgtacggaggaagagctatagcgtcggttaacaccgtcatgtggttttacaatctgtttggtctcttgttgcctgtgtttcttcctcggtcttgtgagatttacttctcagccgacgacaacaaagtagattaagtaacctcccgtctactttctactttagaatctcttatgttgtgtttgtgtcagtgcttggtaaagattattgttaataaaagcgacagtttatgactgcaaaaaaaaaaaaaaaaaagcttatcgataccgtcgac

SEQ ID NO: 1074 - protein, 251 aa, Zea mays subsp. mays
  misc_feature (1)..(251): Ceres Seq. ID no. 13599596
KHKTRPQLQTASEQLLKPKTSLMPEEIREHGGHTDPKPSPPPPKRGLISRKRQLVFLSFMILLAAKGLVGIGEVAFVILSYIYLYEFISRFAFPRKQNEQRRRLSNPKNKLFQAYFLATAIIGLLFPICYIGDGLYRGDIHGVRAAAPHLFLLSGQAFTEPIGFSDRFATPIGILGPVFYNARRIFALLDWVKAEFADIQRPGGPIRLYGGRAIASVNTVMWFYNLFGLLLPVFLPRSCEIYFSADDNKVD

SEQ ID NO: 1075 - protein, 229 aa, Zea mays subsp. mays
  misc_feature (1)..(229): Ceres Seq. ID no. 13599597
MPEEIREHGGHTDPKPSPPPPKRGLISRKRQLVFLSFMILLAAKGLVGIGEVAFVILSYIYLYEFISRFAFPRKQNEQRRRLSNPKNKLFQAYFLATAIIGLLFPICYIGDGLYRGDIHGVRAAAPHLFLLSGQAFTEPIGFSDRFATPIGILGPVFYNARRIFALLDWVKAEFADIQRPGGPIRLYGGRAIASVNTVMWFYNLFGLLLPVFLPRSCEIYFSADDNKVD

SEQ ID NO: 1076 - protein, 192 aa, Zea mays subsp. mays
  misc_feature (1)..(192): Ceres Seq. ID no. 13599598
MILLAAKGLVGIGEVAFVILSYIYLYEFISRFAFPRKQNEQRRRLSNPKNKLFQAYFLATAIIGLLFPICYIGDGLYRGDIHGVRAAAPHLFLLSGQAFTEPIGFSDRFATPIGILGPVFYNARRIFALLDWVKAEFADIQRPGGPIRLYGGRAIASVNTVMWFYNLFGLLLPVFLPRSCEIYFSADDNKVD

SEQ ID NO: 1077 - DNA, 1325 bp, Zea mays subsp. mays
  misc_feature (1)..(1325): Ceres Seq. ID no. 13599631
cactcgtcacgctccagctgccggccgcgacacgctccgcacgcgatctccactcgctccgtccatccggatccccttcctccctccccagccagccagcggccatgtcgtcctcgtcggacaaccccaacacggtcaccgaccgcggcctcttcagcaagagcagcaaggacgacggcgccgacaagaagaagaagcaggaggagaagaaagaggatggggaggagggcggcggcgggttcatcgacaaggtcaaggacttcatccacgacatcggggagaagatcgaggaggcggtggggttcggcaagcccagcgccgacgtggcccggatccacgtgccccacatcggcctccaccgcgccgacctcgtcgtcgacgtgctcatcaagaaccccaacccggtgcccatcccgctcgtcgacatcgactacctcatcgacagcgacggccggaagctcgtcgcggggctcatcccggacgccggcaccatccgcgcgcacggcgaggagacggtcaaggtgcccatcacgctcgacttcgacgacatccggagcacctacgcggacatcaagccgggcagcatcatcccctacctgctccgggtcatcttcctcgtggacgtgcccgtcttcggccgcatcaagatcccgctggacaagtccggggagatccccatcccgtacaagcccgacgtggacgtggacaagatcaagttccaccacttctccttcgaggagaccacggccaccatccacctgagcctggagaacaagaacgacttcgacctcgggctcaacctgctccagtacgagatgtggctcggcgacgacagcgtggtggaggcggagctcaccgactccaccaggatcgagaagcaggggatcaccaagatgcagatccccttcaccttcaggcccaaggacctgggatctgccgtctgggacatgatcaggggcaggggcaccggctacagcatcaagggcaagatcgatgtcgacaccccctttggcaacatgaagctgcccatcgacaaagtcggcggaaccactcgcctcaagaaggacgacgacgatgacgatgagtgaagtgctgttactgaacatacaagatagtcaagcagggagccagggaggatccagctgaactctttactctagcttatggtatctttgttgatggcatcatccgaacatcgtcagcgtttttatgtttcggtgctcagtgttctttgcgggaactcatccagtgtgtattctttctgtgttaactttgtcaagtggaaacagacctgaaaataaattccatcgcccctttcttgtttg

SEQ ID NO: 1078 - protein, 361 aa, Zea mays subsp. mays
  misc_feature (1)..(361): Ceres Seq. ID no. 13599632
LVTLQLPAATRSARDLHSLRPSGSPSSLPSQPAAMSSSSDNPNTVTDRGLFSKSSKDDGADKKKKQEEKKEDGEEGGGGFIDKVKDFIHDIGEKIEEAVGFGKPSADVARIHVPHIGLHRADLVVDVLIKNPNPVPIPLVDIDYLIDSDGRKLVAGLIPDAGTIRAHGEETVKVPITLDFDDIRSTYADIKPGSIIPYLLRVIFLVDVPVFGRIKIPLDKSGEIPIPYKPDVDVDKIKFHHFSFEETTATIHLSLENKNDFDLGLNLLQYEMWLGDDSVVEAELTDSTRIEKQGITKMQIPFTFRPKDLGSAVWDMIRGRGTGYSIKGKIDVDTPFGNMKLPIDKVGGTTRLKKDDDDDDE

SEQ ID NO: 1079 - protein, 358 aa, Zea mays subsp. mays
  misc_feature (1)..(358): Ceres Seq. ID no. 13599633
TRHAPAAGRDTLRTRSPLAPSIRIPFLPPQPASGHVVLVGQPQHGHRPRPLQQEQQGRRRRQEEEAGGEERGWGGGRRRVHRQGQGLHPRHRGEDRGGGGVRQAQRRRGPDPRAPHRPPPRRPRRRRAHQEPQPGAHPARRHRLPHRQRRPEARRGAHPGRRHHPRARRGDGQGAHHARLRRHPEHLRGHQAGQHHPLPAPGHLPRGRARLRPHQDPAGQVRGDPHPVQARRGRGQDQVPPLLLRGDHGHHPPEPGEQERLRPRAQPAPVRDVARRRQRGGGGAHRLHQDREAGDHQDADPLHLQAQGPGICRLGHDQGQGHRLQHQGQDRCRHPLWQHEAAHRQSRRNHSPQEGRRR

SEQ ID NO: 1080 - protein, 327 aa, Zea mays subsp. mays
  misc_feature (1)..(327): Ceres Seq. ID no. 13599634
MSSSSDNPNTVTDRGLFSKSSKDDGADKKKKQEEKKEDGEEGGGGFIDKVKDFIHDIGEKIEEAVGFGKPSADVARIHVPHIGLHRADLVVDVLIKNPNPVPIPLVDIDYLIDSDGRKLVAGLIPDAGTIRAHGEETVKVPITLDFDDIRSTYADIKPGSIIPYLLRVIFLVDVPVFGRIKIPLDKSGEIPIPYKPDVDVDKIKFHHFSFEETTATIHLSLENKNDFDLGLNLLQYEMWLGDDSVVEAELTDSTRIEKQGITKMQIPFTFRPKDLGSAVWDMIRGRGTGYSIKGKIDVDTPFGNMKLPIDKVGGTTRLKKDDDDDDE

SEQ ID NO: 1081 - DNA, 902 bp, Zea mays subsp. mays
  misc_feature (1)..(902): Ceres Seq. ID no. 13599635
atacacgccagaaactaatccagatagctagcctttgatttctcacttcaatctgacgaagtgcacacctaggcaacaaactcgaacgcgcgcggtagtggagccgagatgcagggaggggcgacggccaagcagcaggcgcgagacggtgaccgcggcgcggcgaagacgccgacgacggaggggaagggcgacgccgccggcgccaaggctagcgccgacgtggcgaagggcgacgccgccgtcgccaaggctgctggggacgacgtcgtcgtagggaagggcgacgcaggcaacaaggccggcgccggggccatgcaccacggcctgtcggccgtggaggcgaaggactcccagaccatcgtcgcgctgcagtcgccggtgaccgtcatgcgccccgtccgcggcgacctcgaggagcacctccccaagccatgtgagagcgcgcgcgcccgccacttcctctcgtcgctgaggcctgctggtgctttgttacattgttacttactgatgacgcgtcgtccactgagacgaggagcacagatctggcgcgagccctggtggcgccggacatctaccaccccgacggcaccgcggccgacgagcacggccaccaccacatgagcgtgttgcagcagcacgtcgccttcttcgaccgcgacgacaacggcatcatctacccttgggagacgtactccggtatgcgtgcatgcgaattgtattattaattgctgcgtcgatcgttctctagctagcgagttccaccagatcgagtagcagtcggtgctgattgctcgtgcaaattccaaatgtgatcgctccgccgcgctgagacgagatacactaactgcaaacgatgcaggatgtcgtgcgcttgggttcaacatgatcctgtctctctt

SEQ ID NO: 1082 - protein, 171 aa, Zea mays subsp. mays
  misc_feature (1)..(171): Ceres Seq. ID no. 15218868
MQGGATAKQQARDGDRGAAKTPTTEGKGDAAGAKASADVAKGDAAVAKAAGDDVVVGKGDAGNKAGAGAMHHGLSAVEAKDSQTIVALQSPVTVMRPVRGDLEEHLPKPCESARARHFLSSLRPAGALLHCYLLMTRRPLRRGAQIWREPWWRRTSTTPTAPRPTSTATTT

SEQ ID NO: 1083 - protein, 102 aa, Zea mays subsp. mays
  misc_feature (1)..(102): Ceres Seq. ID no. 15218869
MHHGLSAVEAKDSQTIVALQSPVTVMRPVRGDLEEHLPKPCESARARHFLSSLRPAGALLHCYLLMTRRPLRRGAQIWREPWWRRTSTTPTAPRPTSTATTT

SEQ ID NO: 1084 - DNA, 784 bp, Zea mays subsp. mays
  misc_feature (1)..(784): Ceres Seq. ID no. 13599640
aaccctccgggcccggcgacacaaggcaaggaaaaaaaaggatggctctccggcgcaacgccggatccctcgcgctccgcgccgccgcctacctccgccgccaccgtccccatcctcctcccccactggccctcgccgcccccgctcccactcccatacgctccccgctggccccgcctttccggcacttcgctgctccgcctggtactcagaccaataggaagcgaggcaaggaggaggacgatgccagcgcgggcccgcgcatgaacaacgccatcgccgctcccttcgtcaggctcgtcatggatgaaggccacaacattctcccccggcatgaagccttgcagcttgcgatcaggatggacatggacttggttgaggtagcgacttgctacaaaggcatcaacacaaacatgaaggtagccaacatggaactcgcaatgctgcccgaatctgataatggccaaggacgacttgatcaaacaatgatcaaccctgccgcagaaactcggaactgctaggcaggctacattcagatcggccggtggataacgctctggtcagggacggcgctgttgtggtttcaggcggcaaggtgaagcaacgggtggcgctgaagctgctgcagcacaaaaagtggagagagctggagttggagatggagctcaacgtgtagaaatatgctgtcaagttgtaacttctaatctgaaatctgaaattaaaattacctccctgctgtcagacgatactgcatgcgggttttatccaataatttgtttggcct

SEQ ID NO: 1085 - protein, 172 aa, Zea mays subsp. mays
  misc_feature (1)..(172): Ceres Seq. ID no. 13599641
PSGPGDTRQGKKRMALRRNAGSLALRAAAYLRRHRPHPPPPLALAAPAPTPIRSPLAPPFRHFAAPPGTQTNRKRGKEEDDASAGPRMNNAIAAPFVRLVMDEGHNILPRHEALQLAIRMDMDLVEVATCYKGINTNMKVANMELAMLPESDNGQGRLDQTMINPAAETRNC

SEQ ID NO: 1086 - protein, 159 aa, Zea mays subsp. mays
  misc_feature (1)..(159): Ceres Seq. ID no. 13599642
MALRRNAGSLALRAAAYLRRHRPHPPPPLALAAPAPTPIRSPLAPPFRHFAAPPGTQTNRKRGKEEDDASAGPRMNNAIAAPFVRLVMDEGHNILPRHEALQLAIRMDMDLVEVATCYKGINTNMKVANMELAMLPESDNGQGRLDQTMINPAAETRNC

SEQ ID NO: 1087 - protein, 88 aa, Zea mays subsp. mays
  misc_feature (1)..(88): Ceres Seq. ID no. 13599643
NPPGPATQGKEKKGWLSGATPDPSRSAPPPTSAATVPILLPHWPSPPPLPLPYAPRWPRLSGTSLLRLVLRPIGSEARRRTMPARARA

SEQ ID NO: 1088 - DNA, 875 bp, Zea mays subsp. mays
  misc_feature (1)..(875): Ceres Seq. ID no. 13599820
gtccccccccccccccccgcgacgcctccgatgcggatgaggatgtgccttcggaggaaggcgaggatatggacgaagatgacaatgacgacggtgatgatgaggagaagcagataagaatacttcaggagacgaccggaatgcccagagaagccttcgatggaaagactcgaagcttaagcatgtcattatttctgaacatgtagataagaagactgaaaagtatttggtaaggaaactgcctttcccttacacttcgaaagatgtgtatgagcagagcattcgaatgcctattgggcctgatttcaacccagcgatatcagtttctgctctcaatcgacctgcgattgttaagaagcctggtgttatcattaaaccaatacaatacgaggaggttaatccccatgagaagctcgatgaaacaacgtgtcattcagagagcaaccccaaaccggaatgcaaagaaagcctttgccaaacaaggaaaaagcgtaacttcacaaaagagaaagtgacgagacagtcatcttctcgtcaatggcttcatttggacaaaggagagctcatccgaattttgttgcccccgccgaatttgcacatgcatggctccaggtgtgtgcagtgattcttccctttatgaaagttcccgcttcggcgcatgacccatgggcaaaaggtttcacaccactggtttatgagagcagagaaattttggtacaagtagttctgtatttgttatttattgcattcgccacgcatcgtccaaatgagacggatgctatatttcagttctgatgatggccactggttaactaaaaaaaaaaaaaaaaaaaagaaaaaaaaaaaaaaaaaaaactcgagggggggcccggtac

SEQ ID NO: 1089 - protein, 112 aa, Zea mays subsp. mays
  misc_feature (1)..(112): Ceres Seq. ID no. 15218895
MPIGPDFNPAISVSALNRPAIVKKPGVIIKPIQYEEVNPHEKLDETTCHSESNPKPECKESLCQTRKKRNFTKEKVTRQSSSRQWLHLDKGELIRILLPPPNLHMHGSRCVQ

SEQ ID NO: 1090 - protein, 85 aa, Zea mays subsp. mays
  misc_feature (1)..(85): Ceres Seq. ID no. 15218896
MASFGQRRAHPNFVAPAEFAHAWLQVCAVILPFMKVPASAHDPWAKGFTPLVYESREILVQVVLYLLFIAFATHRPNETDAIFQF

SEQ ID NO: 1091 - protein, 83 aa, Zea mays subsp. mays
  misc_feature (1)..(83): Ceres Seq. ID no. 15218897
MCMSRAFECLLGLISTQRYQFLLSIDLRLLRSLVLSLNQYNTRRLIPMRSSMKQRVIQRATPNRNAKKAFAKQGKSVTSQKRK

SEQ ID NO: 1092 - DNA, 749 bp, Zea mays subsp. mays
  misc_feature (1)..(749): Ceres Seq. ID no. 13599839
ttatactggtttctactaaggcgaccccggcttctagattttctccacatcctggaccaagacgaagacattcttttggggaagaggagctggcataccttccgtatagaagacgagatataatgatagacaatgaaagcaatgaattacttcttcctgtcgaagggtttggtgtatcacttgaagattcttcaaaggaagaaaaaaagaataggaagggacttcttaactggttcaaactccggaaacgtgatggagcttctattctgacaagttcagaaggtgataagtccagtttgactaaatcaaccgctccttcaacacctattggggaaagcgtcaactttcctgctgaaccaagaatatcaaattcattagctggtgagaatgtatcatctgatctgtttagcattggtcatggggaatttccttctggaagcattcacggcgaagaaactctttcggccagtggaaaaacgatggaccatgttgatttgttgagagaacagttgaaaattttgtcaggggaggttgcgtttaatacaagtgctcttaagcgcctcacagaggaagctggaagaagcccaaagaacgagaagattcagatggaaatgaagaagaagaccgatgaaattaaggggaagcatcaacagatagcatctttggagagagagatagctcatgcaacattaggaaactcaggaaaggtcgatacgttagagcattcacccnnctatcatgaactactt

SEQ ID NO: 1093 - protein, 249 aa, Zea mays subsp. mays
  misc_feature (1)..(249): Ceres Seq. ID no. 13599840
  misc_feature (244)..(244): Xaa is any aa, unknown or other
ILVSTKATPASRFSPHPGPRRRHSFGEEELAYLPYRRRDIMIDNESNELLLPVEGFGVSLEDSSKEEKKNRKGLLNWFKLRKRDGASILTSSEGDKSSLTKSTAPSTPIGESVNFPAEPRISNSLAGENVSSDLFSIGHGEFPSGSIHGEETLSASGKTMDHVDLLREQLKILSGEVAFNTSALKRLTEEAGRSPKNEKIQMEMKKKTDEIKGKHQQIASLEREIAHATLGNSGKVDTLEHSPXYHELL

SEQ ID NO: 1094 - protein, 209 aa, Zea mays subsp. mays
  misc_feature (1)..(209): Ceres Seq. ID no. 13599841
  misc_feature (204)..(204): Xaa is any aa, unknown or other
MIDNESNELLLPVEGFGVSLEDSSKEEKKNRKGLLNWFKLRKRDGASILTSSEGDKSSLTKSTAPSTPIGESVNFPAEPRISNSLAGENVSSDLFSIGHGEFPSGSIHGEETLSASGKTMDHVDLLREQLKILSGEVAFNTSALKRLTEEAGRSPKNEKIQMEMKKKTDEIKGKHQQIASLEREIAHATLGNSGKVDTLEHSPXYHELL

SEQ ID NO: 1095 - DNA, 1995 bp, Zea mays subsp. mays
  misc_feature (1)..(1995): Ceres Seq. ID no. 13599965
tattggggccaaagtcgctgccctgccgagtctcgactctccacctcagccctcagggccgccggctccttcctcccctctcctccgcctcgacaagcgtcggcgagatggtgaagaggagcaagaagagcaagagcaagcgagtcacgctgcggcagaagcacaaggtgcagcgcaaggtgaaggagcaccaccgcaagaagcgcaaggaagccaagaaggccggcaaggccggccagcggaggaaggtcgagaaggaccccgggatccccaacgagtggcccttcaaggagcaggagctcaaggcgctcgaggcccgacgcgcgcaggcgctccaggagctcgagctcaagaagcaggcgcgcaaggagagggctcagaagaggaaggcaggattgcttgaggacgaggacattgctagtttggcatctgcagcttccgcacagggcagtgagtttgcagcaaaggagaatgctcctttattagtggcaaagatcaacgatcattcagagaggtctttctacaaggagcttgttaaagtaattgaagcttccgatgtgattatggaggttcttgatgcaagggatccgctgggcacccgttgcattgacatggaaaagatggttaggaaggctgatccaagtaaacggattgtactacttctcaacaagatagatcttgttcccaaggaggcggtagagaaatggcttacatatctaagagaagaattgccaacagttgcttttaagtgcaatacccaggagcagaggaccaagctgggatggaaatcttcaaaattagataaaacaagcaacatcccacaaagcagtgattgtcttggtgccgagaatctaatcaaattgcttaagaattattccagaagccatgagctcaaactggcaattacggtgggtattgttggacttcctaatgttggcaagagcagtctgatcaacagcctgaagaggtcccgagtggtcaatgtcggttctactccagggattactagatcaatgcaagaagttcaattagacaagaaggtaaagttgttggattgtcctggtgttgttatgctcaaatcttccaacagtggtgtgtctgtagcccttcgaaactgcaaaagggttgagaaaatagaagatccagtcgctcctgttaaggagatcctaagtatttgcccacatgagaagttgctgtctctgtacaaggttccaaactttggttcagttgatgattttcttcagaaagtagcaactgtacgtgggaaattgaaaaagggtggtgtagtggatgttgaagctgcagcgagaattgtgcttcatgactggaatgaaggtaaaataccatattttacactgccgcctaaaagagatgctggggaagactcagatgcagtgattatatccgaggatgggaaagaatttaatatcgatgagatttacaaagctgaatcttcatatattggtggtttgaagtccattgaggagttccatcatattgagattcctcctaatgctccactggcgatcgatgaagagatgctagaggatggtggcaagaaaccaagcgaagccatccaggaaagccgggacagggaggagcaaatgcccgacgtgaaggactcaggaggaagcaaggcagccagcgccagcacgcagaacgacaagttgtacaccgccgacgccatactcgaccctcacaagaggaaagcagagaagaaacggcgcaaggcgagcaggcccagcgcgctgaacgacatggacgcggactacgatttcaaggtggattatcggatggaggacggtgggagcgagggtgcacatgcggatgatgaagatggcggagatggatccgaggataatgaaccaatgaccggtgtcgatgatgcgtgaattgtcatgtcgagtgccactttgccagaaatgatttgtcccaatgggggttgggaaattaacccacgacagtttggtaattagtttgtttctgtttaaacac

SEQ ID NO: 1096 - protein, 629 aa, Zea mays subsp. mays
  misc_feature (1)..(629): Ceres Seq. ID no. 13599966
LGPKSLPCRVSTLHLSPQGRRLLPPLSSASTSVGEMVKRSKKSKSKRVTLRQKHKVQRKVKEHHRKKRKEAKKAGKAGQRRKVEKDPGIPNEWPFKEQELKALEARRAQALQELELKKQARKERAQKRKAGLLEDEDIASLASAASAQGSEFAAKENAPLLVAKINDHSERSFYKELVKVIEASDVIMEVLDARDPLGTRCIDMEKMVRKADPSKRIVLLLNKIDLVPKEAVEKWLTYLREELPTVAFKCNTQEQRTKLGWKSSKLDKTSNIPQSSDCLGAENLIKLLKNYSRSHELKLAITVGIVGLPNVGKSSLINSLKRSRVVNVGSTPGITRSMQEVQLDKKVKLLDCPGVVMLKSSNSGVSVALRNCKRVEKIEDPVAPVKEILSICPHEKLLSLYKVPNFGSVDDFLQKVATVRGKLKKGGVVDVEAAARIVLHDWNEGKIPYFTLPPKRDAGEDSDAVIISEDGKEFNIDEIYKAESSYIGGLKSIEEFHHIEIPPNAPLAIDEEMLEDGGKKPSEAIQESRDREEQMPDVKDSGGSKAASASTQNDKLYTADAILDPHKRKAEKKRRKASRPSALNDMDADYDFKVDYRMEDGGSEGAHADDEDGGDGSEDNEPMTGVDDA

SEQ ID NO: 1097 - protein, 594 aa, Zea mays subsp. mays
  misc_feature (1)..(594): Ceres Seq. ID no. 13599967
MVKRSKKSKSKRVTLRQKHKVQRKVKEHHRKKRKEAKKAGKAGQRRKVEKDPGIPNEWPFKEQELKALEARRAQALQELELKKQARKERAQKRKAGLLEDEDIASLASAASAQGSEFAAKENAPLLVAKINDHSERSFYKELVKVIEASDVIMEVLDARDPLGTRCIDMEKMVRKADPSKRIVLLLNKIDLVPKEAVEKWLTYLREELPTVAFKCNTQEQRTKLGWKSSKLDKTSNIPQSSDCLGAENLIKLLKNYSRSHELKLAITVGIVGLPNVGKSSLINSLKRSRVVNVGSTPGITRSMQEVQLDKKVKLLDCPGVVMLKSSNSGVSVALRNCKRVEKIEDPVAPVKEILSICPHEKLLSLYKVPNFGSVDDFLQKVATVRGKLKKGGVVDVEAAARIVLHDWNEGKIPYFTLPPKRDAGEDSDAVIISEDGKEFNIDEIYKAESSYIGGLKSIEEFHHIEIPPNAPLAIDEEMLEDGGKKPSEAIQESRDREEQMPDVKDSGGSKAASASTQNDKLYTADAILDPHKRKAEKKRRKASRPSALNDMDADYDFKVDYRMEDGGSEGAHADDEDGGDGSEDNEPMTGVDDA

SEQ ID NO: 1098 - protein, 442 aa, Zea mays subsp. mays
  misc_feature (1)..(442): Ceres Seq. ID no. 13599968
MEVLDARDPLGTRCIDMEKMVRKADPSKRIVLLLNKIDLVPKEAVEKWLTYLREELPTVAFKCNTQEQRTKLGWKSSKLDKTSNIPQSSDCLGAENLIKLLKNYSRSHELKLAITVGIVGLPNVGKSSLINSLKRSRVVNVGSTPGITRSMQEVQLDKKVKLLDCPGVVMLKSSNSGVSVALRNCKRVEKIEDPVAPVKEILSICPHEKLLSLYKVPNFGSVDDFLQKVATVRGKLKKGGVVDVEAAARIVLHDWNEGKIPYFTLPPKRDAGEDSDAVIISEDGKEFNIDEIYKAESSYIGGLKSIEEFHHIEIPPNAPLAIDEEMLEDGGKKPSEAIQESRDREEQMPDVKDSGGSKAASASTQNDKLYTADAILDPHKRKAEKKRRKASRPSALNDMDADYDFKVDYRMEDGGSEGAHADDEDGGDGSEDNEPMTGVDDA

SEQ ID NO: 1099 - DNA, 1900 bp, Zea mays subsp. mays
  misc_feature (1)..(1900): Ceres Seq. ID no. 13599990
  misc_feature (1858)..(1858): n is a, c, t, g, unknown, or other
  misc_feature (1859)..(1859): n is a, c, t, g, unknown, or other
cccccccccgggttgttgcactgtagtactggagtggaggtccggtcccacgtttgggggtggactcgacaaacgccaaaccgagcaccccccaaagcctgattctgctcaacactgcgcctgaacaattttctctggtggggctgcaaagacaaattaggagtgcttccaagttccaatccctgtttgcttgtacagggtataattaaagaggcaacggagtcatgacccttttgagggagtatcagtaactgcatgatcttttcgagggaggcacgatggaaggaaataacctaccctctggaagcttgatgcaaggaacaccttacagtaatgtggacttgcagcatcataaacatatgcaaatgcctgcaccaagctctggaaaccaggctttcaaccactctcagatgcctggcaatttccccatttgtctgaaccaggttacagattccgaccagctacctgaattccaatttggagagcacggcaaggtcagtcaccaccatcatcctcaccatcacaagcagcatgcaacgaatagcatgagcgatgatgaggagcatggtgtgcatgaggatgccactgatagccagatcggcaagggaaagaagggttccgcatggcatcggatgaagtggactgattcgatggttaggcttttgattactgcagcatcctacaccggggaagacccaggagctgatttaggaggtggtaggagaagctgtgcaatgatgcagaagaaaggcaagtggaaggccatatcaaaagtcatgggcgagcgaggctgcctcgtgtcgccgcagcagtgtgaggataagttcaatgacctaaataagaggtataaaaggcttacagatatccttggtcggggtactacttgcagagttgtggcaaacccagaacttctagatggcatggctaatctctcagataagatgaaagatgacgcgaggaagatattgagctctaagcacttgttctatgaagagatgtgctcctatcacaacaataatcggttcagtttacctgaagatcctgcacttcagcgatcgttgcagcttgctcttaagtgtaaggatgagcatgatgcaaggaagcgagcaagtggagatgctgatgaagatgatcaaagtgcagacactgataatgaagaagagaatgatgatgagcatcccatcacgcatgccaataaggggaccctactcacgcgtaaaagattgcggtacatgccggcggatatggaggatgtaggtttcggcaactcttccagctcacatgactgtagctggagatctgatccccatagcattgcagtggacatcaacaaagcttctccagatggaactaacttggcttcggttcaaaaagacttggctacacagtctgcggagattgagaaacagcgcatggaaattgaagttcaggcattggagcttgcaaaacaacgtctcaagtgggaggcatttagtaagaagaaggacagagagctagagaagatgaggttggaaaatgaacaaatgaagattgagaataaacgtttggagctagaggtaagatacaaggagttggagcttgaacacaaaccacaaggccatggcagtcatgcaacatgataatatctttaaaatcacgaagactgaaacgcaagatagtaagctttgtctcctgttatcactacccagagaaataattatgagtaactcatttctaattctgtcaccaaatccttgatattcatgggttgctagagtaggtgctatttggtaccagacagttcagtcatgtttatatttattttgttctctgtagatgtttcagagaaacgagaacttgaaattccaacgcatgcttnnnggaaaaaaaaaaaaaaaaaaaactcgagggggggcccggt

SEQ ID NO: 1100 - protein, 446 aa, Zea mays subsp. mays
  misc_feature (1)..(446): Ceres Seq. ID no. 15218635
MEGNNLPSGSLMQGTPYSNVDLQHHKHMQMPAPSSGNQAFNHSQMPGNFPICLNQVTDSDQLPEFQFGEHGKVSHHHHPHHHKQHATNSMSDDEEHGVHEDATDSQIGKGKKGSAWHRMKWTDSMVRLLITAASYTGEDPGADLGGGRRSCAMMQKKGKWKAISKVMGERGCLVSPQQCEDKFNDLNKRYKRLTDILGRGTTCRVVANPELLDGMANLSDKMKDDARKILSSKHLFYEEMCSYHNNNRFSLPEDPALQRSLQLALKCKDEHDARKRASGDADEDDQSADTDNEEENDDEHPITHANKGTLLTRKRLRYMPADMEDVGFGNSSSSHDCSWRSDPHSIAVDINKASPDGTNLASVQKDLATQSAEIEKQRMEIEVQALELAKQRLKWEAFSKKKDRELEKMRLENEQMKIENKRLELEVRYKELELEHKPQGHGSHAT

SEQ ID NO: 1101 - protein, 435 aa, Zea mays subsp. mays
  misc_feature (1)..(435): Ceres Seq. ID no. 15218636
MQGTPYSNVDLQHHKHMQMPAPSSGNQAFNHSQMPGNFPICLNQVTDSDQLPEFQFGEHGKVSHHHHPHHHKQHATNSMSDDEEHGVHEDATDSQIGKGKKGSAWHRMKWTDSMVRLLITAASYTGEDPGADLGGGRRSCAMMQKKGKWKAISKVMGERGCLVSPQQCEDKFNDLNKRYKRLTDILGRGTTCRVVANPELLDGMANLSDKMKDDARKILSSKHLFYEEMCSYHNNNRFSLPEDPALQRSLQLALKCKDEHDARKRASGDADEDDQSADTDNEEENDDEHPITHANKGTLLTRKRLRYMPADMEDVGFGNSSSSHDCSWRSDPHSIAVDINKASPDGTNLASVQKDLATQSAEIEKQRMEIEVQALELAKQRLKWEAFSKKKDRELEKMRLENEQMKIENKRLELEVRYKELELEHKPQGHGSHAT

SEQ ID NO: 1102 - protein, 419 aa, Zea mays subsp. mays
  misc_feature (1)..(419): Ceres Seq. ID no. 15218637
MQMPAPSSGNQAFNHSQMPGNFPICLNQVTDSDQLPEFQFGEHGKVSHHHHPHHHKQHATNSMSDDEEHGVHEDATDSQIGKGKKGSAWHRMKWTDSMVRLLITAASYTGEDPGADLGGGRRSCAMMQKKGKWKAISKVMGERGCLVSPQQCEDKFNDLNKRYKRLTDILGRGTTCRVVANPELLDGMANLSDKMKDDARKILSSKHLFYEEMCSYHNNNRFSLPEDPALQRSLQLALKCKDEHDARKRASGDADEDDQSADTDNEEENDDEHPITHANKGTLLTRKRLRYMPADMEDVGFGNSSSSHDCSWRSDPHSIAVDINKASPDGTNLASVQKDLATQSAEIEKQRMEIEVQALELAKQRLKWEAFSKKKDRELEKMRLENEQMKIENKRLELEVRYKELELEHKPQGHGSHAT

SEQ ID NO: 1103 - DNA, 423 bp, Zea mays subsp. mays
  misc_feature (1)..(423): Ceres Seq. ID no. 13600052
tctgaggctaacgaagataaaacnnnnggagattttaacgaaatgggtagcaggttggctggggaggtagttgccttcctgaagaagaaaatgcataagctttcgagatatggaggctgcaaagagctgaagttaagtttcgcaggtcattccattggaaacgtcatcattacaagtgccctggcagaacctgcattgcaaccatacttgaagaacctttacacttacatgtcaatatcagggcctcacttgggtcactggtacagctcaaattctttgttcaattctggactctggctgctgaaaaagctcaagggtgcgcaatgcatccatcaactcactttcagtgatgatcaagacccccagaatacctacttttataagctttgcaagttgaaaacgttggagaacttccaaaatatc

SEQ ID NO: 1104 - protein, 141 aa, Zea mays subsp. mays
  misc_feature (1)..(141): Ceres Seq. ID no. 13600053
  misc_feature (8)..(8): Xaa is any aa, unknown or other
  misc_feature (9)..(9): Xaa is any aa, unknown or other
SEANEDKXXGDFNEMGSRLAGEVVAFLKKKMHKLSRYGGCKELKLSFAGHSIGNVIITSALAEPALQPYLKNLYTYMSISGPHLGHWYSSNSLFNSGLWLLKKLKGAQCIHQLTFSDDQDPQNTYFYKLCKLKTLENFQNI

SEQ ID NO: 1105 - protein, 127 aa, Zea mays subsp. mays
  misc_feature (1)..(127): Ceres Seq. ID no. 13600054
MGSRLAGEVVAFLKKKMHKLSRYGGCKELKLSFAGHSIGNVIITSALAEPALQPYLKNLYTYMSISGPHLGHWYSSNSLFNSGLWLLKKLKGAQCIHQLTFSDDQDPQNTYFYKLCKLKTLENFQNI

SEQ ID NO: 1106 - protein, 111 aa, Zea mays subsp. mays
  misc_feature (1)..(111): Ceres Seq. ID no. 13600055
MHKLSRYGGCKELKLSFAGHSIGNVIITSALAEPALQPYLKNLYTYMSISGPHLGHWYSSNSLFNSGLWLLKKLKGAQCIHQLTFSDDQDPQNTYFYKLCKLKTLENFQNI

SEQ ID NO: 1107 - DNA, 553 bp, Zea mays subsp. mays
  misc_feature (1)..(553): Ceres Seq. ID no. 13600122
ttttttaagggttcaggatgatctcaatgttgcgaaagaaagagacaaggaacagtattataacacggtggaaagactcagagacatgtatcatgaatcaggagcaaggcataaattgatgaagaaggtcttccttttgcttcatgaggaactgcagattattaagcaaagaattaaagatttttcagaggcctattgaaatgagtcactcataacatgtcacttgcaattgtgtttcggagactgtcgctcatcgtaaggctgataatgtctgggcatgagcattatgctttgcctttgtagaagtttgcttgtcttggaaagattcagtcaatggcgcatatcacaggaaacctgagagactccgtgatttctggaatcacatcgtgctgaatttgatagtaatcacggtgaagtggaggcaaggacagttcaaatatcaatggcgttgttggacacaggcaaggacagttcaaatatcaatgacgttgtttgacacctccgcagccccgcacgggggagatagcagaagaaatgattcatcactatcgat

SEQ ID NO: 1108 - protein, 65 aa, Zea mays subsp. mays
  misc_feature (1)..(65): Ceres Seq. ID no. 13600123
FLRVQDDLNVAKERDKEQYYNTVERLRDMYHESGARHKLMKKVFLLLHEELQIIKQRIKDFSEAY

SEQ ID NO: 1109 - protein, 37 aa, Zea mays subsp. mays
  misc_feature (1)..(37): Ceres Seq. ID no. 13600124
MYHESGARHKLMKKVFLLLHEELQIIKQRIKDFSEAY

SEQ ID NO: 1110 - protein, 33 aa, Zea mays subsp. mays
  misc_feature (1)..(33): Ceres Seq. ID no. 13600125
MISMLRKKETRNSIITRWKDSETCIMNQEQGIN

SEQ ID NO: 1111 - DNA, 1657 bp, Zea mays subsp. mays
  misc_feature (1)..(1657): Ceres Seq. ID no. 13600140
aaatcacttcttcccggactcccagactcctcccaaaaccctcgcatcctctcccacgcatgtcacaatcgccatgaccgacagaaaccccgccgccgcctcaagcaagcgtcactgtgacctctccctcgacgatcccacgccgtcggccaagctccagcggtgctccgagccgtcagaaccaacgccggcggggaaaccgaacggcggcgcggcgacgggagaggagagcgagatgatggccggcgcacggaaccctagggcgcagaggtacctggtcgccgtggagtacattggcacccgcttctccggctcacagaagcagcccaaccagcgcaccgtcactggggtcctcgaggaggcatttcaccgatttattgggcagccagtttcaataatcttttctagccgaacggatgcaggtgttcatgctttatcaaatgtttgtcatgttgatgttgagcggataagtaaaaggaagcctggcgaagttttaacacctcatgagcctggagttgtaaaacgtgctgtgaaccactttctactgaagagtgaaggtgacataatggtgactgatgtctgctgtgttgcaccagattttcatgctagatacaaatctctagagcgcacatatcactatcgcttgcttgctggacctgaatcaacatctgtttttgagaaaaactctgtttggcatatatctgaagatttggatattcagtcaatgaagaaagcatgcagcatacttgttgggcatcatgatttcagttcatttcgagcggctggatgtcaggcaaactctccagtgcgaactctggatgaacttagtgttacagaagtattccctttcatgttttttccttcaagtgtagaaagatcagagttggaattatcaaatgtctctcttgtttattcaaggaaaccagacatggaatcttctgggaaaggatctgatggttcctgtaccagtagtgtgaaatcagattttgagaatggaaaagattttggaaagcggtcaaggcaccgttgctttgttgttactgcaagggcacggtcttttctttaccaccaggtaaggttgatggtcggtcttctaaaatctgttgggactggagatctaacaactgcagatgttgagagaattctggatgcaaagacggttactgctgcacccagtatggcaccttcttgtggtctgtaccttgctaacgttaaatatgatctgaatacctgaagacaagttttatcaagtggcttctgttggtgggcctccagattttgtcagctgttggctatcaaaggaattatatgctgccacttgccaaagctttcagttgcctgttttgtccactgaatcttgcatggtgattgaaaacctagaattaagtttatctgtcagcacaagagccggcttcattctcttcttgtacacagagctcttctgcatgttcagaaacaaaataggtagcttcattttagttaagttcaactatccactctttaaatttcagctggatccacccgattttgttgggtgtacgtagatttgacctggtaggggcaaaattttatttcttggttttctcatgactgtacttggttcttgatatataattaattagccaaaaaaaaaaaaaaaaaagcttatcgataccgt

SEQ ID NO: 1112 - protein, 410 aa, Zea mays subsp. mays
  misc_feature (1)..(410): Ceres Seq. ID no. 15218648
NHFFPDSQTPPKTLASSPTHVTIAMTDRNPAAASSKRHCDLSLDDPTPSAKLQRCSEPSEPTPAGKPNGGAATGEESEMMAGARNPRAQRYLVAVEYIGTRFSGSQKQPNQRTVTGVLEEAFHRFIGQPVSIIFSSRTDAGVHALSNVCHVDVERISKRKPGEVLTPHEPGVVKRAVNHFLLKSEGDIMVTDVCCVAPDFHARYKSLERTYHYRLLAGPESTSVFEKNSVWHISEDLDIQSMKKACSILVGHHDFSSFRAAGCQANSPVRTLDELSVTEVFPFMFFPSSVERSELELSNVSLVYSRKPDMESSGKGSDGSCTSSVKSDFENGKDFGKRSRHRCFVVTARARSFLYHQVRLMVGLLKSVGTGDLTTADVERILDAKTVTAAPSMAPSCGLYLANVKYDLNT

SEQ ID NO: 1113 - protein, 386 aa, Zea mays subsp. mays
  misc_feature (1)..(386): Ceres Seq. ID no. 15218649
MTDRNPAAASSKRHCDLSLDDPTPSAKLQRCSEPSEPTPAGKPNGGAATGEESEMMAGARNPRAQRYLVAVEYIGTRFSGSQKQPNQRTVTGVLEEAFHRFIGQPVSIIFSSRTDAGVHALSNVCHVDVERISKRKPGEVLTPHEPGVVKRAVNHFLLKSEGDIMVTDVCCVAPDFHARYKSLERTYHYRLLAGPESTSVFEKNSVWHISEDLDIQSMKKACSILVGHHDFSSFRAAGCQANSPVRTLDELSVTEVFPFMFFPSSVERSELELSNVSLVYSRKPDMESSGKGSDGSCTSSVKSDFENGKDFGKRSRHRCFVVTARARSFLYHQVRLMVGLLKSVGTGDLTTADVERILDAKTVTAAPSMAPSCGLYLANVKYDLNT

SEQ ID NO: 1114 - protein, 332 aa, Zea mays subsp. mays
  misc_feature (1)..(332): Ceres Seq. ID no. 15218650
MMAGARNPRAQRYLVAVEYIGTRFSGSQKQPNQRTVTGVLEEAFHRFIGQPVSIIFSSRTDAGVHALSNVCHVDVERISKRKPGEVLTPHEPGVVKRAVNHFLLKSEGDIMVTDVCCVAPDFHARYKSLERTYHYRLLAGPESTSVFEKNSVWHISEDLDIQSMKKACSILVGHHDFSSFRAAGCQANSPVRTLDELSVTEVFPFMFFPSSVERSELELSNVSLVYSRKPDMESSGKGSDGSCTSSVKSDFENGKDFGKRSRHRCFVVTARARSFLYHQVRLMVGLLKSVGTGDLTTADVERILDAKTVTAAPSMAPSCGLYLANVKYDLNT

SEQ ID NO: 1115 - DNA, 1316 bp, Zea mays subsp. mays
  misc_feature (1)..(1316): Ceres Seq. ID no. 13600141
accatcgccacccgtcagtccgtcacccctcgcgcccatagtccccttccccataccatgtccgacctccacccgccggagcaccaagtcgccggccaccgcgcctccgccagcaagctgggcccgctcatcgacggctccggcctcttctacaagccgctccaggccggcgaccgtggggagcacgaggtcgccttctatgaggcgttctccgcccacgccgccgtcccggcccgcatccgagacaccttcttcccccggttccacggcacgcgactcctccccaccgaggcgcagcccggggagccgcatcctcacctcgtcctcgacgacctcctcgcggggtttcaggcgccctgcgtcgcagacatcaagatcggcgccatcacgtggccaccgagttcgccggagccctacatcgccaagtgcctcgccaaggaccgcgggaccacgagcgttctgctcggattccgcgtctccggcgtccgagtcgtcggccccgagggcgccgtgtggcggacggagcgcccggaggtgaaggccatggacaccgccggcgtccgccgcgtgctccggcgctacgtgtcatccgttgccgacgaggggatggactgtgcgctcgccgcggcggtgtacggaggaaaaggtggagtcttgtcacagctgcgcgagctcaaggcgtggttcgaggagcagactctgttccacttctactcggcgtcgattcttctgggctatgatgctgctgcagtcgcagcaggcggagatgggggtggggtgacggtgaagctggtggactttgcccatgtggccgagggtgatggggtgattgaccacaacttcctgggcgggctctgctcgctgatcaagttcgtttctgacattgttccggagactcctcatacgcagcctttgggtccttcttaagagaggatcctggcatttcgatttgataacaaagccctacaagttttgtctggaaaaagaagcgcctccgagttgtgctgggtgtggagatccgtgagacggtcgtcgccccacgtggttgccttgccttcccttccctgcaaacatacggcaacctgctccttttttcgcaacccctttcttcggaagaaacctttttctcacttttggggggttcgattacgttggattggaactggttgtgccactcggtcagaggttgtaagcatggaggcgtgttgatccggcaactgcctgtaccgctgctactagtcagtcttttgcctgctgtagctgcacatatggatggatgtgtatgggttatcagcagtgttccaaagcttatcgat

SEQ ID NO: 1116 - protein, 308 aa, Zea mays subsp. mays
  misc_feature (1)..(308): Ceres Seq. ID no. 13600142
TIATRQSVTPRAHSPLPHTMSDLHPPEHQVAGHRASASKLGPLIDGSGLFYKPLQAGDRGEHEVAFYEAFSAHAAVPARIRDTFFPRFHGTRLLPTEAQPGEPHPHLVLDDLLAGFQAPCVADIKIGAITWPPSSPEPYIAKCLAKDRGTTSVLLGFRVSGVRVVGPEGAVWRTERPEVKAMDTAGVRRVLRRYVSSVADEGMDCALAAAVYGGKGGVLSQLRELKAWFEEQTLFHFYSASILLGYDAAAVAAGGDGGGVTVKLVDFAHVAEGDGVIDHNFLGGLCSLIKFVSDIVPETPHTQPLGPS

SEQ ID NO: 1117 - protein, 289 aa, Zea mays subsp. mays
  misc_feature (1)..(289): Ceres Seq. ID no. 13600143
MSDLHPPEHQVAGHRASASKLGPLIDGSGLFYKPLQAGDRGEHEVAFYEAFSAHAAVPARIRDTFFPRFHGTRLLPTEAQPGEPHPHLVLDDLLAGFQAPCVADIKIGAITWPPSSPEPYIAKCLAKDRGTTSVLLGFRVSGVRVVGPEGAVWRTERPEVKAMDTAGVRRVLRRYVSSVADEGMDCALAAAVYGGKGGVLSQLRELKAWFEEQTLFHFYSASILLGYDAAAVAAGGDGGGVTVKLVDFAHVAEGDGVIDHNFLGGLCSLIKFVSDIVPETPHTQPLGPS

SEQ ID NO: 1118 - protein, 178 aa, Zea mays subsp. mays
  misc_feature (1)..(178): Ceres Seq. ID no. 13600144
PSPPVSPSPLAPIVPFPIPCPTSTRRSTKSPATAPPPASWARSSTAPASSTSRSRPATVGSTRSPSMRRSPPTPPSRPASETPSSPGSTARDSSPPRRSPGSRILTSSSTTSSRGFRRPASQTSRSAPSRGHRVRRSPTSPSASPRTAGPRAFCSDSASPASESSAPRAPCGGRSARR

SEQ ID NO: 1119 - DNA, 952 bp, Zea mays subsp. mays
  misc_feature (1)..(952): Ceres Seq. ID no. 13600171
gagtcctgccataccttacctccccttccatcctcgtcctcgagcgagccgttgcaggcgtcacaccgccgccagaggtgcctgctgacggcgaggctgaagccaagacctgtgcaactggcggcgacgaccaccagagggccgacgagtggtccctcgcctcctcctccggctagatggtcccgtcgcccatgtaccccccctttcatggctgtcctcaagcgtgttgttgcaggcatcacgtcgccgccaaaaacacctgtcgacgcgaggacgaggcctatgcagccggcagcgacgacaaccaacagttccagcctaccgagcctaaccagagggtcgaggagccgacttctccgtctagatgctcccgtcgtccgtgcatctccccttccatccccgtcctcgactgcgccgttgcgtacatcgtgccaccgccaatcgtgccgccaccagagtctcctgtcagcggcgaggtcgaggccaatgcctgtgcagccagcgacgatgaccaccaccagctgcagcttgtcgagactcaccagagggacgaggagtggtccctctcctctttctcggtctagatgtagctcagcgacacacactacatgcttgggtgccgagacctacaggtccatcgcctactacgacaagggcctcgagatcttgatggctacgctcggcgagcgtgatcccccatcgcaaagacctgcaggagctggagccatcctaagagatgttcaagcaattggggcgtcccttcgatcctgcgttgtgcacataaattggttatgggatatgtagatccgtgaggtgttgttgaagaaatccaaactctctactaacagcacaaacagtcttgttttctttatttgtccagtgaagttatcaaggttgatttatattttcaaagagtttgagtaataaacttgaactatattttttccttgtc

SEQ ID NO: 1120 - protein, 267 aa, Zea mays subsp. mays
  misc_feature (1)..(267): Ceres Seq. ID no. 13600172
ESCHTLPPLPSSSSSEPLQASHRRQRCLLTARLKPRPVQLAATTTRGPTSGPSPPPPARWSRRPCTPPFMAVLKRVVAGITSPPKTPVDARTRPMQPAATTTNSSSLPSLTRGSRSRLLRLDAPVVRASPLPSPSSTAPLRTSCHRQSCRHQSLLSAARSRPMPVQPATMTTTSCSLSRLTRGTRSGPSPLSRSRCSSATHTTCLGAETYRSIAYYDKGLEILMATLGERDPPSQRPAGAGAILRDVQAIGASLRSCVVHINWLWDM

SEQ ID NO: 1121 - protein, 198 aa, Zea mays subsp. mays
  misc_feature (1)..(198): Ceres Seq. ID no. 13600173
MAVLKRVVAGITSPPKTPVDARTRPMQPAATTTNSSSLPSLTRGSRSRLLRLDAPVVRASPLPSPSSTAPLRTSCHRQSCRHQSLLSAARSRPMPVQPATMTTTSCSLSRLTRGTRSGPSPLSRSRCSSATHTTCLGAETYRSIAYYDKGLEILMATLGERDPPSQRPAGAGAILRDVQAIGASLRSCVVHINWLWDM

SEQ ID NO: 1122 - protein, 173 aa, Zea mays subsp. mays
  misc_feature (1)..(173): Ceres Seq. ID no. 13600174
MQPAATTTNSSSLPSLTRGSRSRLLRLDAPVVRASPLPSPSSTAPLRTSCHRQSCRHQSLLSAARSRPMPVQPATMTTTSCSLSRLTRGTRSGPSPLSRSRCSSATHTTCLGAETYRSIAYYDKGLEILMATLGERDPPSQRPAGAGAILRDVQAIGASLRSCVVHINWLWDM

SEQ ID NO: 1123 - DNA, 1205 bp, Zea mays subsp. mays
  misc_feature (1)..(1205): Ceres Seq. ID no. 13600183
cttcttcaagatggggcatttgcaacaatcattccaaaagttttaagaatccgacaaggcgagattcgtggggggcgttttgtgaacccattcctcgaaggtctagttagaatagtctcccggatcacatttgtcttggatgatgatccagatatcattgttgttgcttgtgattacaatcttacttcactcttcactgatctgcttcagatgaatgggcttgacattgtccagatcgtctctgctaatgcgctagagaaactctcacagcagtcaaaacatcttacgaagatactgcctgctcccagcccagggttgtgcttttcaatatttccatgcctcagccagaagactgtagcaactggggtttgtagagttcactgtgggatttgttctgcaagggagagcttctgtctcttggaggggaagtcagtggagaagttggttgcttgcttggataataataatgagaaagtagttgaagctgccctatcagcgttatccactttactggaggatggagtggacattgaccaaggtgtcatggtgctgtgtgatgccgaaggaatcaacccaatacttgacgtattgtgtgagaacagaaatgaggcactgcgccagagagcggtgtgggcagtggagagaatcctgaggatggatgaaatagcatatgaaatatcaggaaaccaaaatgttggtacagccttggttgaggccttcaggcatggtgactataggacaagacaagttgcagagcgagcattgaagcatgtagataagctgcccaatttctctgggatattttctaagatgggagcacaatgacgacgttacatggaagtagtctaattctattttgacacatggattgcagatccacatgaggcacagatgaacacatgtagattggttttgctgacccgcagatggtggtagcgatccgattgatcgaagaagaatcgaaacattgcacgtgttgtatagtgtatatttctacctgtaaacttgtatgtattttttagattggtcagattcatagaataggttgctatccctgttgtgtttagataaatataaataatgcataatccccagctctgggtggggaaaaagaaagaaatgtgaagtatttgcacgtatttaaatgccacggtttcctgatcttcggacctccgamraaaaaaaaaaaaaaaaaaaaaaaaaaa

SEQ ID NO: 1124 - protein, 274 aa, Zea mays subsp. mays
  misc_feature (1)..(274): Ceres Seq. ID no. 15218915
LLQDGAFATIIPKVLRIRQGEIRGGRFVNPFLEGLVRIVSRITFVLDDDPDIIVVACDYNLTSLFTDLLQMNGLDIVQIVSANALEKLSQQSKHLTKILPAPSPGLCFSIFPCLSQKTVATGVCRVHCGICSARESFCLLEGKSVEKLVACLDNNNEKVVEAALSALSTLLEDGVDIDQGVMVLCDAEGINPILDVLCENRNEALRQRAVWAVERILRMDEIAYEISGNQNVGTALVEAFRHGDYRTRQVAERALKHVDKLPNFSGIFSKMGAQ

SEQ ID NO: 1125 - protein, 204 aa, Zea mays subsp. mays
  misc_feature (1)..(204): Ceres Seq. ID no. 15218916
MNGLDIVQIVSANALEKLSQQSKHLTKILPAPSPGLCFSIFPCLSQKTVATGVCRVHCGICSARESFCLLEGKSVEKLVACLDNNNEKVVEAALSALSTLLEDGVDIDQGVMVLCDAEGINPILDVLCENRNEALRQRAVWAVERILRMDEIAYEISGNQNVGTALVEAFRHGDYRTRQVAERALKHVDKLPNFSGIFSKMGAQ

SEQ ID NO: 1126 - DNA, 2219 bp, Zea mays subsp. mays
  misc_feature (1)..(2219): Ceres Seq. ID no. 13600220
gcaagactcaatacacaagcagagctcaaacaattcttgcttcccgctagctagctcgcaagaaataatggctccacttcttcttgcttctcgcacagcctgtcatcctggccttacaagcagccgccatgataatggccggcacggcctttcttcttcaccgggaagtagtagtaagcgaagccgtagccttagcttcataccacgagctgaaaagacgacgacaggcggtgagggtcatgttgtgagcgaaaagctgagcccctggcaaatccccaggagggagtggttcccccctagctttatctttggtgccgccacttcagcataccaaattgaaggcgcttggaacgaaggtggcaaggggccaagcacttgggacgatttctgccacaaatatccggagtggatagcggacgggagcagtggggatgttggagcgaactcctactacctgtatagagaggatgtcagattgctgaaggagatgggtatggacgcctacaggttctctatcgcttggtccagaatactgccaaaggggacgctcgagggaggcattaaccataaaggcatcgagtactacaaaaggctcatcaacttgttgaaagagaacggcatagaaccatatgtaacacttttccactgggacacacctcaagcgctggtggacagctacggtggcttcttagatgacaggattgtaaaagattacacggactttgccaaggtgtgctttgtgcacttcggcgacgtcgtgaagaactggttcaccttcaacgagccacagacgttctcctctttttcctacggaaccgggatctttgccccggggcggtgctccccaggacaaaaatgcgctaacccaaccgggaactcgctaaccgagccttacattgttgcccacaaccttctccgagctcatgctgagactgtccatgagtacaacaagcattacagaggtaacaaggacgcacagatagggattgcgttcgatgtgatgggccgtgtgccatatgacaatatgtttctggacgaccaggcccaagaaaggtccatcgattataacctaggatggttcatggagccggtagttcgcggcgactaccctttctccatgagatcattgatcaaggatcggctaccctacttcaccgacgacgagaaagagaagttagtgggttcgtatgacataatggggataaactactacacctcaaggttttccaagcacatcgacatctcgccaaagtactcgccagtgctcaacaccgacgatgcctatgccgcccaagagacgaaaggacctgacgggaatactattggtccatctatggggaatccgtggatttacatgtaccctaacggcctaaaggatatccttatgttcatgaagaacaaatacggaaacccaccggtctacatcactgagaatggaatcggggatgttgacaccaaagataaacctctacccataaaagacgcgttgaatgaccacgtgaggctagattacctccagcgccacatttcagttctcaaagacgcaatagacctgggggcggacgtgcgtggccacttcacctggtctctgctggacaacttcgagtggtcggccggttacacggagcggtacggcatcgtctacgtggaccgtggcaacggctgcaagcgccgcatgaagcgctcagccaaatggttgaagaaattcaaccgagccgcgcatacgaagaagaaagatatgacgggcattattccgccgtcagcttattagaacagtgcagctagctagctgccatatgcatatgttttaagatacagatatggtgtgtgtgtggtaagtatggtgcatgtatgttgtttgtaaaataaattaacccacatgatgttgtggaaagtaaaattaaaatactcaatggatcggagacatatagccaaaaaaaaaaaaaaaaaaaaaaaaaaaaaaaaaaaaaaaaaaaaaaaaaaaaaaaaaaaaaaaaaaaaaaaaaaaaaaaaaaaagaaaaaaaaaaaaaaaaaaattctgggggggggcccgggacccatttccccctaatggggggccatttaaaattcccgggcccgccttttaaaaccgcgggaaggggaaaaccctggggttacccaatttaatccccttggaaaaaatccccctttccccagttggggaaaaaagaaaaaggcccccccccattccccttcc

SEQ ID NO: 1127 - protein, 589 aa, Zea mays subsp. mays
  misc_feature (1)..(589): Ceres Seq. ID no. 15218920
QDSIHKQSSNNSCFPLASSQEIMAPLLLASRTACHPGLTSSRHDNGRHGLSSSPGSSSKRSRSLSFIPRAEKTTTGGEGHVVSEKLSPWQIPRREWFPPSFIFGAATSAYQIEGAWNEGGKGPSTWDDFCHKYPEWIADGSSGDVGANSYYLYREDVRLLKEMGMDAYRFSIAWSRILPKGTLEGGINHKGIEYYKRLINLLKENGIEPYVTLFHWDTPQALVDSYGGFLDDRIVKDYTDFAKVCFVHFGDVVKNWFTFNEPQTFSSFSYGTGIFAPGRCSPGQKCANPTGNSLTEPYIVAHNLLRAHAETVHEYNKHYRGNKDAQIGIAFDVMGRVPYDNMFLDDQAQERSIDYNLGWFMEPVVRGDYPFSMRSLIKDRLPYFTDDEKEKLVGSYDIMGINYYTSRFSKHIDISPKYSPVLNTDDAYAAQETKGPDGNTIGPSMGNPWIYMYPNGLKDILMFMKNKYGNPPVYITENGIGDVDTKDKPLPIKDALNDHVRLDYLQRHISVLKDAIDLGADVRGHFTWSLLDNFEWSAGYTERYGIVYVDRGNGCKRRMKRSAKWLKKFNRAAHTKKKDMTGIIPPSAY

SEQ ID NO: 1128 - protein, 567 aa, Zea mays subsp. mays
  misc_feature (1)..(567): Ceres Seq. ID no. 15218921
MAPLLLASRTACHPGLTSSRHDNGRHGLSSSPGSSSKRSRSLSFIPRAEKTTTGGEGHVVSEKLSPWQIPRREWFPPSFIFGAATSAYQIEGAWNEGGKGPSTWDDFCHKYPEWIADGSSGDVGANSYYLYREDVRLLKEMGMDAYRFSIAWSRILPKGTLEGGINHKGIEYYKRLINLLKENGIEPYVTLFHWDTPQALVDSYGGFLDDRIVKDYTDFAKVCFVHFGDVVKNWFTFNEPQTFSSFSYGTGIFAPGRCSPGQKCANPTGNSLTEPYIVAHNLLRAHAETVHEYNKHYRGNKDAQIGIAFDVMGRVPYDNMFLDDQAQERSIDYNLGWFMEPVVRGDYPFSMRSLIKDRLPYFTDDEKEKLVGSYDIMGINYYTSRFSKHIDISPKYSPVLNTDDAYAAQETKGPDGNTIGPSMGNPWIYMYPNGLKDILMFMKNKYGNPPVYITENGIGDVDTKDKPLPIKDALNDHVRLDYLQRHISVLKDAIDLGADVRGHFTWSLLDNFEWSAGYTERYGIVYVDRGNGCKRRMKRSAKWLKKFNRAAHTKKKDMTGIIPPSAY

SEQ ID NO: 1129 - protein, 427 aa, Zea mays subsp. mays
  misc_feature (1)..(427): Ceres Seq. ID no. 15218922
MGMDAYRFSIAWSRILPKGTLEGGINHKGIEYYKRLINLLKENGIEPYVTLFHWDTPQALVDSYGGFLDDRIVKDYTDFAKVCFVHFGDVVKNWFTFNEPQTFSSFSYGTGIFAPGRCSPGQKCANPTGNSLTEPYIVAHNLLRAHAETVHEYNKHYRGNKDAQIGIAFDVMGRVPYDNMFLDDQAQERSIDYNLGWFMEPVVRGDYPFSMRSLIKDRLPYFTDDEKEKLVGSYDIMGINYYTSRFSKHIDISPKYSPVLNTDDAYAAQETKGPDGNTIGPSMGNPWIYMYPNGLKDILMFMKNKYGNPPVYITENGIGDVDTKDKPLPIKDALNDHVRLDYLQRHISVLKDAIDLGADVRGHFTWSLLDNFEWSAGYTERYGIVYVDRGNGCKRRMKRSAKWLKKFNRAAHTKKKDMTGIIPPSAY

SEQ ID NO: 1130 - DNA, 1679 bp, Zea mays subsp. mays
  misc_feature (1)..(1679): Ceres Seq. ID no. 13600256
ggagttttttttgtctcgctcctaggccactaaatttcttgcttgtttcgcatttatgctgaagattggtgaatctacctcgtaataacgcatggcttagtgatggaagcacccagttaagtgccattttacgaacggaatttggtcaaatatatagcccttgaactgttttgtctagcatttagtttgcaatgttttttatattattttgaagtctgttttgagcaatctattactactctataaagccctattgtaggcgtccacaagtgcaccatggttctgccatcctccccctcgcgcaatccctcattcttataaggccctattgtagcctatctaaatatttttaggattagaaaattgttttgtattggtccatcttatacttttatttaacattacaccctcattcttcttggtcttggacgactcttttcagtatcaaatccaaattcatgtttaattgcgtgttgagataatgccaacttattccatgttggcatgtgattgtggaggcatctattttactacttacaggtatgcatcttgactagctcgctgaggggaatggcctggtggatctgttgttggtttgcttgtaggtgattagctagattgtgttgtttttttggctagatgcctagatctgattgatgcgcgtatattgttgagtctgttctccacctcggcgcctgttcgaaaccttctgtttttttactgcatgaaacatattaatgcagtaaagccaatagactttactcttttatccaacgaatcatgaaacatactattaataagtgacaccatgacatgtttaatcatttcgacatgttagcaacacagggaagacaaatatgtttcatactccatatgtattagatatggtattatgggatgtcagtatctgctatttcgtttggaatgtctttttgtgatatttcagtctgtggtccagacacctttactttttgaaaaatgtcgccttctgtagttgcttcaaattccatacgttcgacatctatgaatagaaaattttgacactatatctttgaacaattgatctctcaggaatatatgaggccttggagttgagggatggaggatctgattatcttggcaagggtattcttaagcttttggcttaaaatttgagaggaggagatggcggtcacgatcacgtgggtgaaggcgaggcagatcttcatcagccgcggcaaccccaccgtcgaggtggacgtgggcctcagcgatggcagctacacgagggggcgtacccatcggcgcatccactttatgactgccagcgtcagaatctgatatacctattggcgtttccacattgcagacacacaagagtccagcctgcgccagacgctcctgcagctatctgcactgaagatcaggacacgaagatcgcgagctttatcaaggctcgccatgtgcggaaggtgtattttagtgagatctccaagatgaagcattaggggggggtcaatcgacccagattttacgtgtatctaacttagtagggcacccatgatctataatttattctctgtagttgtagcaacgacctagagctgtcattctgtagcacattgtgtaacatgtaggagagagatgaacacatatccccattctttctactgaaacaccagaaatagttgctcttgctc

SEQ ID NO: 1131 - protein, 51 aa, Zea mays subsp. mays
  misc_feature (1)..(51): Ceres Seq. ID no. 13600257
MAVTITWVKARQIFISRGNPTVEVDVGLSDGSYTRGRTHRRIHFMTASVRI

SEQ ID NO: 1132 - protein, 33 aa, Zea mays subsp. mays
  misc_feature (1)..(33): Ceres Seq. ID no. 13600258
MGCQYLLFRLECLFVIFQSVVQTPLLFEKCRLL

SEQ ID NO: 1133 - DNA, 1715 bp, Zea mays subsp. mays
  misc_feature (1)..(1715): Ceres Seq. ID no. 13600272
atatagtttattttatctttgatgagaaagctcttctaattaattcaagactgccttgattttcccagttattactcgagcgcgctgaggcaactctgaactaagctggtagtaggtatgcttccctccagcaccttgaagatcgaggtttttctttttgaaaagcggatttatccatcgtctttgtttgttaaagtaaagtaaagtatggaattctcaccaagagctgcggaacttacgactctattagaaagtagaatgatcaacttttacacgaatttgaaagtggatgagatcggtcgagtggtctcagttggagatggagagcccgcgcagccccgaggcggagatcggccaccgggtggaggacctctgggaggtggcggagccgcagctctcgccgtcggagaagctcaactcctgcttcgaggacatccccgtcgcgtccttcccgcgcacgcacccgtcccaagtcattgagattccttcagatgcaagtcttgctgaaactgtagaaatattatccaaaaacaaaatcttgagtgcacccataagaaatgttgaggctccagaagatgctagttggatggacaaatacatcggcattgtggaatttgctggtattgccatgtggttgctcagtcagtctgatgctgcagttaatgggacggttggttcgggaccaggatcgcctgtctccagtctagtttcgaggttgggttctttcacattcagaaggacatcatctggaagattagaaactgctactgattctgaatcagacgaagcagcatcggttggtgggagcttttttgaaaccctgacttcctctgaattctacaagaatacaaaggttggcgatatctcagggagcttccgctgggcaccatttcttgcactgcagacatctgacacattccttaccatgttgctgcttctatccaagtacagaatgaagagccttccagttgtagaagtgggaggagataagattgagaacattatcacacaatcctctgtcgtacacatgcttgcagagtgtgttgggctctcctggtttgagaactggggaaagggagttggtggcttgccagtcatggacacaagtggagcaaatgccattggtaatattagcatcagagatgtccagtatcttttaactgctcccaagatatacaaagagcacaggtcaatcacgacaaaggatttccttagtgctgttcgacaccacctccaggagcagcgtgaggcctcaccgttgctgcatgatgtcatcacttgcaaaaaggatgatacaatcaaggacatcatactgaagctggactctgagaagatccacaggatctacgttgtggatgacaaagggaacaccgagggagtcatcaccttgagggacataatctccaagctggtgcatgagccacgccattactttggggatttctttgatggtgttgttcccctgcctgcaaacagcaccgtatgacacatcttcgcggtccaatcacactgatgtatctgtgcaaatgtacattttgagctattctcttctgaagttgcttctagtgtattccttttctcagccttctcggttctcaggtaaacagaccattgcctacatggagaaaaggactaatgctctaatggatggatggcaatgttgtacattgaataatcaaaaaaaaaaaaaaaaaaaactcgagggggggcccggt

SEQ ID NO: 1134 - protein, 398 aa, Zea mays subsp. mays
  misc_feature (1)..(398): Ceres Seq. ID no. 13600273
MRSVEWSQLEMESPRSPEAEIGHRVEDLWEVAEPQLSPSEKLNSCFEDIPVASFPRTHPSQVIEIPSDASLAETVEILSKNKILSAPIRNVEAPEDASWMDKYIGIVEFAGIAMWLLSQSDAAVNGTVGSGPGSPVSSLVSRLGSFTFRRTSSGRLETATDSESDEAASVGGSFFETLTSSEFYKNTKVGDISGSFRWAPFLALQTSDTFLTMLLLLSKYRMKSLPVVEVGGDKIENIITQSSVVHMLAECVGLSWFENWGKGVGGLPVMDTSGANAIGNISIRDVQYLLTAPKIYKEHRSITTKDFLSAVRHHLQEQREASPLLHDVITCKKDDTIKDIILKLDSEKIHRIYVVDDKGNTEGVITLRDIISKLVHEPRHYFGDFFDGVVPLPANSTV

SEQ ID NO: 1135 - protein, 388 aa, Zea mays subsp. mays
  misc_feature (1)..(388): Ceres Seq. ID no. 13600274
MESPRSPEAEIGHRVEDLWEVAEPQLSPSEKLNSCFEDIPVASFPRTHPSQVIEIPSDASLAETVEILSKNKILSAPIRNVEAPEDASWMDKYIGIVEFAGIAMWLLSQSDAAVNGTVGSGPGSPVSSLVSRLGSFTFRRTSSGRLETATDSESDEAASVGGSFFETLTSSEFYKNTKVGDISGSFRWAPFLALQTSDTFLTMLLLLSKYRMKSLPVVEVGGDKIENIITQSSVVHMLAECVGLSWFENWGKGVGGLPVMDTSGANAIGNISIRDVQYLLTAPKIYKEHRSITTKDFLSAVRHHLQEQREASPLLHDVITCKKDDTIKDIILKLDSEKIHRIYVVDDKGNTEGVITLRDIISKLVHEPRHYFGDFFDGVVPLPANSTV

SEQ ID NO: 1136 - protein, 299 aa, Zea mays subsp. mays
  misc_feature (1)..(299): Ceres Seq. ID no. 13600275
MDKYIGIVEFAGIAMWLLSQSDAAVNGTVGSGPGSPVSSLVSRLGSFTFRRTSSGRLETATDSESDEAASVGGSFFETLTSSEFYKNTKVGDISGSFRWAPFLALQTSDTFLTMLLLLSKYRMKSLPVVEVGGDKIENIITQSSVVHMLAECVGLSWFENWGKGVGGLPVMDTSGANAIGNISIRDVQYLLTAPKIYKEHRSITTKDFLSAVRHHLQEQREASPLLHDVITCKKDDTIKDIILKLDSEKIHRIYVVDDKGNTEGVITLRDIISKLVHEPRHYFGDFFDGVVPLPANSTV

SEQ ID NO: 1137 - DNA, 1372 bp, Zea mays subsp. mays
  misc_feature (1)..(1372): Ceres Seq. ID no. 13600370
aacagtagctgccctgcctgactcctgcctccagcatgtccgacctgtcaaggactgttcctcaggagcagctcgtgtcccaggacctgctgcacctctcgccaacgcccgtgatcaaccttggccacctcagccttgatgattccgtgacgcgatctggcgtgatcaaccaaatcgccagagcatgccatgatctaggatacttccaggttacaaaccatgggatcagtcaatccgtcatggattgtgctgttgaagcagcttcagatttcttccaactaccaagtgaggcaaaggaacagttcgcatcacaggacctccgcaaacctgttagatatgacaccagctctaaagatagcattagcatgtcacgggcattcctaaagcattatgcccatccgcccagagactggattcagtattggccagacaaaccaccaatctacagggaatacatgggaaagtatgctgttgaagtaaggagggtggctttgcatctgatgcaggcaatactagaaggcctaggattgggcaaggaatacatgaacgagaaatttcagcaaggctcacaactactgtcagtgaactgctatcctaaagcatcacaagacgccatgactatagggctggctccacactctgattatggatttcttaccatcttgctcacaagttgccagggcctccaagtcgttgaccgcagcagcgacgacagctggaaaacggtccagcaacttccgcatgcgttgcatgtccatgtaggagaccacatggaagtcctgagcaatggtcaaatcaaaacagttgtgcaccgtgctgttttgaatcccgaagaagcaaggatttctatagcaagcattcatggttttgagctacatgagaaggtcgcctgtgctaaggagcttgtggatgaacaaaatcccccaaaatacaaagagagcagctttactgacttcctcgaccatctcacagctaatatggacaacaagaacaggaattttcttgaaagcctcagaatgtaaggactacaagccctaatttggtacaaccttaactacaagtccaaaaggtggtaagacaacatcctatatatgtstactttagagttcagactaatgctctaaacttctatgtccttgttgctttgataaagaggtgctaattaacttcgtcatattggggatatgtagttctggtataaaattttaaaccatccaatcatgcaggttaactggtgcgttgatatttgagaaagcagatcgagctaaggtttactgtcacatgttgaactgaagtgtccatgtatttttttttaacgaaatgaagtgtccatgtaatcttcaataaagccctatatgtgtctggtggtgcc

SEQ ID NO: 1138 - protein, 328 aa, Zea mays subsp. mays
  misc_feature (1)..(328): Ceres Seq. ID no. 15218923
MSDLSRTVPQEQLVSQDLLHLSPTPVINLGHLSLDDSVTRSGVINQIARACHDLGYFQVTNHGISQSVMDCAVEAASDFFQLPSEAKEQFASQDLRKPVRYDTSSKDSISMSRAFLKHYAHPPRDWIQYWPDKPPIYREYMGKYAVEVRRVALHLMQAILEGLGLGKEYMNEKFQQGSQLLSVNCYPKASQDAMTIGLAPHSDYGFLTILLTSCQGLQVVDRSSDDSWKTVQQLPHALHVHVGDHMEVLSNGQIKTVVHRAVLNPEEARISIASIHGFELHEKVACAKELVDEQNPPKYKESSFTDFLDHLTANMDNKNRNFLESLRM

SEQ ID NO: 1139 - protein, 260 aa, Zea mays subsp. mays
  misc_feature (1)..(260): Ceres Seq. ID no. 15218924
MDCAVEAASDFFQLPSEAKEQFASQDLRKPVRYDTSSKDSISMSRAFLKHYAHPPRDWIQYWPDKPPIYREYMGKYAVEVRRVALHLMQAILEGLGLGKEYMNEKFQQGSQLLSVNCYPKASQDAMTIGLAPHSDYGFLTILLTSCQGLQVVDRSSDDSWKTVQQLPHALHVHVGDHMEVLSNGQIKTVVHRAVLNPEEARISIASIHGFELHEKVACAKELVDEQNPPKYKESSFTDFLDHLTANMDNKNRNFLESLRM

SEQ ID NO: 1140 - protein, 218 aa, Zea mays subsp. mays
  misc_feature (1)..(218): Ceres Seq. ID no. 15218925
MSRAFLKHYAHPPRDWIQYWPDKPPIYREYMGKYAVEVRRVALHLMQAILEGLGLGKEYMNEKFQQGSQLLSVNCYPKASQDAMTIGLAPHSDYGFLTILLTSCQGLQVVDRSSDDSWKTVQQLPHALHVHVGDHMEVLSNGQIKTVVHRAVLNPEEARISIASIHGFELHEKVACAKELVDEQNPPKYKESSFTDFLDHLTANMDNKNRNFLESLRM

SEQ ID NO: 1141 - DNA, 755 bp, Zea mays subsp. mays
  misc_feature (1)..(755): Ceres Seq. ID no. 13600397
gcacactaaccgaagtcccaatcccaatggcgccaacctgccgtcctcggccggatgcggcgctcctgctgctgctgctgacggcgagtagcgtcggcgtcgcacgggcggcgccgcgggtgccggcggtgatcgtgttcggggactcgacggtggacacgggcaacaacaaccagatccccaccccgctgcgcgccgacttcccgccctacggtcgcgacatgccgggcgggccgcgcgccaccggccggttcggcaacgggcggctgcccccggacctcatctccgaggcgctcggcctgccgccgctggtgccggcctacctcgacccggcctacggcatcgacgacttcgcgcgcggcgtctgcttcgcgtccgcgggcaccggcatcgacaacgccaccgccggagtcttggtaagtctccgccgtacgcctccagccgatacttgctgttctttgtcgatccatcatctgtgctcgttaagtcttcactgccgaatagtatcgccacacaagcatttctgcagaacagaattgtgcacggcccatccgcattccaaagcagagaagtgtgtggcttacctgcgtacacttcagtttgattgagtgtaggtgttgctcgcgcattagaccgtctcaacaagagttttatcagagtttggtggcattaaatatgttgatatggtatggaataaacgataagagatgatgaaagttttacgatatcaaatgaatttgagcaggatgaaacct

SEQ ID NO: 1142 - protein, 201 aa, Zea mays subsp. mays
  misc_feature (1)..(201): Ceres Seq. ID no. 13600398
TLTEVPIPMAPTCRPRPDAALLLLLLTASSVGVARAAPRVPAVIVFGDSTVDTGNNNQIPTPLRADFPPYGRDMPGGPRATGRFGNGRLPPDLISEALGLPPLVPAYLDPAYGIDDFARGVCFASAGTGIDNATAGVLVSLRRTPPADTCCSLSIHHLCSLSLHCRIVSPHKHFCRTELCTAHPHSKAEKCVAYLRTLQFD

SEQ ID NO: 1143 - protein, 193 aa, Zea mays subsp. mays
  misc_feature (1)..(193): Ceres Seq. ID no. 13600399
MAPTCRPRPDAALLLLLLTASSVGVARAAPRVPAVIVFGDSTVDTGNNNQIPTPLRADFPPYGRDMPGGPRATGRFGNGRLPPDLISEALGLPPLVPAYLDPAYGIDDFARGVCFASAGTGIDNATAGVLVSLRRTPPADTCCSLSIHHLCSLSLHCRIVSPHKHFCRTELCTAHPHSKAEKCVAYLRTLQFD

SEQ ID NO: 1144 - protein, 128 aa, Zea mays subsp. mays
  misc_feature (1)..(128): Ceres Seq. ID no. 13600400
MPGGPRATGRFGNGRLPPDLISEALGLPPLVPAYLDPAYGIDDFARGVCFASAGTGIDNATAGVLVSLRRTPPADTCCSLSIHHLCSLSLHCRIVSPHKHFCRTELCTAHPHSKAEKCVAYLRTLQFD

SEQ ID NO: 1145 - DNA, 2297 bp, Zea mays subsp. mays
  misc_feature (1)..(2297): Ceres Seq. ID no. 13600419
gsaccttcggcttttgctccgacgccggcgagmgagaccgagagacgaggcgagccaccgcggcggcggttgcagcgatggggtccatgacgatcggtgccaagtacaagaccacgatcaaggaccccggcaccccgggcatcctccgcatgaacggtgataggttcaccttcacccctaatgatccacgatcggcaatgaagttcaatgttgatttccgaaccatcaaaggtcacaagttcaataaagtagagggtaacaaagcagcattattgaacctttcaaaagaagacaaggctggaggctacatatttgagtttgacaatgttggtaaccgtgaccaatgtcgagactttgtagctagggttttaggcaaacatcaagggatagtgcctcctagaccaactgtggctcctgaaaactcagttgcttccgctgctctggaacaactcagtgccgcagaagtggagagacgggttaaactgttgcgagaagacagcgaattgcagaaactacataagaagtttgttcttggaaatattctgcaagaatctgaattttgggcaacaagaaagaatttacttgatgatgaagcaaataagagatcaaaacaaaagccaggtttcaagagtgcacttgtagatattaggccaacaactgatggtcggacaaacaaggttactttccagatcacacctgagatgatacatcagatttttgcagaaaagcctgctgtccgtagagcatatttagattttgttccaaaaaagatgtcagaaacccgattttgggaaaaatactgtagagctgagtatctagtcaggacaaaaaacactgcagcagcaacagctgaggcagctggaaatgaggaattagctatcttcctgaagaatgatgatatactggccaaggaggcaaagttgaagataaaacgagtcgatccaacattagacatggaggcagacactggagatgattacattcatcttccggaccatgggattcaccgtgatggtagcaaagagacagtcgatgctgacagtgagttggcgaggaggacgctgtctcaggacctgaaccgtcatgcagctgttgttcttgaagggagatctcttgatgtcgagtcatctgatccaaagactttagctgaagcccttgcaagatccaagaaagaaccaccttctacttctaatgttgatgatgataatcatgagagactaatgaaggtggctagaatgacagagatagaggatctgcaagctccacgaagtcttctgtatgcaccactttgtataaaggatcctagagaatattttgattcccaacaagcaaatgctctgagatctctaggtggcagcaatggtggaagaaaagcccatagttgcagcttgagcactgaagaagtgttccatcatttaatggatcaaatgtcttctgttaaagttaataggcttaactgtccgattgttcagtctgatatggctcttaaggttcttaatgaattaaacgaagggatttctcgttcaaggagacttaacctcaagaatcctcaagaaggtctccttggtcagctgcctcaacatacacgggacgagcttatggatcattggacggctatccaggaattgctacgccatttttggtcatcgtatccaataacaagtgcagtactttataacaaggttcaaagagttaaagaagctatgacacagatatatcaaaagctgcagcttataaaggaattggcacagcctgatgtaagacatgaaatatctcggctagtaaagcccatgactcaggccttggatgccgccttcaaccatgatttggaacagcagcagaaatcgtccaaggccggaaacaggcacaacgggttttgagcctaggagattggtttgaccaacacatgaagcgagacggacggacgggctgtgcccgaatacacaagagctgctgcagaattcttgaggcttgtacgattttgttctttttcccctcgcttattaatagctgccggaggagcctgctgtttgcagccccggaatcttgatctatgcatcaattgtttgtaactgactgaatagtgaagactcgcaacgcatgatgctgccgacgcgttgtacttgtacatggcagtaatggctattcgagatagaaccaaagctttaccattttgttttatgcggtttttttcatggccgccgggcagaattatacacatgtatgtcatctacagcgttacaaacataccattatacaaaaaaaaaaaaaaaaaaaactcgaggggggggcccggt

SEQ ID NO: 1146 - protein, 625 aa, Zea mays subsp. mays
  misc_feature (1)..(625): Ceres Seq. ID no. 15218664
  misc_feature (11)..(11): Xaa is any aa, unknown or other
TFGFCSDAGEXDRETRRATAAAVAAMGSMTIGAKYKTTIKDPGTPGILRMNGDRFTFTPNDPRSAMKFNVDFRTIKGHKFNKVEGNKAALLNLSKEDKAGGYIFEFDNVGNRDQCRDFVARVLGKHQGIVPPRPTVAPENSVASAALEQLSAAEVERRVKLLREDSELQKLHKKFVLGNILQESEFWATRKNLLDDEANKRSKQKPGFKSALVDIRPTTDGRTNKVTFQITPEMIHQIFAEKPAVRRAYLDFVPKKMSETRFWEKYCRAEYLVRTKNTAAATAEAAGNEELAIFLKNDDILAKEAKLKIKRVDPTLDMEADTGDDYIHLPDHGIHRDGSKETVDADSELARRTLSQDLNRHAAVVLEGRSLDVESSDPKTLAEALARSKKEPPSTSNVDDDNHERLMKVARMTEIEDLQAPRSLLYAPLCIKDPREYFDSQQANALRSLGGSNGGRKAHSCSLSTEEVFHHLMDQMSSVKVNRLNCPIVQSDMALKVLNELNEGISRSRRLNLKNPQEGLLGQLPQHTRDELMDHWTAIQELLRHFWSSYPITSAVLYNKVQRVKEAMTQIYQKLQLIKELAQPDVRHEISRLVKPMTQALDAAFNHDLEQQQKSSKAGNRHNGF

SEQ ID NO: 1147 - protein, 600 aa, Zea mays subsp. mays
  misc_feature (1)..(600): Ceres Seq. ID no. 15218665
MGSMTIGAKYKTTIKDPGTPGILRMNGDRFTFTPNDPRSAMKFNVDFRTIKGHKFNKVEGNKAALLNLSKEDKAGGYIFEFDNVGNRDQCRDFVARVLGKHQGIVPPRPTVAPENSVASAALEQLSAAEVERRVKLLREDSELQKLHKKFVLGNILQESEFWATRKNLLDDEANKRSKQKPGFKSALVDIRPTTDGRTNKVTFQITPEMIHQIFAEKPAVRRAYLDFVPKKMSETRFWEKYCRAEYLVRTKNTAAATAEAAGNEELAIFLKNDDILAKEAKLKIKRVDPTLDMEADTGDDYIHLPDHGIHRDGSKETVDADSELARRTLSQDLNRHAAVVLEGRSLDVESSDPKTLAEALARSKKEPPSTSNVDDDNHERLMKVARMTEIEDLQAPRSLLYAPLCIKDPREYFDSQQANALRSLGGSNGGRKAHSCSLSTEEVFHHLMDQMSSVKVNRLNCPIVQSDMALKVLNELNEGISRSRRLNLKNPQEGLLGQLPQHTRDELMDHWTAIQELLRHFWSSYPITSAVLYNKVQRVKEAMTQIYQKLQLIKELAQPDVRHEISRLVKPMTQALDAAFNHDLEQQQKSSKAGNRHNGF

SEQ ID NO: 1148 - protein, 597 aa, Zea mays subsp. mays
  misc_feature (1)..(597): Ceres Seq. ID no. 15218666
MTIGAKYKTTIKDPGTPGILRMNGDRFTFTPNDPRSAMKFNVDFRTIKGHKFNKVEGNKAALLNLSKEDKAGGYIFEFDNVGNRDQCRDFVARVLGKHQGIVPPRPTVAPENSVASAALEQLSAAEVERRVKLLREDSELQKLHKKFVLGNILQESEFWATRKNLLDDEANKRSKQKPGFKSALVDIRPTTDGRTNKVTFQITPEMIHQIFAEKPAVRRAYLDFVPKKMSETRFWEKYCRAEYLVRTKNTAAATAEAAGNEELAIFLKNDDILAKEAKLKIKRVDPTLDMEADTGDDYIHLPDHGIHRDGSKETVDADSELARRTLSQDLNRHAAVVLEGRSLDVESSDPKTLAEALARSKKEPPSTSNVDDDNHERLMKVARMTEIEDLQAPRSLLYAPLCIKDPREYFDSQQANALRSLGGSNGGRKAHSCSLSTEEVFHHLMDQMSSVKVNRLNCPIVQSDMALKVLNELNEGISRSRRLNLKNPQEGLLGQLPQHTRDELMDHWTAIQELLRHFWSSYPITSAVLYNKVQRVKEAMTQIYQKLQLIKELAQPDVRHEISRLVKPMTQALDAAFNHDLEQQQKSSKAGNRHNGF

SEQ ID NO: 1149 - DNA, 906 bp, Zea mays subsp. mays
  misc_feature (1)..(906): Ceres Seq. ID no. 13600477
accgtgtctgcctcaaagctatgccaggacgccacgtccaagcaaagcacccgatgccattgccacctcccagcactcacgcgtgagcgtgactataaaaaacgcaccctctgcatccgcccccgtctgcctgccctatcgaatctttcgccgccccatcagcccagcaattcttcgctgttcgttgccgttggttccatcggttgatcgaccggccggaagcagagagagagagatgggcaagtcctgggcgctcatcagccacctccacaccgtcgccgggccgagcatcaccctgctgtaccctctgtacgcgtcggtgtgcgcgatggagagcccgtccaaggcggacgacgagcagtggctgtcctactggatcatacactccttcgtcaccctcctggagatgctcgccgagccgctcctccactgggtacccgtgtggtacccggccaaggtgctgttcgcggcgtggctggcgctgccgcagttcaagggcgcctccttcgtctacgagaagctcgtcagggaacagctccggaactaccgcgccaggtacccgcgcaagggcgccgccgccgccgccgccgtcggcgacgacgacgacgaccataaggtgcacatagccaaggtaggctgaggctgagcacgaccatgtgcagtgaaagcgtgtggagacgacgcaggagctgaccggagatcatcacaggaacttctgtagatctggtgttccaaggtgttcatttgatgtatcctacgtgtctctgtagctcttgtggactgccggtgtcgcgtaatgtatctgaactctcttcgcgagtgcgacggaaccccccctccccttgcagcacgagatgcttctgtaagaacgataacatgtagacaagccaagcgcctcagctcctt

SEQ ID NO: 1150 - protein, 212 aa, Zea mays subsp. mays
  misc_feature (1)..(212): Ceres Seq. ID no. 13600478
PCLPQSYARTPRPSKAPDAIATSQHSRVSVTIKNAPSASAPVCLPYRIFRRPISPAILRCSLPLVPSVDRPAGSREREMGKSWALISHLHTVAGPSITLLYPLYASVCAMESPSKADDEQWLSYWIIHSFVTLLEMLAEPLLHWVPVWYPAKVLFAAWLALPQFKGASFVYEKLVREQLRNYRARYPRKGAAAAAAVGDDDDDHKVHIAKVG

SEQ ID NO: 1151 - protein, 134 aa, Zea mays subsp. mays
  misc_feature (1)..(134): Ceres Seq. ID no. 13600479
MGKSWALISHLHTVAGPSITLLYPLYASVCAMESPSKADDEQWLSYWIIHSFVTLLEMLAEPLLHWVPVWYPAKVLFAAWLALPQFKGASFVYEKLVREQLRNYRARYPRKGAAAAAAVGDDDDDHKVHIAKVG

SEQ ID NO: 1152 - DNA, 681 bp, Zea mays subsp. mays
  misc_feature (1)..(681): Ceres Seq. ID no. 13600496
cwagaacatcctaatcgaaaaaaaaaccggtccccttcgacctcctcctccgccgccagcgtcgaccgcgaccgccacctctcctcgtacgctacagtaggggcaggggcggcgattggtggctcttcctcctcctatgctgtgactcgaggagtatggcggatggggctattgtggtacccatttgccagtacggcggagagttcacttctggccccagtggtaatctgatatacagaggtggagaagcacatgccgttgatgttactcatgattcatcgctggagagcttcaaggatgagctgtccaaggtgttccatgttgatgtcactgacatgtcactcaagtactttcttcccaataatatgaaaacactcatcacaatatcatgtgaccgggatttgcaaaggatggttggttttactgcaaatgctgcgcatgtggatgtttttctgataagtagacaggagaacaggagtaagatgatggtgattgagtttgtggcgacaaatgcatctcttgtatcgctaagagtcttagctgtgaacttagttctcacttctgtgtgactgtgatcaaaggacttgtgtatgatcaaaggagatccatcagttggtaccgaagtgtattttatgtcttgttggttacctggaatttaattggaactggaggggggaaagg

SEQ ID NO: 1153 - protein, 137 aa, Zea mays subsp. mays
  misc_feature (1)..(137): Ceres Seq. ID no. 15218959
MADGAIVVPICQYGGEFTSGPSGNLIYRGGEAHAVDVTHDSSLESFKDELSKVFHVDVTDMSLKYFLPNNMKTLITISCDRDLQRMVGFTANAAHVDVFLISRQENRSKMMVIEFVATNASLVSLRVLAVNLVLTSV

SEQ ID NO: 1154 - protein, 77 aa, Zea mays subsp. mays
  misc_feature (1)..(77): Ceres Seq. ID no. 15218960
MSLKYFLPNNMKTLITISCDRDLQRMVGFTANAAHVDVFLISRQENRSKMMVIEFVATNASLVSLRVLAVNLVLTSV

SEQ ID NO: 1155 - protein, 76 aa, Zea mays subsp. mays
  misc_feature (1)..(76): Ceres Seq. ID no. 15218961
  misc_feature (1)..(1): Xaa is any aa, unknown or other
XEHPNRKKNRSPSTSSSAASVDRDRHLSSYATVGAGAAIGGSSSSYAVTRGVWRMGLLWYPFASTAESSLLAPVVI

SEQ ID NO: 1156 - DNA, 617 bp, Zea mays subsp. mays
  misc_feature (1)..(617): Ceres Seq. ID no. 13600512
aagcgtgactcggaattactttgagaaccttgttcaagctttggaagctgggttggaggatgtccgtgccacaggccaggctgctggtacatccagcactgccaccagctccaagaaaggaggaactaaatccaagaagaagcagcacactgcaccatcatctgaccacactgatgatgggtggccctgcgagcgctgcacatttcttaaccctcctacagtggatgcatgcagcgtctgcgaaaagagtaggtactagatgatggaatagctcaaagggagccagggaggcatcccaagaaaacctcaaagctcgtgagaagcatgcatgcatcggatgctgagaagaagagcttccagctgccgcaatgttgtacagagagttattttagggcctcggttggaaacggtgtggaggctcaagtggtcacatgtttgtgggggtcatttggttttctagttcttttctgttgttccttgtaaatatatttgttgtgatgtggtgacctgtgtttatgtgatgagtttttgtttctgacaaactgtgaaattaaactttaacaaaactgatgagtggtagctctgtttattccctcctaattgcgggcagggtcttt

SEQ ID NO: 1157 - protein, 85 aa, Zea mays subsp. mays
  misc_feature (1)..(85): Ceres Seq. ID no. 13600513
SVTRNYFENLVQALEAGLEDVRATGQAAGTSSTATSSKKGGTKSKKKQHTAPSSDHTDDGWPCERCTFLNPPTVDACSVCEKSRY

SEQ ID NO: 1158 - protein, 67 aa, Zea mays subsp. mays
  misc_feature (1)..(67): Ceres Seq. ID no. 13600514
MSVPQARLLVHPALPPAPRKEELNPRRSSTLHHHLTTLMMGGPASAAHFLTLLQWMHAASAKRVGTR

SEQ ID NO: 1159 - protein, 52 aa, Zea mays subsp. mays
  misc_feature (1)..(52): Ceres Seq. ID no. 13600515
MHASDAEKKSFQLPQCCTESYFRASVGNGVEAQVVTCLWGSFGFLVLFCCSL

SEQ ID NO: 1160 - DNA, 1068 bp, Zea mays subsp. mays
  misc_feature (1)..(1068): Ceres Seq. ID no. 13600568
cctaatccaaaaaccgcagctctcaagcgagatcgaggcagtgcgcacgccgtgcaggcctctcctccactcaaccgcgcgtcatggccatgttgcgcgagcatctcgacctcatccgcgctcacctcctcgacgacaaccacgacgccgtcagctccgatgactcggcgccgtcccactcgccatcgccatccccatcgccgccggggcgtaggccgctgccagcgctttccgtctcgctgcccccgaggccggcagtcgtcctgcagcagcagcacatgagggcggcggcgccgccgttgcagattcctcagcaggagcagcactgctgcccggaacccgaggaggacgatttccggcggtaccgcggcgtgcggcagcggccgtggggcaagtacgcggccgagattcgggacccgtcgcggaagggcgcgcgcgtgtggctgggcacctatgacaccgccgtggaggccgctcgtgcctacgaccgcgccgcgttccgcctgcgcgggtccaaggccatcctcaacttccccaacgaggtcgcgttaagcaccgctgcatggtgggcgacgcctgctcctcctcctcagcccagcgcgaccgtggccggtaacaagagggcgaggtcgccgcaggagcaggacgctaggtgcatggttagggaggtgaagaaggagcggattcaggagcccgcaagcggaggggcggactacttctgggaggatgagtcgctgaagggggcgatctgcagcctgccgccgctctcaccgttgtcgccgcacccgcacctggccgtgccgcagctctacgtcagctgactgcctgacttgatgtcgtagcaagacagggacggtggtcttactcttacctgatgatagtcttctgagttctttgatatgctagaggagtatagctccaaatattctttcgttctttatttattcgttcagtcgcaagcaagcaaacgtgtcctggcgtagcatgactgcatgagaatactataatggacaatttttaaatataatatataataaataaaagataatttatatagtaacatgattg

SEQ ID NO: 1161 - protein, 245 aa, Zea mays subsp. mays
  misc_feature (1)..(245): Ceres Seq. ID no. 15218967
MAMLREHLDLIRAHLLDDNHDAVSSDDSAPSHSPSPSPSPPGRRPLPALSVSLPPRPAVVLQQQHMRAAAPPLQIPQQEQHCCPEPEEDDFRRYRGVRQRPWGKYAAEIRDPSRKGARVWLGTYDTAVEAARAYDRAAFRLRGSKAILNFPNEVALSTAAWWATPAPPPQPSATVAGNKRARSPQEQDARCMVREVKKERIQEPASGGADYFWEDESLKGAICSLPPLSPLSPHPHLAVPQLYVS

SEQ ID NO: 1162 - protein, 243 aa, Zea mays subsp. mays
  misc_feature (1)..(243): Ceres Seq. ID no. 15218968
MLREHLDLIRAHLLDDNHDAVSSDDSAPSHSPSPSPSPPGRRPLPALSVSLPPRPAVVLQQQHMRAAAPPLQIPQQEQHCCPEPEEDDFRRYRGVRQRPWGKYAAEIRDPSRKGARVWLGTYDTAVEAARAYDRAAFRLRGSKAILNFPNEVALSTAAWWATPAPPPQPSATVAGNKRARSPQEQDARCMVREVKKERIQEPASGGADYFWEDESLKGAICSLPPLSPLSPHPHLAVPQLYVS

SEQ ID NO: 1163 - protein, 180 aa, Zea mays subsp. mays
  misc_feature (1)..(180): Ceres Seq. ID no. 15218969
MRAAAPPLQIPQQEQHCCPEPEEDDFRRYRGVRQRPWGKYAAEIRDPSRKGARVWLGTYDTAVEAARAYDRAAFRLRGSKAILNFPNEVALSTAAWWATPAPPPQPSATVAGNKRARSPQEQDARCMVREVKKERIQEPASGGADYFWEDESLKGAICSLPPLSPLSPHPHLAVPQLYVS

SEQ ID NO: 1164 - DNA, 677 bp, Zea mays subsp. mays
  misc_feature (1)..(677): Ceres Seq. ID no. 13600571
cttttttcccagaaaaaccctcgttcagctgctacactcaccgcggtctctctctgtccatttcccgcctcctcgccgcaactagggtttcttaagccctcaccgcccatggcgagcggcagggcggctacatccagttccatcctcgtcaacgccgccggcaccagcaagaccctgtccgcatcgctatggtgggactccttcgtcgtcctctccgacgacctcgaccgagccactgctggcccctctgtcccggatgccctcgctaagcggatcaaaagccaccacgcgtggctccgagggtcggtctctatgttcgggaagccgaacgacgcgtccaggagcgcactggaagttggcgaggttgccgtcggggagcgtcgcctcactgtcaagccagagctcaaggaggccgcgcttcgtgcaagcaaatgcctgaacctggatgaagtgcaatcatacattctggtcaagagatcttcagaagtctctccaacaatccgtgatgctgatgctgaggagtttcttcatctggtataattctgaaaagatgttgattgtagaaactgcaatgtcaatgctgtagtgtagttgtcatttgattctatgcaattgcactctatccttccatgttgttttaagaaaattgcaataaaaagaaaagacatacttcaggc

SEQ ID NO: 1165 - protein, 179 aa, Zea mays subsp. mays
  misc_feature (1)..(179): Ceres Seq. ID no. 13600572
LFSQKNPRSAATLTAVSLCPFPASSPQLGFLKPSPPMASGRAATSSSILVNAAGTSKTLSASLWWDSFVVLSDDLDRATAGPSVPDALAKRIKSHHAWLRGSVSMFGKPNDASRSALEVGEVAVGERRLTVKPELKEAALRASKCLNLDEVQSYILVKRSSEVSPTIRDADAEEFLHLV

SEQ ID NO: 1166 - protein, 143 aa, Zea mays subsp. mays
  misc_feature (1)..(143): Ceres Seq. ID no. 13600573
MASGRAATSSSILVNAAGTSKTLSASLWWDSFVVLSDDLDRATAGPSVPDALAKRIKSHHAWLRGSVSMFGKPNDASRSALEVGEVAVGERRLTVKPELKEAALRASKCLNLDEVQSYILVKRSSEVSPTIRDADAEEFLHLV

SEQ ID NO: 1167 - DNA, 692 bp, Zea mays subsp. mays
  misc_feature (1)..(692): Ceres Seq. ID no. 13600578
cctagaacatcctaatcgaaaaatcccaaaaaacattcctagaattttctatggctcctaaggctcttgcagttacagctcttcttctcacacttaatcttcttttcttcagttttgtaacttccacaaaatgtccaccgactactcctaaaaccccaaaatctccaaaaaagatccctccggttaaacccacttgtcctaccgacacacttaagctcggcgtttgcgcagacctgttgggcttaattaacgttcttgttggttctccaccaaagactccatgttgtgcacttcttaatggtcttgctaacgttgaagctgcggtttgtctttgcaccgctcttaaagccaatgtcttggggattaatctcaatgttcctgttgatctgagcttgttattgaactattgtgggaagaaacttccttatggcttccaatgtgcttgaagagattttaaaaagagaaatctcttggttatgctttgttctgttgctttctattgttatctatttttttgtttgtgagaaaaatgcaaatcttacaacctttgttatttcatattgaacttgttaatgaaatcgtttattgtaatgtcttagcatctctcctaatgtaaatgtgtggttgttaaaaaatatcatttcaatgattccttaaaaaaaaaaaaaaaaaagcttatcgataccgtcgac

SEQ ID NO: 1168 - protein, 131 aa, Zea mays subsp. mays
  misc_feature (1)..(131): Ceres Seq. ID no. 13600579
MAPKALAVTALLLTLNLLFFSFVTSTKCPPTTPKTPKSPKKIPPVKPTCPTDTLKLGVCADLLGLINVLVGSPPKTPCCALLNGLANVEAAVCLCTALKANVLGINLNVPVDLSLLLNYCGKKLPYGFQCA

SEQ ID NO: 1169 - DNA, 1278 bp, Zea mays subsp. mays
  misc_feature (1)..(1278): Ceres Seq. ID no. 13600580
atgcgcgcgctactgcatctgcggctcatcaatccgtgcagtcccagagcaccccgtcttcccgctactcccgcaagggcgctcgtcgcttccttctccggggcgtggcaggcaccttctggtagagcgagagcgagagcagcgccgccggcagttcgcgctatggcgtcccagcaggtgttccgggctcagcagcagcagcagcagcagttcccggctcagcagcaggagtcccagccggggaaggagcacgcgatggacccccggcccgaggccatcgtccaggactacaaggccgccaacaagctcaaggacaaggtggcgctcgtgaccggcggcgactccggcatcgggcgcgccgtgtgcctgtgcttcgcgaaggagggcgcgacggtggccttcaccttcsgtgagggggcaggaggagaaggacgcggaggagacgctgcgtgcgctgcgcgacatcgggtccgagacgggcgcgcgcgagccgatggccctgcccgccgacctcgggtacgaggccaactgccgggaggtggtggagcgggtggcgtcggcgtacggcgggcgcatcgacgtggtggtgaacaacgcggcggagcagtacgagcgggagagcatcggggacgtgacggaggcggacctggagcgcgtgttccgcaccaacatcttctcctacttcctggtgtccaagcacgcggtgccgcgcatggagcccggcgcctgcatcatcaacacctcctccgtcaacgcgtacaagggcaacaagacgctgctggactacacggccaccaagggcgccatcgtggccttcacgcgcgcgctctcgctgcagctggccgacaggggcatccgcgtcaacggcgtcgcgccgggccccgtctggacgccgctcatcccggcgtccttcggcaaggagaaggtggagcagttcgggtcccaggtgcccatgaagcgcgccgcgcagccggccgagatcgcgcccagcttcgtcttcctcgccagcaaccaggattcgtcctacatgtctggccagatcctccacgtcaacggaggcgtcatcgtcaatagctagatacggaagctgttttgctgtcgtgtgatcgtgtccaagtccaagggaacaaagcgagtgtccgtgtgtaccagtcagtaccaggtagcagtgtcagtacgcgcacgcaggaaggcaaggcagggttcagttgtagcggtgtgtaatgctgtcagcacagcacttgtaaagaaggaacgtgtctgaataaatatgcgtcc

SEQ ID NO: 1170 - protein, 357 aa, Zea mays subsp. mays
  misc_feature (1)..(357): Ceres Seq. ID no. 15218975
  misc_feature (137)..(137): Xaa is any aa, unknown or other
MRALLHLRLINPCSPRAPRLPATPARALVASFSGAWQAPSGRARARAAPPAVRAMASQQVFRAQQQQQQQFPAQQQESQPGKEHAMDPRPEAIVQDYKAANKLKDKVALVTGGDSGIGRAVCLCFAKEGATVAFTFXEGAGGEGRGGDAACAARHRVRDGRARADGPARRPRVRGQLPGGGGAGGVGVRRAHRRGGEQRGGAVRAGEHRGRDGGGPGARVPHQHLLLLPGVQARGAAHGARRLHHQHLLRQRVQGQQDAAGLHGHQGRHRGLHARALAAAGRQGHPRQRRRAGPRLDAAHPGVLRQGEGGAVRVPGAHEARRAAGRDRAQLRLPRQQPGFVLHVWPDPPRQRRRHRQ

SEQ ID NO: 1171 - protein, 303 aa, Zea mays subsp. mays
  misc_feature (1)..(303): Ceres Seq. ID no. 15218976
  misc_feature (83)..(83): Xaa is any aa, unknown or other
MASQQVFRAQQQQQQQFPAQQQESQPGKEHAMDPRPEAIVQDYKAANKLKDKVALVTGGDSGIGRAVCLCFAKEGATVAFTFXEGAGGEGRGGDAACAARHRVRDGRARADGPARRPRVRGQLPGGGGAGGVGVRRAHRRGGEQRGGAVRAGEHRGRDGGGPGARVPHQHLLLLPGVQARGAAHGARRLHHQHLLRQRVQGQQDAAGLHGHQGRHRGLHARALAAAGRQGHPRQRRRAGPRLDAAHPGVLRQGEGGAVRVPGAHEARRAAGRDRAQLRLPRQQPGFVLHVWPDPPRQRRRHRQ

SEQ ID NO: 1172 - protein, 272 aa, Zea mays subsp. mays
  misc_feature (1)..(272): Ceres Seq. ID no. 15218977
  misc_feature (52)..(52): Xaa is any aa, unknown or other
MDPRPEAIVQDYKAANKLKDKVALVTGGDSGIGRAVCLCFAKEGATVAFTFXEGAGGEGRGGDAACAARHRVRDGRARADGPARRPRVRGQLPGGGGAGGVGVRRAHRRGGEQRGGAVRAGEHRGRDGGGPGARVPHQHLLLLPGVQARGAAHGARRLHHQHLLRQRVQGQQDAAGLHGHQGRHRGLHARALAAAGRQGHPRQRRRAGPRLDAAHPGVLRQGEGGAVRVPGAHEARRAAGRDRAQLRLPRQQPGFVLHVWPDPPRQRRRHRQ

SEQ ID NO: 1173 - DNA, 910 bp, Zea mays subsp. mays
  misc_feature (1)..(910): Ceres Seq. ID no. 13600585
ctctctacagctacctagctagtatctacccgccattgcattgcaccacctctgtcctcgatctctcttgctcgaccacacacacacgcacacgatcgactaacaaccctgtatctgtatggatatggcaatgagccagcacagctccgacacctcgtccacgtcctcctactcgtccgacccctcctccacgtcgtccaccaccagcggcaagaagcgcccgcgcccgcacgccgccgccgccccggcgtaccgcggcgtccgcatgcgcgcgtggggcaagtgggtgtcggagatcagggagccccgcaagaagtcgcgcatctggctgggcaccttcccgcgcccggagatggcggcgcgcgcgcacgacgccgccgcgctcagcgtcaagggcgcgcgcgccgtgctcaacttcccggccctcgcgcgccacctcccgcgcccggcctccctggcgccgcgcgacgtccaggccgccgccgcgcgcgccgccgtcatgcacgagccagagcctcaacaacctgatgagcccggacggcagcccgtggaggaggtggccctggccgccgagctggtgttcgacgacctggcgcctctgtgggtggaggacgtggtggagttgggcccgtgcccgtcccagcatagctcgtggacgccgtgcgatgggctcgacgccgccgcctgtctgcactctctccctctcttgtgggactactagctgctactaggctccttgctccgtttgtacatggccttgaaccattttcgtttccgcttgtttttttttttttttggttttcacttgttttcatatatccaccggagctacctacaaagagtaaatccctactcgcactgtactacttctcgtatatttggactaaattttggcgggtagccatcgctt

SEQ ID NO: 1174 - protein, 200 aa, Zea mays subsp. mays
  misc_feature (1)..(200): Ceres Seq. ID no. 13600586
MDMAMSQHSSDTSSTSSYSSDPSSTSSTTSGKKRPRPHAAAAPAYRGVRMRAWGKWVSEIREPRKKSRIWLGTFPRPEMAARAHDAAALSVKGARAVLNFPALARHLPRPASLAPRDVQAAAARAAVMHEPEPQQPDEPGRQPVEEVALAAELVFDDLAPLWVEDVVELGPCPSQHSSWTPCDGLDAAACLHSLPLLWDY

SEQ ID NO: 1175 - protein, 198 aa, Zea mays subsp. mays
  misc_feature (1)..(198): Ceres Seq. ID no. 13600587
MAMSQHSSDTSSTSSYSSDPSSTSSTTSGKKRPRPHAAAAPAYRGVRMRAWGKWVSEIREPRKKSRIWLGTFPRPEMAARAHDAAALSVKGARAVLNFPALARHLPRPASLAPRDVQAAAARAAVMHEPEPQQPDEPGRQPVEEVALAAELVFDDLAPLWVEDVVELGPCPSQHSSWTPCDGLDAAACLHSLPLLWDY

SEQ ID NO: 1176 - protein, 196 aa, Zea mays subsp. mays
  misc_feature (1)..(196): Ceres Seq. ID no. 13600588
MSQHSSDTSSTSSYSSDPSSTSSTTSGKKRPRPHAAAAPAYRGVRMRAWGKWVSEIREPRKKSRIWLGTFPRPEMAARAHDAAALSVKGARAVLNFPALARHLPRPASLAPRDVQAAAARAAVMHEPEPQQPDEPGRQPVEEVALAAELVFDDLAPLWVEDVVELGPCPSQHSSWTPCDGLDAAACLHSLPLLWDY

SEQ ID NO: 1177 - DNA, 728 bp, Zea mays subsp. mays
  misc_feature (1)..(728): Ceres Seq. ID no. 13600643
ataaattgggtacactctgatagcgagagaactcaccagacttgcagctccacaccagcaacagcgcgacgatagctagctagtagtagaagcaggcagcggctctagttgtcgagcgttccacaggtcatcaagcaccggcgtttaattagccatccgctccgatcgtcccctcccctattcccatggccagtttcgctgctcaggtcatggacatgttcttcgtgctcgtcgagcgcgtcaccggctacggcggccacgctgaggacgaccagaaggacgcttcaggtgcacatgagcccaccaagctgctgacatcgtctggcgtttctgaaaccgaacaaggagaagaagaggtggtcgttgcggtgcagaatgttcagataagagcaagagggggcggcgaaccctttgtgcaaggtggctcgatgcctcaggttaattagcactgcatgcatgcgggttttgtagaggttattagttgccgctgcctcaggtgatcgagcttcgcagacgatgatgcgtttaatttgcagccagtgttttaacctttttcatgcaaggatgtgtgtgtgtgtgttgtctggatcgtgtttcgtcgtttccttcttctgattgaattaagagtatgtctgtcgagttctatcaagttggttgtaattccagtatcctatgtgcaagcaatgtgtgagcttgctgtcaagtttgtggtgccatcgaatcagtcc

SEQ ID NO: 1178 - protein, 86 aa, Zea mays subsp. mays
  misc_feature (1)..(86): Ceres Seq. ID no. 13600644
MASFAAQVMDMFFVLVERVTGYGGHAEDDQKDASGAHEPTKLLTSSGVSETEQGEEEVVVAVQNVQIRARGGGEPFVQGGSMPQVN

SEQ ID NO: 1179 - protein, 78 aa, Zea mays subsp. mays
  misc_feature (1)..(78): Ceres Seq. ID no. 13600645
MDMFFVLVERVTGYGGHAEDDQKDASGAHEPTKLLTSSGVSETEQGEEEVVVAVQNVQIRARGGGEPFVQGGSMPQVN

SEQ ID NO: 1180 - protein, 76 aa, Zea mays subsp. mays
  misc_feature (1)..(76): Ceres Seq. ID no. 13600646
MFFVLVERVTGYGGHAEDDQKDASGAHEPTKLLTSSGVSETEQGEEEVVVAVQNVQIRARGGGEPFVQGGSMPQVN

SEQ ID NO: 1181 - DNA, 1121 bp, Zea mays subsp. mays
  misc_feature (1)..(1121): Ceres Seq. ID no. 13600651
atccgaccccttgaatccgcttgccctcctgcttgatcccgccgccaccatctcaaccgcccactccttcctctccctatagggttccctgccgctcctgcgaatcgagcaatcggagacccccgggccgccctccaatgcgagttcctctccttccccctactcaactttccccttttcggctcgattcactacaatctcatgggaattttgccgcaccgccctctcccttcctctccaatgttgttaataatattggacccgtgcgtgcgtgcgtgtatccccgtaggccgtagcagagcacaatccggtggtatttaggactgatatagatttctgccgatagatttaaagttggatggttgatttgttagaatcgggcaaggacgaccatgagcgacgatggcgaccgaacctgcccgctctgtgccgaggagatggacactactgaccagcagctcaagccatgcaaatgcggctatgatatttgtgtttggtgctggcaccacatcatagacatggctgagaaggaggaaacagtgggccgctgccctgcatgccgcacatgctatgacaaggacaggatcgtcaagatggctgccacttgtgacaggacggtggcagataaaaatgtagagaagaagcacaagacccaaaaggttaagccaaaggcagcacccacagcagcagcaacatcaaccgtagaatcaaagaagcatctggctagtgtcagggttatccagagaaatctggtgtatataattgggctacctgcacatttatgcaacgagagtgtgagttcacatccagatttgatcaagtcgtgtgatgtgttcattgttttcaagtcgggcgacttgctggtcgttctggctgaccgacttgggtgattaatcgcgattaatcacgattaatcagacaacttgggggactaatcgcgattggtccaaaccgacttggacgattaattgcgactaatcgtgattattcggagacttgaaaacagtggatgtgtttttaaattttacttctcacaccaactctactgttattacttgtttaggtgcttgagtgtagggagtactttggtcaatatgggaaagttttgaaggtttcagttt

SEQ ID NO: 1182 - protein, 165 aa, Zea mays subsp. mays
  misc_feature (1)..(165): Ceres Seq. ID no. 15218589
MSDDGDRTCPLCAEEMDTTDQQLKPCKCGYDICVWCWHHIIDMAEKEETVGRCPACRTCYDKDRIVKMAATCDRTVADKNVEKKHKTQKVKPKAAPTAAATSTVESKKHLASVRVIQRNLVYIIGLPAHLCNESVSSHPDLIKSCDVFIVFKSGDLLVVLADRLG

SEQ ID NO: 1183 - protein, 150 aa, Zea mays subsp. mays
  misc_feature (1)..(150): Ceres Seq. ID no. 15218590
MDTTDQQLKPCKCGYDICVWCWHHIIDMAEKEETVGRCPACRTCYDKDRIVKMAATCDRTVADKNVEKKHKTQKVKPKAAPTAAATSTVESKKHLASVRVIQRNLVYIIGLPAHLCNESVSSHPDLIKSCDVFIVFKSGDLLVVLADRLG

SEQ ID NO: 1184 - protein, 123 aa, Zea mays subsp. mays
  misc_feature (1)..(123): Ceres Seq. ID no. 15218591
MAEKEETVGRCPACRTCYDKDRIVKMAATCDRTVADKNVEKKHKTQKVKPKAAPTAAATSTVESKKHLASVRVIQRNLVYIIGLPAHLCNESVSSHPDLIKSCDVFIVFKSGDLLVVLADRLG

SEQ ID NO: 1185 - DNA, 1299 bp, Zea mays subsp. mays
  misc_feature (1)..(1299): Ceres Seq. ID no. 13600673
atctcggggatccggcactcgcctcccttttccctttccgcgccccatcaccattgccacaaatagcaaccaaggcagtaagcctagccaagccaaccgacggcggcgagagtatatatacacacacacctgacgcctctgctgctgctgggatcaacgcggcagcttagtgacgacgacgactcttctgtctctgcgttgattaatggacagtaacagatccatggcgacgagcggcgtggctccgttcgtggccaagacgtaccgcatggtggatgacccggcgaccgacggcgtggtcgcgtggggcagggacaacaacagcttcgtcgtggccgaccccttcgccctctcgcagacgctcctgcccgcgcacttcaagcactccaacttctccagcttcgtgcgccagctcaacacctacggcttccggaaggtcgatccggaccggtgggagttcgcgcacgtgtccttccttcgcggccagacgcatctcctgggccagatcgtccgccggagcagcggcggcaagcgcaaggacgacggcaacggcgccggcgccggctccgccgacgacgaggacgcggtggccatggaggtggtccggctgaggcgggagcagcgggccatcgaggagcaggtggccgcgatgtggcgccgcgtgcaggagacggagcgccggcccaagcagatgctcgcgttcctcgtcaaggtcgcgggcgacccgcaggtgctgcgccgcctcgtctccggcgccgggggcgacgccgtgttcgccgccgcggagccggaggacggcgcgagcatcaagagggcgcggctgcttctcgatgccggaagcggcggcgacggcgccgtckgacttcmrcgggctctatagcacaaccgccggaagcgaagacgacggcgtcgggttcggcagcgattacctgcagccgccaccgccgtacgtgttccccgtcaacagcggcggctactgactgatggcggtctggtagtccagcatctatccgagcgatgtggcgtgcttcgtcgtcgttagttgcccctcccgagtgacgtgttggactgaagtggcaacggcgccgacggacggtgagcaaccaacccaagataattagctaggaggtggtacaaagtgtaaagcctttggtttaggcaggtctgcggtgatctttaatttgcttgttgcaatgttttccttccctaccttgtcaagtgaatgctacggatcagcggcggcaaaagccgttagctgcagctagtttgccgctgctcttcatacagctgcacgccgtt

SEQ ID NO: 1186 - protein, 224 aa, Zea mays subsp. mays
  misc_feature (1)..(224): Ceres Seq. ID no. 15218992
  misc_feature (219)..(219): Xaa is any aa, unknown or other
  misc_feature (221)..(221): Xaa is any aa, unknown or other
MDSNRSMATSGVAPFVAKTYRMVDDPATDGVVAWGRDNNSFVVADPFALSQTLLPAHFKHSNFSSFVRQLNTYGFRKVDPDRWEFAHVSFLRGQTHLLGQIVRRSSGGKRKDDGNGAGAGSADDEDAVAMEVVRLRREQRAIEEQVAAMWRRVQETERRPKQMLAFLVKVAGDPQVLRRLVSGAGGDAVFAAAEPEDGASIKRARLLLDAGSGGDGAVXLXRAL

SEQ ID NO: 1187 - protein, 218 aa, Zea mays subsp. mays
  misc_feature (1)..(218): Ceres Seq. ID no. 15218993
  misc_feature (213)..(213): Xaa is any aa, unknown or other
  misc_feature (215)..(215): Xaa is any aa, unknown or other
MATSGVAPFVAKTYRMVDDPATDGVVAWGRDNNSFVVADPFALSQTLLPAHFKHSNFSSFVRQLNTYGFRKVDPDRWEFAHVSFLRGQTHLLGQIVRRSSGGKRKDDGNGAGAGSADDEDAVAMEVVRLRREQRAIEEQVAAMWRRVQETERRPKQMLAFLVKVAGDPQVLRRLVSGAGGDAVFAAAEPEDGASIKRARLLLDAGSGGDGAVXLXRAL

SEQ ID NO: 1188 - protein, 203 aa, Zea mays subsp. mays
  misc_feature (1)..(203): Ceres Seq. ID no. 15218994
  misc_feature (198)..(198): Xaa is any aa, unknown or other
  misc_feature (200)..(200): Xaa is any aa, unknown or other
MVDDPATDGVVAWGRDNNSFVVADPFALSQTLLPAHFKHSNFSSFVRQLNTYGFRKVDPDRWEFAHVSFLRGQTHLLGQIVRRSSGGKRKDDGNGAGAGSADDEDAVAMEVVRLRREQRAIEEQVAAMWRRVQETERRPKQMLAFLVKVAGDPQVLRRLVSGAGGDAVFAAAEPEDGASIKRARLLLDAGSGGDGAVXLXRAL

SEQ ID NO: 1189 - DNA, 1100 bp, Zea mays subsp. mays
  misc_feature (1)..(1100): Ceres Seq. ID no. 13622448
tatgggttggcaactgccgggctcatctctagagggcagtgcaaaagtttcaggttggaaaccaccagtcttatcacttgaagggattgctaatggttcaggttcacaagcatcgtgtccttctacgcaaaggggcacaaaatcttcaggttggcagcgatcaagttcatccccggatgggagcagaaaagcctcaggttggcaacagtcaagtacatcaccagaggggagtggaaaagcgcatggctggcaacgatcaggatcttttacccaggggggtacaaaggctgcaggtcggcaaccctctcgttcctgtacagatcggattgcaaaagttgatggctggcaacgaacaagttcatctccggagggaagcagaaaagcttcaggctggcattcgtcgggtcgtgacagctcaaagatcgcatccagtgccagcgaaaaccgtaaattgtcttctagtcaccaagcgacgacaccaacagggaggcactcgttggcaaagagacagggaagcagcgacaagggtgctgctggttgggacgaggctctggggaactcttcggaagcatcgaagagacaacagggaaacagcgacaagaatgcaggctcgggagtggctctcggaagcaacaggagctggcatccatcgtctggtaaccctagtcggggcggccaggggaatcaccaacatgacagggactctcacagcggtgattcgcggcggggtagctcgaactacccccggaggtccgacaatcgtcatgaccatggcagtggtggttcgtcacgaccctcgtcaagagggcagtcccagagggggctatgtaaacactacgagagtggccactgcgggaagggttcgaaatgccagtacctgcaccggtgatcgccgtggccgtgtggaagcgggacccctgtttgcctggccgtcctcacatttttgtatagcaggatgtggtttcgtcgtagtcagtatagtagaacgcttattaaccgtgtcggcaccactaagttggtagtagtacatatctttcagggcaggagcatgactaaagtaggatttgtaagttttattagagccactgatggccttgggc

SEQ ID NO: 1190 - protein, 309 aa, Zea mays subsp. mays
  misc_feature (1)..(309): Ceres Seq. ID no. 13622449
MVQVHKHRVLLRKGAQNLQVGSDQVHPRMGAEKPQVGNSQVHHQRGVEKRMAGNDQDLLPRGVQRLQVGNPLVPVQIGLQKLMAGNEQVHLRREAEKLQAGIRRVVTAQRSHPVPAKTVNCLLVTKRRHQQGGTRWQRDREAATRVLLVGTRLWGTLRKHRRDNRETATRMQAREWLSEATGAGIHRLVTLVGAARGITNMTGTLTAVIRGGVARTTPGGPTIVMTMAVVVRHDPRQEGSPRGGYVNTTRVATAGRVRNASTCTGDRRGRVEAGPLFAWPSSHFCIAGCGFVVVSIVERLLTVSAPLSW

SEQ ID NO: 1191 - protein, 295 aa, Zea mays subsp. mays
  misc_feature (1)..(295): Ceres Seq. ID no. 13622450
MGWQLPGSSLEGSAKVSGWKPPVLSLEGIANGSGSQASCPSTQRGTKSSGWQRSSSSPDGSRKASGWQQSSTSPEGSGKAHGWQRSGSFTQGGTKAAGRQPSRSCTDRIAKVDGWQRTSSSPEGSRKASGWHSSGRDSSKIASSASENRKLSSSHQATTPTGRHSLAKRQGSSDKGAAGWDEALGNSSEASKRQQGNSDKNAGSGVALGSNRSWHPSSGNPSRGGQGNHQHDRDSHSGDSRRGSSNYPRRSDNRHDHGSGGSSRPSSRGQSQRGLCKHYESGHCGKGSKCQYLHR

SEQ ID NO: 1192 - protein, 281 aa, Zea mays subsp. mays
  misc_feature (1)..(281): Ceres Seq. ID no. 13622451
MGAEKPQVGNSQVHHQRGVEKRMAGNDQDLLPRGVQRLQVGNPLVPVQIGLQKLMAGNEQVHLRREAEKLQAGIRRVVTAQRSHPVPAKTVNCLLVTKRRHQQGGTRWQRDREAATRVLLVGTRLWGTLRKHRRDNRETATRMQAREWLSEATGAGIHRLVTLVGAARGITNMTGTLTAVIRGGVARTTPGGPTIVMTMAVVVRHDPRQEGSPRGGYVNTTRVATAGRVRNASTCTGDRRGRVEAGPLFAWPSSHFCIAGCGFVVVSIVERLLTVSAPLSW

SEQ ID NO: 1193 - DNA, 420 bp, Zea mays subsp. mays
  misc_feature (1)..(420): Ceres Seq. ID no. 13622583
atgtgtgctggtgaatgtgagtacagggaagcagcggccgccatttcagggagcttgtcgacgctgtcgcaggggtggatcctgagctgccgaagccgccgtcctgctctcccgcgtgggcttctctaattccattgttttttttagattctctcgggcctagccgtccttggaacccgatattcgggctgggcggttccgcggcctgggcctaggggcttaacagtagcaacagaagcggcggcggcggcagcagcagcagcagcaatctcttcccgaacacgagcaccacaggcgcccgaaggccggaacaggcgtttagagaaaatggcagacgatattgatattgaagcaatgcttgaggctccttacaagaaggatgagaacaagttgagcagtgccaacggccatgaagaacgt

SEQ ID NO: 1194 - protein, 42 aa, Zea mays subsp. mays
  misc_feature (1)..(42): Ceres Seq. ID no. 13622584
MCAGECEYREAAAAISGSLSTLSQGWILSCRSRRPALPRGLL

SEQ ID NO: 1195 - protein, 31 aa, Zea mays subsp. mays
  misc_feature (1)..(31): Ceres Seq. ID no. 13622585
MADDIDIEAMLEAPYKKDENKLSSANGHEER

SEQ ID NO: 1196 - DNA, 586 bp, Zea mays subsp. mays
  misc_feature (1)..(586): Ceres Seq. ID no. 13622600
atgttctgctgtcttgatgagctctacccgaaccacagaggccgtgcatgtcccggagggcgaccgtgcaggagcagatatcctcgcccttcatggactcgccgccgccgcacctcgacgcccccttcttcggggccgatctgatcccctccggccgcctccgtcggatgcgcgggtaccgctactcccccggaggcctcgaggaagagataatgatgtttcagacaagagttttactgggaggaatgaacatgtacgatcgctaccaggattggcgccttgatgtagataacatgacatacgaggagttggtcgagcttggagacagaattggatacgtcaacacagggctacgtgaggacgagattgctcgcagccttaggaaggccaagcacccatccttcggttccttgcgattcgcagcagaagtggaaaggaaatgcactatttgccaagaagaatttcagtcaaatgaagagatgggaaggctagtctgtggccatagctaccatgtgttgtgcatcaagcagtggctctctcagaagacacttgcccggtttgcaaactgccgtcagcaagaatgaaa

SEQ ID NO: 1197 - protein, 178 aa, Zea mays subsp. mays
  misc_feature (1)..(178): Ceres Seq. ID no. 13622601
MSRRATVQEQISSPFMDSPPPHLDAPFFGADLIPSGRLRRMRGYRYSPGGLEEEIMMFQTRVLLGGMNMYDRYQDWRLDVDNMTYEELVELGDRIGYVNTGLREDEIARSLRKAKHPSFGSLRFAAEVERKCTICQEEFQSNEEMGRLVCGHSYHVLCIKQWLSQKTLARFANCRQQE

SEQ ID NO: 1198 - protein, 163 aa, Zea mays subsp. mays
  misc_feature (1)..(163): Ceres Seq. ID no. 13622602
MDSPPPHLDAPFFGADLIPSGRLRRMRGYRYSPGGLEEEIMMFQTRVLLGGMNMYDRYQDWRLDVDNMTYEELVELGDRIGYVNTGLREDEIARSLRKAKHPSFGSLRFAAEVERKCTICQEEFQSNEEMGRLVCGHSYHVLCIKQWLSQKTLARFANCRQQE

SEQ ID NO: 1199 - protein, 138 aa, Zea mays subsp. mays
  misc_feature (1)..(138): Ceres Seq. ID no. 13622603
MRGYRYSPGGLEEEIMMFQTRVLLGGMNMYDRYQDWRLDVDNMTYEELVELGDRIGYVNTGLREDEIARSLRKAKHPSFGSLRFAAEVERKCTICQEEFQSNEEMGRLVCGHSYHVLCIKQWLSQKTLARFANCRQQE

SEQ ID NO: 1200 - DNA, 2309 bp, Zea mays subsp. mays
  misc_feature (1)..(2309): Ceres Seq. ID no. 13622744
ccagcctctcctagccgaggccaaaacccccataccaacacacacttcgcttctcgctgcctccgcggcggcgcgccgctccgctccgagccctcttcctcctcctcctctgcccgttcggtctagaatgttctactcgcatcagcttctcgcgcggaaggcgccgctcggccagatatggatggcggcgacgctccactcgaagatcaaccgcaaacggctcgacaagctcgacatcatcaaaatctgtgaggaaattttgaacccctcggtgcccatggctctgaggctctctggaatcctcatgggtggcgtggtgatcgtgtacgagaggaaggtgaagcttctctacactgatgtctctcggcttctgactgagatcaacgaggcatggcggatcaaaccggtcacagaccccaccgtcctccccaagggtaaaactcaagccaagtatgaagcagtaacactgccagagatcaatatggtggtggaacagcccatgtttttctcagagcctgatggtgccaagttccgacgaatgggattggaagatctggatgaacagtatgttcaagtcaatcttgatgatgatgacttctctcatgctgatgatcgtcatcaagctaaagcagtgaatataaccctggtcgataattttgagtctgggcttgcagaaactgatttattcaatcactttgagagatttgacatagcagatgatgagaccacagtcaatatcactcctgatgagtacccacaagttccaagtacgctgattccgtcaccacctaggcaggaagacattcctcaacaagaataaccgtactacgctgccccctcccctgttcatggagaacctcaacaagggggaccagaggaccaagaggaacagaagatgaagcaaccaccgaaagcatcaaagcggaaagcacgttgggaagtcccacgagtaattatggacaataaccagatgatgatcccaggaaacatatatcagacatggctgaaggatgcatcaagccttgtctcaaaaaggcgtaaacttaacagcaattttaattttattcgatcaaccaagataagtgatctcatgcacatccccccggttgctctaatatctcatgacaacttgttctcagaattatgttatcctaagccacttatgcagctctggaaggactgcactgaggtcaagtccacaaaagcttcttcaggagggcagcgatcatcatcacaagaaccacaaccgaaaaactcaccacctcaggctgggggagagtatgagatggaaacaggtggtctgccgatggatttaacagatggcattgaaaaactcagggcaaacatgagtgcaaaatatgacagagcttacaatattcttcacagtgaccatagtgttactcctggaagtcctgggttaagtcgcaggtctgcttcaagctctggtggctctggatcggcgtttatacaattggatccagaagtacaattgccatcaggaagtggaaggtccaaaagggggcagcattcatctgcaagaagcttggggaatcttgatactgttgaggaagattttccactggagcaggaagtgagggacttcaagatgagaaggctttcagattatgtgccaactcctgacctactggaagaaactgaaccgactcaaaccccatatgagaggcgctccaatccaatggacaagatcacagaaacaatccagtcgcatctcaaacttcatttcgataccccaggtgtcccacaatctgaatccttaagtcatttagctcatggaatgaccaaagccagggcagcccgactattctatcaaatagctgttttggcaacttgtgattacatcaaggttactcagctggaacggaaaggagatgaactgtacggagacatcttgatctccagaggattaaagatgtgacttggtgatgttggaaacaattttgctgcggtggttcccggtgcacatctcgtgtttatattacagaatgcttacatattgcataggatgtcttgtagttaacacataatctatacatggtgatctggtgaaagaaagggagcgagatatgaggcagtagttttgtgttatgtggcaagcaaaattctaagctgttattttagaggtttcataatttaagtacgaacatgtgttatactattatgaaactaagttgtcctgaaagcacttactgaaagggagaaatttacatggtaccttgtcaacgatgaaacatacatcggaggacaacataaagatgcacactgtatcctgctcttcggctgcttcatgt

SEQ ID NO: 1201 - protein, 346 aa, Zea mays subsp. mays
  misc_feature (1)..(346): Ceres Seq. ID no. 13622745
MKQPPKASKRKARWEVPRVIMDNNQMMIPGNIYQTWLKDASSLVSKRRKLNSNFNFIRSTKISDLMHIPPVALISHDNLFSELCYPKPLMQLWKDCTEVKSTKASSGGQRSSSQEPQPKNSPPQAGGEYEMETGGLPMDLTDGIEKLRANMSAKYDRAYNILHSDHSVTPGSPGLSRRSASSSGGSGSAFIQLDPEVQLPSGSGRSKRGQHSSARSLGNLDTVEEDFPLEQEVRDFKMRRLSDYVPTPDLLEETEPTQTPYERRSNPMDKITETIQSHLKLHFDTPGVPQSESLSHLAHGMTKARAARLFYQIAVLATCDYIKVTQLERKGDELYGDILISRGLKM

SEQ ID NO: 1202 - protein, 326 aa, Zea mays subsp. mays
  misc_feature (1)..(326): Ceres Seq. ID no. 13622746
MDNNQMMIPGNIYQTWLKDASSLVSKRRKLNSNFNFIRSTKISDLMHIPPVALISHDNLFSELCYPKPLMQLWKDCTEVKSTKASSGGQRSSSQEPQPKNSPPQAGGEYEMETGGLPMDLTDGIEKLRANMSAKYDRAYNILHSDHSVTPGSPGLSRRSASSSGGSGSAFIQLDPEVQLPSGSGRSKRGQHSSARSLGNLDTVEEDFPLEQEVRDFKMRRLSDYVPTPDLLEETEPTQTPYERRSNPMDKITETIQSHLKLHFDTPGVPQSESLSHLAHGMTKARAARLFYQIAVLATCDYIKVTQLERKGDELYGDILISRGLKM

SEQ ID NO: 1203 - protein, 321 aa, Zea mays subsp. mays
  misc_feature (1)..(321): Ceres Seq. ID no. 13622747
MMIPGNIYQTWLKDASSLVSKRRKLNSNFNFIRSTKISDLMHIPPVALISHDNLFSELCYPKPLMQLWKDCTEVKSTKASSGGQRSSSQEPQPKNSPPQAGGEYEMETGGLPMDLTDGIEKLRANMSAKYDRAYNILHSDHSVTPGSPGLSRRSASSSGGSGSAFIQLDPEVQLPSGSGRSKRGQHSSARSLGNLDTVEEDFPLEQEVRDFKMRRLSDYVPTPDLLEETEPTQTPYERRSNPMDKITETIQSHLKLHFDTPGVPQSESLSHLAHGMTKARAARLFYQIAVLATCDYIKVTQLERKGDELYGDILISRGLKM

SEQ ID NO: 1204 - DNA, 825 bp, Zea mays subsp. mays
  misc_feature (1)..(825): Ceres Seq. ID no. 13623012
gaaaaaaaacagaactcgcaccgttctcgtctaatctctctctcgacaatggctcgatcttcgtctccgtctctttctctctcccggtgccgattcgccgcggcttatctcctcccttcatctcgatccatcttcttccgatctcaatcctcgaatcgccgctctaacctcggggagctgattgagatcgatgtcgccgcgtcgcagtcgcagtcgcaatcggatcctctttcgcagaagctggaggacgcggtgcaccggataatggtgcgccgagccgcgcctgattggctccctttccttcccggcgcttcgtattgggtcccgcctcgtaggtcccagtcccatgggatcgctaagctcgttgagaagctggcgaatcccatcggcgatgaagagtcagtctctgtcgcgtcgggtcgtggatggccttgttctgattacttcatcaaaggtgtagagcctgaatcggtggagacggagatggcttcaggtactgctgcatctcactctgaggatgaggaaggctaaaacattaaaactcgttaaaaccattgtctggactcttcaaaagatttgttgattttaggaacgcggatcaaagaagaattgaaccaccaagagcggttttgaagaggtgacatggtttagactttaagagagggtagaggaaacaaaccttttacaacacatgagatcctatcaagttctgaaatgttaaaaaaaaaaacaataagaaaaggcgttgtagctcagccccctgttttcaatgtaatctttcttataacagtttgatgaatcctgtgtatatatatattcgccggg

SEQ ID NO: 1205 - protein, 176 aa, Zea mays subsp. mays
  misc_feature (1)..(176): Ceres Seq. ID no. 15219384
EKKQNSHRSRLISLSTMARSSSPSLSLSRCRFAAAYLLPSSRSIFFRSQSSNRRSNLGELIEIDVAASQSQSQSDPLSQKLEDAVHRIMVRRAAPDWLPFLPGASYWVPPRRSQSHGIAKLVEKLANPIGDEESVSVASGRGWPCSDYFIKGVEPESVETEMASGTAASHSEDEEG

SEQ ID NO: 1206 - protein, 160 aa, Zea mays subsp. mays
  misc_feature (1)..(160): Ceres Seq. ID no. 15219385
MARSSSPSLSLSRCRFAAAYLLPSSRSIFFRSQSSNRRSNLGELIEIDVAASQSQSQSDPLSQKLEDAVHRIMVRRAAPDWLPFLPGASYWVPPRRSQSHGIAKLVEKLANPIGDEESVSVASGRGWPCSDYFIKGVEPESVETEMASGTAASHSEDEEG

SEQ ID NO: 1207 - protein, 88 aa, Zea mays subsp. mays
  misc_feature (1)..(88): Ceres Seq. ID no. 15219386
MVRRAAPDWLPFLPGASYWVPPRRSQSHGIAKLVEKLANPIGDEESVSVASGRGWPCSDYFIKGVEPESVETEMASGTAASHSEDEEG

SEQ ID NO: 1208 - DNA, 765 bp, Zea mays subsp. mays
  misc_feature (1)..(765): Ceres Seq. ID no. 13623021
agaaagccgacgaaaaggcagagaaaagacgcacaccgaagaaaaacacaaagacttcatcatcatcatctcctccttctttcgcctcagcaagaagctaatctgattcagccatggctaatgcggcgtcaggaatggcagtccacgatgactgcaagctcaagtttcttgaattgaaggccaagaggacataccgtttcatcgtctacaagattgaggagcagcagaagcaagtggtcgttgagaaactcggcgagcctggtcaatcccatgatgactttgcagctagtcttcctgctgatgaatgccgatacgccattttcgattttgatttcgtcactgctgagaattgccaaaagagcaagatcttcttcgttgcatggtctccggacacggcaagagtgagaagcaagatgatctacgcgagctctaaggacaggttcaagagagagctagacgggattcaagtagagcttcaagcaaccgacccaaccgagatggatctcgacgttttcaaaagccgagccaattgaggaaccggttgaattgaacttctttcatctactattgccgagtgatatgcttttacttaaggtttgctgtgacggcaccaaccaaaaaacagcttcatttttatctgtctttggtctctgtctttattttattttggtccttacagtgttgtcttaaaacttaagaggtctggctcgtgctctaccctaaaccctctatcaaaaaatgaatcctattagcacattttgtctt

SEQ ID NO: 1209 - protein, 139 aa, Zea mays subsp. mays
  misc_feature (1)..(139): Ceres Seq. ID no. 13623022
MANAASGMAVHDDCKLKFLELKAKRTYRFIVYKIEEQQKQVVVEKLGEPGQSHDDFAASLPADECRYAIFDFDFVTAENCQKSKIFFVAWSPDTARVRSKMIYASSKDRFKRELDGIQVELQATDPTEMDLDVFKSRAN

SEQ ID NO: 1210 - protein, 132 aa, Zea mays subsp. mays
  misc_feature (1)..(132): Ceres Seq. ID no. 13623023
MAVHDDCKLKFLELKAKRTYRFIVYKIEEQQKQVVVEKLGEPGQSHDDFAASLPADECRYAIFDFDFVTAENCQKSKIFFVAWSPDTARVRSKMIYASSKDRFKRELDGIQVELQATDPTEMDLDVFKSRAN

SEQ ID NO: 1211 - DNA, 778 bp, Zea mays subsp. mays
  misc_feature (1)..(778): Ceres Seq. ID no. 13623093
attttcctttctcctccgttttttctctgccctttctctcctctcttatctcctgcggtagaagaaccatggcttcaaccaccgatttcacaaagtctttactatctcccttctcccaacatggctttaattcccagagaggaagtagcagacagaacaagaacgcgacatggccgaatcagcacaagcccaataggtctcttcgtgtgaacgggttgttcggaggtggaaacaacaaagataataataatactgaggatggacagtcaaaggcaggaggaatctttggtaatatgcagaatatgtatgagactgtcaagaaagctcaaatggttgttcaagttgaggcggttcgtgttcaaaaagagttagctgccgcagagtttgatggttattgtgaaggcgagcttgtcaaggttacgttatcaggtaaccagcaaccgatccgaactgatataacagaggcagcaatggagttaggctctgagaaactttcactgttggtcacggaggcttacaaggacgcgcacgcgaagagtgtcgtggctatgaaagaaagaatgagtgaccttgcgcagagcttaggcatgccacctggcctcagcgaaggaatgaagtaaagaaactgtttttgttgtttgtcacgactcaagtttcagttgtgagtttttctctatttatcatcagtcaggcagagaagcaaaaacctttgtactaatactattatggaatcagatatttttctcattaccctgagtatggtctataatttcaacgc

SEQ ID NO: 1212 - protein, 205 aa, Zea mays subsp. mays
  misc_feature (1)..(205): Ceres Seq. ID no. 13623094
FPFSSVFSLPFLSSLISCGRRTMASTTDFTKSLLSPFSQHGFNSQRGSSRQNKNATWPNQHKPNRSLRVNGLFGGGNNKDNNNTEDGQSKAGGIFGNMQNMYETVKKAQMVVQVEAVRVQKELAAAEFDGYCEGELVKVTLSGNQQPIRTDITEAAMELGSEKLSLLVTEAYKDAHAKSVVAMKERMSDLAQSLGMPPGLSEGMK

SEQ ID NO: 1213 - protein, 183 aa, Zea mays subsp. mays
  misc_feature (1)..(183): Ceres Seq. ID no. 13623095
MASTTDFTKSLLSPFSQHGFNSQRGSSRQNKNATWPNQHKPNRSLRVNGLFGGGNNKDNNNTEDGQSKAGGIFGNMQNMYETVKKAQMVVQVEAVRVQKELAAAEFDGYCEGELVKVTLSGNQQPIRTDITEAAMELGSEKLSLLVTEAYKDAHAKSVVAMKERMSDLAQSLGMPPGLSEGMK

SEQ ID NO: 1214 - protein, 108 aa, Zea mays subsp. mays
  misc_feature (1)..(108): Ceres Seq. ID no. 13623096
MQNMYETVKKAQMVVQVEAVRVQKELAAAEFDGYCEGELVKVTLSGNQQPIRTDITEAAMELGSEKLSLLVTEAYKDAHAKSVVAMKERMSDLAQSLGMPPGLSEGMK

SEQ ID NO: 1215 - DNA, 1605 bp, Zea mays subsp. mays
  misc_feature (1)..(1605): Ceres Seq. ID no. 13623279
aacttattcaaagatgcatttcagatgcagtgtcgtctggaaatgtatttgctgatgcaatattgcaacatctctaccgctggctttgcagcccacgatcgaaacttcatgatccagctctccatcgtcttcttcataatgtgatgaagaaagtctttgctctattgttggccgagttacgaaagctgggggctaatgttatttttgcaaacttttctaagataatcatagatactggaaaagtagatttgtcatctgcacatgcatattgtgacagcttattaaggaccttgcagacgagggacctcttcgagtggatagaattggaaccattgcacttttggcattccttactgttcatggatcagtataactatggcggaattcaagctaaaacacaaaacgtagactcttcagatggtgataatgatattgatattgtctcaagctggaacatggcagaagatttgcccaaagatacacaggatcattttgtcttaatcgtatcagaattcctatatattccgtggaaattcatgaaggaacaagtagctgctcaagctaccataagggatgatacctcatgcactccatctgtaacaatcatggctgctgagaatcttgagggccaggtgatagaacacctccgtgacaagattagcaattactttgcagacaagcttctaagaactgtaagtgatatacttcaccatttcaaagggaaaagcaaacatgagtcagatgaacctgcaaaatctgatcctcacacgcataaaggcgatgctgcattggagttcattaagcatatctgtgcagttcttgctcttgatcaaaatgttcagcatgatattttgagaatgaggaagaacctgttaaagttagttcgtgtgaaggagtttgctccagaagcacaattccaagacccatgcgcctcattcactctgccaaatgtgatctgcagctattgcaacgattgccgggacctggatctctgccgcgactcggcactccagggccaggagtggagatgcgcggtgccgcagtgcgggcagccgtaccaccgcgagcagatggagaacgcgcttctgcaggtggtccggcagcgagagaggctgtaccacctgcaggacctggtgtgcgtgcgctgcaggcaggtgaaggccgcccatctgtcggagcagtgttcctgcgggggctccttccggtgcaaggaagagccttcgtatttcctcagcaaaatgcgggtgttcctgaaggtggcggtgagccaaaagttcccgctcctgcaggactgcgtgcagtggattcttgaagccagatgatgcgggctgctacttcaacatagttcattagttcacctgatcgctaggttgtacaacgtgcacaggctgtagctccgaagagtgtataaacgggtgtatagcgctgccacacagttcattgtagctctgccctgcttgcaaaaggttgttgttgtattgtagatattcaaaggtggatggcgatagtaaccttggtatcgaaacatctggataactagccctctcgtatgtgacaaaaaaaagaaaaaaaaaaaaaaaaaaaactcgagggggggcccggtac

SEQ ID NO: 1216 - protein, 439 aa, Zea mays subsp. mays
  misc_feature (1)..(439): Ceres Seq. ID no. 13623280
LIQRCISDAVSSGNVFADAILQHLYRWLCSPRSKLHDPALHRLLHNVMKKVFALLLAELRKLGANVIFANFSKIIIDTGKVDLSSAHAYCDSLLRTLQTRDLFEWIELEPLHFWHSLLFMDQYNYGGIQAKTQNVDSSDGDNDIDIVSSWNMAEDLPKDTQDHFVLIVSEFLYIPWKFMKEQVAAQATIRDDTSCTPSVTIMAAENLEGQVIEHLRDKISNYFADKLLRTVSDILHHFKGKSKHESDEPAKSDPHTHKGDAALEFIKHICAVLALDQNVQHDILRMRKNLLKLVRVKEFAPEAQFQDPCASFTLPNVICSYCNDCRDLDLCRDSALQGQEWRCAVPQCGQPYHREQMENALLQVVRQRERLYHLQDLVCVRCRQVKAAHLSEQCSCGGSFRCKEEPSYFLSKMRVFLKVAVSQKFPLLQDCVQWILEAR

SEQ ID NO: 1217 - protein, 392 aa, Zea mays subsp. mays
  misc_feature (1)..(392): Ceres Seq. ID no. 13623281
MKKVFALLLAELRKLGANVIFANFSKIIIDTGKVDLSSAHAYCDSLLRTLQTRDLFEWIELEPLHFWHSLLFMDQYNYGGIQAKTQNVDSSDGDNDIDIVSSWNMAEDLPKDTQDHFVLIVSEFLYIPWKFMKEQVAAQATIRDDTSCTPSVTIMAAENLEGQVIEHLRDKISNYFADKLLRTVSDILHHFKGKSKHESDEPAKSDPHTHKGDAALEFIKHICAVLALDQNVQHDILRMRKNLLKLVRVKEFAPEAQFQDPCASFTLPNVICSYCNDCRDLDLCRDSALQGQEWRCAVPQCGQPYHREQMENALLQVVRQRERLYHLQDLVCVRCRQVKAAHLSEQCSCGGSFRCKEEPSYFLSKMRVFLKVAVSQKFPLLQDCVQWILEAR

SEQ ID NO: 1218 - protein, 320 aa, Zea mays subsp. mays
  misc_feature (1)..(320): Ceres Seq. ID no. 13623282
MDQYNYGGIQAKTQNVDSSDGDNDIDIVSSWNMAEDLPKDTQDHFVLIVSEFLYIPWKFMKEQVAAQATIRDDTSCTPSVTIMAAENLEGQVIEHLRDKISNYFADKLLRTVSDILHHFKGKSKHESDEPAKSDPHTHKGDAALEFIKHICAVLALDQNVQHDILRMRKNLLKLVRVKEFAPEAQFQDPCASFTLPNVICSYCNDCRDLDLCRDSALQGQEWRCAVPQCGQPYHREQMENALLQVVRQRERLYHLQDLVCVRCRQVKAAHLSEQCSCGGSFRCKEEPSYFLSKMRVFLKVAVSQKFPLLQDCVQWILEAR

SEQ ID NO: 1219 - DNA, 2517 bp, Zea mays subsp. mays
  misc_feature (1)..(2517): Ceres Seq. ID no. 13623350
atcctgtcatccaccctcgcccaaccgacggctaccggttgtaagattggaatcgtttgatggccgccgccgccgcttcgcctccggttcctttaggacccgatgcctccgatctactggacggggatctccgtctcaagcccgctgtggcaatctcatgggattccgaagcactacacagccatgcagaaaggtgtgagatagagtcaaaagtgtgtgtcattgatccttctctgcttccagctctagatgatttattgcaggacatctatgaatcattgcaaccacagccagtggactatgaacaccgaaaccttatggttaatgttttcaacaaaattgttggagaaatttttggtaaaaataatgagcttccaattgtggaaccatttggatctttcacaatggatctatttactcctcaaagtgacctggacctctctgtgaacttcaatactgatgcaaatgatcagtatcctcgcaagaacaagatttctgctattaggaagcttgcacatgttctattttctcatcagcgtcatggtcgctgttatggtgtttcacctattgtgactgctagagttcctgtactgaaggttattgataagggaactggtgtagagtgtgatatttcagtagaaaacaaagacggcatgtcaagatcagccatatttaaatttatttcatcaattgataaaagattccggatactttgttatctgatgaagttctgggctaaggtacatgatgtgaactgccccaaagatcgaacaatgagctctatggcaattatttctttagtttcttttcatttacagactcggtgtcctccaatattacctgcattttctgccgtattgaaagatggtacagattttgcaagtattgagaagaatgtatcactattccagggttttgggcacagcaataaagagtctattgctgaactttttgtatcactaatgagtaaactagtgtcagtggagggtttatgggagcaagggctctgtgctagcaattttgaagggacatggatatcgaagacctgggcgaagggtgttggcaacttgaatgttgaggacttcttggaccgatctcagaattttgccagatcggtaggggtgaaggagatgcagaaaatatgtgaatgcctaagggctagcgtttctgatttgagcaagttttctaagggtgaaattgctgcgcccaagctaaaggccctgttgtttaagcctttgaaccaggttaacccagtcattaaaccccatcagaaaactattaagaggaagcgtactaatccaaataagaccagaactaaccctattcagaaaaatgctaagaaaaagaaggcccttgagcaggataaattagccatttctcctggtcagaaagatggtaagaagacccttgatcaagagaagtcagttagttctcccattcagaaaggtgctaagaagaccaaaccccttaaccaggataagttagtcatttctcccggccaggaagatgacaagaagccccttgtgcaggatgagccaatagtagtgtctcccatccagaagaataacaataagtatgttgatcaggagaagtcccttcagcaggagaagcaaatcatctctcccggacagaaagatgataagaagagcagcaaggtgggacctgactcagcatgtaatcatgtgcaacagaagaaagtgaaggctactgtatctaccggccgtgctgctaatactcatgtttctagttccaggcctcgctctgtttttatcccccaagcacattggcccagccagccaattgttgatcggtttgcgcatatacctgagcacctgatcagcccttctgcttttagttatgggttgccacaaccacttatgcatccagcctatcctcatcctcattctcatcagggattggtaggtcaaggacagggtaatttccttcatttcaatcctggtattgagctgcagcatcaaggccaggctttcttcggtcctccagctgtctaccaccccatggtgaatgggtttcacccattcggtatcaatggtgctcagcaagtgcagtacatcgacaataggatggtgcagaggccaccatatggttttggcccaggtttctggggatgatggttgcagcctgaggaaaggttggttgctaactagtgggggtttgaggtgaaagttgtcagttcaaagaaaaaaaaagctgttgtgtctaatatactcaaagatttagctttaaataggggccagtggaaaatagctaaccatgtgtctgaaccttgatttgtggtttttgttcggtttcagctctagcttaccttagaagtaaaatgttctgttgatgttggattttaactctagcctatcctgggattaaaaggttttgttgttgttgttgtaagttgtaattgtaactgttaggtttgtactctagtctgatttaaaagtaaaaaggctatattgttgttgttgtatctagacctgtacaaggagaaataatcaaataagg

SEQ ID NO: 1220 - protein, 690 aa, Zea mays subsp. mays
  misc_feature (1)..(690): Ceres Seq. ID no. 13623351
MAAAAASPPVPLGPDASDLLDGDLRLKPAVAISWDSEALHSHAERCEIESKVCVIDPSLLPALDDLLQDIYESLQPQPVDYEHRNLMVNVFNKIVGEIFGKNNELPIVEPFGSFTMDLFTPQSDLDLSVNFNTDANDQYPRKNKISAIRKLAHVLFSHQRHGRCYGVSPIVTARVPVLKVIDKGTGVECDISVENKDGMSRSAIFKFISSIDKRFRILCYLMKFWAKVHDVNCPKDRTMSSMAIISLVSFHLQTRCPPILPAFSAVLKDGTDFASIEKNVSLFQGFGHSNKESIAELFVSLMSKLVSVEGLWEQGLCASNFEGTWISKTWAKGVGNLNVEDFLDRSQNFARSVGVKEMQKICECLRASVSDLSKFSKGEIAAPKLKALLFKPLNQVNPVIKPHQKTIKRKRTNPNKTRTNPIQKNAKKKKALEQDKLAISPGQKDGKKTLDQEKSVSSPIQKGAKKTKPLNQDKLVISPGQEDDKKPLVQDEPIVVSPIQKNNNKYVDQEKSLQQEKQIISPGQKDDKKSSKVGPDSACNHVQQKKVKATVSTGRAANTHVSSSRPRSVFIPQAHWPSQPIVDRFAHIPEHLISPSAFSYGLPQPLMHPAYPHPHSHQGLVGQGQGNFLHFNPGIELQHQGQAFFGPPAVYHPMVNGFHPFGINGAQQVQYIDNRMVQRPPYGFGPGFWG

SEQ ID NO: 1221 - protein, 604 aa, Zea mays subsp. mays
  misc_feature (1)..(604): Ceres Seq. ID no. 13623352
MVNVFNKIVGEIFGKNNELPIVEPFGSFTMDLFTPQSDLDLSVNFNTDANDQYPRKNKISAIRKLAHVLFSHQRHGRCYGVSPIVTARVPVLKVIDKGTGVECDISVENKDGMSRSAIFKFISSIDKRFRILCYLMKFWAKVHDVNCPKDRTMSSMAIISLVSFHLQTRCPPILPAFSAVLKDGTDFASIEKNVSLFQGFGHSNKESIAELFVSLMSKLVSVEGLWEQGLCASNFEGTWISKTWAKGVGNLNVEDFLDRSQNFARSVGVKEMQKICECLRASVSDLSKFSKGEIAAPKLKALLFKPLNQVNPVIKPHQKTIKRKRTNPNKTRTNPIQKNAKKKKALEQDKLAISPGQKDGKKTLDQEKSVSSPIQKGAKKTKPLNQDKLVISPGQEDDKKPLVQDEPIVVSPIQKNNNKYVDQEKSLQQEKQIISPGQKDDKKSSKVGPDSACNHVQQKKVKATVSTGRAANTHVSSSRPRSVFIPQAHWPSQPIVDRFAHIPEHLISPSAFSYGLPQPLMHPAYPHPHSHQGLVGQGQGNFLHFNPGIELQHQGQAFFGPPAVYHPMVNGFHPFGINGAQQVQYIDNRMVQRPPYGFGPGFWG

SEQ ID NO: 1222 - protein, 575 aa, Zea mays subsp. mays
  misc_feature (1)..(575): Ceres Seq. ID no. 13623353
MDLFTPQSDLDLSVNFNTDANDQYPRKNKISAIRKLAHVLFSHQRHGRCYGVSPIVTARVPVLKVIDKGTGVECDISVENKDGMSRSAIFKFISSIDKRFRILCYLMKFWAKVHDVNCPKDRTMSSMAIISLVSFHLQTRCPPILPAFSAVLKDGTDFASIEKNVSLFQGFGHSNKESIAELFVSLMSKLVSVEGLWEQGLCASNFEGTWISKTWAKGVGNLNVEDFLDRSQNFARSVGVKEMQKICECLRASVSDLSKFSKGEIAAPKLKALLFKPLNQVNPVIKPHQKTIKRKRTNPNKTRTNPIQKNAKKKKALEQDKLAISPGQKDGKKTLDQEKSVSSPIQKGAKKTKPLNQDKLVISPGQEDDKKPLVQDEPIVVSPIQKNNNKYVDQEKSLQQEKQIISPGQKDDKKSSKVGPDSACNHVQQKKVKATVSTGRAANTHVSSSRPRSVFIPQAHWPSQPIVDRFAHIPEHLISPSAFSYGLPQPLMHPAYPHPHSHQGLVGQGQGNFLHFNPGIELQHQGQAFFGPPAVYHPMVNGFHPFGINGAQQVQYIDNRMVQRPPYGFGPGFWG

SEQ ID NO: 1223 - DNA, 639 bp, Zea mays subsp. mays
  misc_feature (1)..(639): Ceres Seq. ID no. 13623354
tagataacggatgggtgaaaatacactcttgcagtacacgtcagaggcaaccgtggggtcctttctttcttatccaaaaccaaaaccagcgaaaccaccggccccgcccttgaccaaaactagtccgtcagccggtggctcccgctcccctcgctgccgctcgtaactggggaaggccgcaaccccctcgggcaggcagcggctacccccaccaccaccagtgcaccaccactccaccagcgtggcagcgacgttgctgctgtcggcccgtacgtcctggcgtgtccttggcctacttaacccgcaaggacacgccgccattccgcagggcgagctcaagcctcaagctgggattggcccgtcggcagaacaagtgcacgcgggaccgggcaacatttcccgctgcagccaacaagcagagggggcgacgatatatagccacgggcggccgttgctggatccggcatcttcctcgatcggcaagacgataggatggggttccacctgctggcgttcgtggcggcgaggggcctcatgcaggcgttcaacctgtcggcgccgctcagcctccggctgccgctcgcgcgccacctgccggaggccctcgccgtcctgtacggcgtgctcgccgcgcaagcc

SEQ ID NO: 1224 - protein, 51 aa, Zea mays subsp. mays
  misc_feature (1)..(51): Ceres Seq. ID no. 13623355
MGENTLLQYTSEATVGSFLSYPKPKPAKPPAPPLTKTSPSAGGSRSPRCRS

SEQ ID NO: 1225 - protein, 49 aa, Zea mays subsp. mays
  misc_feature (1)..(49): Ceres Seq. ID no. 13623356
MGFHLLAFVAARGLMQAFNLSAPLSLRLPLARHLPEALAVLYGVLAAQA

SEQ ID NO: 1226 - protein, 36 aa, Zea mays subsp. mays
  misc_feature (1)..(36): Ceres Seq. ID no. 13623357
DNGWVKIHSCSTRQRQPWGPFFLIQNQNQRNHRPRP

SEQ ID NO: 1227 - DNA, 2061 bp, Zea mays subsp. mays
  misc_feature (1)..(2061): Ceres Seq. ID no. 13623497
tgatagctagggcctcttttcctgcttcggcttctcatgtttcttgccggtcgtagtggaatccctacatgacagttagtaataacaacatatatctgtaaggtactctgtttttttggttgatgaggtaaactcaaccctttgctttgatgataataataagagtcatattttgcaggattttttttatttagggattatctccgattcctctttacaccactttttttcatttcagtgcaatatcaggtagtggaagtgctgggaggagaaaaaatcttgtcttgcatctgattcggtcttgtagagaaacagaaatgaaatttcttgtcagaacactggttcgtaacttgcgtattggggctatgatgaagacgattttacctgcgcttgcacatgctgttgtttttgatagaaactgtgcagcagatcctgcggtgtcattggaaggcataaaatcacaactacagagtctttcaactgaagttgccgaggcatacaatgtcactcctaatctagatttgctcattccttctcttctgagagaaggcactgcattttcagcttcatccttggcaatggtgcctggcacacctattccacctatgcttgcaagaattactaacgggttgactcagtcgttgaaagctttccatggcagatcatttacttgtgagtacaagtatgatggtcagcgtgcccagattcacaaagcacttgatggatccgtgcgaatattttcaaggcaaatgaaagaatcaacttccagatttcctgatcttgtgaatatgattaaggagttgtgcaagcccgaagtgtcaagctttatactggatgccgaggtggtaggaattaacaggaagaaaggaaatgagttgatgtcgttccaagagctatcttcaagagaaagagggaataagcattcctcaatttcaatagagaacataaaggttgacatttgtgtgtttgtttttgacatcatgttccatgatggagagagactactggattgccctcttcggcaaagaagaaagtacattcatgacttgttccatgagaagccaggatattttgagttagctcagcagctaaatatagaagcctgcgaagcttcaccagacaattctagcactttggctaggatggacacgtttttcagaaatgcatgccagtcttcttgtgagggtataatgttaaagactttggatgtcgatgctggatactctgcttccaaacgctgtgattcatggttaaaggtcaagcgtgactatgtgcaaggcttaggtgatagccttgacttggttccgattggtgcatggtatggaaacggacgtaaagctgggtggtacagcccttttctcatggcatgctacaaccctgaaactgaagagttccaaagtgtatgtcgtgttatgtctggtttctcggatgagttctataaagagatgaaggagttctattcgggggaaaggatactgcccaagaagcctgtttactacaaaacagacgagcaaccagagctgtggttcaccgcagaacaaatctgggagatccgaggtgcagacctgacgttgtcccctgtccaccatgcggccattgggcttgtccatccatcgcgcggcatctcggtgaggatgccccggtacatccgttcagttccagaccggagcccagaggactgcggcacggccgccgatattgctagcatgttcaaagcccagacccggaagatggatgtcagcagcgagggccaggagtagtaggcaatgcaaagctcagcccatttcctcgtcctagctttgcttatgttcaccagttctgtatatacacagaacgaaccagggtgaagtgaaccaccctactgatcaaatggtgaaaactgaagcgtaggacaggcagcactgatcccactggctttcaatttttctttgtacagaaactgaatgcagttggaacgcggaaggaagcccacgagttgcacgttcggggggaaaaaaacgatgcataagtacatcaggcaaaaaaaaaaaaaaaaaaaactcgagggggggcccggtaccc

SEQ ID NO: 1228 - protein, 480 aa, Zea mays subsp. mays
  misc_feature (1)..(480): Ceres Seq. ID no. 13623498
MKFLVRTLVRNLRIGAMMKTILPALAHAVVFDRNCAADPAVSLEGIKSQLQSLSTEVAEAYNVTPNLDLLIPSLLREGTAFSASSLAMVPGTPIPPMLARITNGLTQSLKAFHGRSFTCEYKYDGQRAQIHKALDGSVRIFSRQMKESTSRFPDLVNMIKELCKPEVSSFILDAEVVGINRKKGNELMSFQELSSRERGNKHSSISIENIKVDICVFVFDIMFHDGERLLDCPLRQRRKYIHDLFHEKPGYFELAQQLNIEACEASPDNSSTLARMDTFFRNACQSSCEGIMLKTLDVDAGYSASKRCDSWLKVKRDYVQGLGDSLDLVPIGAWYGNGRKAGWYSPFLMACYNPETEEFQSVCRVMSGFSDEFYKEMKEFYSGERILPKKPVYYKTDEQPELWFTAEQIWEIRGADLTLSPVHHAAIGLVHPSRGISVRMPRYIRSVPDRSPEDCGTAADIASMFKAQTRKMDVSSEGQE

SEQ ID NO: 1229 - protein, 464 aa, Zea mays subsp. mays
  misc_feature (1)..(464): Ceres Seq. ID no. 13623499
MMKTILPALAHAVVFDRNCAADPAVSLEGIKSQLQSLSTEVAEAYNVTPNLDLLIPSLLREGTAFSASSLAMVPGTPIPPMLARITNGLTQSLKAFHGRSFTCEYKYDGQRAQIHKALDGSVRIFSRQMKESTSRFPDLVNMIKELCKPEVSSFILDAEVVGINRKKGNELMSFQELSSRERGNKHSSISIENIKVDICVFVFDIMFHDGERLLDCPLRQRRKYIHDLFHEKPGYFELAQQLNIEACEASPDNSSTLARMDTFFRNACQSSCEGIMLKTLDVDAGYSASKRCDSWLKVKRDYVQGLGDSLDLVPIGAWYGNGRKAGWYSPFLMACYNPETEEFQSVCRVMSGFSDEFYKEMKEFYSGERILPKKPVYYKTDEQPELWFTAEQIWEIRGADLTLSPVHHAAIGLVHPSRGISVRMPRYIRSVPDRSPEDCGTAADIASMFKAQTRKMDVSSEGQE

SEQ ID NO: 1230 - protein, 463 aa, Zea mays subsp. mays
  misc_feature (1)..(463): Ceres Seq. ID no. 13623500
MKTILPALAHAVVFDRNCAADPAVSLEGIKSQLQSLSTEVAEAYNVTPNLDLLIPSLLREGTAFSASSLAMVPGTPIPPMLARITNGLTQSLKAFHGRSFTCEYKYDGQRAQIHKALDGSVRIFSRQMKESTSRFPDLVNMIKELCKPEVSSFILDAEVVGINRKKGNELMSFQELSSRERGNKHSSISIENIKVDICVFVFDIMFHDGERLLDCPLRQRRKYIHDLFHEKPGYFELAQQLNIEACEASPDNSSTLARMDTFFRNACQSSCEGIMLKTLDVDAGYSASKRCDSWLKVKRDYVQGLGDSLDLVPIGAWYGNGRKAGWYSPFLMACYNPETEEFQSVCRVMSGFSDEFYKEMKEFYSGERILPKKPVYYKTDEQPELWFTAEQIWEIRGADLTLSPVHHAAIGLVHPSRGISVRMPRYIRSVPDRSPEDCGTAADIASMFKAQTRKMDVSSEGQE

SEQ ID NO: 1231 - DNA, 541 bp, Zea mays subsp. mays
  misc_feature (1)..(541): Ceres Seq. ID no. 13623677
actggcagcatgggaagttgattctgtgggaaatgctaccggaattcctgcttcaatgtacctcttgcttgctgataaaagttctgctgagactggagcagagatctgcataaactacggcaacaaaggaaatgaggaactactgtacctttatggatttgtggttgacaacaatcctgatgattatctcatggttcattatcctttggaagctcttagacagatccagtctgctgatataaaaatgaagctactagagatgcagaagggagaattgaggtgcctcctacccagaagtttgcttgataatggattttttggtatccgttctagtgaagataaggatagcaagaaaaatactggtccgttttcaagttttagttggagtggtcaacgcaaagttccatcatatcttcccaaaattgttttccctcatgaatttatgagtactctacgtactattgccatgcaagaacatgagcttgaacaggttgcttctttacttggagaggttggatatagtgaagacagagaaacatct

SEQ ID NO: 1232 - protein, 180 aa, Zea mays subsp. mays
  misc_feature (1)..(180): Ceres Seq. ID no. 13623678
LAAWEVDSVGNATGIPASMYLLLADKSSAETGAEICINYGNKGNEELLYLYGFVVDNNPDDYLMVHYPLEALRQIQSADIKMKLLEMQKGELRCLLPRSLLDNGFFGIRSSEDKDSKKNTGPFSSFSWSGQRKVPSYLPKIVFPHEFMSTLRTIAMQEHELEQVASLLGEVGYSEDRETS

SEQ ID NO: 1233 - protein, 162 aa, Zea mays subsp. mays
  misc_feature (1)..(162): Ceres Seq. ID no. 13623679
MYLLLADKSSAETGAEICINYGNKGNEELLYLYGFVVDNNPDDYLMVHYPLEALRQIQSADIKMKLLEMQKGELRCLLPRSLLDNGFFGIRSSEDKDSKKNTGPFSSFSWSGQRKVPSYLPKIVFPHEFMSTLRTIAMQEHELEQVASLLGEVGYSEDRETS

SEQ ID NO: 1234 - protein, 117 aa, Zea mays subsp. mays
  misc_feature (1)..(117): Ceres Seq. ID no. 13623680
MVHYPLEALRQIQSADIKMKLLEMQKGELRCLLPRSLLDNGFFGIRSSEDKDSKKNTGPFSSFSWSGQRKVPSYLPKIVFPHEFMSTLRTIAMQEHELEQVASLLGEVGYSEDRETS

SEQ ID NO: 1235 - DNA, 1547 bp, Zea mays subsp. mays
  misc_feature (1)..(1547): Ceres Seq. ID no. 13623689
atataaatttggttaaatttgaattacttttgactcctcaaggaatgacttataataatttaggatggagggagtatttccatattactagagctcagactgacaaatttagactacagagttatcctaagaaattgagaaaccatatcaaaacataataactgaacaggtgcatactcaggcacttcctgacttaacactgacgctgcaacatgtctgacaccatgaacaactaaaaactcgacaccagatagataacaaaatcaagattcacctaccatgcttgagtaggtcatacaacatttgctggtaatcgatcatcagtgcacttaaataccataaaatagaattcttagatgatactcagctcagtccactgcatcactcagccaggtccatgagcgtcctggtcacttccttggtcaggtcgtggcgacgaagatgtaggttcatcagtgcacgcctctgcttcttgatcctctcgtccagtgtacgggccttgctgtcttcgatcatcccaaactcccgcttgaacaagcctgggtgtgccctctgaagcgccctcacctcctccgcaaggtatgggtacagctcacacatctcgtcaggctccctcccagcaccaccgttagccgacgccttggtaaccgccttggtaacaggcttggcattgctaacagaaggccagacgttcttgcagaggtcgaagagacggcgatcctgatccttgctcggtggcgcgcctttcttgaccgctttggcgtaccggctctgcaaactcctcaccttcctcttgagatcggagaggctgcagccactattgtcgagcttgccagcgagggcgtcggccagcacgtccgtttgaggcagcgcgccgtgctccaggcgttgagcagcgagggcctgcaggatgcggaagtggtcgtcaatcgaccaggtgcgctggaacggcgcgctcggccgctttgcacctttagcctacacctcttgatttggagcggggttcgtctgcggcatctcgtcgtgcgcctccctatccttttcttcgtcggaagcctcagaatcctcgccagtctgcggcggcggaggcgggttcttggtggcggaagaagggaccacgtggttggccttctcgtcctcttcgatatcctcctcttcgtcgtcttcatcctcatcggacgcttcgggttcctggaccttctgcggctcgtcatcttcatcgtcatactcatcctcgtcggacgcttcgggttcctggaccttctgcggcagcggagcaacgctcttgggagcgacgggaggcggtgagtgggcggtctccaaatcatcctcctcctcctcctcctcctcctcctcctcctcctcggagcccgaaccagaggcggtctcctcggaggaggcagccgggggcggaggcggcggaggtggagccgagcgcttgggggccatctccgccgctgcacctagggttagagatttggcaagctggtgaggcggcaccaagctagggttttcgcggcgtcgcggttttgttcatttttttatat

SEQ ID NO: 1236 - protein, 52 aa, Zea mays subsp. mays
  misc_feature (1)..(52): Ceres Seq. ID no. 13623690
MSVLVTSLVRSWRRRCRFISARLCFLILSSSVRALLSSIIPNSRLNKPGCAL

SEQ ID NO: 1237 - protein, 51 aa, Zea mays subsp. mays
  misc_feature (1)..(51): Ceres Seq. ID no. 13623691
INLVKFELLLTPQGMTYNNLGWREYFHITRAQTDKFRLQSYPKKLRNHIKT

SEQ ID NO: 1238 - protein, 37 aa, Zea mays subsp. mays
  misc_feature (1)..(37): Ceres Seq. ID no. 13623692
MTYNNLGWREYFHITRAQTDKFRLQSYPKKLRNHIKT

SEQ ID NO: 1239 - DNA, 808 bp, Zea mays subsp. mays
  misc_feature (1)..(808): Ceres Seq. ID no. 13623785
aaaaaaaaaaaaggatacatcaaaccctcaaaagtgaaaagcccgtgtctactaaaacccaagacacttgggcggttcacggcggcccagactgcggcgcctcaccaaccaacgagaccacgaagcagaccatgtcatcctacggtcccgccggcgccgcggcggacgcgatggaagctgccggcggcggcagctaccgtgtgtgcgacacggtggtgctcgtctgcctcgcctgcgcctccgccctcatcgtctctacgatggccgtctgcttccgccgcgccttcgccaacgggtacacggccagcgcgggggccaccgctgcgaacggcagaagccagtgtgggctggcgccgtccgcgctgtcggcgatccccaagctcgcctaccggaggggcgctggcgctggcgctgggtgggcgcagtgcgcgatctgcctcgccttggtgcgggacggcgagacggtgcggttgctgccggcgtgtggccacctattccacgttgagtgcatcgacctgtggctgcgctctcacgctacgtgcccgctttgccggcgtgacgtcggggaggagccacatgaaaaagtttgagctcgccgctggtggaccaggatgacacacgccggctactggttcaaccgccggcctctagagtctagactctagttcaacttttgtttcctgccatgatgttgggcattcatccaaagaattgtacatcctagggtttaggcgtagtttcattttttttcggtggaatggaacctttattctgccatccaaaaaaaaaaaaaaaaaagcttatcgat

SEQ ID NO: 1240 - protein, 204 aa, Zea mays subsp. mays
  misc_feature (1)..(204): Ceres Seq. ID no. 13623786
KKKKGYIKPSKVKSPCLLKPKTLGRFTAAQTAAPHQPTRPRSRPCHPTVPPAPRRTRWKLPAAAATVCATRWCSSASPAPPPSSSLRWPSASAAPSPTGTRPARGPPLRTAEASVGWRRPRCRRSPSSPTGGALALALGGRSARSASPWCGTARRCGCCRRVATYSTLSASTCGCALTLRARFAGVTSGRSHMKKFELAAGGPG

SEQ ID NO: 1241 - protein, 195 aa, Zea mays subsp. mays
  misc_feature (1)..(195): Ceres Seq. ID no. 13623787
KKKRIHQTLKSEKPVSTKTQDTWAVHGGPDCGASPTNETTKQTMSSYGPAGAAADAMEAAGGGSYRVCDTVVLVCLACASALIVSTMAVCFRRAFANGYTASAGATAANGRSQCGLAPSALSAIPKLAYRRGAGAGAGWAQCAICLALVRDGETVRLLPACGHLFHVECIDLWLRSHATCPLCRRDVGEEPHEKV

SEQ ID NO: 1242 - protein, 152 aa, Zea mays subsp. mays
  misc_feature (1)..(152): Ceres Seq. ID no. 13623788
MSSYGPAGAAADAMEAAGGGSYRVCDTVVLVCLACASALIVSTMAVCFRRAFANGYTASAGATAANGRSQCGLAPSALSAIPKLAYRRGAGAGAGWAQCAICLALVRDGETVRLLPACGHLFHVECIDLWLRSHATCPLCRRDVGEEPHEKV

SEQ ID NO: 1243 - DNA, 1456 bp, Zea mays subsp. mays
  misc_feature (1)..(1456): Ceres Seq. ID no. 13623893
cccactttattatgaaaaagttagaactgcatttctttcatataaaactacaatcttgtatcaacccatcataagtgttgtagtgctgaaacaagtggcccgtaattttctaggtatgtactggagcgaagagtgaacagcaatccaagcttgcagcaaggaaggtgtgatatggcttgatatcattttatttaagttggatctagtttacggagaggcttctgcattataacacttgtctgtatttccagtatgcccgcattattcagaaacttggttttccagctaagtttaaggtaactttttcatacttgtgtacattgacctgttctttgaacaatatgtacatcagttgctaagttgctgttctaagccaggattttaagattcagaatattgttggctcttgtgatgtcaagtttccaattaggcttgagggccttgcatattctcatggtgccttctcaagtgtatgtccaaggatggtttattttatcaccacagtaattcttttaccctttttgtctccattcttggataatgacaattttcatttgttttatagtacgaacccgaactctttcctggccttatctatcggatgaaacaaccaaagattgttcttttaatttttgtttcaggcaagattgttttgactggagcaaaggttagtcgtcatttcttcttgcacatgcttaataataccgccatttgcttctcttttcccttcatttcatactccattgtttgtaggtgagagaggagacctacactgccttcgaaaacatctatcctgtactgtcagagtttagaaaaattcagcaatgatgacatgtgatgtgaaggtcacgttcttcaaattacaagcttcctcgaggattctcgtgtgaccatgaattctaaatgtacataaaagtctggcggaacttatagcatcctgtaatctctgtgagccgcggdctgtcagtattgggtggbcttgctgtggtaactggtggacatgtcgagttcatccatttgggtaggccttggtgaacacggacgccccacatcatgtctcagtttgagtagtttgtgtgaactgaagggtacgtgcttctcccatghggttgcagcgttaacttgagtcaagtgctaacaagagtagataaaattttgccccaghtcgtctttgtgacagtcttttamagtcttttttctgagtatctttcaaaghgttttcagagtatcttccagtgtgctactgctgtgcgatgatgagaaggctggcactgtatgtaacggkggcaacgtgaccggttgtaagttatgtattgtagttgagatgctgtagcgcctagggcactggsattgmacttgtggaggaaccagtcagtcgaccgttctatttrtgtggccctctgctactgactaatgtggcctgttcccaaatgtcgctgcgattttcgtktcttct

SEQ ID NO: 1244 - protein, 51 aa, Zea mays subsp. mays
  misc_feature (1)..(51): Ceres Seq. ID no. 15219153
MKQPKIVLLIFVSGKIVLTGAKVSRHFFLHMLNNTAICFSFPFISYSIVCR

SEQ ID NO: 1245 - protein, 44 aa, Zea mays subsp. mays
  misc_feature (1)..(44): Ceres Seq. ID no. 15219154
PLYYEKVRTAFLSYKTTILYQPIISVVVLKQVARNFLGMYWSEE

SEQ ID NO: 1246 - protein, 43 aa, Zea mays subsp. mays
  misc_feature (1)..(43): Ceres Seq. ID no. 15219155
MTIFICFIVRTRTLSWPYLSDETTKDCSFNFCFRQDCFDWSKG

SEQ ID NO: 1247 - DNA, 672 bp, Zea mays subsp. mays
  misc_feature (1)..(672): Ceres Seq. ID no. 13623924
ccccccccccccccggtatgatctctagtggaaaagtattatcctgcagatttctcaaatcaagaaagaatgcaattagagtgccaattgccacattttcaacttgatgtttgcaaccatccagaactaaagggtttatcatctttggctgatttaacaagtggattagttaaattggataaagattcttcttatccgatggtagataaattattgagattactcttgactctccctgtgtcaactgcgaccacagagtgagccttttcagctatgaaatttgtgaagacacgtcttcgaagcaaaatgggagatgcctatttacgggattatctggtcgtttatattgaaagggaattagcggcaatgattagttctgatgatattatcaaggcctatgatctagctaatacacgtagagctaaattcaaaataactgagatgtaattttaatttgtttgacaaaatagatgctcttttattatattgttttgtaatgaagattatatatcaatatatgcattgtggttggttcccttgccatttttatattgtgtcattgctggtttggtcgcttggaggctaagcctgccccctctgtcttcggatcctggcttcgccccctggccaccaccagtgctgctgcttcccctatggcatgcccaaggtatg

SEQ ID NO: 1248 - protein, 63 aa, Zea mays subsp. mays
  misc_feature (1)..(63): Ceres Seq. ID no. 13623925
MQLECQLPHFQLDVCNHPELKGLSSLADLTSGLVKLDKDSSYPMVDKLLRLLLTLPVSTATTE

SEQ ID NO: 1249 - protein, 57 aa, Zea mays subsp. mays
  misc_feature (1)..(57): Ceres Seq. ID no. 13623926
MKFVKTRLRSKMGDAYLRDYLVVYIERELAAMISSDDIIKAYDLANTRRAKFKITEM

SEQ ID NO: 1250 - protein, 46 aa, Zea mays subsp. mays
  misc_feature (1)..(46): Ceres Seq. ID no. 13623927
MGDAYLRDYLVVYIERELAAMISSDDIIKAYDLANTRRAKFKITEM

SEQ ID NO: 1251 - DNA, 2828 bp, Zea mays subsp. mays
  misc_feature (1)..(2828): Ceres Seq. ID no. 13624010
ctcccttttagcttttagctcgccccttgcgttcgcggaaaaagctcatcttttcaggtggaaggagcgattcgtctgtgcctgcgcctgcgcctgcgcctcgccgggctcgtgccgctgtaccctccttctccaggagacctgtacggtgaaggggcgctcccgcgccaaacgggaagcaaagctcgctcgcgcccttttttcggatcatataacgccggcgcctagctcaaacaccacagctcgctgcctanatctacgcggcagcggcgtcggcagaggagagggacccggagctgcgccatggggcctaccgccggctccggcgaggacaaggctatgttagagctccggaaaaaacatcgtgtggacctggagagactaacaattacatcacgaccgttcaagacattgtcattctttgtgttagccatcgctcagaatttggaaagaacatgttcatctgttctgaaaaaaggttaccagttaaaaaccgcaatgcttttggttgttgctacttgggttctgctcatgttcactgatggcctgaatgaaaaggtaccatcttgttttaaattaattagaacatatgtgttttgcaggattaagaacagtctgagttacataaatgctacatattagataatgacttgcaagaaagctttgcccttttttattctttttagcacgaatatttggaagtggatgataaactgcagtctgtttttactcttactctttaggccgctgtatttggggaagccctaaaactatctgccatttggcaaatttgcttgtatattgttcaagaaaatttcatatacatcgctacagcttggtcacattattaataatttgcttccaatatctcccgttgcatgcccaatatgcaccttggataaacatggtatgttgtcattgatgcagcatctgcaggagctactttggtatgtcaggtttggattgtggtggattatactaggggtcgcttcatccattggattaggttctggtttgcacactttcataatgtatttggctccccatgttgccctgttcactatcaaagcggttcagtgtggtagggttgatttgaaaagtgctccttatgacactattctccttgaaaggagaccatcctggttagagaaagactgtctgcaatttggacccccaatttatcatgaaacaattccattcagcaaaatactgcaagaagtttatcttgaagctattctttggggcattggaactgcacttggagagcttcctccatattttctctcaagaacagctagcatgtcaggccgcataattgatgagttagaagatttggatgcttccatttcagaaggctttctatcttcagctttacgtcaggccaaacgatggctcatgtctcattcacagtatttaagcttcactctaatattgctacttgcttcggtgccaaaccctctatttgatcttgccggtatcttgtgtggacaatttaacatccctttctggaagttttttctagcaactttgattggaaaggctattgttaaagtttgtatccagactacattggtgattactctctgcaataaccaacttcttgatttggtggagaaaaggcttatatgggcatttagcaatgttcctggagtggcatctgtccttccatcttttgtttccaaactgaagatggccaaaaataagtttttatcagcccatgttgctgcatcagcttctacttctgttaaggtatggattccactctactttagttacaaaaaatagaaatttaatgtatgcttcacttgcccactctttaaagtgatatgacaacagcccttagactatctccagcaacttacccatccctatactcatattcaaactcccctctgcgaacagtgcaaaactgtgtttttgggtaaactatggattgactgctgcagacggcctttgaggttgataatgttttgatatttttaccattggtcatgtaagtacatggcatggaagaacacaccatggaaaggtgtgcagtaagtggttataaaattaagttcttgatcttggggataattctggtgtttacatcgactcaaagaaaaataaaatgctccagtgatttactctgaccattttactatcttgttgtcatcttcgttgcattgtttaaaaatgctcatattgtttaatccatgtttagggaaagaagtggaatctgtcattctctttggtctggaataccctggtgtggctcatggttgcaaacttcattatccagatagttacttctacagcacagggttatctcaggacacaacaggagcgagagatcagtaaaaagttggaaaccgagctttctgcctcttaacgttcttctggcgcaccaaaatgattcgccctgggtatcgatctggtttcttcaatcttttacatacttatatcgagtttagagaggaatattaacatgaataatgtggtaactgactgggaaattcaaaccgtgttcaccaactatttgctgctactgttcttcaggaaagtccaatcatacattgtacataaccatgcatcaaccatcagctcaaggctaaaggctctcctgcagtattgtggtgcactgactattgatctatttctttcgaaagagaaagagaggaaagctattagctagtgctagaaatataatgctgccccagctacaattgtaagtttgtggccttgtacatagcatcaaatattattaggggacaaaaatatctaatgatataagttaataaaaaaaaaaaaaaaaaaaaaaaaaaaaaactcgagggggggcccggtac

SEQ ID NO: 1252 - protein, 291 aa, Zea mays subsp. mays
  misc_feature (1)..(291): Ceres Seq. ID no. 13624011
MLSLMQHLQELLWYVRFGLWWIILGVASSIGLGSGLHTFIMYLAPHVALFTIKAVQCGRVDLKSAPYDTILLERRPSWLEKDCLQFGPPIYHETIPFSKILQEVYLEAILWGIGTALGELPPYFLSRTASMSGRIIDELEDLDASISEGFLSSALRQAKRWLMSHSQYLSFTLILLLASVPNPLFDLAGILCGQFNIPFWKFFLATLIGKAIVKVCIQTTLVITLCNNQLLDLVEKRLIWAFSNVPGVASVLPSFVSKLKMAKNKFLSAHVAASASTSVKVWIPLYFSYKK

SEQ ID NO: 1253 - protein, 287 aa, Zea mays subsp. mays
  misc_feature (1)..(287): Ceres Seq. ID no. 13624012
MQHLQELLWYVRFGLWWIILGVASSIGLGSGLHTFIMYLAPHVALFTIKAVQCGRVDLKSAPYDTILLERRPSWLEKDCLQFGPPIYHETIPFSKILQEVYLEAILWGIGTALGELPPYFLSRTASMSGRIIDELEDLDASISEGFLSSALRQAKRWLMSHSQYLSFTLILLLASVPNPLFDLAGILCGQFNIPFWKFFLATLIGKAIVKVCIQTTLVITLCNNQLLDLVEKRLIWAFSNVPGVASVLPSFVSKLKMAKNKFLSAHVAASASTSVKVWIPLYFSYKK

SEQ ID NO: 1254 - protein, 251 aa, Zea mays subsp. mays
  misc_feature (1)..(251): Ceres Seq. ID no. 13624013
MYLAPHVALFTIKAVQCGRVDLKSAPYDTILLERRPSWLEKDCLQFGPPIYHETIPFSKILQEVYLEAILWGIGTALGELPPYFLSRTASMSGRIIDELEDLDASISEGFLSSALRQAKRWLMSHSQYLSFTLILLLASVPNPLFDLAGILCGQFNIPFWKFFLATLIGKAIVKVCIQTTLVITLCNNQLLDLVEKRLIWAFSNVPGVASVLPSFVSKLKMAKNKFLSAHVAASASTSVKVWIPLYFSYKK

SEQ ID NO: 1255 - DNA, 859 bp, Zea mays subsp. mays
  misc_feature (1)..(859): Ceres Seq. ID no. 13624029
cctagacccagacccagacccaggtgcaccacacctagacctggaacaccacggaaggtacgtagagccgctggtactgctgctacaatggcatttgatctgcatacattgcatccggccttccaaatcttcctcgtctgtcctcctcccccgactagagcaatcccaggtcaatctctgcagccacatcagtatctccatcctcggccatcgagccactcgaatcaagatcgccttcgcttgattccaacaacccattggcagtggcaggcaaaaaattcgccttctatatgtgccgcggcctcccaactccagctccagctccagcgcttcaatttcagtcccaggattgcagtcggcagcagcgaggtactacccaagcaccgcccggccgagcgagcgagtccgtgcgtgcgtgcatggcagcagagaggaaggcggcctcccgcccggccgcctgcgggcgaatgcgcggcgccgagggtgccaagccgcggggccgtcaggcaaaggcagcgcgggcaccaccgggccaggggtacttcacggcggggctggcggcgctgttcctttgcctcaccacgctgctcgtgttcctgcctctcgtgctgccgccgctgccgccgccgccgttgctgctgctgctcgtgcccgtgggcctcatggctgtactgcttgcgctggcgctcgtgccgtccgacggccgggccgccgccgccgccgtcgcttcttcatcgtgcgtgtgctgaagacggacgacgcatcgcacgtgtgctagacacgccgagagactgtactgtaaaaatgtggcggtttaacatttgttttgttaatttgatataaggaatagtgatttcct

SEQ ID NO: 1256 - protein, 280 aa, Zea mays subsp. mays
  misc_feature (1)..(280): Ceres Seq. ID no. 13624030
PRPRPRPRCTTPRPGTPRKVRRAAGTAATMAFDLHTLHPAFQIFLVCPPPPTRAIPGQSLQPHQYLHPRPSSHSNQDRLRLIPTTHWQWQAKNSPSICAAASQLQLQLQRFNFSPRIAVGSSEVLPKHRPAERASPCVRAWQQRGRRPPARPPAGECAAPRVPSRGAVRQRQRGHHRARGTSRRGWRRCSFASPRCSCSCLSCCRRCRRRRCCCCSCPWASWLYCLRWRSCRPTAGPPPPPSLLHRACAEDGRRIARVLDTPRDCTVKMWRFNICFVNLI

SEQ ID NO: 1257 - protein, 251 aa, Zea mays subsp. mays
  misc_feature (1)..(251): Ceres Seq. ID no. 13624031
MAFDLHTLHPAFQIFLVCPPPPTRAIPGQSLQPHQYLHPRPSSHSNQDRLRLIPTTHWQWQAKNSPSICAAASQLQLQLQRFNFSPRIAVGSSEVLPKHRPAERASPCVRAWQQRGRRPPARPPAGECAAPRVPSRGAVRQRQRGHHRARGTSRRGWRRCSFASPRCSCSCLSCCRRCRRRRCCCCSCPWASWLYCLRWRSCRPTAGPPPPPSLLHRACAEDGRRIARVLDTPRDCTVKMWRFNICFVNLI

SEQ ID NO: 1258 - protein, 152 aa, Zea mays subsp. mays
  misc_feature (1)..(152): Ceres Seq. ID no. 13624032
MCRGLPTPAPAPALQFQSQDCSRQQRGTTQAPPGRASESVRACMAAERKAASRPAACGRMRGAEGAKPRGRQAKAARAPPGQGYFTAGLAALFLCLTTLLVFLPLVLPPLPPPPLLLLLVPVGLMAVLLALALVPSDGRAAAAAVASSSCVC

SEQ ID NO: 1259 - protein, 251 aa, Zea mays subsp. mays; identical to SEQ ID NO: 1257
  misc_feature (1)..(251): Ceres Seq. ID no. 16625722

SEQ ID NO: 1260 - DNA, 689 bp, Zea mays subsp. mays
  misc_feature (1)..(689): Ceres Seq. ID no. 13624258
aaaaatctcatctcagcgtcattcatttcaatcaccgtgtgtgtgtgaaagaactgaacatggccatgagaggcaacaatgtcaagaccttggcgttgatgctcgtagttgtgggtcttgtggcactccagcaaacccagcaagtacaagcatcccactgttgttgccatctagactccgtccctacctattttaagtgccgcgaaaaatctgatagcaccgtctcagagtgctgcggttcttctgatggctatatatcagacgccgctggatttgaatgcaagtccggttttatagatatagagacagcactgcaagccgtcaactactgcaagctggggtgcacggcttccttgtgcaacaaagtaactccatctgggaaagatgccatggaacgctgcactagtggatgccacgatctgtgcaccaagaacaatgccgaaattgcgcaagtcgtcgcggcttaactagttatgccaaagagctgcatctgacaagcccgccaaggagtgtttatgttgccttcaataattggtgccaaatccaataaggatcatgagctgtatgatgcatcttcctgcgaggatgtatagtgctcgatcatcatttcttgttaaatgttttatcttgtatccttggcaaatggcatgatgacgacatgcttttagtgaaatcttgtttagtttgcg

SEQ ID NO: 1261 - protein, 154 aa, Zea mays subsp. mays
  misc_feature (1)..(154): Ceres Seq. ID no. 13624259
KSHLSVIHFNHRVCVKELNMAMRGNNVKTLALMLVVVGLVALQQTQQVQASHCCCHLDSVPTYFKCREKSDSTVSECCGSSDGYISDAAGFECKSGFIDIETALQAVNYCKLGCTASLCNKVTPSGKDAMERCTSGCHDLCTKNNAEIAQVVAA

SEQ ID NO: 1262 - protein, 135 aa, Zea mays subsp. mays
  misc_feature (1)..(135): Ceres Seq. ID no. 13624260
MAMRGNNVKTLALMLVVVGLVALQQTQQVQASHCCCHLDSVPTYFKCREKSDSTVSECCGSSDGYISDAAGFECKSGFIDIETALQAVNYCKLGCTASLCNKVTPSGKDAMERCTSGCHDLCTKNNAEIAQVVAA

SEQ ID NO: 1263 - protein, 133 aa, Zea mays subsp. mays
  misc_feature (1)..(133): Ceres Seq. ID no. 13624261
MRGNNVKTLALMLVVVGLVALQQTQQVQASHCCCHLDSVPTYFKCREKSDSTVSECCGSSDGYISDAAGFECKSGFIDIETALQAVNYCKLGCTASLCNKVTPSGKDAMERCTSGCHDLCTKNNAEIAQVVAA

SEQ ID NO: 1264 - DNA, 1037 bp, Zea mays subsp. mays
  misc_feature (1)..(1037): Ceres Seq. ID no. 13624400
tgaagagtcttaagagcattcccaatgtcgtatccgtgggaagcccaaatccatattcaacaagggtgttaccagtgggtggccaatcgccaggaaatggaatgaatgggacacctgggaaactcaagcttgagaaacttgcaatcaataagttctctccaactagcctattgaattccatcaaattgagaagagaaggtcctctttctctcatgacagagcacaaagaagcattatggagcacgtattcgccaaccacaaagcccgatacttctgttctaaataggctcattgacgctggtgtgtcaccaaggattgaggagtccatgtcagtagtcaacaatgagatattgcggcggcacttcttggagttgacgaccaacttccttgcgccttttgggccgtatctgagaactacaacaccatcagaagggacttcaccttttgttgacccaccattgctaccaccgtttcatgcagatgagttcatcaatggtttggcagctagaggtccagggaagtttttgtccaaaaggatgaggtccaattggttggacctatataggagatttctcgaaggccccaattttatgccttggttccggcaaaggcgtgctgctgcggagcaagaacagcagaggctctggaggcaggctcgcatgaatgttgacattgaaaagctaatgtcaaatatgtccgaaatagagaggattgattcttttgatgctgttgagcgttatcttctcagagagatggagaaccctggaaaaggaagtgctgattcaataggggcatgccaaaaattgaaggtagacctccaagcagcattcaatgtactgccgaaggacttgcagcaactcctgctctccaaccctaaaagagctgttcttcttcaaggtagtcaagagaaggccctgggtgccaatggcattggcacccagacaagtttgtagcagccccctctgtaacattaccattgtcactattttttgcacacataatacaaagttacacatttatatacacccacgtttgtc

SEQ ID NO: 1265 - protein, 316 aa, Zea mays subsp. mays
  misc_feature (1)..(316): Ceres Seq. ID no. 13624401
KSLKSIPNVVSVGSPNPYSTRVLPVGGQSPGNGMNGTPGKLKLEKLAINKFSPTSLLNSIKLRREGPLSLMTEHKEALWSTYSPTTKPDTSVLNRLIDAGVSPRIEESMSVVNNEILRRHFLELTTNFLAPFGPYLRTTTPSEGTSPFVDPPLLPPFHADEFINGLAARGPGKFLSKRMRSNWLDLYRRFLEGPNFMPWFRQRRAAAEQEQQRLWRQARMNVDIEKLMSNMSEIERIDSFDAVERYLLREMENPGKGSADSIGACQKLKVDLQAAFNVLPKDLQQLLLSNPKRAVLLQGSQEKALGANGIGTQTSL

SEQ ID NO: 1266 - protein, 283 aa, Zea mays subsp. mays
  misc_feature (1)..(283): Ceres Seq. ID no. 13624402
MNGTPGKLKLEKLAINKFSPTSLLNSIKLRREGPLSLMTEHKEALWSTYSPTTKPDTSVLNRLIDAGVSPRIEESMSVVNNEILRRHFLELTTNFLAPFGPYLRTTTPSEGTSPFVDPPLLPPFHADEFINGLAARGPGKFLSKRMRSNWLDLYRRFLEGPNFMPWFRQRRAAAEQEQQRLWRQARMNVDIEKLMSNMSEIERIDSFDAVERYLLREMENPGKGSADSIGACQKLKVDLQAAFNVLPKDLQQLLLSNPKRAVLLQGSQEKALGANGIGTQTSL

SEQ ID NO: 1267 - protein, 246 aa, Zea mays subsp. mays
  misc_feature (1)..(246): Ceres Seq. ID no. 13624403
MTEHKEALWSTYSPTTKPDTSVLNRLIDAGVSPRIEESMSVVNNEILRRHFLELTTNFLAPFGPYLRTTTPSEGTSPFVDPPLLPPFHADEFINGLAARGPGKFLSKRMRSNWLDLYRRFLEGPNFMPWFRQRRAAAEQEQQRLWRQARMNVDIEKLMSNMSEIERIDSFDAVERYLLREMENPGKGSADSIGACQKLKVDLQAAFNVLPKDLQQLLLSNPKRAVLLQGSQEKALGANGIGTQTSL

SEQ ID NO: 1268 - DNA, 458 bp, Zea mays subsp. mays
  misc_feature (1)..(458): Ceres Seq. ID no. 13624408
aatctgggttttatcttgttcttggaagctcgaacgtcgatgaagggttacgtggttatttgacaaagtatgactgcagttcagctgatgtaaaccccattggaagtgtaagtaagcaagatctgagagcttttttacgatgggcagcaattcatcttaagtattcttccttggccgaggttgaagctgcaccacctactgccgagcttgagccaatacgagcaaactacaatcagttggatgaaatagacatgggaatgacatatgaggagctgtctatatatggaaggttaaggaaaattttccgatgtggtcctgtttcaatgtttcagaacctgtgccacagttggtgtggaagattgtctccgtctgaagtggctgacaaagtgaagcacttcttcaagtactacgccataaaccggcacaagatgactgttttgacacccatcttatcatgc

SEQ ID NO: 1269 - protein, 152 aa, Zea mays subsp. mays
  misc_feature (1)..(152): Ceres Seq. ID no. 13624409
SGFYLVLGSSNVDEGLRGYLTKYDCSSADVNPIGSVSKQDLRAFLRWAAIHLKYSSLAEVEAAPPTAELEPIRANYNQLDEIDMGMTYEELSIYGRLRKIFRCGPVSMFQNLCHSWCGRLSPSEVADKVKHFFKYYAINRHKMTVLTPILSC

SEQ ID NO: 1270 - protein, 69 aa, Zea mays subsp. mays
  misc_feature (1)..(69): Ceres Seq. ID no. 13624410
MGMTYEELSIYGRLRKIFRCGPVSMFQNLCHSWCGRLSPSEVADKVKHFFKYYAINRHKMTVLTPILSC

SEQ ID NO: 1271 - DNA, 1089 bp, Zea mays subsp. mays
  misc_feature (1)..(1089): Ceres Seq. ID no. 13624555
tctttcccccttcccactctccactctgagcactctcctccgctctgctcctttgctccccacggcaaaccgtaaaccctagcctgaggggcacccctgtcgcagccatgggcgcaagccggaagctgcagggcgagatcgaccgcgtcctgaagaaggtccaggagggcgtcgatgtctttgacagcatctggaataaggtctacgacactgagaatgccaaccagaaggagaagttcgaggcggacctcaagaaggagatcaagaagctgcagcggtacagggaccagatcaagacgtggattcagtccagcgagatcaaggacaagaaggtgaggattacggattacctcgagtcctgcccctcccctggcaagcctctatgtctgcacgtggagggcatggttgtttgggatgcaatgctgctgctgtttgctgactttgtgttgtgatcaacgtgccgccatgctgtcctccttagtgacttgtgctgtgatcaacgtgccgctatgctgtcctcattagtgactgtgctgtgatcaacgtgccgctatgctgtcctctttagtgacttcactgacttgtgctgtgatcaacgtgctgttatgttgtcctctttagtggagtgctaggtagaagggagtattgaacaagttatgttgtgtggcacgacacaggtggtgatcagtgagtagagacctagactggagaatggttctattgttgtatatcatctaggtgatgattcaggtgacacggtgtaggcataactggtgacgtgatcagtttcatatgtatcctgtcaaggtcaggggtgcaaaggtttttgatgttactattaatactgcttcccattcttttgctatctctctctctctcttttttggcgttgctagctgttctgttatctagattatcctgtaatgacgatgctgatcatgtagatcttgtttccatcaccaaggttgtctgcactctgcagtccatgggtacattgttcccactactagatgccacttgcaatccgaagttgttgggatgcaatatgtaatacttctttgggcactttaatttgtgaaagcagatgat

SEQ ID NO: 1272 - protein, 114 aa, Zea mays subsp. mays
  misc_feature (1)..(114): Ceres Seq. ID no. 13624556
MGASRKLQGEIDRVLKKVQEGVDVFDSIWNKVYDTENANQKEKFEADLKKEIKKLQRYRDQIKTWIQSSEIKDKKVRITDYLESCPSPGKPLCLHVEGMVVWDAMLLLFADFVL

SEQ ID NO: 1273 - protein, 73 aa, Zea mays subsp. mays
  misc_feature (1)..(73): Ceres Seq. ID no. 13624557
MLLLILLPILLLSLSLSFLALLAVLLSRLSCNDDADHVDLVSITKVVCTLQSMGTLFPLLDATCNPKLLGCNM

SEQ ID NO: 1274 - DNA, 982 bp, Zea mays subsp. mays
  misc_feature (1)..(982): Ceres Seq. ID no. 13624608
aattatcacaccactctctccctctcctcctttatattttagttatggccaagattggtttgaaacccgatccagttaacaataatgccaaggagattcgttacagaggcgttaggaagaggccatggggccgttatgccgcggagatccgagatccgggtaagaaaacccgggtctggcttggtactttcgataccgccgaagaggcggcgcgtgcttacgatgcggcggcgcgtgatttccgaggggccaaggctaagaccaatttccccaattttctcgagctgagtgagaagatgccggctgccggcggcggtttcgagcgtagcccaagccagagcagcacccttgactgcgattctcctccggcggcggttacgccggcgagtgctgggattgttccgccgcagctcgagcttcgcctcggcggctatcagatcccgatggcgcgtcctatttactttttggacgttatgggagtaggcaacggaggtcgtgctcagcctccggtggcgtcagcttttaggtcgccggtggcttgtgtggctcagagcgactctgattcgtcgtcggttgttgatttcgaaggtgtgatggagaagagatctcagctgtttgatctagatctaaacttgtctcctccgtcggaacaggcctgaacttatcgaaggtggtcgtggtcgtgttcatttccgacgcgcatgcgttttttttttgtttgggagctgagagaattcgtattctcgttagttttttattctctctcactctagaataattattattatcggtttaaaaaaaaaaagtttatcgggagagagaatataattttagctgacatggatcgttatgtacatattattacataactggagatctgaacttttgttgtgtgcttttttgcgacttggtttcaccttgttgttcctctatctgtagcctttaattttgttattgcaaattttatatcaataatttggtg

SEQ ID NO: 1275 - protein, 218 aa, Zea mays subsp. mays
  misc_feature (1)..(218): Ceres Seq. ID no. 13624609
LSHHSLPLLLYILVMAKIGLKPDPVNNNAKEIRYRGVRKRPWGRYAAEIRDPGKKTRVWLGTFDTAEEAARAYDAAARDFRGAKAKTNFPNFLELSEKMPAAGGGFERSPSQSSTLDCDSPPAAVTPASAGIVPPQLELRLGGYQIPMARPIYFLDVMGVGNGGRAQPPVASAFRSPVACVAQSDSDSSSVVDFEGVMEKRSQLFDLDLNLSPPSEQA

SEQ ID NO: 1276 - protein, 204 aa, Zea mays subsp. mays
  misc_feature (1)..(204): Ceres Seq. ID no. 13624610
MAKIGLKPDPVNNNAKEIRYRGVRKRPWGRYAAEIRDPGKKTRVWLGTFDTAEEAARAYDAAARDFRGAKAKTNFPNFLELSEKMPAAGGGFERSPSQSSTLDCDSPPAAVTPASAGIVPPQLELRLGGYQIPMARPIYFLDVMGVGNGGRAQPPVASAFRSPVACVAQSDSDSSSVVDFEGVMEKRSQLFDLDLNLSPPSEQA

SEQ ID NO: 1277 - protein, 120 aa, Zea mays subsp. mays
  misc_feature (1)..(120): Ceres Seq. ID no. 13624611
MPAAGGGFERSPSQSSTLDCDSPPAAVTPASAGIVPPQLELRLGGYQIPMARPIYFLDVMGVGNGGRAQPPVASAFRSPVACVAQSDSDSSSVVDFEGVMEKRSQLFDLDLNLSPPSEQA

SEQ ID NO: 1278 - DNA, 547 bp, Zea mays subsp. mays
  misc_feature (1)..(547): Ceres Seq. ID no. 13624647
ataccgatttgcagacccatggtgctgacgaagaatgcactccgcattctctacaaatagcttggcaccttgacacctagcttcacctccctcctcctggcccagtcgtcctagccatcaaaattcagttgagggttcttcagttcagccatgaagcttgagatgacagcagcggccatggtcttgatcctgctgacctcgggcgccgaggccaaggtctgctactcgcggagcaggaccttcaaggggtggtgctaccacagcatcaactgcatcgccatctgcatcaccgagggcgacaccagcgggttctgccaggccggggcctgcatgtgcacttatgagtgtctcaatggtgtcgtcgccggtggcggcggtggcggcggacagcatccatcggttggctcatcgcgtggtggtggtgctgaggctaaagcagccgtcccatcagtgtagagcttctgattctggcggggtgatggcagatggtgcactactactcttccgtgcacatgctaactcaaggtttcgagttgatgaataacac

SEQ ID NO: 1279 - protein, 101 aa, Zea mays subsp. mays
  misc_feature (1)..(101): Ceres Seq. ID no. 13624648
MKLEMTAAAMVLILLTSGAEAKVCYSRSRTFKGWCYHSINCIAICITEGDTSGFCQAGACMCTYECLNGVVAGGGGGGGQHPSVGSSRGGGAEAKAAVPSV

SEQ ID NO: 1280 - protein, 97 aa, Zea mays subsp. mays
  misc_feature (1)..(97): Ceres Seq. ID no. 13624649
MTAAAMVLILLTSGAEAKVCYSRSRTFKGWCYHSINCIAICITEGDTSGFCQAGACMCTYECLNGVVAGGGGGGGQHPSVGSSRGGGAEAKAAVPSV

SEQ ID NO: 1281 - protein, 92 aa, Zea mays subsp. mays
  misc_feature (1)..(92): Ceres Seq. ID no. 13624650
MVLILLTSGAEAKVCYSRSRTFKGWCYHSINCIAICITEGDTSGFCQAGACMCTYECLNGVVAGGGGGGGQHPSVGSSRGGGAEAKAAVPSV

SEQ ID NO: 1282 - DNA, 626 bp, Zea mays subsp. mays
  misc_feature (1)..(626): Ceres Seq. ID no. 13635567
agtcccccccccactgagaagaaggagagctcagaaaccaaagaagctcggaagagcacgcagagtccagaaggcggcggcaaaggcgacgagggtccagacagcaaggcggagggcgagaaggaagcggccgttgttgaccttaggccactgacgatggaagacctgaggcaggcaaagaaccaggttgcagcgagcttcgccgccgagggtgccgtgatgaacgagctcaggcagtggaacgacctgtacggcgaaggggggtccaggaagaaacagcagctgacctacttcttgtagaggtgaagcatttggcaggtggtggagaggaacagagctgggcagacggtggacccatacttgatgaaccgagcatggtttcttcaagacgtgacgtgggcatgacgcatagtactagtctttgaggttccaggatccatgagatgagatgaggtcgatggtcaatttgtaggatcatgaactattattcttttacatgcatttgtacatgagcgctagactggttatgtatatctggattgattgaacagctcttgtgtttgagggtcattttagcttctcgtagactgctgtaattatatcatatatagtgagtatatatattc

SEQ ID NO: 1283 - protein, 99 aa, Zea mays subsp. mays
  misc_feature (1)..(99): Ceres Seq. ID no. 13635568
SPPPTEKKESSETKEARKSTQSPEGGGKGDEGPDSKAEGEKEAAVVDLRPLTMEDLRQAKNQVAASFAAEGAVMNELRQWNDLYGEGGSRKKQQLTYFL

SEQ ID NO: 1284 - protein, 50 aa, Zea mays subsp. mays
  misc_feature (1)..(50): Ceres Seq. ID no. 13635569
VPPPLRRRRAQKPKKLGRARRVQKAAAKATRVQTARRRARRKRPLLTLGH

SEQ ID NO: 1285 - protein, 47 aa, Zea mays subsp. mays
  misc_feature (1)..(47): Ceres Seq. ID no. 13635570
MEDLRQAKNQVAASFAAEGAVMNELRQWNDLYGEGGSRKKQQLTYFL

SEQ ID NO: 1286 - DNA, 701 bp, Zea mays subsp. mays
  misc_feature (1)..(701): Ceres Seq. ID no. 13666107
agaagcaggaaccgaaagttcgacaaatggtcaccaagctgggaaggcccttacaggatcacacaggtaatagctggtaatgcctacatgcttcaaactttgcaaggtgaggacctacctaagacgctaaatggtcgtttcttgaagcaataccatcctagtatgtggcaagatgcttaagaaagctgatgttgtcatatcgagttgattccaaccgcaccagtgcttttgtttcgctcagcgtccccaaaaggcagagggcatgtgttgagcacctattgtggcactgggcgcagtcggacggttcggccttgaggcccggacggtctgcaataggattagatcatgcggttaagctcctttctcctcgtgtgtttatccttctaaactcgtgggagctgttggagaacgcataggaacgggttcagacctccccttatatatttgaaggggtacggctgattgcgggcatccacaatcgaaccaatcaatatacttgtcgttcttctacctttcatgccctaggagtagcagtaacttagccttcgcatctctactttcacctctgtgcgactctacgtcgtatggagacgtcttgggnngtattgttgatcccaagaaaatcctaggatctctcctccctgactagggatggcagcaagtcgggttgtgttcgggtatgataataccgacccgatatc

SEQ ID NO: 1287 - protein, 75 aa, Zea mays subsp. mays
  misc_feature (1)..(75): Ceres Seq. ID no. 13666108
MLSYRVDSNRTSAFVSLSVPKRQRACVEHLLWHWAQSDGSALRPGRSAIGLDHAVKLLSPRVFILLNSWELLENA

SEQ ID NO: 1288 - protein, 59 aa, Zea mays subsp. mays
  misc_feature (1)..(59): Ceres Seq. ID no. 13666109
RSRNRKFDKWSPSWEGPYRITQVIAGNAYMLQTLQGEDLPKTLNGRFLKQYHPSMWQDA

SEQ ID NO: 1289 - DNA, 1478 bp, Zea mays subsp. mays
  misc_feature (1)..(1478): Ceres Seq. ID no. 14301626
gatgttctgttcaatgaggaatccccatattctgctccattaccccccttacttggagaagatgatgaatcaggaagtgggaagattgatgagctggcaaccattgtcaaaaaaatgagagagtcgatcactcctaaggatagattctataagatgagaagatttagcaactgctttcttggtagtgaagctgtggatttcatatcagaagatcaatatttggagagagatgaggcagtggaatttggaaggaagcttgcaagaaaatacttctttcgtcatgttctagatgaaaatgtctttgaagatggaaaccacatatatcgtttcctggatcatgatcccatagttatgactcaatgttacaacatccctaggggcatcatcgatgttgcaccaaagcccattgctgaagtagcatcaaggctgaggttgctatcctgtgccatttttgaagcttatgtatcagccgatggtagacatgttgactaccaaagcatcaaaggttctgaggaatttaaaagatatattagaacagttgaggagctccagagggtggaaattgattatttatcacgtgaagaaaaacttgctttcttcataaatctctacaatatgatggctatccatgcattagtgacatgtggccatcctgctggaccattggacagaaaaaagttttttggagattttaagtatatcattggtggatgtgcttattcactgtcagcaatccaaaatggcattctacgtggcaaccaaaggccaccatacaacattgccaaacctttcgggcagaaagaccgaagatccaaggtggcccttccataccatgaacctcttgttcactttgctttggtatgtggcaccaaatctggacctgcacttaggtgttactcaccaggggatatcgatagagaattgatggaagctgcacgtgatttcgtgaggaatggaggactgattgttgatcctgaagccaaaattgcatctgcaagcaagattttgaaatggtatagcacagattttggtaagaacgagatagaagtgttaaagcatgctgcgaactatcttgagcccgcagagtcagagcagctcttggaactgctcgccagcactcaactgaaagtcatgtaccaaaattacgactggagcatcaacatttagaaggtggtgcttatcatttttctgaattccgttcagttaactaaatgagaatcgccgacgccatcttccctaccggagctattaagatttacaaacggtggtgatgttatcagcacggccggtgatgtggagcgagcgagcgagcatgcgtgaacgctgctgcagcgcgcatgattgcttggaacaattaacttctcgccattacgagcgagcgtttgagctgcacgtattttgttttgttgactggctcgatctgaaaaaaagttgattctacgattttcctcttaccttttaaactctccaaacagttt

SEQ ID NO: 1290 - protein, 388 aa, Zea mays subsp. mays
  misc_feature (1)..(388): Ceres Seq. ID no. 14301627
DVLFNEESPYSAPLPPLLGEDDESGSGKIDELATIVKKMRESITPKDRFYKMRRFSNCFLGSEAVDFISEDQYLERDEAVEFGRKLARKYFFRHVLDENVFEDGNHIYRFLDHDPIVMTQCYNIPRGIIDVAPKPIAEVASRLRLLSCAIFEAYVSADGRHVDYQSIKGSEEFKRYIRTVEELQRVEIDYLSREEKLAFFINLYNMMAIHALVTCGHPAGPLDRKKFFGDFKYIIGGCAYSLSAIQNGILRGNQRPPYNIAKPFGQKDRRSKVALPYHEPLVHFALVCGTKSGPALRCYSPGDIDRELMEAARDFVRNGGLIVDPEAKIASASKILKWYSTDFGKNEIEVLKHAANYLEPAESEQLLELLASTQLKVMYQNYDWSINI

SEQ ID NO: 1291 - protein, 350 aa, Zea mays subsp. mays
  misc_feature (1)..(350): Ceres Seq. ID no. 14301628
MRESITPKDRFYKMRRFSNCFLGSEAVDFISEDQYLERDEAVEFGRKLARKYFFRHVLDENVFEDGNHIYRFLDHDPIVMTQCYNIPRGIIDVAPKPIAEVASRLRLLSCAIFEAYVSADGRHVDYQSIKGSEEFKRYIRTVEELQRVEIDYLSREEKLAFFINLYNMMAIHALVTCGHPAGPLDRKKFFGDFKYIIGGCAYSLSAIQNGILRGNQRPPYNIAKPFGQKDRRSKVALPYHEPLVHFALVCGTKSGPALRCYSPGDIDRELMEAARDFVRNGGLIVDPEAKIASASKILKWYSTDFGKNEIEVLKHAANYLEPAESEQLLELLASTQLKVMYQNYDWSINI

SEQ ID NO: 1292 - protein, 337 aa, Zea mays subsp. mays
  misc_feature (1)..(337): Ceres Seq. ID no. 14301629
MRRFSNCFLGSEAVDFISEDQYLERDEAVEFGRKLARKYFFRHVLDENVFEDGNHIYRFLDHDPIVMTQCYNIPRGIIDVAPKPIAEVASRLRLLSCAIFEAYVSADGRHVDYQSIKGSEEFKRYIRTVEELQRVEIDYLSREEKLAFFINLYNMMAIHALVTCGHPAGPLDRKKFFGDFKYIIGGCAYSLSAIQNGILRGNQRPPYNIAKPFGQKDRRSKVALPYHEPLVHFALVCGTKSGPALRCYSPGDIDRELMEAARDFVRNGGLIVDPEAKIASASKILKWYSTDFGKNEIEVLKHAANYLEPAESEQLLELLASTQLKVMYQNYDWSINI

SEQ ID NO: 1293 - DNA, 818 bp, Zea mays subsp. mays
  misc_feature (1)..(818): Ceres Seq. ID no. 14301952
aaatcgtacaaacaccgtttctatacaggccaaggcgacaagcttcgtccagctctgcatcaaagaaggaaggaagttatggaccgcacctactacaagggcggcatcaaggcgtactggaagcgccggggctactaccgcatcgacgccaccgccgcgcagcgccgcccgccgttccccaccgcggagctcggaggtggcgtgggcgtcgcccaggcccagccgccgcaggcgccgccgccggagggtggctcgggccggcgccgttgccgcgggtggcgcgtgcgctgcggccagctgcggcggcggctgctccgcgcgctgtcgccgcgccggtggctcgtgcggctccgcgacgcgtacgtgtccgccatgctgcggctggcgtcctcccccgccgtcgggtacggcgccggcgcgccctactgcggcacggcggccttcgcgcggccggcgcagctcaaggagtacgaacagaaggtgctggtggagatctacaggtccatactcgcgggcggcgggcctggccccatcgccgtcactaccggcagcaacggcgccggtgcgcctgccgccgccacactacggctaccgacggctgctgcttgagcttgagcggcagatgaagcatgtatttattcttcttgcttttactctttatgtcgcgacgttgtaacttcggtgcgcctcacaagcatttcatttcttcttcgtaaattaaggttcctctgaccatggtgtgaaaatgtttgatgaagagggtcattagcatctctacttgctagcaaggcaagatttagtattgattagccgtacac

SEQ ID NO: 1294 - protein, 224 aa, Zea mays subsp. mays
  misc_feature (1)..(224): Ceres Seq. ID no. 14301953
NRTNTVSIQAKATSFVQLCIKEGRKLWTAPTTRAASRRTGSAGATTASTPPPRSAARRSPPRSSEVAWASPRPSRRRRRRRRVARAGAVAAGGACAAASCGGGCSARCRRAGGSCGSATRTCPPCCGWRPPPPSGTAPARPTAARRPSRGRRSSRSTNRRCWWRSTGPYSRAAGLAPSPSLPAATAPVRLPPPHYGYRRLLLELERQMKHVFILLAFTLYVATL

SEQ ID NO: 1295 - protein, 207 aa, Zea mays subsp. mays
  misc_feature (1)..(207): Ceres Seq. ID no. 14301954
IVQTPFLYRPRRQASSSSASKKEGSYGPHLLQGRHQGVLEAPGLLPHRRHRRAAPPAVPHRGARRWRGRRPGPAAAGAAAGGWLGPAPLPRVARALRPAAAAAAPRAVAAPVARAAPRRVRVRHAAAGVLPRRRVRRRRALLRHGGLRAAGAAQGVRTEGAGGDLQVHTRGRRAWPHRRHYRQQRRRCACRRHTTATDGCCLSLSGR

SEQ ID NO: 1296 - protein, 202 aa, Zea mays subsp. mays
  misc_feature (1)..(202): Ceres Seq. ID no. 14301955
KSYKHRFYTGQGDKLRPALHQRRKEVMDRTYYKGGIKAYWKRRGYYRIDATAAQRRPPFPTAELGGGVGVAQAQPPQAPPPEGGSGRRRCRGWRVRCGQLRRRLLRALSPRRWLVRLRDAYVSAMLRLASSPAVGYGAGAPYCGTAAFARPAQLKEYEQKVLVEIYRSILAGGGPGPIAVTTGSNGAGAPAAATLRLPTAAA

SEQ ID NO: 1297 - protein, 176 aa, Zea mays subsp. mays
  misc_feature (1)..(176): Ceres Seq. ID no. 14301956
MDRTYYKGGIKAYWKRRGYYRIDATAAQRRPPFPTAELGGGVGVAQAQPPQAPPPEGGSGRRRCRGWRVRCGQLRRRLLRALSPRRWLVRLRDAYVSAMLRLASSPAVGYGAGAPYCGTAAFARPAQLKEYEQKVLVEIYRSILAGGGPGPIAVTTGSNGAGAPAAATLRLPTAAA

SEQ ID NO: 1298 - DNA, 1222 bp, Zea mays subsp. mays
  misc_feature (1)..(1222): Ceres Seq. ID no. 14301961
cccctctcggcccggctcgatggggtccggcgtgtcgtcgagcatggcgctggcgctggcgggcttctgcttcagcgtcctcttcatcgtcttcgtctgcacgcgcctcgcctgcgcgctcgtccgccggcgccggcgccaggcccgcgcccgcctcgcggccgccccgccgctcccgcactacgcccacggctacgccgaccccgaccctttcccgtcgttccgcgccgcccgccaccaccaccacgccccgggcctcgatcccgccgccttccccacccgcgcctacgccgccgcacaagcctccgactccgacgacggctcccagtgcgtcatctgtctggcggaatacgaagagggagacgagctccgcgtgctgcctccctgcagccacaccttccacacgggctgtatcagcctgtggctggcgcagaactcgacgtgcccggtctgtagagtctcgctgctcgtgcctgatactagtactacccctgaaagcgaacactctgcaccccatcctcctcctcctcctcatcatcatcatcatctgtccagcatagtgataataagcccaccaagctcccccgaaccgtcgagatcggacccgtgccgatgcctgttcgccagcggtggtgggcactcgtcaagggcggcagaggctcctcctcctcctcctcctcccagacacgagcccgaccaggtcgtatctggtccaccaccggcagcagatggggctagcggctacagctcgccgttgcctgaagttattcaccccgctcctgctcctgaaaccaacgggcagacagtacggaagcaggcgggcagcagatctactaccccgctaggcccctgcaaatagcggccgctcactctgtgtgggtgggtggggtgaacaggtggtgcgtggtaaaagcgaagtagagagaaacaagcgacttgaagaggcctgggttcgttcgtgtacatacgatcgagaaatcgtttcaggtcattcattcatccattcattcatccatgggcacatactgtggtattacggagtattacggtgtacgtgtagtgtgccgcaggagagacgacgcgacggcagcagtgcgttttccatatgcgacgggacgggagcattcgaggagatgatggcaatggcatggttttgtgtactgtacggtaacatttgtcgctgggaattaataataaaaaacccgtggctggctgatgcagc

SEQ ID NO: 1299 - protein, 285 aa, Zea mays subsp. mays
  misc_feature (1)..(285): Ceres Seq. ID no. 14301962
PSRPGSMGSGVSSSMALALAGFCFSVLFIVFVCTRLACALVRRRRRQARARLAAAPPLPHYAHGYADPDPFPSFRAARHHHHAPGLDPAAFPTRAYAAAQASDSDDGSQCVICLAEYEEGDELRVLPPCSHTFHTGCISLWLAQNSTCPVCRVSLLVPDTSTTPESEHSAPHPPPPPHHHHHLSSIVIISPPSSPEPSRSDPCRCLFASGGGHSSRAAEAPPPPPPPRHEPDQVVSGPPPAADGASGYSSPLPEVIHPAPAPETNGQTVRKQAGSRSTTPLGPCK

SEQ ID NO: 1300 - protein, 279 aa, Zea mays subsp. mays
  misc_feature (1)..(279): Ceres Seq. ID no. 14301963
MGSGVSSSMALALAGFCFSVLFIVFVCTRLACALVRRRRRQARARLAAAPPLPHYAHGYADPDPFPSFRAARHHHHAPGLDPAAFPTRAYAAAQASDSDDGSQCVICLAEYEEGDELRVLPPCSHTFHTGCISLWLAQNSTCPVCRVSLLVPDTSTTPESEHSAPHPPPPPHHHHHLSSIVIISPPSSPEPSRSDPCRCLFASGGGHSSRAAEAPPPPPPPRHEPDQVVSGPPPAADGASGYSSPLPEVIHPAPAPETNGQTVRKQAGSRSTTPLGPCK

SEQ ID NO: 1301 - protein, 271 aa, Zea mays subsp. mays
  misc_feature (1)..(271): Ceres Seq. ID no. 14301964
MALALAGFCFSVLFIVFVCTRLACALVRRRRRQARARLAAAPPLPHYAHGYADPDPFPSFRAARHHHHAPGLDPAAFPTRAYAAAQASDSDDGSQCVICLAEYEEGDELRVLPPCSHTFHTGCISLWLAQNSTCPVCRVSLLVPDTSTTPESEHSAPHPPPPPHHHHHLSSIVIISPPSSPEPSRSDPCRCLFASGGGHSSRAAEAPPPPPPPRHEPDQVVSGPPPAADGASGYSSPLPEVIHPAPAPETNGQTVRKQAGSRSTTPLGPCK

SEQ ID NO: 1302 - DNA, 1078 bp, Zea mays subsp. mays
  misc_feature (1)..(1078): Ceres Seq. ID no. 14301982
gctgtcttgtccctccttatccctatctctctcccactcctcttcctctgcaatggcttcttcaatagtaacctcaagcttcaagcccttagccatggcagactcttcctcttccaccatcttctcccacccttcactctccaccatctcccctcgctgctccttcctcactaacctcccgctctcgttctcccgcgtctccctatctctcaaagccaaaaccaacctaaagaagtcgcctttcgtctccttcgttgctcagacttctgattgggagggggaagaaggtggggacgtgagcgcttccgtcgccgttgaggagaacgagccagaggcgacgttttccgaagaggaaggagatgtgagcgaaggaggtgacttcccggagccaccggaagaagcgaagctcttcgtcggaaacttggcgtacgacgttgatagccaagccttggctatgctctttgagcaagctggtaccgttgaaatcgctgaggttatctacaacagagagacagaccagagtcgtgggtttggatttgtgacaatgagtacggtggaggaagccgagactgctgttgagaagttcaaccgttatgatttgaacggacggcttctgacagtaaacaaggcagcaccaagaggatcacgtccagaacgccaacctcgggtatacgaacctgcattcagagtctatgttggaaacctaccatgggatgtggacaacggtcgtctagaacaagttttcagcgagcatggcaaagttgtggaagctcgtgtggtctacgaccgtgagacaggtcgttcacgtgggttcggttttgtgacaatgtctaacgagactgaactcaatgacgctatcgctgctcttgatggacagaacatggaaggtagagcaatcagagtgaatgtcgcggaggaacgtccaaggcgtggattttaaggattgagattttctcttgtgcctctctttatctctttccattttgtttagacgagattcttacactctttggtgatttttttttttgttctgtctgaactcttgcttcttctatagcacatcattgccttcagtagc

SEQ ID NO: 1303 - protein, 312 aa, Zea mays subsp. mays
  misc_feature (1)..(312): Ceres Seq. ID no. 14301983
LSCPSLSLSLSHSSSSAMASSIVTSSFKPLAMADSSSSTIFSHPSLSTISPRCSFLTNLPLSFSRVSLSLKAKTNLKKSPFVSFVAQTSDWEGEEGGDVSASVAVEENEPEATFSEEEGDVSEGGDFPEPPEEAKLFVGNLAYDVDSQALAMLFEQAGTVEIAEVIYNRETDQSRGFGFVTMSTVEEAETAVEKFNRYDLNGRLLTVNKAAPRGSRPERQPRVYEPAFRVYVGNLPWDVDNGRLEQVFSEHGKVVEARVVYDRETGRSRGFGFVTMSNETELNDAIAALDGQNMEGRAIRVNVAEERPRRGF

SEQ ID NO: 1304 - protein, 295 aa, Zea mays subsp. mays
  misc_feature (1)..(295): Ceres Seq. ID no. 14301984
MASSIVTSSFKPLAMADSSSSTIFSHPSLSTISPRCSFLTNLPLSFSRVSLSLKAKTNLKKSPFVSFVAQTSDWEGEEGGDVSASVAVEENEPEATFSEEEGDVSEGGDFPEPPEEAKLFVGNLAYDVDSQALAMLFEQAGTVEIAEVIYNRETDQSRGFGFVTMSTVEEAETAVEKFNRYDLNGRLLTVNKAAPRGSRPERQPRVYEPAFRVYVGNLPWDVDNGRLEQVFSEHGKVVEARVVYDRETGRSRGFGFVTMSNETELNDAIAALDGQNMEGRAIRVNVAEERPRRGF

SEQ ID NO: 1305 - protein, 281 aa, Zea mays subsp. mays
  misc_feature (1)..(281): Ceres Seq. ID no. 14301985
MADSSSSTIFSHPSLSTISPRCSFLTNLPLSFSRVSLSLKAKTNLKKSPFVSFVAQTSDWEGEEGGDVSASVAVEENEPEATFSEEEGDVSEGGDFPEPPEEAKLFVGNLAYDVDSQALAMLFEQAGTVEIAEVIYNRETDQSRGFGFVTMSTVEEAETAVEKFNRYDLNGRLLTVNKAAPRGSRPERQPRVYEPAFRVYVGNLPWDVDNGRLEQVFSEHGKVVEARVVYDRETGRSRGFGFVTMSNETELNDAIAALDGQNMEGRAIRVNVAEERPRRGF

SEQ ID NO: 1306 - DNA, 799 bp, Zea mays subsp. mays
  misc_feature (1)..(799): Ceres Seq. ID no. 14302128
aataatataaccacagaaatccatcgacgaacaactgagaagagctgcgcctgcgcctgcgcctgcgggaaagggagaacatggtggggaagaagaggggtgttatctccccgctggaccatctcgctgggctgctggaggtgcgcgtggtgaggggagtggacctcgccatccgcgacctccgatccagcgacccctacgtcgtccttcgcatcggcaaggcgcagaaagtgaagacgcgagtggtcaagaagagcatcaatccggaatggaacgaaaaactcaccctctctattgaagaccctgccgttcctattagactggaagtatttgacaaggacactttcgttgatgatgcaatgggtaacgcggagctggacatccgcccgttagtcgagattgtgaagatgaagctccagggtgtcgctgacaaaacggtggtaaagaagctggtgcccaacagacagaactgcctagccgaggagagctccatatacatatcggaggggaaggtgaagcaagacctggtcgtacggctaaggaacgtagagtgtggcgaaatcgagctccaacttcagtgggtccacctccctggctctaagggtgtatgagaagagttatgagcgctgcctagcttgcactgctcaggttcttcgcttcacattaaagtaatctatttgaactgtagttgtaatctatagagataaaagcagtgtaaaaatagtagaaatcgttatggattaaagacagtcgacccagctcttgctagttgaaaagaacccagctcttgccatttgac

SEQ ID NO: 1307 - protein, 176 aa, Zea mays subsp. mays
  misc_feature (1)..(176): Ceres Seq. ID no. 14302129
MVGKKRGVISPLDHLAGLLEVRVVRGVDLAIRDLRSSDPYVVLRIGKAQKVKTRVVKKSINPEWNEKLTLSIEDPAVPIRLEVFDKDTFVDDAMGNAELDIRPLVEIVKMKLQGVADKTVVKKLVPNRQNCLAEESSIYISEGKVKQDLVVRLRNVECGEIELQLQWVHLPGSKGV

SEQ ID NO: 1308 - DNA, 1317 bp, Zea mays subsp. mays
  misc_feature (1)..(1317): Ceres Seq. ID no. 14302138
tttatggcaactaattcttagttatatgcagcatcacacatatcaacaagtttttgtgtcctgaccaggaacaatagatatcataccaaggagaaaaagtatgggctaacaacttgaatcgttaagcagaggactaggaatgaagattccaatccaaattactgaagggagcaagaggccagagccacccattcaagctgctaagtttgcatcagaggggggaatcacattgaggcagcacattccaatatttcaccactggaaggagtacaagaagaaagagaatgaacctacaataagaaactatattggaaaagatattgctcaattcaccttggacaatgatagcaaggcagtggaagatgcatgtctagatatgctaaagggtggacaatgccaaatgaggtatagactaaaacaaaagtatttcaatgggatacctgctaatcaagtgaggactacatcacctatttcaagcatgtctgatgaggactggagaaagttggtggagaagtggtctacccaaaacacaaggatagttgtatgaagaataaacttaatcgtgaaaaagtacagtatcaacaatgcataggatcccaatcatatattgcaaaagcttatttactgaaagaagagaaatataaggatgctgaaccgagtgcaatagatcttttcaaggacatgcattgcagcaagaagaaaggtttttctgaaaatgtaaagaaagcaattgttgacatggaagcaagggtgacaacaccagttgaggatggacaacaacaaaagtctcctatagaagttgtttctgaagtgctatggggctccagtttatttctacagaatgttggtctgcaagataactccaagaaaagctccacaacaactgtttttgctaaggttcaagaacttcataatcaattggagtctgagaggctagaaaaagatgggcttcaagaagaagtagaaaccttaaaggctcaggcacaggcctcaaaggagaccatggacaatatgaagagatcgatggaagaaaataacagtctcctccgtcaactgttgagcttcaatcgaagccaaacgtccccatcttaagtctgctatagtatcatgttatattagttctggattcaggttttataaatttggaatatgtttaaaactttcatactttgagttgaagttataggatttcctttgtattttaagttacatgatctacaatcatatgatttgaagttataaaagtatctcttgtatgaattgtgtgaatgttgaactaaataattcaatgttttggttattagcatgtgatttcat

SEQ ID NO: 1309 - protein, 182 aa, Zea mays subsp. mays
  misc_feature (1)..(182): Ceres Seq. ID no. 14302139
MKNKLNREKVQYQQCIGSQSYIAKAYLLKEEKYKDAEPSAIDLFKDMHCSKKKGFSENVKKAIVDMEARVTTPVEDGQQQKSPIEVVSEVLWGSSLFLQNVGLQDNSKKSSTTTVFAKVQELHNQLESERLEKDGLQEEVETLKAQAQASKETMDNMKRSMEENNSLLRQLLSFNRSQTSPS

SEQ ID NO: 1310 - protein, 136 aa, Zea mays subsp. mays
  misc_feature (1)..(136): Ceres Seq. ID no. 14302140
MHCSKKKGFSENVKKAIVDMEARVTTPVEDGQQQKSPIEVVSEVLWGSSLFLQNVGLQDNSKKSSTTTVFAKVQELHNQLESERLEKDGLQEEVETLKAQAQASKETMDNMKRSMEENNSLLRQLLSFNRSQTSPS

SEQ ID NO: 1311 - protein, 135 aa, Zea mays subsp. mays
  misc_feature (1)..(135): Ceres Seq. ID no. 14302141
MKIPIQITEGSKRPEPPIQAAKFASEGGITLRQHIPIFHHWKEYKKKENEPTIRNYIGKDIAQFTLDNDSKAVEDACLDMLKGGQCQMRYRLKQKYFNGIPANQVRTTSPISSMSDEDWRKLVEKWSTQNTRIVV

SEQ ID NO: 1312 - DNA, 1239 bp, Zea mays subsp. mays
  misc_feature (1)..(1239): Ceres Seq. ID no. 14302164
taggctctaggttctttgaacattttaagttgttcactccaagtgtgaaaccaggtccctatttggacctgaagtgaagcattttaaagttgaaggacccagattctcacttcgagagtttatgaacctagatgagaatctaaggctctggaagttatggaacttgaccagaaaatagatctagttcatgagcttgatggtcatattatgcaatgtgtccgtgatcaaaatggaaatcacgttatacagaagtgcattgagtgtgtccccacagaacatattggttttgtagtgtctgcttttcagggacaagttactagcctttcaatgcatccatatggctgccgtgtaattcagagaatcttggagcactgcggtggtaactcacaaggccagtgcataatagacgagatattacagtgggtgtgcatccttgcgcaggatcagtatggcaactatgttacacagcatgttctagaaagaggaaaagctcatgagaggagccaaattattactaaattggccgggcaggttgttaccatgagccaaaataaatatgcatcaaatgtgatagagaagtgttttcaacatggtgatattgcggagcgggatcttctgatcagacggattgtggagcagacagagggcaacaacaatttattggcaatgatgaaggaccagtatgctaattacgtggtccataagatacttgaaacttgcaacgaggatcagcgggagcttctgctcagccacgtaaaggatcatatgcaagcattgaggaagtacacatacggcaagcacatcgtaagccgagtcgagcagctctgtggcgacgttgtcaccctttcaggaactgccgagtcaggttcttgaaacgaaccgccgcctaattcttcataggctggagggtgtcctgctcttttgctcattccgtcagtgacgaagaaagcaaaacggatcaagtctaactctggcgcttcagaacagactaacaaagctgtcgtcgaagattgtataggtatgactctgttcagggatagtcttgaggttatagaacagaagggtagtggtgtgcatcagtgtatctgtttactggataatagtggttggttaggtgtgtgcagaaaaagtttagcgctatggtttgtatgtgatacatattaactgtgccttggaatgttcatatgttgtcctgattgcgtgtgatatctctcgttcagttcaagttgcgttttctgc

SEQ ID NO: 1313 - protein, 238 aa, Zea mays subsp. mays
  misc_feature (1)..(238): Ceres Seq. ID no. 14302165
MELDQKIDLVHELDGHIMQCVRDQNGNHVIQKCIECVPTEHIGFVVSAFQGQVTSLSMHPYGCRVIQRILEHCGGNSQGQCIIDEILQWVCILAQDQYGNYVTQHVLERGKAHERSQIITKLAGQVVTMSQNKYASNVIEKCFQHGDIAERDLLIRRIVEQTEGNNNLLAMMKDQYANYVVHKILETCNEDQRELLLSHVKDHMQALRKYTYGKHIVSRVEQLCGDVVTLSGTAESGS

SEQ ID NO: 1314 - protein, 221 aa, Zea mays subsp. mays
  misc_feature (1)..(221): Ceres Seq. ID no. 14302166
MQCVRDQNGNHVIQKCIECVPTEHIGFVVSAFQGQVTSLSMHPYGCRVIQRILEHCGGNSQGQCIIDEILQWVCILAQDQYGNYVTQHVLERGKAHERSQIITKLAGQVVTMSQNKYASNVIEKCFQHGDIAERDLLIRRIVEQTEGNNNLLAMMKDQYANYVVHKILETCNEDQRELLLSHVKDHMQALRKYTYGKHIVSRVEQLCGDVVTLSGTAESGS

SEQ ID NO: 1315 - protein, 181 aa, Zea mays subsp. mays
  misc_feature (1)..(181): Ceres Seq. ID no. 14302167
MHPYGCRVIQRILEHCGGNSQGQCIIDEILQWVCILAQDQYGNYVTQHVLERGKAHERSQIITKLAGQVVTMSQNKYASNVIEKCFQHGDIAERDLLIRRIVEQTEGNNNLLAMMKDQYANYVVHKILETCNEDQRELLLSHVKDHMQALRKYTYGKHIVSRVEQLCGDVVTLSGTAESGS

SEQ ID NO: 1316 - DNA, 977 bp, Zea mays subsp. mays
  misc_feature (1)..(977): Ceres Seq. ID no. 14302179
tctggccttaaaaacctctgctcccccgtctcggcgcgattgccatcgccatcgccatcgccatcgcgcaccgcctccccgtgtcccctccttctcgcccggcaccgtcgagctcggctgtggaaacagaacaaacccatcaaccatggcgaactcggcgtcggggatggccgtgagcgacgagtgcaagctcaagttccaggagctcaagtcgaagcgaagcttccggttcatcacgttcaagatcaacgagcagacgcagcaggtggtggtggacaggctggggcagccgggcgacacctacgacgacttcaccggctccatgcccgagagcgagtgccgctacgccgtcttcgacttcgacttcaccaccgacgagaactgccagaagagcaagatcttgttcatctcctggtccccggacacctcgagggtcaggagcaagatgctgtacgcgagctccaaggaccggttcaagagggagctggagggcatccagctggagctgcaggccaccgaccccagcgagatgagcatggacattgtcagggcgcgagctctctgaagaggaagacgcgcatccgctcgcgcgatcgccatgcatgccccggaacgacagaagctgtttgtcttgcatcgaccggcggcctctgcatgtacccgtgtgccgttttttgcaccgccggtgccagtgttctcttactccatgtaaactactctagacagtgctcggtgagtacagctgctcggtgagtacggtgtcacagtcactccgtgtaggcagtgccatttcgaagacaatattgcaaaatttaactaacttggttttacaatgcgtttggttggaagtattcctccgggtcactaataattcatgctttgtatatacatgacgtggtcgtggtctatggaatatagcttaaaccattactagtataatacgttgtaacaacacatcaatcatatttgatttatag

SEQ ID NO: 1317 - protein, 250 aa, Zea mays subsp. mays
  misc_feature (1)..(250): Ceres Seq. ID no. 14302180
SGLKNLCSPVSARLPSPSPSPSRTASPCPLLLARHRRARLWKQNKPINHGELGVGDGRERRVQAQVPGAQVEAKLPVHHVQDQRADAAGGGGQAGAAGRHLRRLHRLHARERVPLRRLRLRLHHRRELPEEQDLVHLLVPGHLEGQEQDAVRELQGPVQEGAGGHPAGAAGHRPQRDEHGHCQGASSLKRKTRIRSRDRHACPGTTEAVCLASTGGLCMYPCAVFCTAGASVLLLHVNYSRQCSVSTAAR

SEQ ID NO: 1318 - protein, 187 aa, Zea mays subsp. mays
  misc_feature (1)..(187): Ceres Seq. ID no. 14302181
LALKTSAPPSRRDCHRHRHRHRAPPPRVPSFSPGTVELGCGNRTNPSTMANSASGMAVSDECKLKFQELKSKRSFRFITFKINEQTQQVVVDRLGQPGDTYDDFTGSMPESECRYAVFDFDFTTDENCQKSKILFISWSPDTSRVRSKMLYASSKDRFKRELEGIQLELQATDPSEMSMDIVRARAL

SEQ ID NO: 1319 - protein, 139 aa, Zea mays subsp. mays
  misc_feature (1)..(139): Ceres Seq. ID no. 14302182
MANSASGMAVSDECKLKFQELKSKRSFRFITFKINEQTQQVVVDRLGQPGDTYDDFTGSMPESECRYAVFDFDFTTDENCQKSKILFISWSPDTSRVRSKMLYASSKDRFKRELEGIQLELQATDPSEMSMDIVRARAL

SEQ ID NO: 1320 - DNA, 1799 bp, Zea mays subsp. mays
  misc_feature (1)..(1799): Ceres Seq. ID no. 14302183
gacttacaggtacatgagctgggtgagctgtccgacgctgtcgctgagcgtgccctggatgttgacacttgacagccgcctgcatgcaaacaaggcacgcacgaagcatgaagacccgttcagtctggtggctcgaatcgatcggtgaagaaaggaaggaaggaaggaaggaagttgcgcggtgattaagtaatataaagacacttgactacatctctgctgagggtggccggtgatgagcaacctgtctctttatttataacaaactcataccaagaatgatagattgcttctgtgaaaattatacggaacaagcagactgggcactcagaaggctatggttttattgagttttcctctcgagctgctgcagaacatactctggtgaacttcaatgggcagatgatgccaaatgttgagatgacttttaagctgaactgagcttctgctagcactggtgataagcgtggagatagtggttctgatcacacaatatttgttggtgatttggctcatggtgttactgactccatgttgaaagatgtgttcagagctaagtacccttcagttagaggagctaatgttgttgttgataggatgactggatggcccaaaggatatggtttcgtgcgttttggaaatctgaatgagcaggcacgtgctatgactgagatgaatggaatgttgttatctacaaggcaaatgaggattggtgctgcagttaacaagaagaatagggatgctcagtagacatatgcaactaacgctcggacggcgcgaggggcctcaccagcgtcggcctgtccaattccgagtctaggccagacagtgtggcacagcgtggcttcgaccacgacactgaagagagggtggaggagctcacattgaagaattgcatcaacaatggtatccagcctgaggtttctgctggtgggagcacaagcagcagggataggcctacccgtattaatggcttgtggggtaattttacacggagaactagcaatttggccagcagggaaaacgccgcactgagttctggtgacattgcaaacttgagggttggtgatgcttcagcaaaggcaataaggcttactggagtttctgcatactcaagggttcatgggcatcccagactcccagcaatggaatctgcaaggtatggctcattcgaaccatatgtggagaagtttaattccttattagtgagaggagaagatagaaaatgtagaatagttgtatagtgtttcaaaggcgttgcctacgcacgtccggccgtccaggtatctccagctcgctacctatttttgccattatggaatctgcaaggtatggctccacattgatacagttgatggtttgtctgcatatctagcaagtgtgcaggaggatgttgcatcagttatcattggtaaaaaaactatattgcatgcgcggactgcctctgatgctattgatatgaggatctcagttgatgaaagtgtaaaggacaagctctcaaatttggtagccaggctccaaaatcaaagctttaccgcttcccgaaagaactagcatcactctcagagtgcttgtttcatctgaaaaggagaccacttttaggtggcataatccgacatgaagatgaaagatctgtacttaggaatttgttcttgaatgcttagtttgacctttcacttcgtatgctaccacttcagtgtataatgcattgtgaagatgtacatctgtgcttgtttgatctgaaaaggggaccacttgtagatagcataataggatatgaagatgaaagatctgtactt

SEQ ID NO: 1321 - protein, 72 aa, Zea mays subsp. mays
  misc_feature (1)..(72): Ceres Seq. ID no. 14302184
MLKDVFRAKYPSVRGANVVVDRMTGWPKGYGFVRFGNLNEQARAMTEMNGMLLSTRQMRIGAAVNKKNRDAQ

SEQ ID NO: 1322 - protein, 50 aa, Zea mays subsp. mays
  misc_feature (1)..(50): Ceres Seq. ID no. 14302185
MTGWPKGYGFVRFGNLNEQARAMTEMNGMLLSTRQMRIGAAVNKKNRDAQ

SEQ ID NO: 1323 - protein, 48 aa, Zea mays subsp. mays
  misc_feature (1)..(48): Ceres Seq. ID no. 14302186
TYRYMSWVSCPTLSLSVPWMLTLDSRLHANKARTKHEDPFSLVARIDR

SEQ ID NO: 1324 - DNA, 628 bp, Zea mays subsp. mays
  misc_feature (1)..(628): Ceres Seq. ID no. 14302584
ccacacacacgcatccatcaaagaaacaagagcacacaaacaatacctctctagctcgccaccaacaatggcctctaggttctccatcatgctcgccacaacggcactggctacgttttttgtgattggttcgtgcaccaccccgctcaccttcaaggtcggcaaaggctccaagcctggccacctggtcctcacccccaacattgccaccatctccgaagtggagatcaaggagcacggtggcgatgacttctcctttgagctcaaggagggcccggccggcacctggacgcttgacacaaaggccccactcaagtaccccctctgcatccgctttgccatcaagtctggcggctaccgcatcgccgatgatgtcatccctgaaaattttaaggccgacaccacctacaagaccaccctcagcatctgatcatcctcttatgaggaataatattttgaaagagctcatctgatccatgtgccagcgagctaatatttaatttttgttctatggttattttatggcaccacaccacccaagaaataagttatgttacatgtcccttcgtgcaccttgttgtgttgggttaatacggttatataaattgaaatacaatatgtatttaat

SEQ ID NO: 1325 - protein, 142 aa, Zea mays subsp. mays
  misc_feature (1)..(142): Ceres Seq. ID no. 14302585
HTHASIKETRAHKQYLSSSPPTMASRFSIMLATTALATFFVIGSCTTPLTFKVGKGSKPGHLVLTPNIATISEVEIKEHGGDDFSFELKEGPAGTWTLDTKAPLKYPLCIRFAIKSGGYRIADDVIPENFKADTTYKTTLSI

SEQ ID NO: 1326 - protein, 120 aa, Zea mays subsp. mays
  misc_feature (1)..(120): Ceres Seq. ID no. 14302586
MASRFSIMLATTALATFFVIGSCTTPLTFKVGKGSKPGHLVLTPNIATISEVEIKEHGGDDFSFELKEGPAGTWTLDTKAPLKYPLCIRFAIKSGGYRIADDVIPENFKADTTYKTTLSI

SEQ ID NO: 1327 - protein, 113 aa, Zea mays subsp. mays
  misc_feature (1)..(113): Ceres Seq. ID no. 14302587
MLATTALATFFVIGSCTTPLTFKVGKGSKPGHLVLTPNIATISEVEIKEHGGDDFSFELKEGPAGTWTLDTKAPLKYPLCIRFAIKSGGYRIADDVIPENFKADTTYKTTLSI

SEQ ID NO: 1328 - DNA, 604 bp, Zea mays subsp. mays
  misc_feature (1)..(604): Ceres Seq. ID no. 14303216
gatgatgtggagagagagaaacctgtgaggagcgctacaatggctgagcaggtggatgagtatgttgatattggggatgagatgccaacagccacttaccaatccatggaaatcgagaaggacgctgaaggtgcgactggctctcgtggttctggcagtggctcttcgtcgtccagtggttctgagtcgaggagctcaggggacagtgcctcaggagctggcaatgctcattctttggcttaggggaggttgttaacaataggatttgaaaatttggatgatccgagttctgttgttgggtgatttacgtagaggtagtggtaattgtaagtatgtagctctttctgagacgtgggtttgcgtaggcgtggattacacagttagtagtagataacaaactggctttctgggtgtctgttagcaccatgtgtatgtaagctgggggtggaaggtgctggggtgttaaaagtagttgatcgaccttctggtatggagggggccagggctagtgtttgtgttctttgtagtacaattgttctggtgcagacctcttatgtaattaatgatttgtgcatgacattaaagtatggttgtataagtaacg

SEQ ID NO: 1329 - protein, 80 aa, Zea mays subsp. mays
  misc_feature (1)..(80): Ceres Seq. ID no. 14303217
DDVEREKPVRSATMAEQVDEYVDIGDEMPTATYQSMEIEKDAEGATGSRGSGSGSSSSSGSESRSSGDSASGAGNAHSLA

SEQ ID NO: 1330 - protein, 67 aa, Zea mays subsp. mays
  misc_feature (1)..(67): Ceres Seq. ID no. 14303218
MAEQVDEYVDIGDEMPTATYQSMEIEKDAEGATGSRGSGSGSSSSSGSESRSSGDSASGAGNAHSLA

SEQ ID NO: 1331 - protein, 66 aa, Zea mays subsp. mays
  misc_feature (1)..(66): Ceres Seq. ID no. 14303219
MSMLILGMRCQQPLTNPWKSRRTLKVRLALVVLAVALRRPVVLSRGAQGTVPQELAMLILWLRGGC

SEQ ID NO: 1332 - DNA, 795 bp, Zea mays subsp. mays
  misc_feature (1)..(795): Ceres Seq. ID no. 14303220
agctgttgttagcaccgagaaaggccaagtctataaagcattgctcaatgagttgaatgcagaaagacgtcaatgccgatctgggatgcgagatttgttcaatacctcttttggtgcaacatttcttacagacacgggaagggaatcatcattttcctatcacattcatcaatatgccgatatttacacgagcaagcttgagaacttcttatcatatgcccctgaatcttggcttcatccacctcatgacataaagatcatgccacacaatgcgaaggtcccagcgagccttttcagtacctcctagttcatcctttctctatttcggtggagaaccaagccgtagtacccccacctatggtttctgtgcgtgaccacgtgacaggattgtggactgctgctgcattcgcttgcgttatactataactgaagcaccatatgatgcatcaatccagcagaccagcaagttagcattctctagaattgccatggaattatcagtcatgtgagtagttaaccgactcatttgcctgtatgacgaagcctctgttttccgtttaaaataaaaaaaggaagcatctgagaggccgcatacttgtgttcccatgaaaccctaccaacttgtaatggccgccaataaaacagtcacacgcaacccatctcgtttccccattttattcgcattctgctacactctttgctgcactcatgttacactgaactcgcctggtggcatctgacaagttttttgggatgagcagaagataatttgggttcgggcaacggataaattag

SEQ ID NO: 1333 - protein, 101 aa, Zea mays subsp. mays
  misc_feature (1)..(101): Ceres Seq. ID no. 14303221
AVVSTEKGQVYKALLNELNAERRQCRSGMRDLFNTSFGATFLTDTGRESSFSYHIHQYADIYTSKLENFLSYAPESWLHPPHDIKIMPHNAKVPASLFSTS

SEQ ID NO: 1334 - protein, 73 aa, Zea mays subsp. mays
  misc_feature (1)..(73): Ceres Seq. ID no. 14303222
MRDLFNTSFGATFLTDTGRESSFSYHIHQYADIYTSKLENFLSYAPESWLHPPHDIKIMPHNAKVPASLFSTS

SEQ ID NO: 1335 - protein, 65 aa, Zea mays subsp. mays
  misc_feature (1)..(65): Ceres Seq. ID no. 14303223
MQKDVNADLGCEICSIPLLVQHFLQTREGNHHFPITFINMPIFTRASLRTSYHMPLNLGFIHLMT

SEQ ID NO: 1336 - DNA, 875 bp, Zea mays subsp. mays
  misc_feature (1)..(875): Ceres Seq. ID no. 14303245
atccccaatatatccccactcttcgcctcctttctggagcagctagggttccgtcctcgatccgatccgccgagtgcacaccacctttccccactccgatcgaatcgatggccgccgagggcgagaagaagatgataaccctcaaaagctccgatggcgaggagttcgaggtggaagaggcggtggcgatggagtcgcagaccatccgccacatgatcgaggatgactgcgccgacaacggtatccctcttcctaacgtcaactccaagatcctatccaaggtaatcgagtactgcaacaagcacgtacatgccgccgccgccaagagcgagtgctcgcgcagcctcttcggcggctactccgactacccgaactacatggccaacacggagtcgttccgcgccaaggcgcggtcgcagagcgcgccgaagcagaggccgcagtacgagcggtccagctccctacgcagggcgtcggcggcgcagaggtcggcggcggcggcggcctcctccctgcacgccaagttcaccaacaaggcgtacccgggctctggcaggctggatcggcttggcttgccggccaggtactgatactgagcctgcctaattcgcgtcaggatgatgtgctgccgctgtgtctcgagcgaggaggacgacgacgaagaagtgcaatcgactagtggtagttaggttcccccgtgccttggttgtgctattaccatcaacagttttttctgtttcttgctttgggtagctacccatgtttaaagttgctggtagctgtaatgatgctataatgcgtgcttaactgctgacgaacctttttcctctacatttccgtggtatatatatatgtgccgtcaaatcatgcatggg

SEQ ID NO: 1337 - protein, 195 aa, Zea mays subsp. mays
  misc_feature (1)..(195): Ceres Seq. ID no. 14303246
PQYIPTLRLLSGAARVPSSIRSAECTPPFPTPIESMAAEGEKKMITLKSSDGEEFEVEEAVAMESQTIRHMIEDDCADNGIPLPNVNSKILSKVIEYCNKHVHAAAAKSECSRSLFGGYSDYPNYMANTESFRAKARSQSAPKQRPQYERSSSLRRASAAQRSAAAAASSLHAKFTNKAYPGSGRLDRLGLPARY

SEQ ID NO: 1338 - protein, 160 aa, Zea mays subsp. mays
  misc_feature (1)..(160): Ceres Seq. ID no. 14303247
MAAEGEKKMITLKSSDGEEFEVEEAVAMESQTIRHMIEDDCADNGIPLPNVNSKILSKVIEYCNKHVHAAAAKSECSRSLFGGYSDYPNYMANTESFRAKARSQSAPKQRPQYERSSSLRRASAAQRSAAAAASSLHAKFTNKAYPGSGRLDRLGLPARY

SEQ ID NO: 1339 - protein, 152 aa, Zea mays subsp. mays
  misc_feature (1)..(152): Ceres Seq. ID no. 14303248
MITLKSSDGEEFEVEEAVAMESQTIRHMIEDDCADNGIPLPNVNSKILSKVIEYCNKHVHAAAAKSECSRSLFGGYSDYPNYMANTESFRAKARSQSAPKQRPQYERSSSLRRASAAQRSAAAAASSLHAKFTNKAYPGSGRLDRLGLPARY

SEQ ID NO: 1340 - DNA, 1789 bp, Zea mays subsp. mays
  misc_feature (1)..(1789): Ceres Seq. ID no. 14303249
atctagggctattagaaaacgtgcaaggcttctttcctcccaaatcccctgagcaaggcccccgtcggctagcgccgcagccgtcgccgtcgacgccgactctcaccggcagccgcttgcagcgcgtcccttccccgctcccggcgccatggactgcgcaaagggaaggtcgatggcggacctctacgacgagctgatgttggagatcttctcgcgcatgcccgtcaaagacctccgccattccacttacgtgtgcaaatcttggcgcaacctcatcaccgaccccctcaacggcaagaagctgccccagaccctggaaggcttcttccacggcggcgtcggagggcctcgcagctacggccatttcaccagcctgccggggagcggagtgcctccggtcgacccttccttctcttttatcaaggcaatggtgcctggggtcgagcgcatggtcctcttggattcttgcaacgggctcctgctctttgggtgcacgcgggagggcaagttcgggtacatcgtgtcaaaccctgcgaccaagaaattggtgactgtgcccgccagctccggctcttgtccgcctccacctttatttgcatttgaagcggaagtcgattatgatagtggggaaaaatatgcacacacctttctgatgtttaacccggctgtctcctcgcacttccacttgttccagatctggcaggatatgacggtggaggatgtggaaacggtgcactcttactcgtctgaaacgaaggcatggagtgacaggtcaagcaagtggcggcgaggtgaagagggcagtgaatgggggctgtggggtgaatgcctcatcaaattcaggatgggcagggctttgatcaacgatctgctgcattttgttggcttcgattctcagaaacaagaggatgtgatagttgcagtggatggggaagggaagacttgtaggatcatcgactggcatggtaaggatgtgagattaatcatttttattggtcaatcccaagaccgtctgcactgcatcggtgtcaatacgaaagcaggtcaagaccatatacacatcacgcggatgtcaatctgggttcttgaggactatgatacaaaagcatggatcctgaagcacagtgtgggctctttgcagttttttggattactgggtcgcctggtccatgatttcaatattgtggccattcatccagatcacaattctatcatcattgttcagcactggaaccagaaacttgtatcatataacatggatacccaggaactgcgtggtctccgcactcttgaaaatggctgtgcctatgtggctattaccccatacgttccctgtttcttggagtcatcagttcttgccaccaaaggttgaggttgttgctttttggagacttctctgcatgttcagcaatagcttgatcatccaagtgtggggcaaactagcagtgtgggtaaacctactagaatcaggtggtgcaaagttggattacatgtctttaggtgatctattctgatggtgctttaatgtcctcttgtaatgctgtgagaaagctctttacaagacagcatgcaggttagcattacatattactagttcgagctgcccaacacatgtaagttctcagttttgagtttcagatgctacactttgtgtttccagaatgatgtctccatcttttttgtgtgcttcctttttctcggcctatattagcgagccattactgactgaatttgtgcttggtcggtgctgtatatgtattttatgctgggaaatgcatttatcttcccc

SEQ ID NO: 1341 - protein, 407 aa, Zea mays subsp. mays
  misc_feature (1)..(407): Ceres Seq. ID no. 14303250
MDCAKGRSMADLYDELMLEIFSRMPVKDLRHSTYVCKSWRNLITDPLNGKKLPQTLEGFFHGGVGGPRSYGHFTSLPGSGVPPVDPSFSFIKAMVPGVERMVLLDSCNGLLLFGCTREGKFGYIVSNPATKKLVTVPASSGSCPPPPLFAFEAEVDYDSGEKYAHTFLMFNPAVSSHFHLFQIWQDMTVEDVETVHSYSSETKAWSDRSSKWRRGEEGSEWGLWGECLIKFRMGRALINDLLHFVGFDSQKQEDVIVAVDGEGKTCRIIDWHGKDVRLIIFIGQSQDRLHCIGVNTKAGQDHIHITRMSIWVLEDYDTKAWILKHSVGSLQFFGLLGRLVHDFNIVAIHPDHNSIIIVQHWNQKLVSYNMDTQELRGLRTLENGCAYVAITPYVPCFLESSVLATKG

SEQ ID NO: 1342 - protein, 399 aa, Zea mays subsp. mays
  misc_feature (1)..(399): Ceres Seq. ID no. 14303251
MADLYDELMLEIFSRMPVKDLRHSTYVCKSWRNLITDPLNGKKLPQTLEGFFHGGVGGPRSYGHFTSLPGSGVPPVDPSFSFIKAMVPGVERMVLLDSCNGLLLFGCTREGKFGYIVSNPATKKLVTVPASSGSCPPPPLFAFEAEVDYDSGEKYAHTFLMFNPAVSSHFHLFQIWQDMTVEDVETVHSYSSETKAWSDRSSKWRRGEEGSEWGLWGECLIKFRMGRALINDLLHFVGFDSQKQEDVIVAVDGEGKTCRIIDWHGKDVRLIIFIGQSQDRLHCIGVNTKAGQDHIHITRMSIWVLEDYDTKAWILKHSVGSLQFFGLLGRLVHDFNIVAIHPDHNSIIIVQHWNQKLVSYNMDTQELRGLRTLENGCAYVAITPYVPCFLESSVLATKG

SEQ ID NO: 1343 - protein, 391 aa, Zea mays subsp. mays
  misc_feature (1)..(391): Ceres Seq. ID no. 14303252
MLEIFSRMPVKDLRHSTYVCKSWRNLITDPLNGKKLPQTLEGFFHGGVGGPRSYGHFTSLPGSGVPPVDPSFSFIKAMVPGVERMVLLDSCNGLLLFGCTREGKFGYIVSNPATKKLVTVPASSGSCPPPPLFAFEAEVDYDSGEKYAHTFLMFNPAVSSHFHLFQIWQDMTVEDVETVHSYSSETKAWSDRSSKWRRGEEGSEWGLWGECLIKFRMGRALINDLLHFVGFDSQKQEDVIVAVDGEGKTCRIIDWHGKDVRLIIFIGQSQDRLHCIGVNTKAGQDHIHITRMSIWVLEDYDTKAWILKHSVGSLQFFGLLGRLVHDFNIVAIHPDHNSIIIVQHWNQKLVSYNMDTQELRGLRTLENGCAYVAITPYVPCFLESSVLATKG

SEQ ID NO: 1344 - DNA, 977 bp, Zea mays subsp. mays
  misc_feature (1)..(977): Ceres Seq. ID no. 14305097
aatcaacaacaatatccagaccttctctgagaatcaaatcaaacaggaagctcacagaagtccaaaattacagttataattcatctgtcacccttgaccccagtctgatccagccatgtttagaaacaattacgataacgattcggtgactttctcaccgcaaggccgtatcttccaggtggaatatgctcaagaagctgtcaaacagggttccgttgtggtcggattagttagcaagacacatgctgttctcgtggggttgaagcgaaacgcagaagaactctcgtcgtaccagaaaaaagtcatcgaaatcgactcacacatgggcatcgccattgccggcctctcctccgacgcccgggtcctttccaacttcatgaaacagcaatctctcggctcacgaatgacatacggccgcgccatccccctagaccggatcgtcacccaaatcggtgatcgcgcacaaaccaacacacaacattacggcaaacgaccatacggtgttggcctcttagttgcgggtgtcgatgaggcaggcccgcatttattcgagtttcaaccttccggtatgacgcaggagatgcttgcatgcgcgattggggctcggtcacagatggcgaggacttatctggaaagaaatctggccgagtttgcggattgttcgcgcgaggagttgattaaccatggcctgaaggccttgagggagactctttcgcaggataaggagcttaggattgataataccacggttggagttgtgggacttgtccccaaggattcggcgacaccttcctccaagggtactaagctagagaactttaagctatatgatggacaggacgttggtgcgctattggaggcgttggatggcgcagctaccgagggtggtgaaatggaggttgatacacagtgatggattagcgttctatctcttcaatagatcaatttctcattatgaatggataatcatactcgtt

SEQ ID NO: 1345 - protein, 265 aa, Zea mays subsp. mays
  misc_feature (1)..(265): Ceres Seq. ID no. 14305098
MFRNNYDNDSVTFSPQGRIFQVEYAQEAVKQGSVVVGLVSKTHAVLVGLKRNAEELSSYQKKVIEIDSHMGIAIAGLSSDARVLSNFMKQQSLGSRMTYGRAIPLDRIVTQIGDRAQTNTQHYGKRPYGVGLLVAGVDEAGPHLFEFQPSGMTQEMLACAIGARSQMARTYLERNLAEFADCSREELINHGLKALRETLSQDKELRIDNTTVGVVGLVPKDSATPSSKGTKLENFKLYDGQDVGALLEALDGAATEGGEMEVDTQ

SEQ ID NO: 1346 - protein, 196 aa, Zea mays subsp. mays
  misc_feature (1)..(196): Ceres Seq. ID no. 14305099
MGIAIAGLSSDARVLSNFMKQQSLGSRMTYGRAIPLDRIVTQIGDRAQTNTQHYGKRPYGVGLLVAGVDEAGPHLFEFQPSGMTQEMLACAIGARSQMARTYLERNLAEFADCSREELINHGLKALRETLSQDKELRIDNTTVGVVGLVPKDSATPSSKGTKLENFKLYDGQDVGALLEALDGAATEGGEMEVDTQ

SEQ ID NO: 1347 - protein, 178 aa, Zea mays subsp. mays
  misc_feature (1)..(178): Ceres Seq. ID no. 14305100
MKQQSLGSRMTYGRAIPLDRIVTQIGDRAQTNTQHYGKRPYGVGLLVAGVDEAGPHLFEFQPSGMTQEMLACAIGARSQMARTYLERNLAEFADCSREELINHGLKALRETLSQDKELRIDNTTVGVVGLVPKDSATPSSKGTKLENFKLYDGQDVGALLEALDGAATEGGEMEVDTQ

SEQ ID NO: 1348 - DNA, 1083 bp, Zea mays subsp. mays
  misc_feature (1)..(1083): Ceres Seq. ID no. 14305132
gtagctccttctcctacacagaaaagccgtcgcctactcgcctccggccaaaaaactgactccacacacgacccaaatcttttcctctccacaggcgactcccaacgcaacagcagctcgtcgagcgagtcgtcgccggccggccggtatatacgcaagaaagccaagaaaaacacttctgcctcttcctccatatccaagaaccaaaggtagctagctagccgcgactcgttggctagacgattcaagcagcagcgcaggatggtggcgccggtggtgattgcgtcggccgggctgggcatgctggccggcgtggcgatggccaaccggtccctcgggaacgggctcccggcggcctccaggtgggacgcgcgcccgcgctgcgccacgtgcggcggctccggccgcgtggagtgcatctgcaaccgctggtccgacggcgactccggctgccggacctgcgctgggtcggggaggatgccctgccgcagctgcggcggctccggcacgggccgaccgctccctgcacggctcaccgtccagcaccagaagccgccgccgccgccgccgcccggctacaactgatcgatggtggatgattaggtatccgtatccgtggattatatacttctcgcgggcgatttgcgatgcgacccatacaagaaagaaatcagttaaactgcgatatgatgcgctctagctagttaatcatatatacatatatacacgtccgatccattcgtgtggatgacatccatgttgcatatgtacaagtacatgtctcttcttcaagagtcaagactagctgtaattgagctgagcatacttggtgttgctgttgttcagttaatttgcaaaaacgcacaacacaagaaagaaggaaaaaaaaaacagagtggaaatgtttttttttaagatctggagaacaacatgattgagaagggagggaaggtgattctgagcacagttttgttggaaaggctgtagttaattctggtggatgtaatatattatatgtatgtatatgcttagattcgttaatatatatgcatatatatgcacccacatgaatatgatttacag

SEQ ID NO: 1349 - protein, 107 aa, Zea mays subsp. mays
  misc_feature (1)..(107): Ceres Seq. ID no. 14305133
MVAPVVIASAGLGMLAGVAMANRSLGNGLPAASRWDARPRCATCGGSGRVECICNRWSDGDSGCRTCAGSGRMPCRSCGGSGTGRPLPARLTVQHQKPPPPPPPGYN

SEQ ID NO: 1350 - protein, 94 aa, Zea mays subsp. mays
  misc_feature (1)..(94): Ceres Seq. ID no. 14305134
MLAGVAMANRSLGNGLPAASRWDARPRCATCGGSGRVECICNRWSDGDSGCRTCAGSGRMPCRSCGGSGTGRPLPARLTVQHQKPPPPPPPGYN

SEQ ID NO: 1351 - protein, 88 aa, Zea mays subsp. mays
  misc_feature (1)..(88): Ceres Seq. ID no. 14305135
MANRSLGNGLPAASRWDARPRCATCGGSGRVECICNRWSDGDSGCRTCAGSGRMPCRSCGGSGTGRPLPARLTVQHQKPPPPPPPGYN

SEQ ID NO: 1352 - DNA, 912 bp, Zea mays subsp. mays
  misc_feature (1)..(912): Ceres Seq. ID no. 14305136
acactgagaagcagtcaaggaaaagagcagagaagacaaacaagaagtttagtgttgccttagctaacactgaagcttctttgcacgcagtgatgaaagaacttgaaagggagaggaaatataaaggaagacttgagaagatctgcaacgagctcatcagaggcattgatgaggacaaagctgtggtgcaggcactgaagagggaaaccgagaaggcacaacaagagctccagaaagagcgtgaaatgcttcaacttgcagatgagtggcgtgaacaaagggttcagatgaagcttttagaagcacgggttcaatttgaggagaaaaatgcagctgttaatcagctgcgcgatgaactccaagcttatctggatactaagaaagagcaggaaccgttgaatgatccaatggaactgtcccatgcatctgaaattggcgccactgcagctgatttagttcctgacagaaatggtggaaacttcagcgaagacgcctcagaaggcagtgatatacactccattgagctgaacgtcgatggcatcaacaggacctacacctggagctacactcctacctcaaaaggcaggcagaggagcccatcaaggcatgaaccgttttcggatagagggatggatggcgtgaactcgtggcgtttagagcaaagttttcgggacatggatgaagaactggagggagactgggcagaagggtgcagcaacggaatgctgaacttggatcatgatgaggagaggtatctggctatcaagaatctcagagagcagatgttggccgggtcggggttcatcctgtcacaaggtagagaaaatgctaaaagagagtattgtgggttgtaagataaactgaacaagaaaatttaaaagtaaggtgccgtatgaatcgctgcttgatgct

SEQ ID NO: 1353 - protein, 283 aa, Zea mays subsp. mays
  misc_feature (1)..(283): Ceres Seq. ID no. 14305137
TEKQSRKRAEKTNKKFSVALANTEASLHAVMKELERERKYKGRLEKICNELIRGIDEDKAVVQALKRETEKAQQELQKEREMLQLADEWREQRVQMKLLEARVQFEEKNAAVNQLRDELQAYLDTKKEQEPLNDPMELSHASEIGATAADLVPDRNGGNFSEDASEGSDIHSIELNVDGINRTYTWSYTPTSKGRQRSPSRHEPFSDRGMDGVNSWRLEQSFRDMDEELEGDWAEGCSNGMLNLDHDEERYLAIKNLREQMLAGSGFILSQGRENAKREYCGL

SEQ ID NO: 1354 - protein, 253 aa, Zea mays subsp. mays
  misc_feature (1)..(253): Ceres Seq. ID no. 14305138
MKELERERKYKGRLEKICNELIRGIDEDKAVVQALKRETEKAQQELQKEREMLQLADEWREQRVQMKLLEARVQFEEKNAAVNQLRDELQAYLDTKKEQEPLNDPMELSHASEIGATAADLVPDRNGGNFSEDASEGSDIHSIELNVDGINRTYTWSYTPTSKGRQRSPSRHEPFSDRGMDGVNSWRLEQSFRDMDEELEGDWAEGCSNGMLNLDHDEERYLAIKNLREQMLAGSGFILSQGRENAKREYCGL

SEQ ID NO: 1355 - protein, 202 aa, Zea mays subsp. mays
  misc_feature (1)..(202): Ceres Seq. ID no. 14305139
MLQLADEWREQRVQMKLLEARVQFEEKNAAVNQLRDELQAYLDTKKEQEPLNDPMELSHASEIGATAADLVPDRNGGNFSEDASEGSDIHSIELNVDGINRTYTWSYTPTSKGRQRSPSRHEPFSDRGMDGVNSWRLEQSFRDMDEELEGDWAEGCSNGMLNLDHDEERYLAIKNLREQMLAGSGFILSQGRENAKREYCGL

SEQ ID NO: 1356 - DNA, 866 bp, Zea mays subsp. mays
  misc_feature (1)..(866): Ceres Seq. ID no. 14305156
ctctccgttccgttccgttccgtcccctccaccccgcacctgcagccgcgggatgaccggcggcggccgcggcgcgtgcgcggtgtgcaagcaccagcggcgcaagtgcgagcccaactgcgagctggccgcctacttcccggcgcacaggatgaacgacttccgcgcgctgcacctcgtcttcggggtggccaacctcaccaagctcatcaaggccaacgccagcgaggccggccggcgccgcgccgccgagacgctcacctgggaggcccgctggagggagtgcgacccctcggacgggtgctaccgcgaggtggcctgcctgcgccgcgacaacgccgtgctgcgcgccgagaacgccgcgctgcggcggcagctggccgagcagcagctgctctggtccagcgcctgcagcactggcggcagcgcgcttctggccgagcagcagctgctgccgccgtgtgggggcaataataatgggcttctgacggcgagtagcagagctcatcatgcaccggcagcagctctggcggcaacgcacaccgcgctggcctgctaccgtggcagcatgccggtgtgtactattactatgacagcggacgacggcagcggcaggaggccggcgtcggatgctgccgccatcgccgggagagggagtggtgctcaggtcgacgcttctagggataacaagagcagcgcctgcaggtgaggatgctcagatcgattccttgtgctctcagctactgcaaaagatagctgtgtgtggatacttgcattggcttctctccattgtttatgcaactgcaggtgatgctagctggccggctatactgctaattaacaactgcaaagaaagcaagataccc

SEQ ID NO: 1357 - protein, 235 aa, Zea mays subsp. mays
  misc_feature (1)..(235): Ceres Seq. ID no. 14305157
SPFRSVPSPPPRTCSRGMTGGGRGACAVCKHQRRKCEPNCELAAYFPAHRMNDFRALHLVFGVANLTKLIKANASEAGRRRAAETLTWEARWRECDPSDGCYREVACLRRDNAVLRAENAALRRQLAEQQLLWSSACSTGGSALLAEQQLLPPCGGNNNGLLTASSRAHHAPAAALAATHTALACYRGSMPVCTITMTADDGSGRRPASDAAAIAGRGSGAQVDASRDNKSSACR

SEQ ID NO: 1358 - protein, 218 aa, Zea mays subsp. mays
  misc_feature (1)..(218): Ceres Seq. ID no. 14305158
MTGGGRGACAVCKHQRRKCEPNCELAAYFPAHRMNDFRALHLVFGVANLTKLIKANASEAGRRRAAETLTWEARWRECDPSDGCYREVACLRRDNAVLRAENAALRRQLAEQQLLWSSACSTGGSALLAEQQLLPPCGGNNNGLLTASSRAHHAPAAALAATHTALACYRGSMPVCTITMTADDGSGRRPASDAAAIAGRGSGAQVDASRDNKSSACR

SEQ ID NO: 1359 - protein, 185 aa, Zea mays subsp. mays
  misc_feature (1)..(185): Ceres Seq. ID no. 14305159
MNDFRALHLVFGVANLTKLIKANASEAGRRRAAETLTWEARWRECDPSDGCYREVACLRRDNAVLRAENAALRRQLAEQQLLWSSACSTGGSALLAEQQLLPPCGGNNNGLLTASSRAHHAPAAALAATHTALACYRGSMPVCTITMTADDGSGRRPASDAAAIAGRGSGAQVDASRDNKSSACR

SEQ ID NO: 1360 - DNA, 598 bp, Zea mays subsp. mays
  misc_feature (1)..(598): Ceres Seq. ID no. 14305238
gagcagcggccacgcattctcccttccctggactattcttggtgggtggagagagccgcagaaggcagctggaagaggagaggaccgcgcgaggctccgtgccggcgagttcgggtgcttttcctgcggtccgagatgcgatcgttgggacccgggagacagcgcagctcgggttcgggttcgggggggcggtagccacctgagcaggatgtttaactggaacgacgagcagcaccaggtcgaagcacataagaggccagtgtggtcacgtagaaaaccagaggaaagaggtaaaagtaaaatatccagcagtacaagtggcttctcccacagcaaagtagagagttcatcgacgaatttgcaaactcctatggaacctgtacagactcctcaatatgcactgttccaggatagcaaattcgtcgatgaactctctaccttgttgctggcaaagcgtagttctgtacctcctctatcgttgtcctaccactctaggtctatcccttgatctaggtttctatggtctgaagatttgtgattttctccgcactgttgttgctatccccgtgtcgtaataatacgatgttttaagcggttg

SEQ ID NO: 1361 - protein, 168 aa, Zea mays subsp. mays
  misc_feature (1)..(168): Ceres Seq. ID no. 14305239
SSGHAFSLPWTILGGWREPQKAAGRGEDRARLRAGEFGCFSCGPRCDRWDPGDSAARVRVRGGGSHLSRMFNWNDEQHQVEAHKRPVWSRRKPEERGKSKISSSTSGFSHSKVESSSTNLQTPMEPVQTPQYALFQDSKFVDELSTLLLAKRSSVPPLSLSYHSRSIP

SEQ ID NO: 1362 - protein, 99 aa, Zea mays subsp. mays
  misc_feature (1)..(99): Ceres Seq. ID no. 14305240
MFNWNDEQHQVEAHKRPVWSRRKPEERGKSKISSSTSGFSHSKVESSSTNLQTPMEPVQTPQYALFQDSKFVDELSTLLLAKRSSVPPLSLSYHSRSIP

SEQ ID NO: 1363 - DNA, 580 bp, Zea mays subsp. mays
  misc_feature (1)..(580): Ceres Seq. ID no. 14305251
agagcgagactgcgagagacagcgcgaaggtagagagagtgtgtggaacagtggaagcagcagcaaacgcgaccatggcgggtggcgccggcgggcgggacccgctcgtcgcctccgagatccacggcttcctcacctgcgcagacttgaactttgacaagctgatgatggaggctgggacacgctggttccggccgaatgagatctatgcggtgctggcgaactatgcaaggttcaaggtccatgctcagcccatcgacaaaccaattagtggtactgttgttctatatgatcgtaaagttgtccggaacttccgtaaagatggccataactggaagaaaaagaaagatggcaagactgtccaagaagcccatgaaaaactaaagattggtaatgaagaaaaggttcatgtgtattatgctcgaggagaggatgatccaaatttctttcgcagatgctactggctactttggacaccaaattcttaacctaggtcttgtttgggtgcacacacgtatctagttcaatttacttgtattgaggttcattgaagtggaaaatcaactagttttcccccttc

SEQ ID NO: 1364 - protein, 161 aa, Zea mays subsp. mays
  misc_feature (1)..(161): Ceres Seq. ID no. 14305252
SETARDSAKVERVCGTVEAAANATMAGGAGGRDPLVASEIHGFLTCADLNFDKLMMEAGTRWFRPNEIYAVLANYARFKVHAQPIDKPISGTVVLYDRKVVRNFRKDGHNWKKKKDGKTVQEAHEKLKIGNEEKVHVYYARGEDDPNFFRRCYWLLWTPNS

SEQ ID NO: 1365 - protein, 137 aa, Zea mays subsp. mays
  misc_feature (1)..(137): Ceres Seq. ID no. 14305253
MAGGAGGRDPLVASEIHGFLTCADLNFDKLMMEAGTRWFRPNEIYAVLANYARFKVHAQPIDKPISGTVVLYDRKVVRNFRKDGHNWKKKKDGKTVQEAHEKLKIGNEEKVHVYYARGEDDPNFFRRCYWLLWTPNS

SEQ ID NO: 1366 - protein, 107 aa, Zea mays subsp. mays
  misc_feature (1)..(107): Ceres Seq. ID no. 14305254
MMEAGTRWFRPNEIYAVLANYARFKVHAQPIDKPISGTVVLYDRKVVRNFRKDGHNWKKKKDGKTVQEAHEKLKIGNEEKVHVYYARGEDDPNFFRRCYWLLWTPNS

SEQ ID NO: 1367 - DNA, 832 bp, Zea mays subsp. mays
  misc_feature (1)..(832): Ceres Seq. ID no. 14305270
atgttgctccagacacatctaaatcacatcactccattccatctgaggaagtaaatgccatgaggggagacctcatgctgtggcctccagttgttgtgatacataacagctcgactggtcatgaggcaaaggatactgatgcaaagattgtgtccatagaagaaatcgaaggtgtattggcagatattggggtagcgcatgagaaggctagggttagccatggaagatcagccaatcagagcgtgttcctggtgaagttccagccaacaatatctgggttccaagaagccatgagagtgcatacccatttctccaccagaaaccatggcaaggaagagttccagctgatgaaaggcagcaaaggtaagaaggctgcctccactgatagcctggaagagctgctgtatgcgcatattggggtcgtggaagacctggggctgctggatgagggaacaaagaagagatgcaaggtcatgaggaagaaggaaattgaggcaaatgcagaggcaacactgaatttagaagtttattaggtctagtactaggatccgaaccatttgaagtggtcctcttttgcttcatcttgcagctgcttgcttgtccttgcggctgtaacgtcaaaagaagaaaagaagtgtaaattctgcttttgccattaaagagtgacgaaactcagttggcttctgtctgctggggaaggcctgcctcggtttgcatggcatggcaaggacataattttgtggctagatggggacaccttaacggcaaaagcagaattacctggtcgaagaaccgagtttaatctttatattatggaatcccttcttttttt

SEQ ID NO: 1368 - protein, 176 aa, Zea mays subsp. mays
  misc_feature (1)..(176): Ceres Seq. ID no. 14305271
VAPDTSKSHHSIPSEEVNAMRGDLMLWPPVVVIHNSSTGHEAKDTDAKIVSIEEIEGVLADIGVAHEKARVSHGRSANQSVFLVKFQPTISGFQEAMRVHTHFSTRNHGKEEFQLMKGSKGKKAASTDSLEELLYAHIGVVEDLGLLDEGTKKRCKVMRKKEIEANAEATLNLEVY

SEQ ID NO: 1369 - protein, 157 aa, Zea mays subsp. mays
  misc_feature (1)..(157): Ceres Seq. ID no. 14305272
MRGDLMLWPPVVVIHNSSTGHEAKDTDAKIVSIEEIEGVLADIGVAHEKARVSHGRSANQSVFLVKFQPTISGFQEAMRVHTHFSTRNHGKEEFQLMKGSKGKKAASTDSLEELLYAHIGVVEDLGLLDEGTKKRCKVMRKKEIEANAEATLNLEVY

SEQ ID NO: 1370 - protein, 152 aa, Zea mays subsp. mays
  misc_feature (1)..(152): Ceres Seq. ID no. 14305273
MLWPPVVVIHNSSTGHEAKDTDAKIVSIEEIEGVLADIGVAHEKARVSHGRSANQSVFLVKFQPTISGFQEAMRVHTHFSTRNHGKEEFQLMKGSKGKKAASTDSLEELLYAHIGVVEDLGLLDEGTKKRCKVMRKKEIEANAEATLNLEVY

SEQ ID NO: 1371 - DNA, 590 bp, Zea mays subsp. mays
  misc_feature (1)..(590): Ceres Seq. ID no. 14305274
acgatatttctcactccattccaccattacagggggggcgagcgggaccggtccaggcacgcgcacgccgcacccgttcgaaagacgaccgcatcggcgtcggcgatgatgcgatcgggcgcgcgcggcggcgacgcggaggaagaggtggaccggaagccggtgatcaagcctggcgtccacgtgacgctcaaggtgcaggacacggcggggcgcacggtggttttcaccgtgcggaggacccaggagctgcaggcgctcatggacgcctactacgccagcgtgccggacgtcgcgtacggcacgggaaggttcctgtacgacggcgggcggctgacgggggcgcacacgcctgcggagctcgggatggaggaacaggacgagatcgacttcttcaccgagctgttgggtggcggccgacatgctgctgctgaacctggacgcccggtggtcgcgtaactccctgctcatcgtcgtatgacttagctttgcgcgggcctgggaggaaggagcacactgctcgctgctcatatcgttgtgcgcgcttgcttttgatgaatctgatgaagttattatgcatcgttacattt

SEQ ID NO: 1372 - protein, 152 aa, Zea mays subsp. mays
  misc_feature (1)..(152): Ceres Seq. ID no. 14305275
TIFLTPFHHYRGGERDRSRHAHAAPVRKTTASASAMMRSGARGGDAEEEVDRKPVIKPGVHVTLKVQDTAGRTVVFTVRRTQELQALMDAYYASVPDVAYGTGRFLYDGGRLTGAHTPAELGMEEQDEIDFFTELLGGGRHAAAEPGRPVVA

SEQ ID NO: 1373 - protein, 143 aa, Zea mays subsp. mays
  misc_feature (1)..(143): Ceres Seq. ID no. 14305276
DISHSIPPLQGGRAGPVQARARRTRSKDDRIGVGDDAIGRARRRRGGRGGPEAGDQAWRPRDAQGAGHGGAHGGFHRAEDPGAAGAHGRLLRQRAGRRVRHGKVPVRRRAADGGAHACGARDGGTGRDRLLHRAVGWRPTCCC

SEQ ID NO: 1374 - protein, 117 aa, Zea mays subsp. mays
  misc_feature (1)..(117): Ceres Seq. ID no. 14305277
MMRSGARGGDAEEEVDRKPVIKPGVHVTLKVQDTAGRTVVFTVRRTQELQALMDAYYASVPDVAYGTGRFLYDGGRLTGAHTPAELGMEEQDEIDFFTELLGGGRHAAAEPGRPVVA

SEQ ID NO: 1375 - DNA, 581 bp, Zea mays subsp. mays
  misc_feature (1)..(581): Ceres Seq. ID no. 14305380
gttgtttccaagcagtttgaatcctgacattcttgaaggcctacttggatctgtgggtggtgtcatggctttcctcactttgcatgaaatgctgcctcttgcatttgactattgtggccagaagcaagctgtcaaagctgtctttgtgggcatggcctgcatgtctgcaagcttgtacttcttggaagtcagcttagcaaaggagataagcttgtagcatcgcgctgcaggtactgggaggccatagcctgtcagtagatcctgaattctaggaggaggaacagcacaataaaaccatgaacagtgactactggtgtgccgccattgatattgtccatcttaccgtgaaaggagggagaaactgcatttccccagaatgtattccccagattcctcgtgggaccatatgaaagaattgaaaaatgtactgtagtactctgtcgtccggcaatggaagcttcgaagtcgtcaactaaactatttctagcactctcgtcggttgacaatggaagattctatgtaaaaacccatcagatagatgttaacctttaatctttaatttcttaaaagtacattgaaac

SEQ ID NO: 1376 - protein, 71 aa, Zea mays subsp. mays
  misc_feature (1)..(71): Ceres Seq. ID no. 14305381
LFPSSLNPDILEGLLGSVGGVMAFLTLHEMLPLAFDYCGQKQAVKAVFVGMACMSASLYFLEVSLAKEISL

SEQ ID NO: 1377 - protein, 50 aa, Zea mays subsp. mays
  misc_feature (1)..(50): Ceres Seq. ID no. 14305382
MAFLTLHEMLPLAFDYCGQKQAVKAVFVGMACMSASLYFLEVSLAKEISL

SEQ ID NO: 1378 - protein, 42 aa, Zea mays subsp. mays
  misc_feature (1)..(42): Ceres Seq. ID no. 14305383
MLPLAFDYCGQKQAVKAVFVGMACMSASLYFLEVSLAKEISL

SEQ ID NO: 1379 - DNA, 659 bp, Zea mays subsp. mays
  misc_feature (1)..(659): Ceres Seq. ID no. 14305425
aggcctactaccaaccagcctccgcgtccaagatctccctcccacggcccgctcggactccccggcgcaatggcgaccgacgcgatcctggagacgatcaagccgcggcggagcgaggagcagctcccggtgaccacggcggccgccgccgccggcaccaggctgcggcggcgcgtgtcctcgttctcggcgcacgtgaggccgccgccggggctgtcgtcctcggcggcagcggcgttccggcgcgcgaggtcgatgccgtccgccaaggcgctggcggcggcgggagcgctgcggcggtggtgggagtgggtgacggcgccgttcgcgccccgcggcggcggcgacgacgacgacgacgaggcaaggccgctgggcgggtgccgctgcgcctgcgccggcggaccgggcgggtggcgccacgtcctggtcaggctccgcgccggcgcgcgccgcctgctgggccgcgacggccgcccgctcaaggccgccgcgccgccggacttcggctacgactccgtcagctacgcgcgcaacttcgacgacggcgaggcgtgatgcgcgggtgatgccgagccgaggtggtggcgggacggccgtggcggtggcggccgggcgtggatcacaggatcagcagtggtccagctgtcgcaataaag

SEQ ID NO: 1380 - protein, 188 aa, Zea mays subsp. mays
  misc_feature (1)..(188): Ceres Seq. ID no. 14305426
AYYQPASASKISLPRPARTPRRNGDRRDPGDDQAAAERGAAPGDHGGRRRRHQAAAARVLVLGAREAAAGAVVLGGSGVPAREVDAVRQGAGGGGSAAAVVGVGDGAVRAPRRRRRRRRRGKAAGRVPLRLRRRTGRVAPRPGQAPRRRAPPAGPRRPPAQGRRAAGLRLRLRQLRAQLRRRRGVMRG

SEQ ID NO: 1381 - protein, 185 aa, Zea mays subsp. mays
  misc_feature (1)..(185): Ceres Seq. ID no. 14305427
RPTTNQPPRPRSPSHGPLGLPGAMATDAILETIKPRRSEEQLPVTTAAAAAGTRLRRRVSSFSAHVRPPPGLSSSAAAAFRRARSMPSAKALAAAGALRRWWEWVTAPFAPRGGGDDDDDEARPLGGCRCACAGGPGGWRHVLVRLRAGARRLLGRDGRPLKAAAPPDFGYDSVSYARNFDDGEA

SEQ ID NO: 1382 - protein, 162 aa, Zea mays subsp. mays
  misc_feature (1)..(162): Ceres Seq. ID no. 14305428
MATDAILETIKPRRSEEQLPVTTAAAAAGTRLRRRVSSFSAHVRPPPGLSSSAAAAFRRARSMPSAKALAAAGALRRWWEWVTAPFAPRGGGDDDDDEARPLGGCRCACAGGPGGWRHVLVRLRAGARRLLGRDGRPLKAAAPPDFGYDSVSYARNFDDGEA

SEQ ID NO: 1383 - DNA, 699 bp, Zea mays subsp. mays
  misc_feature (1)..(699): Ceres Seq. ID no. 14305528
atgaattcaagatttcgtgtctagaggccatcaaagatttatttccacacgactcaaatccgttttatgctggatttggaaatagagacacagacgagcttagctacctcaaggttggtattcctatgggcaagatcttcataataaaccccaagggtgaagtcgcagtgaaccgacgggtcgatacaaagtcgtacacatccttgcatgctcttgtccacgggatgttccctccaatattgtcgtcatctgagcaggaggactacaatgcttggaattactggaagatgccattgcctgatgttgatttgtgaggtacaagtcgagtctgcacaacagcactgcactaattttatgatgtgccgtagtgatcatgagaaggccattacttggttggctacatgtggatgctcctgctcctgatataagttcctgcaagatggaattttgtatatataggatcataatagatgtagtagctatttcttgtgtctcctgttgttgttgttgttgtcgtcgtaggactggaaatcatacctccgtgtgtcctgtaactgaaggtacaaaatttactggatggagggatctgatagtatgttgcagccccccctttttcgtttcatccttgatgtaattgtggtaccgatgtattttgtacaagaacaaatcaataataatgcaatcgaaagcgagctgttc

SEQ ID NO: 1384 - protein, 103 aa, Zea mays subsp. mays
  misc_feature (1)..(103): Ceres Seq. ID no. 14305529
EFKISCLEAIKDLFPHDSNPFYAGFGNRDTDELSYLKVGIPMGKIFIINPKGEVAVNRRVDTKSYTSLHALVHGMFPPILSSSEQEDYNAWNYWKMPLPDVDL

SEQ ID NO: 1385 - protein, 86 aa, Zea mays subsp. mays
  misc_feature (1)..(86): Ceres Seq. ID no. 14305530
MRRPLLGWLHVDAPAPDISSCKMEFCIYRIIIDVVAISCVSCCCCCCRRRTGNHTSVCPVTEGTKFTGWRDLIVCCSPPFFVSSLM

SEQ ID NO: 1386 - protein, 71 aa, Zea mays subsp. mays
  misc_feature (1)..(71): Ceres Seq. ID no. 14305531
MLLSTGCSLQYCRHLSRRTTMLGITGRCHCLMLICEVQVESAQQHCTNFMMCRSDHEKAITWLATCGCSCS

SEQ ID NO: 1387 - protein, 62 aa, Zea mays subsp. mays
  misc_feature (1)..(62): Ceres Seq. ID no. 14305532
MGKIFIINPKGEVAVNRRVDTKSYTSLHALVHGMFPPILSSSEQEDYNAWNYWKMPLPDVDL

SEQ ID NO: 1388 - DNA, 901 bp, Zea mays subsp. mays
  misc_feature (1)..(901): Ceres Seq. ID no. 14305614
cattccaaaactccgagcaatcagtccaaacccgtgtccaccgaaagtttgatgggatcaggcctctcaagcagcagcagccaccggagcagcggcgcgtcgtcgtcgcttcaccagccaccggcggcggccccggccctggtcgtcgcggtcgacggctcgctacgggagttcgtcacgccggcggcggtgccgctcctcccccccgtctccgtctccgacgtgctgggcgcgaatgcggacgacggccggtccttcgtgtgcagctccagcgcgctctacttcgagaccgacgtcccggcgctcggcgccagcgagctgctccggccggggcagctctacttcgtcctccccgcggcgatgctcggcaggccgctctcgggcgccgacatggccgcgctggccgtgcgcgccagccaggcgctggcggcgggagcgaggccgccgcgtggcgggcgacgccctcgcgggtccaccagggcgcgcgtcgtgccggcggcggcggcgcaccacgcgcacgcgcacggcgacgaggaggctgtcaacgagaagctcaaccagaggactcttggcggcttcgagacggctcctccacgtggtccggccaggaagcccgctgtcgcggcgcgaccggccccgcctgtgactgtgactgtgactgagaggagggcgctcagcaccatcgaagagggtgccgagtgatcgataaaatggctacaaggcgcgcgtgttcgattgattgatgattaggtttagttttttattgggttaattaaagacttaatgacacgcaaatagtttgaaaggatagggaaacttgttacttggttgatcgacgtctgtgtactactcacactaattacaaaattaaatgggaattttggttttcgacctggttctt

SEQ ID NO: 1389 - protein, 233 aa, Zea mays subsp. mays
  misc_feature (1)..(233): Ceres Seq. ID no. 14305615
HSKTPSNQSKPVSTESLMGSGLSSSSSHRSSGASSSLHQPPAAAPALVVAVDGSLREFVTPAAVPLLPPVSVSDVLGANADDGRSFVCSSSALYFETDVPALGASELLRPGQLYFVLPAAMLGRPLSGADMAALAVRASQALAAGARPPRGGRRPRGSTRARVVPAAAAHHAHAHGDEEAVNEKLNQRTLGGFETAPPRGPARKPAVAARPAPPVTVTVTERRALSTIEEGAE

SEQ ID NO: 1390 - protein, 219 aa, Zea mays subsp. mays
  misc_feature (1)..(219): Ceres Seq. ID no. 14305616
FQNSEQSVQTRVHRKFDGIRPLKQQQPPEQRRVVVASPATGGGPGPGRRGRRLATGVRHAGGGAAPPPRLRLRRAGRECGRRPVLRVQLQRALLRDRRPGARRQRAAPAGAALLRPPRGDARQAALGRRHGRAGRARQPGAGGGSEAAAWRATPSRVHQGARRAGGGGAPRARARRRGGCQREAQPEDSWRLRDGSSTWSGQEARCRGATGPACDCDCD

SEQ ID NO: 1391 - protein, 216 aa, Zea mays subsp. mays
  misc_feature (1)..(216): Ceres Seq. ID no. 14305617
MGSGLSSSSSHRSSGASSSLHQPPAAAPALVVAVDGSLREFVTPAAVPLLPPVSVSDVLGANADDGRSFVCSSSALYFETDVPALGASELLRPGQLYFVLPAAMLGRPLSGADMAALAVRASQALAAGARPPRGGRRPRGSTRARVVPAAAAHHAHAHGDEEAVNEKLNQRTLGGFETAPPRGPARKPAVAARPAPPVTVTVTERRALSTIEEGAE

SEQ ID NO: 1392 - DNA, 781 bp, Zea mays subsp. mays
  misc_feature (1)..(781): Ceres Seq. ID no. 14305790
gaatatatccatcctaacatccacccacccacacaccagacacacataccttattctccgccgtttcttggcctccggaaatctcctcccccaagttgcaagcatgggcgggttcagcctcagcggcgctacaggtctcgcggcgtaccgcgaggaagacgacgaggagctgttcgagacgtcgtcttcgatctccggcgactccgacgatgagggccaccagctctccgatggagaggggggcgcctatgatttgtcatctgtgatggcacagctccctgtcaagaaagggctatccagatactacgacggcaagtcccagtccttcgcgtgcatgtctgaagtgcgatgcctggaagatctgcgcaagaaagagacgccctacaagaagatcaagacatcaaggagtagcgtcgcgttagacgaagagcaggactgtcatacgccgggtcgtacgaacagcagcagagcgcccggaagttgttgcgcaaacctggtggctcggaacaacggcaaaaacatgctgtacagacctcccccagtccctgtaaacaaaagtggataccgtcagtaggctctaggacattactggatgatatctatccagggtttcacctcttgttttttttccatttttgagggattttgttgacaggcgtattggcctgtctcagatgtaatgtaagagggtttccttctctgctcttagcagagttatctcctatgatcttgtccatgagacattggttcgtgtaaataatagtgatgttgtaaccacttt

SEQ ID NO: 1393 - protein, 190 aa, Zea mays subsp. mays
  misc_feature (1)..(190): Ceres Seq. ID no. 14305791
NISILTSTHPHTRHTYLILRRFLASGNLLPQVASMGGFSLSGATGLAAYREEDDEELFETSSSISGDSDDEGHQLSDGEGGAYDLSSVMAQLPVKKGLSRYYDGKSQSFACMSEVRCLEDLRKKETPYKKIKTSRSSVALDEEQDCHTPGRTNSSRAPGSCCANLVARNNGKNMLYRPPPVPVNKSGYRQ

SEQ ID NO: 1394 - protein, 156 aa, Zea mays subsp. mays
  misc_feature (1)..(156): Ceres Seq. ID no. 14305792
MGGFSLSGATGLAAYREEDDEELFETSSSISGDSDDEGHQLSDGEGGAYDLSSVMAQLPVKKGLSRYYDGKSQSFACMSEVRCLEDLRKKETPYKKIKTSRSSVALDEEQDCHTPGRTNSSRAPGSCCANLVARNNGKNMLYRPPPVPVNKSGYRQ

SEQ ID NO: 1395 - protein, 102 aa, Zea mays subsp. mays
  misc_feature (1)..(102): Ceres Seq. ID no. 14305793
MAQLPVKKGLSRYYDGKSQSFACMSEVRCLEDLRKKETPYKKIKTSRSSVALDEEQDCHTPGRTNSSRAPGSCCANLVARNNGKNMLYRPPPVPVNKSGYRQ

SEQ ID NO: 1396 - DNA, 697 bp, Zea mays subsp. mays
  misc_feature (1)..(697): Ceres Seq. ID no. 14305813
tccatttcatagccaaaatggacgctgccaagttggctaagcttcagcagagcgtgcgcattggaggaaaaggtaccccccgccgcaagaccaagcgtgtccacaagacctccaccacggacgacaagaaactccaaaccacactcaagaagatgaacgtccaacccattcaggccattgaggaagtcaacatgttcaaggaggacggaaacgtcatccacttctccaaccccaaggtccacgccgccgtcccctccaacaccttcgccatctacggcaacggcgaagaaaaggaactaaccgaactcgtgcctggaatcctgaaccagcttggtcccgacagtctggcgtctctccgcaaattggccgagagttatcagagtctgcagaagaaggaggctggtgagggaaagaatgacgatgaggatgaggatgatatcccggatttggtggagggggaaaactttgagggtactgttgagtaaaatgcctttctgtcaagagggtgagaaaaaaggaaagttgtctcttttctttccttagctatatgtcctagcggaatttattaggatattttgttgaggaatttttttattttgaagaaaaatgaaaaaaggaatttcttgggacctgcattattattatgaatgcgagtgtgtgtctagtctattgaggcgaatgatatacataacccccc

SEQ ID NO: 1397 - protein, 160 aa, Zea mays subsp. mays
  misc_feature (1)..(160): Ceres Seq. ID no. 14305814
HFIAKMDAAKLAKLQQSVRIGGKGTPRRKTKRVHKTSTTDDKKLQTTLKKMNVQPIQAIEEVNMFKEDGNVIHFSNPKVHAAVPSNTFAIYGNGEEKELTELVPGILNQLGPDSLASLRKLAESYQSLQKKEAGEGKNDDEDEDDIPDLVEGENFEGTVE

SEQ ID NO: 1398 - protein, 155 aa, Zea mays subsp. mays
  misc_feature (1)..(155): Ceres Seq. ID no. 14305815
MDAAKLAKLQQSVRIGGKGTPRRKTKRVHKTSTTDDKKLQTTLKKMNVQPIQAIEEVNMFKEDGNVIHFSNPKVHAAVPSNTFAIYGNGEEKELTELVPGILNQLGPDSLASLRKLAESYQSLQKKEAGEGKNDDEDEDDIPDLVEGENFEGTVE

SEQ ID NO: 1399 - protein, 110 aa, Zea mays subsp. mays
  misc_feature (1)..(110): Ceres Seq. ID no. 14305816
MNVQPIQAIEEVNMFKEDGNVIHFSNPKVHAAVPSNTFAIYGNGEEKELTELVPGILNQLGPDSLASLRKLAESYQSLQKKEAGEGKNDDEDEDDIPDLVEGENFEGTVE

SEQ ID NO: 1400 - DNA, 810 bp, Zea mays subsp. mays
  misc_feature (1)..(810): Ceres Seq. ID no. 14305825
atgtggagaaacatcctgggacaggccttgtaccagttccttgtaatttggtacctacagacagagggaaagtggctgtttggaatcaagggcaataactccgatctagtcttgaacacactgatcttcaattgcttcgtgttctgccaggtattcaatgaggtgagctcaagggagatggagaggataaatgtatttgaaggcattctaaacaacaacgtgttcattgctgtcctcggcagcaccgtcatcttccagttcatcataatacagtttctcggcgatttcgcaaacactacccctcttacgctcaaccagtggatcgcatgtgtttttatcggtttcataggcatgcctatcgcagctattgtgaagatgatcccagttggatctacgtagtgaattagagctaatttcgtccagaaactgaagttgggcatggctacagtctgatcatggcaatggagttttctgggttgccatttgtgtacaagatagatctgtgctatgcttctattctggtcaatctttgcctcttttatcctgtagtatcttatcagccaaggttgtggactcgattgttagaaaatgccttgggctcttgtagctgttctttgctttatattcttttcttggtgcttttgctaggaacattggaggctggagctgtatatgacaatcttgttgttcactcgaatgtgcttgttttgacacctatcattttgcttcatctgataagtaatgtttcagtcagaagttccagagaagggtggaattttaatgtttctgatttgccaagaaaatggaccc

SEQ ID NO: 1401 - protein, 132 aa, Zea mays subsp. mays
  misc_feature (1)..(132): Ceres Seq. ID no. 14305826
MWRNILGQALYQFLVIWYLQTEGKWLFGIKGNNSDLVLNTLIFNCFVFCQVFNEVSSREMERINVFEGILNNNVFIAVLGSTVIFQFIIIQFLGDFANTTPLTLNQWIACVFIGFIGMPIAAIVKMIPVGST

SEQ ID NO: 1402 - protein, 118 aa, Zea mays subsp. mays
  misc_feature (1)..(118): Ceres Seq. ID no. 14305827
MAMEFSGLPFVYKIDLCYASILVNLCLFYPVVSYQPRLWTRLLENALGSCSCSLLYILFLVLLLGTLEAGAVYDNLVVHSNVLVLTPIILLHLISNVSVRSSREGWNFNVSDLPRKWT

SEQ ID NO: 1403 - protein, 116 aa, Zea mays subsp. mays
  misc_feature (1)..(116): Ceres Seq. ID no. 14305828
MEFSGLPFVYKIDLCYASILVNLCLFYPVVSYQPRLWTRLLENALGSCSCSLLYILFLVLLLGTLEAGAVYDNLVVHSNVLVLTPIILLHLISNVSVRSSREGWNFNVSDLPRKWT

SEQ ID NO: 1404 - DNA, 851 bp, Zea mays subsp. mays
  misc_feature (1)..(851): Ceres Seq. ID no. 14305917
gcacaacgcttaggacttccttttgcttcttacatttgattttctaatgcccaggcagcaccgccagcgacagccgccgagtgtccggcccaacggctgctccctcgtctgctatggcatcgtcgtggccaccgcgtcgctgctcctgctcgccatactcgctgccacagtcagcatcgtcaaggcgtgcgccctcgccggcgctgtcgcggtggtgttcagcgctgcgggctatgtctctcggtggtgcgcagcagaggacggcgctgctcatgcgctggcgctgcccacgacgatggcgacgccagccgcgcgcggccgcgcggtgtgtggcctcgttgacgcggcgatcgacgcgctgccggcgttcgcgtacgcgcgccctgccacgtgtggcgcagaaagtagcagcaagtccggaagactcgcactctgcccggtatgcctggaggaggtcgaggccggcgagatggtccggcagctgcctgcgtgcggccacctgttccacgtggagtgcatcgacatgtggctgcactcgcatgcgtcgtgccctctgtgccgatgcgacgtctcgccgcaggcagttgctatgacggtcacggaagctgcagatccaccgcatggtgcgctgccggtgatggtgagctgctgagatcatactcacggccgggagtgcgactaaggtcgtcgatttttgctcatgtcctactatgagcccttggcttcacccaaaaatggagagattggatagctactaagctattatccttcgttcatcttctaaaattattattaatagtcagcaaaccaaaaccatcaagcacatgagagtggtgcgtcagagagatccg

SEQ ID NO: 1405 - protein, 201 aa, Zea mays subsp. mays
  misc_feature (1)..(201): Ceres Seq. ID no. 14305918
MPRQHRQRQPPSVRPNGCSLVCYGIVVATASLLLLAILAATVSIVKACALAGAVAVVFSAAGYVSRWCAAEDGAAHALALPTTMATPAARGRAVCGLVDAAIDALPAFAYARPATCGAESSSKSGRLALCPVCLEEVEAGEMVRQLPACGHLFHVECIDMWLHSHASCPLCRCDVSPQAVAMTVTEAADPPHGALPVMVSC

SEQ ID NO: 1406 - protein, 159 aa, Zea mays subsp. mays
  misc_feature (1)..(159): Ceres Seq. ID no. 14305919
MASSWPPRRCSCSPYSLPQSASSRRAPSPALSRWCSALRAMSLGGAQQRTALLMRWRCPRRWRRQPRAAARCVASLTRRSTRCRRSRTRALPRVAQKVAASPEDSHSARYAWRRSRPARWSGSCLRAATCSTWSASTCGCTRMRRALCADATSRRRQLL

SEQ ID NO: 1407 - protein, 119 aa, Zea mays subsp. mays
  misc_feature (1)..(119): Ceres Seq. ID no. 14305920
MSLGGAQQRTALLMRWRCPRRWRRQPRAAARCVASLTRRSTRCRRSRTRALPRVAQKVAASPEDSHSARYAWRRSRPARWSGSCLRAATCSTWSASTCGCTRMRRALCADATSRRRQLL

SEQ ID NO: 1408 - DNA, 717 bp, Zea mays subsp. mays
  misc_feature (1)..(717): Ceres Seq. ID no. 14306032
atcagaaaccgatccttgtccctagcagcgcgcgacacgcacgtacccagcgcgcgagaaatcttacatcgatcatcacctgcgagccagccggccgagcagcaccgatggcggcgtacatgcgcgtgacgcaccgcgacgaggaaggcaagaaggtgacggagaagatgccggtcccggaaacgcggcgcccggacacggccaagcacttcgagcgcaagctggaggagcagggcctccaccgcttcgagcggcacccggcgaacgcgccccggggcgtgggcatcggcgccccgccgcccaagtccgggcgcggcggcaagtacacctgggagggccccggcagcgtcgtcgaggaccagctcgacccggcgccgcccgccatcgaccccaacgaccccaactacgaggaggcggaggacgacgaggcggccagggaggtggtcgtcggggaggtggaggtcgctaaggtcgccgagggcagggacggcgtcgccagggtcgacgtcgcgccgggcctgctccaggaccagaagcagtaaaaagacttgtcttttctggatacgtctagagtctagatcgactcggtgtgtgtcagtgtgttcgagtttattccgtgcagagagtgcacgtcaactccgctttaattaatctgcttttgttaatatttctactgatcagtaatatgaaccagtggttgatatttggatggacctt

SEQ ID NO: 1409 - protein, 179 aa, Zea mays subsp. mays
  misc_feature (1)..(179): Ceres Seq. ID no. 14306033
QKPILVPSSARHARTQRARNLTSIITCEPAGRAAPMAAYMRVTHRDEEGKKVTEKMPVPETRRPDTAKHFERKLEEQGLHRFERHPANAPRGVGIGAPPPKSGRGGKYTWEGPGSVVEDQLDPAPPAIDPNDPNYEEAEDDEAAREVVVGEVEVAKVAEGRDGVARVDVAPGLLQDQKQ

SEQ ID NO: 1410 - protein, 144 aa, Zea mays subsp. mays
  misc_feature (1)..(144): Ceres Seq. ID no. 14306034
MAAYMRVTHRDEEGKKVTEKMPVPETRRPDTAKHFERKLEEQGLHRFERHPANAPRGVGIGAPPPKSGRGGKYTWEGPGSVVEDQLDPAPPAIDPNDPNYEEAEDDEAAREVVVGEVEVAKVAEGRDGVARVDVAPGLLQDQKQ

SEQ ID NO: 1411 - protein, 140 aa, Zea mays subsp. mays
  misc_feature (1)..(140): Ceres Seq. ID no. 14306035
MRVTHRDEEGKKVTEKMPVPETRRPDTAKHFERKLEEQGLHRFERHPANAPRGVGIGAPPPKSGRGGKYTWEGPGSVVEDQLDPAPPAIDPNDPNYEEAEDDEAAREVVVGEVEVAKVAEGRDGVARVDVAPGLLQDQKQ

SEQ ID NO: 1412 - DNA, 642 bp, Zea mays subsp. mays
  misc_feature (1)..(642): Ceres Seq. ID no. 14306056
aatgcctcaccacgccggttatgtgaacgggcactaagagagcttccaaagaagactggtgaacagttagttatcctatctcaggttctaatggatgatatcaatgtcggttatgaaaggcttgctgaactacaggtaaagaaggtaaatgatgtggaggttgaaaacctgaagcacctgtgcagcctcgtggaaggctgcaccgaagaaaacttaaggtttgacttggacgatgaaagagtcattgtcctgaagtaccagaacgcaaggcttgccacatcccgggtcctcaaacggcacaggataccgtcagccatatcgagcgaccttgtcgaagatcaagtaactgatggcgaggttgagacgtcatgcaccagctaatgctagactcttttttagacctaattgggagttccctgctgtagctcagctcaagaagcgagctgcattgttggcgaggcaagcgcacctgcctgcctgcctgcctggagtacatggtatcacttcctccctttagggcggctttagttttgacataaggaggagtgtctttagaaaataagattatgagctccggggcttttcagtctgaatgtaacggtaacataaccattctttactagaacatttattttttccgtc

SEQ ID NO: 1413 - protein, 126 aa, Zea mays subsp. mays
  misc_feature (1)..(126): Ceres Seq. ID no. 14306057
NASPRRLCERALRELPKKTGEQLVILSQVLMDDINVGYERLAELQVKKVNDVEVENLKHLCSLVEGCTEENLRFDLDDERVIVLKYQNARLATSRVLKRHRIPSAISSDLVEDQVTDGEVETSCTS

SEQ ID NO: 1414 - protein, 96 aa, Zea mays subsp. mays
  misc_feature (1)..(96): Ceres Seq. ID no. 14306058
MDDINVGYERLAELQVKKVNDVEVENLKHLCSLVEGCTEENLRFDLDDERVIVLKYQNARLATSRVLKRHRIPSAISSDLVEDQVTDGEVETSCTS

SEQ ID NO: 1415 - DNA, 735 bp, Zea mays subsp. mays
  misc_feature (1)..(735): Ceres Seq. ID no. 14306110
agtggtgcccacagctaaagccttgtgcaaaattatcattaagctgtcatcaatcatcatggctgccattacggcaggtctgctggtactcctcgctgctgccgtcgccgctccggcgcacgccacggactacacggtcggcgactcgtccgggtggagcagcggcgtggactacgccacctgggcgagcggcaagaccttcgctgctggggacaacctagtgttccagtacagcgcgatgcacacggtggtggaggtgagctccgcggactacggcgcgtgctcggccagcaactccatccagtcctacagcgaccagaacaccaagatcgcgctcacagcgcccggcacgcgctacttcatctgcggcaccccgggccactgcggcaacggcatgaagctcgccgtcacggtcgccgctgggaccgccaccaccaccccggcgtcatccccgcccgccgctgactcgcctccagagacagccacgccgtccgggtctacgcccacggcaacgacgtcgccgtcggcgcccacgacgaagcccacctcgagcagcactggcgctgcctgcggtggggaggcccggctcgctatgggcgttttggcctgggccgcgggcctcgccgggctcgccctgatgggttaggcaagaggcagtgctgtttccgttccatgcttttcctgttgcaggcttttgtggcccgttgtgtttaatctgaattcacgtctatggcc

SEQ ID NO: 1416 - protein, 214 aa, Zea mays subsp. mays
  misc_feature (1)..(214): Ceres Seq. ID no. 14306111
VVPTAKALCKIIIKLSSIIMAAITAGLLVLLAAAVAAPAHATDYTVGDSSGWSSGVDYATWASGKTFAAGDNLVFQYSAMHTVVEVSSADYGACSASNSIQSYSDQNTKIALTAPGTRYFICGTPGHCGNGMKLAVTVAAGTATTTPASSPPAADSPPETATPSGSTPTATTSPSAPTTKPTSSSTGAACGGEARLAMGVLAWAAGLAGLALMG

SEQ ID NO: 1417 - protein, 195 aa, Zea mays subsp. mays
  misc_feature (1)..(195): Ceres Seq. ID no. 14306112
MAAITAGLLVLLAAAVAAPAHATDYTVGDSSGWSSGVDYATWASGKTFAAGDNLVFQYSAMHTVVEVSSADYGACSASNSIQSYSDQNTKIALTAPGTRYFICGTPGHCGNGMKLAVTVAAGTATTTPASSPPAADSPPETATPSGSTPTATTSPSAPTTKPTSSSTGAACGGEARLAMGVLAWAAGLAGLALMG

SEQ ID NO: 1418 - protein, 135 aa, Zea mays subsp. mays
  misc_feature (1)..(135): Ceres Seq. ID no. 14306113
MHTVVEVSSADYGACSASNSIQSYSDQNTKIALTAPGTRYFICGTPGHCGNGMKLAVTVAAGTATTTPASSPPAADSPPETATPSGSTPTATTSPSAPTTKPTSSSTGAACGGEARLAMGVLAWAAGLAGLALMG

SEQ ID NO: 1419 - DNA, 903 bp, Zea mays subsp. mays
  misc_feature (1)..(903): Ceres Seq. ID no. 14306117
tcttccttttacttttttctgatatttctatcggctacgatctcatgcgttagcgagtgccgccccgcccgcgctatccactcgtctctccgtccccatggccacttatctcaacgcaccgccggcagccaccacgacgactgcaagctgccgccatgccttctccggtggcagcctccgtctactccggccgagccgaccgacgctgcacgtgacgtgccaagccgccgcctcctcccagcagccgtcgtccccgtccaggaggtcagcctgcctcctcggcatcgcgtgcgccgtcctgctccgcccacgtgccgcctccgccgccgaaaccgacgacgagccggccaacaacggctggtggctgaccgagttccccttgcccgtgcccaagatcgtcaacaaggagatcaacaacgcggagacgggcacgcgctccttcctcaagaacggcatctacatggcggacatcgggcccagcttcgcggcgcacgcgtaccggctgcgcagcacggccttcgacctgctggcgctggaggacctgctgggcaaggacgcctccaactacgtcaacaagtacctccgcctcaagtccaccttcatgtactacgacttcgacaagctcatctccgccgccgaagacaagccgcccttcgtcgacctcgccaaccgcctcttcgacagcttcgagacgctccaggaggccgtcacagccaaggacgacgccaggatcggcgaccgctacgccgagacaaagctcatcctccaggagctcatggccaagatggcctagcagaaccacaatttttcattcatatatcatgatgtgtaaatgaatacttgaaactcacaaggggtattgcagaattcccagagcagggaaatacaattatcatgtcagac

SEQ ID NO: 1420 - protein, 274 aa, Zea mays subsp. mays
  misc_feature (1)..(274): Ceres Seq. ID no. 14306118
SSFYFFLIFLSATISCVSECRPARAIHSSLRPHGHLSQRTAGSHHDDCKLPPCLLRWQPPSTPAEPTDAARDVPSRRLLPAAVVPVQEVSLPPRHRVRRPAPPTCRLRRRNRRRAGQQRLVADRVPLARAQDRQQGDQQRGDGHALLPQERHLHGGHRAQLRGARVPAAQHGLRPAGAGGPAGQGRLQLRQQVPPPQVHLHVLRLRQAHLRRRRQAALRRPRQPPLRQLRDAPGGRHSQGRRQDRRPLRRDKAHPPGAHGQDGLAEPQFFIHIS

SEQ ID NO: 1421 - protein, 231 aa, Zea mays subsp. mays
  misc_feature (1)..(231): Ceres Seq. ID no. 14306119
MATYLNAPPAATTTTASCRHAFSGGSLRLLRPSRPTLHVTCQAAASSQQPSSPSRRSACLLGIACAVLLRPRAASAAETDDEPANNGWWLTEFPLPVPKIVNKEINNAETGTRSFLKNGIYMADIGPSFAAHAYRLRSTAFDLLALEDLLGKDASNYVNKYLRLKSTFMYYDFDKLISAAEDKPPFVDLANRLFDSFETLQEAVTAKDDARIGDRYAETKLILQELMAKMA

SEQ ID NO: 1422 - DNA, 990 bp, Zea mays subsp. mays
  misc_feature (1)..(990): Ceres Seq. ID no. 14306167
tcatatagctgaagcgaagtcacagaaatactcgtatgaagttcttttcagaagcttgcagaaacttcttattgatactgccacttcagaatacctgtttactgatgatttctttggcgaagaatccatattccatgatatatttgcaggaccgattcaagttgttgatgaacatttcaatactgtactcctgaactgttatgatgcaattggcataatgcttatgatcagaataattcatcagcaccagctcatcatgtttaagcggcgaatcccatgtttggactcttacctagacaaagttaatatgtcactctggcctcgcttcaagatggtgttcgacttgcatttgaacagcttgcgaaatgcaaatattaaaacactttgggaggatgatgtccatccacactatgttacaaggagatatgctgaatttacagcttctctagttcatctcaatgttgagcatggggacggtcagcttgatctaaatttggagcgattgtggatggccattgaggatttgcttgttaagttggccaagatgttttccaaaccgaagctacaaactgtctttctgataaacaactatgatttaacaatttccattttgaaggaagctggaactgagggtgggaaagcacaacaacacttcgaggaggttcttaagagcaacatcgcaatatatgtggaagagttgctcctggagcagttcagtagtttgatcagattcgtcaaatctcgtccagcggatgagacggctgcaaattccgagaaagccagcattttcaaccccacagcccacccccattctccatttgttgattacatacctactcgatttattcatttaatctatctcgtccgtacatcattgttgcaaaatttctgtagaacccccaaaaaacatctcctgattcatgtgaagaatgactgtaaatttttacttccatgtttaccagacaactgaggaaaaaaggtatagattgc

SEQ ID NO: 1423 - protein, 322 aa, Zea mays subsp. mays
  misc_feature (1)..(322): Ceres Seq. ID no. 14306168
HIAEAKSQKYSYEVLFRSLQKLLIDTATSEYLFTDDFFGEESIFHDIFAGPIQVVDEHFNTVLLNCYDAIGIMLMIRIIHQHQLIMFKRRIPCLDSYLDKVNMSLWPRFKMVFDLHLNSLRNANIKTLWEDDVHPHYVTRRYAEFTASLVHLNVEHGDGQLDLNLERLWMAIEDLLVKLAKMFSKPKLQTVFLINNYDLTISILKEAGTEGGKAQQHFEEVLKSNIAIYVEELLLEQFSSLIRFVKSRPADETAANSEKASIFNPTAHPHSPFVDYIPTRFIHLIYLVRTSLLQNFCRTPKKHLLIHVKNDCKFLLPCLPDN

SEQ ID NO: 1424 - protein, 250 aa, Zea mays subsp. mays
  misc_feature (1)..(250): Ceres Seq. ID no. 14306169
MLMIRIIHQHQLIMFKRRIPCLDSYLDKVNMSLWPRFKMVFDLHLNSLRNANIKTLWEDDVHPHYVTRRYAEFTASLVHLNVEHGDGQLDLNLERLWMAIEDLLVKLAKMFSKPKLQTVFLINNYDLTISILKEAGTEGGKAQQHFEEVLKSNIAIYVEELLLEQFSSLIRFVKSRPADETAANSEKASIFNPTAHPHSPFVDYIPTRFIHLIYLVRTSLLQNFCRTPKKHLLIHVKNDCKFLLPCLPDN

SEQ ID NO: 1425 - protein, 248 aa, Zea mays subsp. mays
  misc_feature (1)..(248): Ceres Seq. ID no. 14306170
MIRIIHQHQLIMFKRRIPCLDSYLDKVNMSLWPRFKMVFDLHLNSLRNANIKTLWEDDVHPHYVTRRYAEFTASLVHLNVEHGDGQLDLNLERLWMAIEDLLVKLAKMFSKPKLQTVFLINNYDLTISILKEAGTEGGKAQQHFEEVLKSNIAIYVEELLLEQFSSLIRFVKSRPADETAANSEKASIFNPTAHPHSPFVDYIPTRFIHLIYLVRTSLLQNFCRTPKKHLLIHVKNDCKFLLPCLPDN

SEQ ID NO: 1426 - DNA, 671 bp, Zea mays subsp. mays
  misc_feature (1)..(671): Ceres Seq. ID no. 14306321
atcgtctttgctcgaggagtcgaggttcaggttccacggtgcggcgagagctcgcagccatggagagcaagagcccatggtcgctgcggctgctagtttgctgcgcggcaatggtggccgtcgcgcttctctcccagcaaggaggccaggccgcttgtttcgtgccgacgccgggtccagctccggcaccgccaggctcctccgcgacgaacacgaacgactcctccgctgctcctcggccagccaagcccagcgcattccaacccccaatggtgagtgggtactaccgatagtacaatcaaacacagtatcaagactgatccaatgaacgtgcctttgattttaccttggcaacaacgttcgattatctgcatgcagtacggtggtgtcacccccggcagcctccagccccacgagtgcggcggccggtgcgcggggcggtgctcggcgacggcgtaccagaagccgtgcctcttcttctgccgcaagtgctgcgcggcgtgcctgtgcgtgccgccgggcacctacggcaacaagaacacctgcccctgctacaacaactggaagaccaagctgggaggccccaagtgcccctagtagggcctccctctcggtctacttgatgagatcttctgttcaaaaaatcaaaaggaataagaatctgtttaacc

SEQ ID NO: 1427 - protein, 108 aa, Zea mays subsp. mays
  misc_feature (1)..(108): Ceres Seq. ID no. 14306322
SSLLEESRFRFHGAARARSHGEQEPMVAAAASLLRGNGGRRASLPARRPGRLFRADAGSSSGTARLLRDEHERLLRCSSASQAQRIPTPNGEWVLPIVQSNTVSRLIQ

SEQ ID NO: 1428 - protein, 96 aa, Zea mays subsp. mays
  misc_feature (1)..(96): Ceres Seq. ID no. 14306323
RLCSRSRGSGSTVRRELAAMESKSPWSLRLLVCCAAMVAVALLSQQGGQAACFVPTPGPAPAPPGSSATNTNDSSAAPRPAKPSAFQPPMVSGYYR

SEQ ID NO: 1429 - protein, 90 aa, Zea mays subsp. mays
  misc_feature (1)..(90): Ceres Seq. ID no. 14306324
MNVPLILPWQQRSIICMQYGGVTPGSLQPHECGGRCAGRCSATAYQKPCLFFCRKCCAACLCVPPGTYGNKNTCPCYNNWKTKLGGPKCP

SEQ ID NO: 1430 - DNA, 716 bp, Zea mays subsp. mays
  misc_feature (1)..(716): Ceres Seq. ID no. 14306385
acaccttgcacttagtctggacagaagagaagttgcaagaacagcttgatgtgcttgatcgacgatgggagatttcaaggcgaagggcattggcatccttcaagtctggagataaactagctgcttatcgttatgtgaggcagtctaaattattctcacaaagccggagcagatgcacacagttgttggaaaggattgaagaagtcatcagcctaattgctagtgctgaatcaaataagaaggtttatgaggcaatacaaattggtatcctggcaatgaaggacaacactgtcagcatagatgaggttaacatccacatgaaggagattgatgagcttgttgctgcacaaagagaagttgatgctgcccttgtaccactccagtcgttagatgatgaaggagatattgatgaagagttcagcaagcttgaagcagaattgcaggatgacgtccctcatattcatgttcaagaaccaatggcaccttccaacgaggaatcacctgatgaagtggttgaatcattgagccataacatgtcaagaattagactggagcccatctaaatgctccattttacgtttaatcaatttgacctgtacatagtgtgatctagtcaaatcatctagtcccaacaatgtgtcttatgtttcttgttacaccatccttataaaagggcaattctgttgcagatattcctcaatgttgcctgctgtttt

SEQ ID NO: 1431 - protein, 186 aa, Zea mays subsp. mays
  misc_feature (1)..(186): Ceres Seq. ID no. 14306386
TLHLVWTEEKLQEQLDVLDRRWEISRRRALASFKSGDKLAAYRYVRQSKLFSQSRSRCTQLLERIEEVISLIASAESNKKVYEAIQIGILAMKDNTVSIDEVNIHMKEIDELVAAQREVDAALVPLQSLDDEGDIDEEFSKLEAELQDDVPHIHVQEPMAPSNEESPDEVVESLSHNMSRIRLEPI

SEQ ID NO: 1432 - protein, 95 aa, Zea mays subsp. mays
  misc_feature (1)..(95): Ceres Seq. ID no. 14306387
MKDNTVSIDEVNIHMKEIDELVAAQREVDAALVPLQSLDDEGDIDEEFSKLEAELQDDVPHIHVQEPMAPSNEESPDEVVESLSHNMSRIRLEPI

SEQ ID NO: 1433 - DNA, 2181 bp, Zea mays subsp. mays
  misc_feature (1)..(2181): Ceres Seq. ID no. 14307940
tctcccatcacagtgcgccacccgcacccaccaacgaggcaacgaaacccagtcggaagctagaccggcgacaagtgcagcgctcgccgcgatggattctgactacggcgtgccgcgcgagctgtcggaggtgcagaagaagcgcgcgctctaccagcccgaggtgcccccctgcctccaggggactactgtcagggtggagtatggtgacgccgcaattgcagctgaccaggcaggcgctcatgtgatcagccatgcgttccctcacacctatgggcagccccttgcacatttcctcaggaagacggctgttgtccttgatgctaaggtcatatctgaacacccggtggtcagggttggcattgtcttctgtggcaggcaatccccaggaggccacaatgttgtttggggactctatgaggctatcaaggcccacaaccaaaacagcaaactcattggtttcctcggtggatcagatggtttgctagcgcagagaacattggagatcactaatgaagttcttgcttcatataaaaatcaaggtggatatgacatgcttggtcggacaaaggatcagattaggacgacagagcaggtcaatggtgcaatggctagttgccaggctttgaagttggatgctctggttataattggaggtgtcacttccaacactgacgctgctcaacttgctgagacttttgctgaggcaaagtgtgcaacgaaggttgtaggtgttcctgtaactttgaatggggacctcaagaaccagtttgttgagactactgttggctttgacaccatatgcaaggtgaatgcacaacttatcagcaatgtctgcactgatgctctatctgctgagaagtattactacttcattcgtttgatgggacgcaaggcttctcatgtggcattggaatgtgctcttcaatcacacccgaacatggtcatcctaggagaggaggtggctgcttccaaacttacaatttttgatattacgaagcagatttgtgatgcggttcaggcaagggcagaaaaagacaagaaccatggggttgttcttattcctgagggtcttgtggagagtattcctgaactatatgctctgcttcaggaaatccatggcctccatggcaaaggtgtttctgttgagaatatctcttctcagctttcaccctgggcatctgcactctttgagtttttgcccccttttatcaggaagcagctacttctccatcctgaatctgatgattcagctcaactttctcagattgagacagagaagcttctagcccagttagttgagactgagatgaacagacgtttgaaggagggcacttacaaaggaaagaagtttaatgcaatctgtcacttctttggctaccaagctaggggagcactgccttccaagtttgactgcgattatgcctatgtcttggggcatgtgtgctaccacatcatagctgccggtttgaacggttacatggccacagtgacaaatgttaagagtccagtgaacaagtggcgatgtggtgcggctcctatttcgtctatgatgactgtgcagcgatggtcgcgtggcccttcagccacccaaatcggaaagcctgctgttcacatggctagcgttgacttgaaaggaaaagcatacgatgtattgaggcagaattcttccaggtttttgttggaagatgtctacaggaacccaggtccgctccagtttgaaggaccaggtgccgattcaaagcctatctcactgtgcgtcgaggatcaagactacatgggcaggataaagaaattgcaggaatacctggagaaggtgaagagcattgtgaagcctgggtgctcgcaggatgtccttaaggcggcgctgagcgccatgtcttctgtgacggagacactgaacatcatgacctcatcgtccaccggccagactgcactgtgactcgtttggtgccgttttgtggtgcggatcagaatccccactttttccatggtgtcgattgacaaagttaggagcagtaatcctggtgccacacgggtcattcttttgtagcttcttgggagagttctgtcagttttgaattcgatagtttattatggagaggcttgttggtgagtttgagctcgaataatttttgaaacagacggattgcggaatcttaataaaccaaaatttgtgac

SEQ ID NO: 1434 - protein, 646 aa, Zea mays subsp. mays
  misc_feature (1)..(646): Ceres Seq. ID no. 14307941
LPSQCATRTHQRGNETQSEARPATSAALAAMDSDYGVPRELSEVQKKRALYQPEVPPCLQGTTVRVEYGDAAIAADQAGAHVISHAFPHTYGQPLAHFLRKTAVVLDAKVISEHPVVRVGIVFCGRQSPGGHNVVWGLYEAIKAHNQNSKLIGFLGGSDGLLAQRTLEITNEVLASYKNQGGYDMLGRTKDQIRTTEQVNGAMASCQALKLDALVIIGGVTSNTDAAQLAETFAEAKCATKVVGVPVTLNGDLKNQFVETTVGFDTICKVNAQLISNVCTDALSAEKYYYFIRLMGRKASHVALECALQSHPNMVILGEEVAASKLTIFDITKQICDAVQARAEKDKNHGVVLIPEGLVESIPELYALLQEIHGLHGKGVSVENISSQLSPWASALFEFLPPFIRKQLLLHPESDDSAQLSQIETEKLLAQLVETEMNRRLKEGTYKGKKFNAICHFFGYQARGALPSKFDCDYAYVLGHVCYHIIAAGLNGYMATVTNVKSPVNKWRCGAAPISSMMTVQRWSRGPSATQIGKPAVHMASVDLKGKAYDVLRQNSSRFLLEDVYRNPGPLQFEGPGADSKPISLCVEDQDYMGRIKKLQEYLEKVKSIVKPGCSQDVLKAALSAMSSVTETLNIMTSSSTGQTAL

SEQ ID NO: 1435 - protein, 616 aa, Zea mays subsp. mays
  misc_feature (1)..(616): Ceres Seq. ID no. 14307942
MDSDYGVPRELSEVQKKRALYQPEVPPCLQGTTVRVEYGDAAIAADQAGAHVISHAFPHTYGQPLAHFLRKTAVVLDAKVISEHPVVRVGIVFCGRQSPGGHNVVWGLYEAIKAHNQNSKLIGFLGGSDGLLAQRTLEITNEVLASYKNQGGYDMLGRTKDQIRTTEQVNGAMASCQALKLDALVIIGGVTSNTDAAQLAETFAEAKCATKVVGVPVTLNGDLKNQFVETTVGFDTICKVNAQLISNVCTDALSAEKYYYFIRLMGRKASHVALECALQSHPNMVILGEEVAASKLTIFDITKQICDAVQARAEKDKNHGVVLIPEGLVESIPELYALLQEIHGLHGKGVSVENISSQLSPWASALFEFLPPFIRKQLLLHPESDDSAQLSQIETEKLLAQLVETEMNRRLKEGTYKGKKFNAICHFFGYQARGALPSKFDCDYAYVLGHVCYHIIAAGLNGYMATVTNVKSPVNKWRCGAAPISSMMTVQRWSRGPSATQIGKPAVHMASVDLKGKAYDVLRQNSSRFLLEDVYRNPGPLQFEGPGADSKPISLCVEDQDYMGRIKKLQEYLEKVKSIVKPGCSQDVLKAALSAMSSVTETLNIMTSSSTGQTAL

SEQ ID NO: 1436 - protein, 462 aa, Zea mays subsp. mays
  misc_feature (1)..(462): Ceres Seq. ID no. 14307943
MLGRTKDQIRTTEQVNGAMASCQALKLDALVIIGGVTSNTDAAQLAETFAEAKCATKVVGVPVTLNGDLKNQFVETTVGFDTICKVNAQLISNVCTDALSAEKYYYFIRLMGRKASHVALECALQSHPNMVILGEEVAASKLTIFDITKQICDAVQARAEKDKNHGVVLIPEGLVESIPELYALLQEIHGLHGKGVSVENISSQLSPWASALFEFLPPFIRKQLLLHPESDDSAQLSQIETEKLLAQLVETEMNRRLKEGTYKGKKFNAICHFFGYQARGALPSKFDCDYAYVLGHVCYHIIAAGLNGYMATVTNVKSPVNKWRCGAAPISSMMTVQRWSRGPSATQIGKPAVHMASVDLKGKAYDVLRQNSSRFLLEDVYRNPGPLQFEGPGADSKPISLCVEDQDYMGRIKKLQEYLEKVKSIVKPGCSQDVLKAALSAMSSVTETLNIMTSSSTGQTAL

SEQ ID NO: 1437 - DNA, 1691 bp, Zea mays subsp. mays
  misc_feature (1)..(1691): Ceres Seq. ID no. 14308552
gatatttaggttaagggacaagcttgagatggcattggctttagctgaggaaaatgaagctgctgctattgaagttcgtcaaactgcagagattagtaaaatttatgctgaggaaaaagaagaggaggttaagattcttgaacgatctgtcgaggaacttgaaggaacagtaactgttcttgaggaagaggtatgcaaccttaaagaggaagtaaggaactatcaaatacataaacaatctgaagcccaatttcaagctattaatgacatgcttgctgaagaaaaagcatcaaaatgtgatgctgctgaggaatcgtgtcaagcgaaatgtcatctagaaaagagattgcaagctgagattcttgcacatcaaggtgtcagaaagaagattgaaggtctcaaattggaagcaaagcgtaaagatgatgagattggacaatacaaagagcatattgctgagttggtcctgcattcagaagcacagtccttgttgtttcaggagaagtacaatgaaatggaacacatggtttctagacagaggtttggtccgcatgaatcttattctgagactgtccccaagactgaaaagccttcagggcgagcaagaggatccagctcccctttccggtgcatatctagcattattcaacaaatgaactctgagagagatcaagaaatcttggtggcacgccaacgaattgaagaactagaaggtttggttagttgcaaacagaaagagatatgcttgctaacatcaagactagctgctgtggataccatgacgcatgatattataagagaactacttggtgtcaaactagacatgacaaactatgctaatttggttgaccaagaagagctgcaaaagttgctcatagcatcccagcaacagattgaacaatcaaaggcgaaggatacagagctcgaagcgctgaaggaacaacttggccatcttattctggaaagggacagcttgcttgatgacatggaccaaagaaagacggacctattggaggctcaactgctcgttgaacagctcgagcaacgggagcagatgctagaagcccagattgaaatgttgcagctggagaaagacagccttcagcaaaagaccttggagatggacgagacaatcgagcttctagccagatcaaaccaaccagatataaacccacgaatgggcgacaaccaccatcgcggcagcagtgagttcagcaggcggttagctcagtccgacatgctcctctcccacgcgaggcatgagcattctcgcaggcacgcggccggaagctcgaggacgcaccacggccggcaccgatgaagctcggggatgcttgctagtagaatgctggtgcgtcagccgccagacaccgcttgtgtttgtagcggcgcggcttctctggccgggattgtacagaagctgcaagacccgaatggcagtggccagaagaagaaacttcccacgtctgtaagatctgcgcgcctgtaaatctgatagtgcaatgtacgcgttgttgccatttgggccgttgtatgttcttccgcgaggcttttcagcgagatctccctgaaagaagataaacagctgaaagtgacaatcccacagatttgtttctactttaccgagggttagctagggttttgtgcaatacgttgacccttgtaacgaggcgcagatatttgcatgctcc

SEQ ID NO: 1438 - protein, 439 aa, Zea mays subsp. mays
  misc_feature (1)..(439): Ceres Seq. ID no. 14308553
IFRLRDKLEMALALAEENEAAAIEVRQTAEISKIYAEEKEEEVKILERSVEELEGTVTVLEEEVCNLKEEVRNYQIHKQSEAQFQAINDMLAEEKASKCDAAEESCQAKCHLEKRLQAEILAHQGVRKKIEGLKLEAKRKDDEIGQYKEHIAELVLHSEAQSLLFQEKYNEMEHMVSRQRFGPHESYSETVPKTEKPSGRARGSSSPFRCISSIIQQMNSERDQEILVARQRIEELEGLVSCKQKEICLLTSRLAAVDTMTHDIIRELLGVKLDMTNYANLVDQEELQKLLIASQQQIEQSKAKDTELEALKEQLGHLILERDSLLDDMDQRKTDLLEAQLLVEQLEQREQMLEAQIEMLQLEKDSLQQKTLEMDETIELLARSNQPDINPRMGDNHHRGSSEFSRRLAQSDMLLSHARHEHSRRHAAGSSRTHHGRHR

SEQ ID NO: 1439 - protein, 430 aa, Zea mays subsp. mays
  misc_feature (1)..(430): Ceres Seq. ID no. 14308554
MALALAEENEAAAIEVRQTAEISKIYAEEKEEEVKILERSVEELEGTVTVLEEEVCNLKEEVRNYQIHKQSEAQFQAINDMLAEEKASKCDAAEESCQAKCHLEKRLQAEILAHQGVRKKIEGLKLEAKRKDDEIGQYKEHIAELVLHSEAQSLLFQEKYNEMEHMVSRQRFGPHESYSETVPKTEKPSGRARGSSSPFRCISSIIQQMNSERDQEILVARQRIEELEGLVSCKQKEICLLTSRLAAVDTMTHDIIRELLGVKLDMTNYANLVDQEELQKLLIASQQQIEQSKAKDTELEALKEQLGHLILERDSLLDDMDQRKTDLLEAQLLVEQLEQREQMLEAQIEMLQLEKDSLQQKTLEMDETIELLARSNQPDINPRMGDNHHRGSSEFSRRLAQSDMLLSHARHEHSRRHAAGSSRTHHGRHR

SEQ ID NO: 1440 - protein, 350 aa, Zea mays subsp. mays
  misc_feature (1)..(350): Ceres Seq. ID no. 14308555
MLAEEKASKCDAAEESCQAKCHLEKRLQAEILAHQGVRKKIEGLKLEAKRKDDEIGQYKEHIAELVLHSEAQSLLFQEKYNEMEHMVSRQRFGPHESYSETVPKTEKPSGRARGSSSPFRCISSIIQQMNSERDQEILVARQRIEELEGLVSCKQKEICLLTSRLAAVDTMTHDIIRELLGVKLDMTNYANLVDQEELQKLLIASQQQIEQSKAKDTELEALKEQLGHLILERDSLLDDMDQRKTDLLEAQLLVEQLEQREQMLEAQIEMLQLEKDSLQQKTLEMDETIELLARSNQPDINPRMGDNHHRGSSEFSRRLAQSDMLLSHARHEHSRRHAAGSSRTHHGRHR

SEQ ID NO: 1441 - DNA, 3495 bp, Zea mays subsp. mays
  misc_feature (1)..(3495): Ceres Seq. ID no. 14308925
tcgtcgtttgtgccgagtgggttggttatcgagagcgtaagtggttcatctgactagactattttagctgtccgatcgaaagcggtgatggccgagtgcccgctgtgcgggacggcgtcgcgccgaattcatagccgatacgccagacaagtcgcggacctgccctgcgcgggtaggcagatacgtctgtgggtgatcgcgcgacggttcctgtgcgagattccgcattgtcgtcggagaattttcgccgagcggttcggtcaggatgtcgtcccggtgcagtcacgccgaacagccaggttggaatgcatcgtcgtcgccggcattgatgattgggccttccggaacaaccattgctacggaacaatcgtttgcgatctggagcgacggcggatcgtgaggttgctgctcaatcgcgagattgcaacggtgcaggcttggctatccgaccatcccgggatcaaaataagtatcgcgcgatcgtggcggcggctatggcgaggctgccgcaaaggcgctgcctgaggtcatccaggttgccgatcgctggcacctgatggaaaacgcgagcgcagccttcctcggtgccgtgcgccggtcgatgcgcgtgatctgtacggcaatcggcgctacgatgatcaatccagagttgctcacctgtgcggaacgactgcaatataacggctatctgcggcgcgaggagaccaacgccgcgatcatggcgctcgtcaaggatggcgtgccgcttaaggagatcgtccgtcgaaccgggtacagccgtaaactcactcgtcaggtcagtcgaggcgagagcacggatatcttccgaacgcggcagagcacgctcaacgcgcacttacccttcatcgatgcccaatgggctacgggctgccgtaacggcgcggagctctggcgtcgtctgcaggctcacggcttccgaggctagttacgtgtcgtcagcgaatggacgacacggcggcgacgtgcggagaaggcaaccaacaaacaactgcaaaaggtgccttctgcgcgaacgatcgtacgattgacaaggaagggcaggcgcaagggttcgaccccaagagattgatggtcggcacaagcgcctttcactctcgaaaatgaagctgttgtttcgggcgggagatcgaagcgactgcgcgatcgacgcggcaaaagcgccagactgatcagacgcgacgtagctctgtgcttcgcgatgagaagctttttccgccccctcaacccggttgctatcagcattgagccacgaaggaagctttcaacataggcaagggagtgataagcctacattgcgaaattccctgacagctggcccagcatcggtctcgatgacgaggaattgcgtgtttaattccgcaacggcatgacaagggcatgggacatgggcttaggttggtgccgaacccaagagtgatttcgacccccttcggacaatatgtttgggaaggacaagcagattctggttcttataccattagagaggaaaaagacccggagcagctcattcctaggggaactcgccttactctctatctcaagtgtgatgataagggttttgctcaccctgagaggattcaaaaacttctaaagacttactctcagtttgtttcctttcccatttacacatgggaagagaaaggcttcacaaaagaggtcgaggttgatgaagatccagcggaagcccaaaaaaaaggtgatgattcagcggaaaccaaaactgagcctaagaaaaagaccaaaactgttattgagaagtattgggattgggagctttcaaatgagacacaacctatttggcttcggaaccccaaagaggtttcaactgaggaatacaatgattttttcaagaaaaccttcaatgagtacttgggccctttggcatcatcacacttcactacagagggtgaggtagaatttaggtcaattctttttgttcctgctacaaggaaggaagatgtaactgctgatagtaggaagaccaagaatatcagactatatgttaagcgtgtattcatatcagatgactttgatggagaattgttcccaagatatttgagctttgtgaagggtgttgttgactcaaatgaccttccattgaatgtttctcgtgagaatcttcaagaaagtcgaattgttcgtataatgagaaaaaggctggtgcggaaagcctttgatatgatacttggcatttcttgcagtgaaaatagagatgattatgaaaggttctgggagaactttggaaaatttttaaagctgggtgccatggaagataaggaaaatcacaagagaattgctcctttgttgcgcttcttctcttctcaaagcaacaatgaattaattagcttggatgaatatgtggaaaacatgaaacctgagcagaaggacatttacttcattgctgcagatagtatgagcagtgccataaatgctcctttcttagagagactaacagaaaaagactatgaggttctacttttggtcgaccctatggatgaattggctatccagaatctgagctcctacaaggataagaaatttgtggacattagcaaagaagatttggatttaggtgataacaatgaggaaagagagaaggagataaagcaggagttcagccaagcctgtgactggataaagaatcgcttgggtgacaaggttgcacgtgttgacatatctaatcgtctcaggtcatcgccatgtgttcttgttgcagcgaagtttggttggtcagccaatatggaaaggctgatgagagcacagtctatgggtgatacagcctctttggatttcatgcgttcgaggaaagtttttgaaataaacccagagcatgagataatcaaggccttgaatgtggcatgcaggaataaccctgatgatcctgaagccctaaaggctctggatgttctctttgaaactgctatgatttcaagtggcttttcgcctgacaacccggcggagctcagtgggaagatttacgagatgatgacctctgccatcgctggcaaatggtcctcacagccacaggcgcaggcgcaacctgccgacccaatcccacagcacgacgcacctgtgaggtcagacgagccgcttgaagctcaagtggtggaggcagagcccgttgaggctggtcagcagaagtgagggcctgttcgtgcagaatctttgtacggagtagttttgaaccgttgtgcacaacatggctgagaatttcgagtatatgttttgacggcctgtatctgtgtcatgagctgttactggtaatgtaagacgtattggttagaaattagatgattaggaataattgggtagctggactacttgaactggttcctgaaccatcaggagggttatggactcatggttagcttctactgcgtccttgggggcagtagtaattttgaagccaattcgttgttttgtaggctctatttctgtttggctttaatacttatcggtttctactgtttctac

SEQ ID NO: 1442 - protein, 588 aa, Zea mays subsp. mays
  misc_feature (1)..(588): Ceres Seq. ID no. 14308926
MGHGLRLVPNPRVISTPFGQYVWEGQADSGSYTIREEKDPEQLIPRGTRLTLYLKCDDKGFAHPERIQKLLKTYSQFVSFPIYTWEEKGFTKEVEVDEDPAEAQKKGDDSAETKTEPKKKTKTVIEKYWDWELSNETQPIWLRNPKEVSTEEYNDFFKKTFNEYLGPLASSHFTTEGEVEFRSILFVPATRKEDVTADSRKTKNIRLYVKRVFISDDFDGELFPRYLSFVKGVVDSNDLPLNVSRENLQESRIVRIMRKRLVRKAFDMILGISCSENRDDYERFWENFGKFLKLGAMEDKENHKRIAPLLRFFSSQSNNELISLDEYVENMKPEQKDIYFIAADSMSSAINAPFLERLTEKDYEVLLLVDPMDELAIQNLSSYKDKKFVDISKEDLDLGDNNEEREKEIKQEFSQACDWIKNRLGDKVARVDISNRLRSSPCVLVAAKFGWSANMERLMRAQSMGDTASLDFMRSRKVFEINPEHEIIKALNVACRNNPDDPEALKALDVLFETAMISSGFSPDNPAELSGKIYEMMTSAIAGKWSSQPQAQAQPADPIPQHDAPVRSDEPLEAQVVEAEPVEAGQQK

SEQ ID NO: 1443 - protein, 332 aa, Zea mays subsp. mays
  misc_feature (1)..(332): Ceres Seq. ID no. 14308927
MRKRLVRKAFDMILGISCSENRDDYERFWENFGKFLKLGAMEDKENHKRIAPLLRFFSSQSNNELISLDEYVENMKPEQKDIYFIAADSMSSAINAPFLERLTEKDYEVLLLVDPMDELAIQNLSSYKDKKFVDISKEDLDLGDNNEEREKEIKQEFSQACDWIKNRLGDKVARVDISNRLRSSPCVLVAAKFGWSANMERLMRAQSMGDTASLDFMRSRKVFEINPEHEIIKALNVACRNNPDDPEALKALDVLFETAMISSGFSPDNPAELSGKIYEMMTSAIAGKWSSQPQAQAQPADPIPQHDAPVRSDEPLEAQVVEAEPVEAGQQK

SEQ ID NO: 1444 - protein, 321 aa, Zea mays subsp. mays
  misc_feature (1)..(321): Ceres Seq. ID no. 14308928
MILGISCSENRDDYERFWENFGKFLKLGAMEDKENHKRIAPLLRFFSSQSNNELISLDEYVENMKPEQKDIYFIAADSMSSAINAPFLERLTEKDYEVLLLVDPMDELAIQNLSSYKDKKFVDISKEDLDLGDNNEEREKEIKQEFSQACDWIKNRLGDKVARVDISNRLRSSPCVLVAAKFGWSANMERLMRAQSMGDTASLDFMRSRKVFEINPEHEIIKALNVACRNNPDDPEALKALDVLFETAMISSGFSPDNPAELSGKIYEMMTSAIAGKWSSQPQAQAQPADPIPQHDAPVRSDEPLEAQVVEAEPVEAGQQK

SEQ ID NO: 1445 - DNA, 1885 bp, Zea mays subsp. mays
  misc_feature (1)..(1885): Ceres Seq. ID no. 14308932
atcctaatatgcatacaaacaatgaggcccagttatacggactggtggagcctaatgtacatccgcaagtattagcttcctcttctcaggggtacccttcagaaaacccggaagcagataatgctgtgcaagtcttcaggatgccagaatctaatgttcactcacaagttctcccttccacatctgaggtagcactgtattgttattttaaattgctctcctgcagtcccttttatattattattacttgtaatcatttggatatattcattaggcagcttaacttataacaatacatcgtagtctactagtcttggcccatcatcatgttgaccagggctgctagtgagtccagttttaatccacttagtttccacatttaataatctctacgtggttctcttgttattgcattattgcttctaaaatggttctgcttcaaggagttcaacacggggcactttgctggtttataattgaggaaaattagtctgctctgatataaaatttgagaatccagtcttggttttttgtgttttgtctcaggttgaacgatgactgacaattagactgccacaatttctgtcttctgttttcctagaacactcttctattcactgttgatcacagtataaatacataacctgttggccggctaagtcactcaggtagcaaaagtacatgaggctatctaccaattctaccaactaactgggccaaaccaccaaactacccatagagccaaaacctacaatttctgctactgttctacatacagtcagaggtgaaaacaaaggagcaggccctgtttcctgtacttctatggcaaaagaaaaagagtggatagtagctgattatctaacatattcttgcagtccaagaaaaaatgaagacaaatttgcttcctctttgtgtaacgcttagtgaatatcatgattaaattgtgacatgtgttgcaggctttaaatccacagattgtgagcaacagccctgtttcgatctcgtcacagcagcagcagcatatctcccagcaacaagccgcagcacagatgtaccctcaaatgcatgtgcagcattttccaaatttcatgccatatcgacaactctattctccagtttaccccatgcctatgccaaactattcgccaaatgtcccttatccatcaaatggaaataattatcttcagatgcccagtggaggttcacatttaactgcaggaagcgtgaagtatggagtttcacagtttaaaccactcccatctggtaacccttctggctatggaaattacactcatccagctggttttacaatgggttctcctggtgttattggagccacagttggtgttgatgatgtcaataggatgaagtacaaggacaacatttatgcctcaactccacaggtcgagacatctgacatctggattcagcaagctagagagatgccacctatgcaggttccttcatattacaacataccaggtcaagcaacaccaggtgcttttgtgccaaatccagcaaatgcatctttcaatgctacagctcaatcctctcatgtgcagttcccaggcttgtaccatcctcagcaacctccctctattgtaagtccgcaccccatggtgcatcaacaggtgccatcggccattggtcccaatgttggggttggggtggcagctccaggcccgcaagttggagcttatcagcaaccacagcttggccatatgaattggagacccagcttttgaagaaggtttcttaattatctgtaattagggggggtcacaagagcctttatgtaacaacagtaggctccttttaacaggaagcacctttgtttttagtgcagctctttctgatctatttaagctataacgaggtttttgtt

SEQ ID NO: 1446 - protein, 231 aa, Zea mays subsp. mays
  misc_feature (1)..(231): Ceres Seq. ID no. 14308933
MYPQMHVQHFPNFMPYRQLYSPVYPMPMPNYSPNVPYPSNGNNYLQMPSGGSHLTAGSVKYGVSQFKPLPSGNPSGYGNYTHPAGFTMGSPGVIGATVGVDDVNRMKYKDNIYASTPQVETSDIWIQQAREMPPMQVPSYYNIPGQATPGAFVPNPANASFNATAQSSHVQFPGLYHPQQPPSIVSPHPMVHQQVPSAIGPNVGVGVAAPGPQVGAYQQPQLGHMNWRPSF

SEQ ID NO: 1447 - protein, 227 aa, Zea mays subsp. mays
  misc_feature (1)..(227): Ceres Seq. ID no. 14308934
MHVQHFPNFMPYRQLYSPVYPMPMPNYSPNVPYPSNGNNYLQMPSGGSHLTAGSVKYGVSQFKPLPSGNPSGYGNYTHPAGFTMGSPGVIGATVGVDDVNRMKYKDNIYASTPQVETSDIWIQQAREMPPMQVPSYYNIPGQATPGAFVPNPANASFNATAQSSHVQFPGLYHPQQPPSIVSPHPMVHQQVPSAIGPNVGVGVAAPGPQVGAYQQPQLGHMNWRPSF

SEQ ID NO: 1448 - protein, 218 aa, Zea mays subsp. mays
  misc_feature (1)..(218): Ceres Seq. ID no. 14308935
MPYRQLYSPVYPMPMPNYSPNVPYPSNGNNYLQMPSGGSHLTAGSVKYGVSQFKPLPSGNPSGYGNYTHPAGFTMGSPGVIGATVGVDDVNRMKYKDNIYASTPQVETSDIWIQQAREMPPMQVPSYYNIPGQATPGAFVPNPANASFNATAQSSHVQFPGLYHPQQPPSIVSPHPMVHQQVPSAIGPNVGVGVAAPGPQVGAYQQPQLGHMNWRPSF

SEQ ID NO: 1449 - DNA, 670 bp, Zea mays subsp. mays
  misc_feature (1)..(670): Ceres Seq. ID no. 14308968
ttttttctccaatcggatccagtttcaagaacagtagaatcggacggaatctctcctacgccgcgatgtctctccgccgctctatcctcggtctccaccgccaaacccacaacctctccctctcaaaggcgtcacctttctcgatgagtaacatctcctccccgtccgccgccgtgagaaacccaatcggaagagaaatctcttcgatcccattttccctaacccagaaactgaaaccggactccgggaatcgttctcttgggcagtctgatctcgccaaattcgctcgtctcccgtcgtctcgagggtacagcaacgcatctctcgtacggaagatccctgttctgtttcacataaatgcagggatggaagaagttttggcggattacgttcaccaggagatgaccaggaatctgatggtgatgtctctgggcgtgttccagatcatcgttatcaaagatgtcatcgtgtttcttttcttctgagcaaggaatcatcttttgggggggggggggctcatgaactcgatcatctagtgagataaagtctcttcttgttattatcttttaatgaataatgaacattggtgcaatggcatctttaaccttccaagtttgctctgtttgattcagtttgtgtaaggctttaagtggaattctaagtgtgtttg

SEQ ID NO: 1450 - protein, 160 aa, Zea mays subsp. mays
  misc_feature (1)..(160): Ceres Seq. ID no. 14308969
FSPIGSSFKNSRIGRNLSYAAMSLRRSILGLHRQTHNLSLSKASPFSMSNISSPSAAVRNPIGREISSIPFSLTQKLKPDSGNRSLGQSDLAKFARLPSSRGYSNASLVRKIPVLFHINAGMEEVLADYVHQEMTRNLMVMSLGVFQIIVIKDVIVFLFF

SEQ ID NO: 1451 - protein, 139 aa, Zea mays subsp. mays
  misc_feature (1)..(139): Ceres Seq. ID no. 14308970
MSLRRSILGLHRQTHNLSLSKASPFSMSNISSPSAAVRNPIGREISSIPFSLTQKLKPDSGNRSLGQSDLAKFARLPSSRGYSNASLVRKIPVLFHINAGMEEVLADYVHQEMTRNLMVMSLGVFQIIVIKDVIVFLFF

SEQ ID NO: 1452 - protein, 113 aa, Zea mays subsp. mays
  misc_feature (1)..(113): Ceres Seq. ID no. 14308971
MSNISSPSAAVRNPIGREISSIPFSLTQKLKPDSGNRSLGQSDLAKFARLPSSRGYSNASLVRKIPVLFHINAGMEEVLADYVHQEMTRNLMVMSLGVFQIIVIKDVIVFLFF

SEQ ID NO: 1453 - DNA, 803 bp, Zea mays subsp. mays
  misc_feature (1)..(803): Ceres Seq. ID no. 14308995
aagaaaaagcaagcccatcgtcctaccgtattagcaatggaggcagcagcaggagaggggccgacgacgacgatgaagacggtgtgcgtgaccggcgcggggggtttcgtggcctcgtggctcgtcgagcgcctcctcgccggcggacgatacaagatccacggcaccgtccgcgatcccggcgacgccaagaacgcgcacctgctggggctggacggcgccgcggagcggctgcggctgttcaaggccgacctgctcgacttcggcagcctggcggcggccattgcaggctgtgacggcgtcttccacgtggcctgccccgtccccgactataccctcaccgaccccgagaccgagctgctggctcctgccgtgacgggcaccatgaacatcctcagggcgtgctccgacgcccatgtcaggagggtcgtcgtggtctcctctctctcggctgtcatgataaaccctgactggggcgagtgcaaggtcatggacgaaggttgctggtctgatgtcgacctctgcagaactactaagcgaaatctcatcttttcctacatgactctaagggcatgtacaatgctgaaggcaactaccatctccaagtgttttgaggaatgcagaggcaagactgtgagaaaggatgttatgtactatatttaattcatacacaatctttatcactatgcatcgatcaagaatatattggatatttgtagccattttcttgcatgtttatggtggatactaaaataaggcatgtgaatttcatgtagaatcataaatataatttatatttatat

SEQ ID NO: 1454 - protein, 220 aa, Zea mays subsp. mays
  misc_feature (1)..(220): Ceres Seq. ID no. 14308996
KKKQAHRPTVLAMEAAAGEGPTTTMKTVCVTGAGGFVASWLVERLLAGGRYKIHGTVRDPGDAKNAHLLGLDGAAERLRLFKADLLDFGSLAAAIAGCDGVFHVACPVPDYTLTDPETELLAPAVTGTMNILRACSDAHVRRVVVVSSLSAVMINPDWGECKVMDEGCWSDVDLCRTTKRNLIFSYMTLRACTMLKATTISKCFEECRGKTVRKDVMYYI

SEQ ID NO: 1455 - protein, 208 aa, Zea mays subsp. mays
  misc_feature (1)..(208): Ceres Seq. ID no. 14308997
MEAAAGEGPTTTMKTVCVTGAGGFVASWLVERLLAGGRYKIHGTVRDPGDAKNAHLLGLDGAAERLRLFKADLLDFGSLAAAIAGCDGVFHVACPVPDYTLTDPETELLAPAVTGTMNILRACSDAHVRRVVVVSSLSAVMINPDWGECKVMDEGCWSDVDLCRTTKRNLIFSYMTLRACTMLKATTISKCFEECRGKTVRKDVMYYI

SEQ ID NO: 1456 - protein, 196 aa, Zea mays subsp. mays
  misc_feature (1)..(196): Ceres Seq. ID no. 14308998
MKTVCVTGAGGFVASWLVERLLAGGRYKIHGTVRDPGDAKNAHLLGLDGAAERLRLFKADLLDFGSLAAAIAGCDGVFHVACPVPDYTLTDPETELLAPAVTGTMNILRACSDAHVRRVVVVSSLSAVMINPDWGECKVMDEGCWSDVDLCRTTKRNLIFSYMTLRACTMLKATTISKCFEECRGKTVRKDVMYYI

SEQ ID NO: 1457 - DNA, 793 bp, Zea mays subsp. mays
  misc_feature (1)..(793): Ceres Seq. ID no. 14309084
ataaaccatggcgtctcactcttctcttcttctcatcctaaccgttgctctcttcgtctctatcatctcaccggcgacttcacaaacatgctcaacacagaacgtgctctccgccgagaaaactccgttccagacatgcctagacctccccgaactcgaatcatacctccactacacttacaacgccaccaactcttctctctccgtcgccttcgtcgccgcaccatctcgctccgacgggtggatcgcttgggctatcaacccgacggcgaccacgatgagcggctctcaggcgttcctcgcctacggatccggagccggcgcgcctcccgtcgtgaagacgtacaacatcactggccacaatctcaccgaggggagacttgccttcgacttttggaacctacgcgccgaatctttaaacggcggtaggatcgcgattttcacgacggtgaaggttccggcgggagctgggagcgtgaatcaggtgtggcagatcggtgggaatgtgaaaaacggtcgtgttggagtgcatcctttcagtccgccgaatttgaactctagagccgtgctgaatttaaccggtacgacgagtactggtggtggtggctcaaaaactccggggaacgcggggtggatgatgacaaacgtacatttaggggtgaatttgggatttttggttttgttggggactataattattttctgaaaatcttttttctagtaataatgcaagccaccatataatgtactgtttaccttcttagacttagaggcatttacttttttttcacct

SEQ ID NO: 1458 - protein, 232 aa, Zea mays subsp. mays
  misc_feature (1)..(232): Ceres Seq. ID no. 14309085
MASHSSLLLILTVALFVSIISPATSQTCSTQNVLSAEKTPFQTCLDLPELESYLHYTYNATNSSLSVAFVAAPSRSDGWIAWAINPTATTMSGSQAFLAYGSGAGAPPVVKTYNITGHNLTEGRLAFDFWNLRAESLNGGRIAIFTTVKVPAGAGSVNQVWQIGGNVKNGRVGVHPFSPPNLNSRAVLNLTGTTSTGGGGSKTPGNAGWMMTNVHLGVNLGFLVLLGTIIIF

SEQ ID NO: 1459 - protein, 142 aa, Zea mays subsp. mays
  misc_feature (1)..(142): Ceres Seq. ID no. 14309086
MSGSQAFLAYGSGAGAPPVVKTYNITGHNLTEGRLAFDFWNLRAESLNGGRIAIFTTVKVPAGAGSVNQVWQIGGNVKNGRVGVHPFSPPNLNSRAVLNLTGTTSTGGGGSKTPGNAGWMMTNVHLGVNLGFLVLLGTIIIF

SEQ ID NO: 1460 - protein, 142 aa, Zea mays subsp. mays
  misc_feature (1)..(142): Ceres Seq. ID no. 14309087
INHGVSLFSSSHPNRCSLRLYHLTGDFTNMLNTERALRRENSVPDMPRPPRTRIIPPLHLQRHQLFSLRRLRRRTISLRRVDRLGYQPDGDHDERLSGVPRLRIRSRRASRREDVQHHWPQSHRGETCLRLLEPTRRIFKRR

SEQ ID NO: 1461 - DNA, 923 bp, Zea mays subsp. mays
  misc_feature (1)..(923): Ceres Seq. ID no. 14309110
atctcactcactctcgtctcttctctatctctctgcgtgggtgaaatttagatggctggagttgtgcgattatcaacgacgtcggttcagacccttggcgtctcttctccgcccttcacctcctttgcagccactctcagttctcctcccttacctcctcctactccgaatctgaattccgacaagagattgcgtccgctctcatcttctccctcgtgctcgtctcctcattacccagcttctggtctcgcaagccatagcctccttagacgtcccaacagcaaagtggttcgcgtcaaggtagatgagagtgtggccgagacagagccacctaaatggtgggagaggaatgctccaaacatggtagacattcattccaccgaagagttcttgaaggctctgagcgaagcgggtgaaagactagtgattgtagagttctatggaacttggtgcgcttcttgtagagcattgttccctaagctttgcaaaacggcggtggagaatcccaatatattgttcctcaaagtaaactttgatgagaataaaccaatgtgcaagagtttgaacgtgaaagtgcttccttatttccacttctaccgtggtgctgatggccagctcgagtccttctcatgttctcttgctaagtttcagaagataaaagatgccatcagactacacaacactgatcgttgcagcatcggtccagccaagggacctgaagggtttacgttggattctttatccgtccagacgaatgcagccaaaccagctggatcaagttgaaatgccagatactgagctcaatattctgtacatccgagatcttctgctactgtaacaatctttggttgctgaagcaaatactgagcttaatattctgtatatcagtaatttttttggtataaatggataactcctgaagc

SEQ ID NO: 1462 - protein, 243 aa, Zea mays subsp. mays
  misc_feature (1)..(243): Ceres Seq. ID no. 14309111
MAGVVRLSTTSVQTLGVSSPPFTSFAATLSSPPLPPPTPNLNSDKRLRPLSSSPSCSSPHYPASGLASHSLLRRPNSKVVRVKVDESVAETEPPKWWERNAPNMVDIHSTEEFLKALSEAGERLVIVEFYGTWCASCRALFPKLCKTAVENPNILFLKVNFDENKPMCKSLNVKVLPYFHFYRGADGQLESFSCSLAKFQKIKDAIRLHNTDRCSIGPAKGPEGFTLDSLSVQTNAAKPAGSS

SEQ ID NO: 1463 - protein, 140 aa, Zea mays subsp. mays
  misc_feature (1)..(140): Ceres Seq. ID no. 14309112
MVDIHSTEEFLKALSEAGERLVIVEFYGTWCASCRALFPKLCKTAVENPNILFLKVNFDENKPMCKSLNVKVLPYFHFYRGADGQLESFSCSLAKFQKIKDAIRLHNTDRCSIGPAKGPEGFTLDSLSVQTNAAKPAGSS

SEQ ID NO: 1464 - DNA, 863 bp, Zea mays subsp. mays
  misc_feature (1)..(863): Ceres Seq. ID no. 14309113
aaaaacctaacaagaaagcttgtgttaaacttgtttccttactaacttgtccgattttctcattaggccatggctccttccgctgcctcttcaaacactaaagaaggagaatctggtgaggaaggatatactgcattggagaaacatgtagccttcttcgacaggaacggagacggcgtcatttatccttgggaaacctaccaaggatttagagcgataggggtagggcgtctcccgtcagctattgctggtctctttatcaacatgggacttagccagaaaactcgcccggggaagggattctcgctgttgtttccaatagaagtgaagaatagtcacttttgcatccatggtagtgtcactgaagtatacgacaagaacggaagatttgtggaatcgaaattcgaggagatattcaagaagcatgctcgctcacatcgaaatgctctcacttacaaggaacttcttcaattgcttaagtctaacagagaccctggagactttggaggatggattgcagcatacggagaatggaaattattatatgaattatgcaaagatgaagatggtttattgacgagagaggcagtaaaaggcgccttcgatggcagcattttcagaaaattggagaaagaacgattatcttcttctcataagaagaaagaaaaaagaagacgttaaatattcccaaagcccattcatccatcatcttcaacgttacaaattaatagatacacttatgtgactagtgtgtatcttatatgaaaatggtttgttgttgtgatgcattctttacataaacatatatgatatttttgtgtaatattccgataataccattagaaaatatagttatgacatgc

SEQ ID NO: 1465 - protein, 203 aa, Zea mays subsp. mays
  misc_feature (1)..(203): Ceres Seq. ID no. 14309114
MAPSAASSNTKEGESGEEGYTALEKHVAFFDRNGDGVIYPWETYQGFRAIGVGRLPSAIAGLFINMGLSQKTRPGKGFSLLFPIEVKNSHFCIHGSVTEVYDKNGRFVESKFEEIFKKHARSHRNALTYKELLQLLKSNRDPGDFGGWIAAYGEWKLLYELCKDEDGLLTREAVKGAFDGSIFRKLEKERLSSSHKKKEKRRR

SEQ ID NO: 1466 - protein, 138 aa, Zea mays subsp. mays
  misc_feature (1)..(138): Ceres Seq. ID no. 14309115
MGLSQKTRPGKGFSLLFPIEVKNSHFCIHGSVTEVYDKNGRFVESKFEEIFKKHARSHRNALTYKELLQLLKSNRDPGDFGGWIAAYGEWKLLYELCKDEDGLLTREAVKGAFDGSIFRKLEKERLSSSHKKKEKRRR

SEQ ID NO: 1467 - DNA, 636 bp, Zea mays subsp. mays
  misc_feature (1)..(636): Ceres Seq. ID no. 14309116
aatagattttcagttgtgtcggctgaagaagcacacagatggcggcgagcgcgtgtctccggctgccggcggcgatggctgtccggcgagaggaaggcgttccgaattcaaaatcttcgcaggaaaaaccgagaatttatctcaacaaaccttcatggatagtcacaactcagtgtggcgctaagacgagtagaaaggagaagggtcgatgcgtaatctgccatggaactggaagagtcgactgtttcaattgtagcgggaaagggaggactaactgcgtggatatggagatgcttccaagaggagagtggcccaaatggtgcaggagctgtggagggagtggtttatgtgaatgctctcgctgtcttggcaccggagagtacagatacattatgggtttccgcttcttgaacaaacacgatgacgtggatccacagttatgagttgctgaaacggtggtggtgatgtttccttaccagtttctttttgtatatgttcagtgaagactttagtatgttttgatatgtttgctccagacttgtttggttttagtgtgttaaatgtctgtcacttttaagtgtaattcttttctctgtaagaacgctacaataattaatgtcttctctttacttgggt

SEQ ID NO: 1468 - protein, 134 aa, Zea mays subsp. mays
  misc_feature (1)..(134): Ceres Seq. ID no. 14309117
MAASACLRLPAAMAVRREEGVPNSKSSQEKPRIYLNKPSWIVTTQCGAKTSRKEKGRCVICHGTGRVDCFNCSGKGRTNCVDMEMLPRGEWPKWCRSCGGSGLCECSRCLGTGEYRYIMGFRFLNKHDDVDPQL

SEQ ID NO: 1469 - protein, 122 aa, Zea mays subsp. mays
  misc_feature (1)..(122): Ceres Seq. ID no. 14309118
MAVRREEGVPNSKSSQEKPRIYLNKPSWIVTTQCGAKTSRKEKGRCVICHGTGRVDCFNCSGKGRTNCVDMEMLPRGEWPKWCRSCGGSGLCECSRCLGTGEYRYIMGFRFLNKHDDVDPQL

SEQ ID NO: 1470 - DNA, 719 bp, Zea mays subsp. mays
  misc_feature (1)..(719): Ceres Seq. ID no. 14309154
aagagataaagaaaataaaacttcacaagacagaacacagagagagagagatgagccgttgctgctctcttgggctctgtgccccgaatgcgttgtctctttcttcaacccctcgcagtgtcaaagctcctctctctattacatctcacaccaaacccatctctaacaccgattctcttcttcataatattgccaagatgagagcaaaggctggtgacttctttggagcaaagaagacaatctttgcagctcaactcgggacagttcttgccacgattgatcacccggccttggcaataactggagtcaaccacgagcaggaactgagcagcgtcgtgctcgatatcagtatcatatcggtctggtacttcctagtaatgccaccaattatcatgaactggctgagagtaagatggtacagaaggaagttcttcgagatgtatctacagttcatgtgcgtcttcatgttcttccccgggctacttctatgggcaccatttctcaatttcagaaagttcccaagagatccgtctatgaagtatccttgggacaaaccaaaagacccttccactatcaagaacggttaccttaagtacccatttgctcagccagaagattatgactactaaaatcttgatttacagaaagtttgttatatatatcttgtgactgtatatactcttcttgcctactcaggcttaaggctctatattcaatat

SEQ ID NO: 1471 - protein, 208 aa, Zea mays subsp. mays
  misc_feature (1)..(208): Ceres Seq. ID no. 14309155
EIKKIKLHKTEHREREMSRCCSLGLCAPNALSLSSTPRSVKAPLSITSHTKPISNTDSLLHNIAKMRAKAGDFFGAKKTIFAAQLGTVLATIDHPALAITGVNHEQELSSVVLDISIISVWYFLVMPPIIMNWLRVRWYRRKFFEMYLQFMCVFMFFPGLLLWAPFLNFRKFPRDPSMKYPWDKPKDPSTIKNGYLKYPFAQPEDYDY

SEQ ID NO: 1472 - protein, 192 aa, Zea mays subsp. mays
  misc_feature (1)..(192): Ceres Seq. ID no. 14309156
MSRCCSLGLCAPNALSLSSTPRSVKAPLSITSHTKPISNTDSLLHNIAKMRAKAGDFFGAKKTIFAAQLGTVLATIDHPALAITGVNHEQELSSVVLDISIISVWYFLVMPPIIMNWLRVRWYRRKFFEMYLQFMCVFMFFPGLLLWAPFLNFRKFPRDPSMKYPWDKPKDPSTIKNGYLKYPFAQPEDYDY

SEQ ID NO: 1473 - protein, 143 aa, Zea mays subsp. mays
  misc_feature (1)..(143): Ceres Seq. ID no. 14309157
MRAKAGDFFGAKKTIFAAQLGTVLATIDHPALAITGVNHEQELSSVVLDISIISVWYFLVMPPIIMNWLRVRWYRRKFFEMYLQFMCVFMFFPGLLLWAPFLNFRKFPRDPSMKYPWDKPKDPSTIKNGYLKYPFAQPEDYDY

SEQ ID NO: 1474 - DNA, 630 bp, Zea mays subsp. mays
  misc_feature (1)..(630): Ceres Seq. ID no. 14309244
atactcaaaatctcagatcatatcgtcttctctttctctccctcccatctcgcaaaacccacgatcttaagatggaatccagtggcaatcatggagggatccagcaactgcttgctgctgaacaagaagctcagcaaatcgtcaatgccgctaggaccgcgaaaatggcaaggctgaagcaagccaaggaagaggctgagaccgagattgctgatcacaaaaccactacggagcattctttccagaggaagctcgaagagaccagtggagattcaggtgcaaacgtgaagaggcttgagcaagagactgatgagaagatcgagcagttgaagaacgaagcttccaggatttccagagatgttgtggacatgcttctcaaacatgtcaccactgtcaacaactgagatatatataccatccgtctttgagatggtgtcgagtgttatttttgagtggaattattcatcattcgtttcttttatggattccatgtttcaactgttgcttttgattttgaacttcagccttcagagttgctgtattcatctctctgaagacgtacagaatacagatcttttgtgtattgtaataaatttcagaacaaaaggaaaccaatgattttttttttgt

SEQ ID NO: 1475 - protein, 133 aa, Zea mays subsp. mays
  misc_feature (1)..(133): Ceres Seq. ID no. 14309245
TQNLRSYRLLFLSLPSRKTHDLKMESSGNHGGIQQLLAAEQEAQQIVNAARTAKMARLKQAKEEAETEIADHKTTTEHSFQRKLEETSGDSGANVKRLEQETDEKIEQLKNEASRISRDVVDMLLKHVTTVNN

SEQ ID NO: 1476 - protein, 110 aa, Zea mays subsp. mays
  misc_feature (1)..(110): Ceres Seq. ID no. 14309246
MESSGNHGGIQQLLAAEQEAQQIVNAARTAKMARLKQAKEEAETEIADHKTTTEHSFQRKLEETSGDSGANVKRLEQETDEKIEQLKNEASRISRDVVDMLLKHVTTVNN

SEQ ID NO: 1477 - protein, 86 aa, Zea mays subsp. mays
  misc_feature (1)..(86): Ceres Seq. ID no. 14309247
MLWTCFSNMSPLSTTEIYIPSVFEMVSSVIFEWNYSSFVSFMDSMFQLLLLILNFSLQSCCIHLSEDVQNTDLLCIVINFRTKGNQ

SEQ ID NO: 1478 - DNA, 841 bp, Zea mays subsp. mays
  misc_feature (1)..(841): Ceres Seq. ID no. 14309248
actattcgagcctccgccggattacaaatcgaagatgtcgtcgtcgccgttcgtgaagtcttatctcttcgcttacaattttctccaagcttcgtcatggacgatttcgcttctgagtatcgttagcagcgttttgtcgagcaagacgatcaatggcggcgcttactctgccgccggatatttgataagtgtgatgcaaactgctgctgttctagaagttcttcacggagccatgggaattgttccgagtggattcttgtctccgctgatgcaatggagtggaagaacacacttcatattggccattgttggacagatcaatgaggtccaggatttgccgtggctgtcaataactcttgtagcttggtgtatcggcgagatgattagatatcctcactatgctttaacttgccttggtagatgtccctattggctaacctatctcaggtacactggattcatcatcatctatccaacggggctggtgggtgaattgttgatcatgtacaaagcgcttccacatgttaaagaaaggaacctttatgcgaatttcttctctgttttccccttcagttactaccaattcctttgggccgtccttttggtctacccgttcctttggttgaagctttatctccagctgttcaaacaaagaaagtccaagcttggaaaagcagagaagcatcacggcaagagaaagagaatgtgaaaggcccttcaatcatctcctcagatatgtctatctttatccttgtttatgttatcgctctatgtgctgcctttaatttttgttttttcctttttttttttttaaagtttaaataatttaattatcatggcc

SEQ ID NO: 1479 - protein, 235 aa, Zea mays subsp. mays
  misc_feature (1)..(235): Ceres Seq. ID no. 14309249
LFEPPPDYKSKMSSSPFVKSYLFAYNFLQASSWTISLLSIVSSVLSSKTINGGAYSAAGYLISVMQTAAVLEVLHGAMGIVPSGFLSPLMQWSGRTHFILAIVGQINEVQDLPWLSITLVAWCIGEMIRYPHYALTCLGRCPYWLTYLRYTGFIIIYPTGLVGELLIMYKALPHVKERNLYANFFSVFPFSYYQFLWAVLLVYPFLWLKLYLQLFKQRKSKLGKAEKHHGKRKRM

SEQ ID NO: 1480 - protein, 224 aa, Zea mays subsp. mays
  misc_feature (1)..(224): Ceres Seq. ID no. 14309250
MSSSPFVKSYLFAYNFLQASSWTISLLSIVSSVLSSKTINGGAYSAAGYLISVMQTAAVLEVLHGAMGIVPSGFLSPLMQWSGRTHFILAIVGQINEVQDLPWLSITLVAWCIGEMIRYPHYALTCLGRCPYWLTYLRYTGFIIIYPTGLVGELLIMYKALPHVKERNLYANFFSVFPFSYYQFLWAVLLVYPFLWLKLYLQLFKQRKSKLGKAEKHHGKRKRM

SEQ ID NO: 1481 - protein, 171 aa, Zea mays subsp. mays
  misc_feature (1)..(171): Ceres Seq. ID no. 14309251
MQTAAVLEVLHGAMGIVPSGFLSPLMQWSGRTHFILAIVGQINEVQDLPWLSITLVAWCIGEMIRYPHYALTCLGRCPYWLTYLRYTGFIIIYPTGLVGELLIMYKALPHVKERNLYANFFSVFPFSYYQFLWAVLLVYPFLWLKLYLQLFKQRKSKLGKAEKHHGKRKRM

SEQ ID NO: 1482 - DNA, 803 bp, Zea mays subsp. mays
  misc_feature (1)..(803): Ceres Seq. ID no. 14309300
gtcgtcttcttgccgagaaaaaaaaaattaaaagagcctcgaaaaattcacagacttgtctcccctctccctctctttctcactctttagtagcttctgaaaatttcacagccctaaacaaacaaaaatgagcaagttctggactttcctcaccgctcttcactcaggcgctggtcctctggtgatgttggtgtatccattgtacgcatcggtggtggcaatggagagcacaacgaaagtagacgatgagcagtggcttgcctactggatcatttactccttcctcaccctcactgagctgattctgcagtcgcttcttgagtggatcccgatctggtactcggtgaaactggtgtttgtagcttggttggttctgcctcagttccatggtgcagctttcatctacaaccgtgtggtgagagaacagttcaagaaacacggcttcttcggctcctcctttcacaccaaacactccaaacccaacatcatccactccattttccaccgggagggacacgaggctcactctcactgacgccaaagcagaggagaagctcgaatagcattgtagcggagttggtggtggcccccgtcttgtcttaagtctaatctttacttttgttttagttttatttaataatttgagaaatgtgatggatgatgactaatgaggtgtgtgatcgtttaaaagtagaaatggcttcttgttgtttttgttgttgttgtattgctttagcttccacgcgtatcttccatttgggaacacaagtgttaacgctattgtttcaatcgctttctaatgc

SEQ ID NO: 1483 - protein, 135 aa, Zea mays subsp. mays
  misc_feature (1)..(135): Ceres Seq. ID no. 14309301
MSKFWTFLTALHSGAGPLVMLVYPLYASVVAMESTTKVDDEQWLAYWIIYSFLTLTELILQSLLEWIPIWYSVKLVFVAWLVLPQFHGAAFIYNRVVREQFKKHGFFGSSFHTKHSKPNIIHSIFHREGHEAHSH

SEQ ID NO: 1484 - protein, 116 aa, Zea mays subsp. mays
  misc_feature (1)..(116): Ceres Seq. ID no. 14309302
MLVYPLYASVVAMESTTKVDDEQWLAYWIIYSFLTLTELILQSLLEWIPIWYSVKLVFVAWLVLPQFHGAAFIYNRVVREQFKKHGFFGSSFHTKHSKPNIIHSIFHREGHEAHSH

SEQ ID NO: 1485 - protein, 104 aa, Zea mays subsp. mays
  misc_feature (1)..(104): Ceres Seq. ID no. 14309303
MESTTKVDDEQWLAYWIIYSFLTLTELILQSLLEWIPIWYSVKLVFVAWLVLPQFHGAAFIYNRVVREQFKKHGFFGSSFHTKHSKPNIIHSIFHREGHEAHSH

SEQ ID NO: 1486 - DNA, 1174 bp, Zea mays subsp. mays
  misc_feature (1)..(1174): Ceres Seq. ID no. 14309328
aatcggtacgatcagattgcataaaagcaaatcataataagtcacgtggcacagttttgtcagatccaagagaagaaatcagaaaaagaacttgaaacgatgccgtactacaccagagacgaggacgaagtcgacgatttcgacgagttcgatccgacgccgtacagtggaggctacgacatcaccgtgatctacggccgtccgatccctccttgcgacgacacttgctaccctctctcctccgcagcggatgaagatttcgagtacgagagacctgaattcacctcgtaccacgatccttccgcctacgccgaagaagctctcaacaccgagtacagcagctactcccgccccaagccccgtcccggatttcgacccggttcagccggtggcggtcatgtccaaggtgagagacccgatcccagttacggatccggatacggtggagcgacggaggctgagtacggtaggagacctgaatctggatatggtgggagatcggagacggagaccggatacggatccgggtatgagaagaaaccgagcttcggtgaagagaggagcgagtatgagcgtaagcctagctatggaaggtctggggaagaggaaggaggttacaggaagcctagctatgggagatctgaggatcaggttgagagctacataaagcccaccagctatgaaaggtctgaggaacaggaggaagggagttacaggaagcctagctatggccgcaatgatgacgatgatgatgaagagcgcaggaaccgttctggtgatgatgaggaaggcagctatggccgcaagaaatatggtggcaatgactctaatgatgatgatgaggagaagaagcagcatcgttacaagcatcaccaccaccagaggcgccgtgatgaagatgatgactaaaaccttctctcagtactggagagtgttatgatcaagtacttttgcttagcttcatcttactaaataataaaaaagctaaggcatttatctttggatgttgttgttgcgtttgtttgattctctttggatacagcagagtctgtgtctgactttgtttctggttcataataagaccttgaactgatatcgggtcatcatcatgtaaaaagtaaactgttgtttttgttttctcgatattaaatatcaaaagtcattgccgagaagt

SEQ ID NO: 1487 - protein, 269 aa, Zea mays subsp. mays
  misc_feature (1)..(269): Ceres Seq. ID no. 14309329
MPYYTRDEDEVDDFDEFDPTPYSGGYDITVIYGRPIPPCDDTCYPLSSAADEDFEYERPEFTSYHDPSAYAEEALNTEYSSYSRPKPRPGFRPGSAGGGHVQGERPDPSYGSGYGGATEAEYGRRPESGYGGRSETETGYGSGYEKKPSFGEERSEYERKPSYGRSGEEEGGYRKPSYGRSEDQVESYIKPTSYERSEEQEEGSYRKPSYGRNDDDDDEERRNRSGDDEEGSYGRKKYGGNDSNDDDEEKKQHRYKHHHHQRRRDEDDD

SEQ ID NO: 1488 - protein, 138 aa, Zea mays subsp. mays
  misc_feature (1)..(138): Ceres Seq. ID no. 14309330
MKISSTRDLNSPRTTILPPTPKKLSTPSTAATPAPSPVPDFDPVQPVAVMSKVRDPIPVTDPDTVERRRLSTVGDLNLDMVGDRRRRPDTDPGMRRNRASVKRGASMSVSLAMEGLGKRKEVTGSLAMGDLRIRLRAT

SEQ ID NO: 1489 - DNA, 797 bp, Zea mays subsp. mays
  misc_feature (1)..(797): Ceres Seq. ID no. 14309339
aatcggagcttggaagggttgagacttgagcgagcgagcgagagatgagcaactacgcgattccactttcttcttcgtcctctctctccaatgcctatcatcaaccttctcgtgtttgcttcgttttccgcaatcctcgttccaattttgagtttcgcgggacacgactaagtggtggggttcgaagaacctctttaaagtgcaattgctgcagcaaagggaagggaggtacaggtgaaaacgaaaacagaaatgtgttggatgctttctttttgggaaaggcactagctgaggttatcaacgagcgaattgagtccactgttggcgaagttttgggtaacattgggaggtttcaagctgagcaacagaagcaagttcaggagattcagggagaggtacttgaaagagccaagaaagctaaggaaagagcagctagagaatccatggaggcacaaggactcgtaccggaatccacaaacacaaacccaaagccggctgctggtgttgttgcctctgttgtaacccctacctcgatcgttgaaagcaaggctataagaaatgatgaaaagctgtctggtttctccggatcttcaatgggggacgatatggatagctcgagttctagcgacgaagacgaagacagtgtctaagcgattgttcctagaccaatttcaagatttggtgatagatgcagacttgtttgaaaccgttgagaacatcttcgttgatatatgtacttaaaatgatgtttgagaataaataaccttgatattaattatgtggatttttaaaagggc

SEQ ID NO: 1490 - protein, 201 aa, Zea mays subsp. mays
  misc_feature (1)..(201): Ceres Seq. ID no. 14309340
MSNYAIPLSSSSSLSNAYHQPSRVCFVFRNPRSNFEFRGTRLSGGVRRTSLKCNCCSKGKGGTGENENRNVLDAFFLGKALAEVINERIESTVGEVLGNIGRFQAEQQKQVQEIQGEVLERAKKAKERAARESMEAQGLVPESTNTNPKPAAGVVASVVTPTSIVESKAIRNDEKLSGFSGSSMGDDMDSSSSSDEDEDSV

SEQ ID NO: 1491 - DNA, 925 bp, Zea mays subsp. mays
  misc_feature (1)..(925): Ceres Seq. ID no. 14309404
accttaccaagactgagctctcaatggcggccttctcgatgactctgtcaaatccgaaggctttctcagctgctccacgaagactttctccgatcaacgcctccgctccctcttccaccactttccgattgaacaccaaatctaccgtcaacttcatcaagtttccgtctttaaccgcatcatctctcctcctccatacatcttccaccaagagaaaccgccgcagctgcttatcggttcaatccagtgctgagcctttagcggagccacaatcgaagataacgcataaggtgtatttcgatataagtgttgggaacccagttgggaaattggctgggaggattgttattggtttgtttggtgatgatgttccccaaactgttgagaacttccgtgctctttgcacaggtgagaaggggtttggctacaagggctcaacattccaccgtgtcatccgagatttcatgattcagggtggagactttgacaagggcaatggaactggaggtaaaagtgtatatggtcggacatttaaggatgagaatttcaatttatcccatgtcggacccggagttgtgagtatggcaaatgctggccctaatacaaatggaagtcagttcttcatctgcactgttaagacttcatggttggacgggaggcatgtggtgttcgggcaagttatagaaggaatggatgtcgtgaggctgatagaggaacaagagacagatagaggagaccgtcccagaaagaaagtggtcattgcagactgtggtcaacttccaatgtctgaagcttaagtaacaacatccaaaaccccaaaaccttgtgacaatgagattgagttgtattatgcgtttgcaatttttacacgctttcttttgtgaaatggatacaagtccctttataataatatcaatttcagttc

SEQ ID NO: 1492 - protein, 264 aa, Zea mays subsp. mays
  misc_feature (1)..(264): Ceres Seq. ID no. 14309405
LTKTELSMAAFSMTLSNPKAFSAAPRRLSPINASAPSSTTFRLNTKSTVNFIKFPSLTASSLLLHTSSTKRNRRSCLSVQSSAEPLAEPQSKITHKVYFDISVGNPVGKLAGRIVIGLFGDDVPQTVENFRALCTGEKGFGYKGSTFHRVIRDFMIQGGDFDKGNGTGGKSVYGRTFKDENFNLSHVGPGVVSMANAGPNTNGSQFFICTVKTSWLDGRHVVFGQVIEGMDVVRLIEEQETDRGDRPRKKVVIADCGQLPMSEA

SEQ ID NO: 1493 - protein, 257 aa, Zea mays subsp. mays
  misc_feature (1)..(257): Ceres Seq. ID no. 14309406
MAAFSMTLSNPKAFSAAPRRLSPINASAPSSTTFRLNTKSTVNFIKFPSLTASSLLLHTSSTKRNRRSCLSVQSSAEPLAEPQSKITHKVYFDISVGNPVGKLAGRIVIGLFGDDVPQTVENFRALCTGEKGFGYKGSTFHRVIRDFMIQGGDFDKGNGTGGKSVYGRTFKDENFNLSHVGPGVVSMANAGPNTNGSQFFICTVKTSWLDGRHVVFGQVIEGMDVVRLIEEQETDRGDRPRKKVVIADCGQLPMSEA

SEQ ID NO: 1494 - protein, 252 aa, Zea mays subsp. mays
  misc_feature (1)..(252): Ceres Seq. ID no. 14309407
MTLSNPKAFSAAPRRLSPINASAPSSTTFRLNTKSTVNFIKFPSLTASSLLLHTSSTKRNRRSCLSVQSSAEPLAEPQSKITHKVYFDISVGNPVGKLAGRIVIGLFGDDVPQTVENFRALCTGEKGFGYKGSTFHRVIRDFMIQGGDFDKGNGTGGKSVYGRTFKDENFNLSHVGPGVVSMANAGPNTNGSQFFICTVKTSWLDGRHVVFGQVIEGMDVVRLIEEQETDRGDRPRKKVVIADCGQLPMSEA

SEQ ID NO: 1495 - DNA, 955 bp, Zea mays subsp. mays
  misc_feature (1)..(955): Ceres Seq. ID no. 14309422
aaaagaaaagcgaaaagaaacaaaatttgcttctctgttagctcaaagatcaaccatggaagctaccgccctaagctctgcggccaccatcgtctcttcctcatcttcgtcgctatccatcttctctccgaagaagagaacatactcatcttcgccaagaatcgtccggctttctaagagtaaacaaccttacgcataatatgctatttcattgcttacgatcatctctcagggttactttgattcttctcttttcttattttgattcagaggacgacaaagattatgatcccaaattcgaatcggattccttgagcctcgttcctctattccaaaatcgaactctctcgaatgatgaggccatgggattggtcttgagcgccgcctcggtcagaggctggaccaccggttccgggatggaggggccgtctcttccggcaaaggccgatgcggagacgatttcaacatttccgtggtcactattcacgaaatcgccccgtaggcgtatgcgcgttgccttcacttgcaacgtttgtggacagagaactacacgagccataaatccacatgcctacactgacggcaccgtcttcgtgcagtgttgcggatgctatgtgttccataagctggtggataatctgaacttgtttcatgaggtgaagtattatgtgagctcgagttccagctaccaagatgcaaagtgggatgttgggggattcaatctcttccagatggatgacgatactgatgatgatgccggtgacggccgcaatgactccttccctctttaaagaggttgggactagtgatcaatactttgtgcaaacgaatgccgcatatatatatatatatatatatctgtatatagctagctttatcctatcatctagcacgaataatacgtttgaagtatctcagttcccattgataataaattggtcatatatatagctcg

SEQ ID NO: 1496 - protein, 196 aa, Zea mays subsp. mays
  misc_feature (1)..(196): Ceres Seq. ID no. 14309423
MLFHCLRSSLRVTLILLFSYFDSEDDKDYDPKFESDSLSLVPLFQNRTLSNDEAMGLVLSAASVRGWTTGSGMEGPSLPAKADAETISTFPWSLFTKSPRRRMRVAFTCNVCGQRTTRAINPHAYTDGTVFVQCCGCYVFHKLVDNLNLFHEVKYYVSSSSSYQDAKWDVGGFNLFQMDDDTDDDAGDGRNDSFPL

SEQ ID NO: 1497 - protein, 142 aa, Zea mays subsp. mays
  misc_feature (1)..(142): Ceres Seq. ID no. 14309424
MGLVLSAASVRGWTTGSGMEGPSLPAKADAETISTFPWSLFTKSPRRRMRVAFTCNVCGQRTTRAINPHAYTDGTVFVQCCGCYVFHKLVDNLNLFHEVKYYVSSSSSYQDAKWDVGGFNLFQMDDDTDDDAGDGRNDSFPL

SEQ ID NO: 1498 - protein, 124 aa, Zea mays subsp. mays
  misc_feature (1)..(124): Ceres Seq. ID no. 14309425
MEGPSLPAKADAETISTFPWSLFTKSPRRRMRVAFTCNVCGQRTTRAINPHAYTDGTVFVQCCGCYVFHKLVDNLNLFHEVKYYVSSSSSYQDAKWDVGGFNLFQMDDDTDDDAGDGRNDSFPL

SEQ ID NO: 1499 - DNA, 791 bp, Zea mays subsp. mays
  misc_feature (1)..(791): Ceres Seq. ID no. 14309426
gttccttcccatgctagctaagtaacaccaataacatttatttactaaagcttatattacaaagagagaaatgaagaaagctacggcattgatgaaacatgtcgttgcattgttgagttccgcagcaaaggcgaaatctatagccataaagaataaaacaagtgctttcaagacaagactcctcatgttgtcccttgtgaaacatgagaagctcgggttccgttcaatttccaacaagatccacaacctcctagggcattcagatcaagagcaagactacgaccatgaacaagacaatagcaaggctataatcctctacaacaacggggaagtggctcactgtgagagttatgacgtacaaggcgaggaatgtgacaagtatcctgatctgaggcacacgttgttcgaaggtgaggaggattttggggacttggaggaaggccaaggaagttctgtcatagatatggtgaggaactcgaagaaagaagaaggagagagtttcaagctagaagatgagatcgaccatgttgcggatctcttcatttcaaggtttcataagcagatgaagcttcagaaactcttgtcctttaagaggtatcaagaaatgctagcccgaggcacataaaatcacacacctatatatatttatacacgttggcatagatatgaagaatagattcatattacgatttgtgctaacgttcatattttgtgttgtcaatcataaatccttccagcctctcatttttaggataaaatatcatgatctatttaatatgatttcagttatt

SEQ ID NO: 1500 - protein, 184 aa, Zea mays subsp. mays
  misc_feature (1)..(184): Ceres Seq. ID no. 14309427
MKKATALMKHVVALLSSAAKAKSIAIKNKTSAFKTRLLMLSLVKHEKLGFRSISNKIHNLLGHSDQEQDYDHEQDNSKAIILYNNGEVAHCESYDVQGEECDKYPDLRHTLFEGEEDFGDLEEGQGSSVIDMVRNSKKEEGESFKLEDEIDHVADLFISRFHKQMKLQKLLSFKRYQEMLARGT

SEQ ID NO: 1501 - protein, 177 aa, Zea mays subsp. mays
  misc_feature (1)..(177): Ceres Seq. ID no. 14309428
MKHVVALLSSAAKAKSIAIKNKTSAFKTRLLMLSLVKHEKLGFRSISNKIHNLLGHSDQEQDYDHEQDNSKAIILYNNGEVAHCESYDVQGEECDKYPDLRHTLFEGEEDFGDLEEGQGSSVIDMVRNSKKEEGESFKLEDEIDHVADLFISRFHKQMKLQKLLSFKRYQEMLARGT

SEQ ID NO: 1502 - protein, 146 aa, Zea mays subsp. mays
  misc_feature (1)..(146): Ceres Seq. ID no. 14309429
MLSLVKHEKLGFRSISNKIHNLLGHSDQEQDYDHEQDNSKAIILYNNGEVAHCESYDVQGEECDKYPDLRHTLFEGEEDFGDLEEGQGSSVIDMVRNSKKEEGESFKLEDEIDHVADLFISRFHKQMKLQKLLSFKRYQEMLARGT

SEQ ID NO: 1503 - DNA, 866 bp, Zea mays subsp. mays
  misc_feature (1)..(866): Ceres Seq. ID no. 14309445
gtacttgggacttggaagaaagattcatggcttgtgttcagaacacactctacttcgttgcagctatacttcttattcaccagaagacggtcacctccgatttcctctctcctctgctctctcctatgttcgatgatatatgcaaggaagtgcaatgtgggaaagggaaatgcaaagcatctttaaacgcaacttttatgcatgaatgtgagtgtgataatggttggaagcagattgatcataacctcaagtttctcccttgcgtcacccccaactgtacctttgatctaacttgcggtgaagcagcttctccagcacagcccaaaacgcttcccaaggacaccaatgcttcatttttcgatatttgtcactgggtggattgtggaggagggttttgcaataagacaaatccgtttttatacagctgcaattgccgtgaaggttacaacaatcttatgaacatcaccacatttccttgctttaagcaatgtgcacttggaatggactgcttgaatcttgggatccctttgtccaacgcatcatcgtcttctccacctgctctgcctgatagcagcaagaatcaagcaacaggattgaatataagaggatcatcgttatggtttataacatatttgctctgtgtctccctagcaccatggaggttgctctgtatttgatcacttttattctgtgtgtttcacattttgtatacggatattgttcggtactgttttgtatttctttgtttctattctatcttactcatctattcttttttttttgtctaccacaaatactactgcaggcccggcccagtaaaatttattgcctaaaagcaaaataaaaaatgggcgttcgatggatcg

SEQ ID NO: 1504 - protein, 224 aa, Zea mays subsp. mays
  misc_feature (1)..(224): Ceres Seq. ID no. 14309446
TWDLEERFMACVQNTLYFVAAILLIHQKTVTSDFLSPLLSPMFDDICKEVQCGKGKCKASLNATFMHECECDNGWKQIDHNLKFLPCVTPNCTFDLTCGEAASPAQPKTLPKDTNASFFDICHWVDCGGGFCNKTNPFLYSCNCREGYNNLMNITTFPCFKQCALGMDCLNLGIPLSNASSSSPPALPDSSKNQATGLNIRGSSLWFITYLLCVSLAPWRLLCI

SEQ ID NO: 1505 - protein, 216 aa, Zea mays subsp. mays
  misc_feature (1)..(216): Ceres Seq. ID no. 14309447
MACVQNTLYFVAAILLIHQKTVTSDFLSPLLSPMFDDICKEVQCGKGKCKASLNATFMHECECDNGWKQIDHNLKFLPCVTPNCTFDLTCGEAASPAQPKTLPKDTNASFFDICHWVDCGGGFCNKTNPFLYSCNCREGYNNLMNITTFPCFKQCALGMDCLNLGIPLSNASSSSPPALPDSSKNQATGLNIRGSSLWFITYLLCVSLAPWRLLCI

SEQ ID NO: 1506 - protein, 183 aa, Zea mays subsp. mays
  misc_feature (1)..(183): Ceres Seq. ID no. 14309448
MFDDICKEVQCGKGKCKASLNATFMHECECDNGWKQIDHNLKFLPCVTPNCTFDLTCGEAASPAQPKTLPKDTNASFFDICHWVDCGGGFCNKTNPFLYSCNCREGYNNLMNITTFPCFKQCALGMDCLNLGIPLSNASSSSPPALPDSSKNQATGLNIRGSSLWFITYLLCVSLAPWRLLCI

SEQ ID NO: 1507 - DNA, 754 bp, Zea mays subsp. mays
  misc_feature (1)..(754): Ceres Seq. ID no. 14309452
gggatcgatctctctttctctgaaacattttggaaacttctaggtaaggcttcttcattccaaagcaagaccacaatttttcttcatggccaccggagaggagaaacctgttatggtcgtcggtatcgacgaaagcgagcagagcacttacgccttggagtggaccctcgatcgtttcttcactccctacgctcctaattttcctttcaagctcttcatcgtccacgccaaacctaacgccgtctctgccgttggtcttgctggtcccggagctgcggaggttctgccttatgttgataccgatttgaagcatattgctgccagggttatcgagatggctaaaggtatctgtcagagcaaatcggttaatggcgctatgttcgaagtttttgaaggtgatgcaagaagtatactgtgcgatgttgtggataaacatcatgcttctcttcttgtcgtgggaagccatggttatggagctatcaagagggcggttctagggagcgtgagcgactactgtgctcatcatgctcattgctcggtgatgatcgtgaagaagcctaagatcaagcactgatgatcacctaaacccaagctgttatatcagtcaaagcaaagcaaagtctcatctgcatagtcgtcagtttcggtgaaatgaaataaaattgtgaaacgatccaatctatatattaatattcgtgtgtaaattggttattgtattcataaactattttatatattgacgtttgataatact

SEQ ID NO: 1508 - protein, 162 aa, Zea mays subsp. mays
  misc_feature (1)..(162): Ceres Seq. ID no. 14309453
MATGEEKPVMVVGIDESEQSTYALEWTLDRFFTPYAPNFPFKLFIVHAKPNAVSAVGLAGPGAAEVLPYVDTDLKHIAARVIEMAKGICQSKSVNGAMFEVFEGDARSILCDVVDKHHASLLVVGSHGYGAIKRAVLGSVSDYCAHHAHCSVMIVKKPKIKH

SEQ ID NO: 1509 - protein, 153 aa, Zea mays subsp. mays
  misc_feature (1)..(153): Ceres Seq. ID no. 14309454
MVVGIDESEQSTYALEWTLDRFFTPYAPNFPFKLFIVHAKPNAVSAVGLAGPGAAEVLPYVDTDLKHIAARVIEMAKGICQSKSVNGAMFEVFEGDARSILCDVVDKHHASLLVVGSHGYGAIKRAVLGSVSDYCAHHAHCSVMIVKKPKIKH

SEQ ID NO: 1510 - DNA, 1490 bp, Zea mays subsp. mays
  misc_feature (1)..(1490): Ceres Seq. ID no. 14309641
actccccgcgccacgcgcctgactgggtgcactgcactggtggtgtgcacgcccctcgtcagtcgtcactcactcgctaccccatatcccattccccccgacggcgcctctggcagcaaggaacaatatgtccaatagggccacccattggtgttatgcctgtcagcgcccaattcgtcttcgcgggcaggatatcatatgtcccaactgcagtgatggttttatccaagaaatcagtgagatgggtggcgtactgaacacttatgggctaactgaaccggactttgaagagcgccaggccagaagatttggaatgatggatgccatatcttccctcatgcggcaacggctgtcagaaataggaagggatagtttgtttgatattcacggtagacaagggacaggtactgaatatggaaggaggtcaactgctattcctacgctggtatttggtggcatcccttctcctgcagttggtagcagtgatgtcaatgttgtcatcagggaaggccgcagagctggcgctgcccgtccgaatttcagtagcttagttgttggtcccagtctggaagctctatttgagcagctactactccagaacaaccgtcaaggcccaccacctgctccacagtcagctattgactccatgcctgtggtaaagataaatcgcaggcatcttgacgaagatccacagtgtgcagtttgcaaagacaaattcgaggttggagcagaggcgcgggagatgccgtgcaagcacttgtaccatactgactgcatcatcccctggctggttcagcacaactcctgccctgtttgccgtcatccgctgccatcacagcgatcaggcagtagtaccagcagcgcccgtgtgccttcagcatactacaacgaaacagctgatcctcctgcggtcgccagggcagatttggatcctgtgccttcagcatactacaacgaaacagcggatcctcctgcggtcaccagagcatatttcgatcctgctccaggaaactacggcagcgaaagccaggaaagtcacgaccccttctcctttctctggccatttggcccgtcgagttcttaccaatatgaagaaaatgttgatgaacctgcagtatacgatccaaaccatatagcatattctgcatggcactatgaccactgactgaaaccctgagttaaagtcaagatatctgcaattcgtgccttgagctctcagctttggtgaggcaaagggctgcttgccgtataaaaaatggatggttattgtgttcagtgcatacccttgctacgcatgtccgttgtggagatatcagctgtgtatagaactgggcgcaacaaactctgctgtaatgcccgtatatattccttttcggtatatcaagtctaaagctatagtgcataagtgctgtaatcggtgaactgagtgcatccagaatatcatgtcatggtaaacataattataattacatggttgtctttttagactg

SEQ ID NO: 1511 - protein, 345 aa, Zea mays subsp. mays
  misc_feature (1)..(345): Ceres Seq. ID no. 14309642
MSNRATHWCYACQRPIRLRGQDIICPNCSDGFIQEISEMGGVLNTYGLTEPDFEERQARRFGMMDAISSLMRQRLSEIGRDSLFDIHGRQGTGTEYGRRSTAIPTLVFGGIPSPAVGSSDVNVVIREGRRAGAARPNFSSLVVGPSLEALFEQLLLQNNRQGPPPAPQSAIDSMPVVKINRRHLDEDPQCAVCKDKFEVGAEAREMPCKHLYHTDCIIPWLVQHNSCPVCRHPLPSQRSGSSTSSARVPSAYYNETADPPAVARADLDPVPSAYYNETADPPAVTRAYFDPAPGNYGSESQESHDPFSFLWPFGPSSSYQYEENVDEPAVYDPNHIAYSAWHYDH

SEQ ID NO: 1512 - protein, 307 aa, Zea mays subsp. mays
  misc_feature (1)..(307): Ceres Seq. ID no. 14309643
MGGVLNTYGLTEPDFEERQARRFGMMDAISSLMRQRLSEIGRDSLFDIHGRQGTGTEYGRRSTAIPTLVFGGIPSPAVGSSDVNVVIREGRRAGAARPNFSSLVVGPSLEALFEQLLLQNNRQGPPPAPQSAIDSMPVVKINRRHLDEDPQCAVCKDKFEVGAEAREMPCKHLYHTDCIIPWLVQHNSCPVCRHPLPSQRSGSSTSSARVPSAYYNETADPPAVARADLDPVPSAYYNETADPPAVTRAYFDPAPGNYGSESQESHDPFSFLWPFGPSSSYQYEENVDEPAVYDPNHIAYSAWHYDH

SEQ ID NO: 1513 - protein, 283 aa, Zea mays subsp. mays
  misc_feature (1)..(283): Ceres Seq. ID no. 14309644
MMDAISSLMRQRLSEIGRDSLFDIHGRQGTGTEYGRRSTAIPTLVFGGIPSPAVGSSDVNVVIREGRRAGAARPNFSSLVVGPSLEALFEQLLLQNNRQGPPPAPQSAIDSMPVVKINRRHLDEDPQCAVCKDKFEVGAEAREMPCKHLYHTDCIIPWLVQHNSCPVCRHPLPSQRSGSSTSSARVPSAYYNETADPPAVARADLDPVPSAYYNETADPPAVTRAYFDPAPGNYGSESQESHDPFSFLWPFGPSSSYQYEENVDEPAVYDPNHIAYSAWHYDH

SEQ ID NO: 1514 - DNA, 2201 bp, Zea mays subsp. mays
  misc_feature (1)..(2201): Ceres Seq. ID no. 14309649
aaattagtttatggtcgaaagcactttgctgttgaaaaagagaagccaagccagcttttcggaacatatgatttcgatagctcaccttttgactggggtgacaattataagcttcctaatttgcctgagacagatcttgttatatatgaaatgaatgtccgtgccttcactgccgacgagtcaagcaggcttgctccagctattcgtggaagttaccttggtgtcattgataaaattcctcatttgctggaacttggcgttaatgcagtggaactacttcctgtttttgagttcgatgagctggagttgaagaggttccctaacccaagggaccacatggtaaatacatggggatattctacaatcaacctttttgcgcccatgagtcgttatgctagtgctggtggtggacctgtggctgcttccaaagagctcaaacagatggtcaaggcatttcataattctggaattgaggttattttggatgtagtttacaaccatacaaatgaagctgatgatgttaacccttacatgacttcctttcgtggtattgataacaaggtctattacatgttagatctcaacaacagtgcacagctgctgaacttctcgggttgcgggaatacactaaactgcaaccatcctgttgtcaaggagcttgtacttgacagtttaagacattgggttaaggagtatcacatagatggatttcggtttgaccttgcgagtgttctttgtcgtggaccagatggcagtcctcttgatgcacctccacttattaaggaaattgccaaaggctctgtattgtctagatgtaagatcattgctgaaccttgggactgtggtggcctttatctagtagggaggttccctaattgggacaggtgggctgaatggaacgggaagtacagagatgatattcgaagatttattaagggagatcctggtatgaagggggtgtttgcaactcgcgtttctggttctgcagatctctaccaggtgaacaatcggaagccttaccatagtgtgaactttgtaattgctcatgatggatttactttatgtgaccttgtttcatataactccaagcacaatgatgcaaatggagaaggtggtcgtgatgggtgcaatgacaactacagctggaactgtggcattgaaggagaaacaaatgatttgaatgtgctaagtcttcgttcaaggcaaatgaagaacttccatgtggcattaatgatttcccagggtactccaatgatgctgatgggagatgaatatggtcacacacgttatggaaacaacaatagctatggacatgatactcacataaataattttcagtggggccagttggaagaaaggaaggatggccatttcaggtttttctcagagatgatcaagtttcggcataaccatcctatattgagacgagacaggtttctcaacaaaaatgatgtcacttggcatgaaaatcgttgggagaaccaggacagcaaatttttggcatttacgatacatgatcacagttctggtggagacatctatttggcattcaatgctcatgagtattttgtggatgctgtaattcccccaccaccacaccataaatcttggagtcgtgtggtggataccaacctggaatcaccaaaggatattgtcccagaaggggtgccattcacaggttcagggtacaggattgctccctactcttccatcttgcttaaggcaaagccttagaatggcggaggcaagtcattctcaagtaagcacgaataaaggtgttgtgatccctaactttccaagctcttagccaactgtactgcaagtatagcaaactttggtatgtgaagtcggaccaacccttgcggaaatcaacggaagccatggtttgctaaaggtattactcatggagaattggagatatggcaaacacatacgcaagtaacctccacacatctaagcaagaagagcctttcattaggggatgcatggctcgaggaaactatatttgcatttggttgattcatttttatttgttgcacatgtcagtatgtcacctgtgtgtgtcaagctcttatttgcttaaaaattggacattcctttgttacatatttgtgttgtactgtgttggagctagcgttcctggtatattccccgggggtgggaggacgggggaccttttttccccgtgtttttgggctccc

SEQ ID NO: 1515 - protein, 577 aa, Zea mays subsp. mays
  misc_feature (1)..(577): Ceres Seq. ID no. 14309650
KLVYGRKHFAVEKEKPSQLFGTYDFDSSPFDWGDNYKLPNLPETDLVIYEMNVRAFTADESSRLAPAIRGSYLGVIDKIPHLLELGVNAVELLPVFEFDELELKRFPNPRDHMVNTWGYSTINLFAPMSRYASAGGGPVAASKELKQMVKAFHNSGIEVILDVVYNHTNEADDVNPYMTSFRGIDNKVYYMLDLNNSAQLLNFSGCGNTLNCNHPVVKELVLDSLRHWVKEYHIDGFRFDLASVLCRGPDGSPLDAPPLIKEIAKGSVLSRCKIIAEPWDCGGLYLVGRFPNWDRWAEWNGKYRDDIRRFIKGDPGMKGVFATRVSGSADLYQVNNRKPYHSVNFVIAHDGFTLCDLVSYNSKHNDANGEGGRDGCNDNYSWNCGIEGETNDLNVLSLRSRQMKNFHVALMISQGTPMMLMGDEYGHTRYGNNNSYGHDTHINNFQWGQLEERKDGHFRFFSEMIKFRHNHPILRRDRFLNKNDVTWHENRWENQDSKFLAFTIHDHSSGGDIYLAFNAHEYFVDAVIPPPPHHKSWSRVVDTNLESPKDIVPEGVPFTGSGYRIAPYSSILLKAKP

SEQ ID NO: 1516 - protein, 527 aa, Zea mays subsp. mays
  misc_feature (1)..(527): Ceres Seq. ID no. 14309651
MNVRAFTADESSRLAPAIRGSYLGVIDKIPHLLELGVNAVELLPVFEFDELELKRFPNPRDHMVNTWGYSTINLFAPMSRYASAGGGPVAASKELKQMVKAFHNSGIEVILDVVYNHTNEADDVNPYMTSFRGIDNKVYYMLDLNNSAQLLNFSGCGNTLNCNHPVVKELVLDSLRHWVKEYHIDGFRFDLASVLCRGPDGSPLDAPPLIKEIAKGSVLSRCKIIAEPWDCGGLYLVGRFPNWDRWAEWNGKYRDDIRRFIKGDPGMKGVFATRVSGSADLYQVNNRKPYHSVNFVIAHDGFTLCDLVSYNSKHNDANGEGGRDGCNDNYSWNCGIEGETNDLNVLSLRSRQMKNFHVALMISQGTPMMLMGDEYGHTRYGNNNSYGHDTHINNFQWGQLEERKDGHFRFFSEMIKFRHNHPILRRDRFLNKNDVTWHENRWENQDSKFLAFTIHDHSSGGDIYLAFNAHEYFVDAVIPPPPHHKSWSRVVDTNLESPKDIVPEGVPFTGSGYRIAPYSSILLKAKP

SEQ ID NO: 1517 - protein, 465 aa, Zea mays subsp. mays
  misc_feature (1)..(465): Ceres Seq. ID no. 14309652
MVNTWGYSTINLFAPMSRYASAGGGPVAASKELKQMVKAFHNSGIEVILDVVYNHTNEADDVNPYMTSFRGIDNKVYYMLDLNNSAQLLNFSGCGNTLNCNHPVVKELVLDSLRHWVKEYHIDGFRFDLASVLCRGPDGSPLDAPPLIKEIAKGSVLSRCKIIAEPWDCGGLYLVGRFPNWDRWAEWNGKYRDDIRRFIKGDPGMKGVFATRVSGSADLYQVNNRKPYHSVNFVIAHDGFTLCDLVSYNSKHNDANGEGGRDGCNDNYSWNCGIEGETNDLNVLSLRSRQMKNFHVALMISQGTPMMLMGDEYGHTRYGNNNSYGHDTHINNFQWGQLEERKDGHFRFFSEMIKFRHNHPILRRDRFLNKNDVTWHENRWENQDSKFLAFTIHDHSSGGDIYLAFNAHEYFVDAVIPPPPHHKSWSRVVDTNLESPKDIVPEGVPFTGSGYRIAPYSSILLKAKP

SEQ ID NO: 1518 - DNA, 1889 bp, Zea mays subsp. mays
  misc_feature (1)..(1889): Ceres Seq. ID no. 14309719
gtcccccccccccccccatttagctaaagtctgaaaagacgtttcaacgttcgtttaaacgtttaaacgttgaaaagttggttcataacgttttaacgttttaccgctttaataaccatgctataggccctttcgtatttctgttgacaaatgacagatgtaattttatgttttttaccctatgattgtatacaaattgaatctaaaaaagctaaggcagcatatcaaattctcttttgtgaaatattgaattcatgctcttgctttcttttgcgtaagtctaatgtcataggttttatcttcagctttataccaaaaacctacatctggatgaaaaagtcgatcttcagactgttgctgtgttctgcaatggctatgttggagctgatttagaagcattgtgtcgagaagctgccaagcttgcatatcatagaatgttaaacttatgtgagggtgacaaagtacttaaactacttatggaggactgggaatgtgctagatctatggtgggaccaagcataacaagaggggtaaccaaagaaatttcaattgtttagtgggatgatataggaggcttgaaagatctaaagaaagagcttcagaaagctgttgaatggcccatcaagcatgctgctgcattttctagacttgggataccaccagtccggggggtgctgttgcatggcccaccagggtgctccaagactactcttgccaaggctgcagcgcatgctgcccaagcttctttcttttctttgaggttcatcaggaaacaactttttattttgggaaaataacagctcactttccgttgtgtgaagaacatagaacttttagcccacagtatttaaaacagattaacataatttacttatttctgccagttgagttaatatcttgtacccagaagtcagcgaatgcttgaaaataatcaactaaacatgttcagataaatataccctcatcaacactcactagcttttcacataaattcttataacagtggtgcagatttatattccaagtatgttggagaaggggaagctctgttgcgtagaacatttcagaaagctcgtcttgcttctcccagcattatattttttgatgaggctgatgccattgcccccaagagaactggccctggtgggaattctagtggcaatgccacagtcggagaaagacttttgtcgactttattgaccgaaatggatggtttagaactggctacggtactgttagcctgctgataactttctgtgtgattctactgattatatctacatgtatattcactagaaggcaatcctttttttagggaattatcgtattgggtgctacgaatcgcccaaatgcaattgatgctgctcttttgcgtccagggcgtttcgataaggtccttcagtgcttctgttaatgacacatggacatatagacactggccataatttcccattgatctgcaggtgctgtatgtcccgccaccagatgtggaagggcgacacgagatactacgcatccatacacggaaaatgaagttgggagaggatgtagatctttggaaggttgcagagtgtaccgagctattcaccggtgctgatcttgaaggcctttgcagggaagctggaatggcagcattgagggaagatatctcagcaagtttgatacatgacgctcacttccaagccgcacgaagttcattaagcccctctcttacaaaagcagtagttgatgagtactcaaaggtagatataaatgatccatcgagtaggaaacattgatatgttctttttctatttctttgttgcacactaggcgcaatacacatttgcaaccttgccaccaagacacacagatggagatagagagatctttttaagaatattcttttt

SEQ ID NO: 1519 - protein, 82 aa, Zea mays subsp. mays
  misc_feature (1)..(82): Ceres Seq. ID no. 14309720
MKLGEDVDLWKVAECTELFTGADLEGLCREAGMAALREDISASLIHDAHFQAARSSLSPSLTKAVVDEYSKVDINDPSSRKH

SEQ ID NO: 1520 - protein, 80 aa, Zea mays subsp. mays
  misc_feature (1)..(80): Ceres Seq. ID no. 14309721
MTDVILCFLPYDCIQIESKKAKAAYQILFCEILNSCSCFLLRKSNVIGFIFSFIPKTYIWMKKSIFRLLLCSAMAMLELI

SEQ ID NO: 1521 - protein, 57 aa, Zea mays subsp. mays
  misc_feature (1)..(57): Ceres Seq. ID no. 14309722
MLEKGKLCCVEHFRKLVLLLPALYFLMRLMPLPPRELALVGILVAMPQSEKDFCRLY

SEQ ID NO: 1522 - DNA, 1042 bp, Zea mays subsp. mays
  misc_feature (1)..(1042): Ceres Seq. ID no. 14312507
caactcagttattctacagctttaattttgcagagcgaccaccagtccaggtccagcgcgggacgcatcacatacacgcggtaccttcgttcgttctcaagcttatagcgcccgatcgaccctgcgcggagctagttcgttcgttccggcaggcggcggcagcgaagcagtgcgacgacgacgacgaggtacgtagagagcgagaggatagatgtcgagccgaaggtcgtcgtcgcacggcaacatctccgaggacgagatgaacgagctcgtctccaagctccaggccctgctccccagctcccgccgccgccgcggctccggccaggcgtcgacggcgaagctgctgaaggagacctgcagctacatcaagagcctccagcgggaggtggacgacctcagcgaccggctgtcggacctcttgtccaccatggaccacaacagccccgcggcggagatcatccgaagcatcctccgctcctgatcgcgcgcaagggcgaggtcaacgaacgccggcctccgatcgatcgccgacagcgcgcgctctccggccggctggtcacgtgcgggagctgagctcaattaggtagctagggtatatatacatataatatatatatctacatgtacgtgtatctaccttttcctttaccagtctccctagatctgagatcatgtggctagctccgtataaaaatgtactagccacacgctgacacgcacacgtatgcatgatggtctctgcgctaagcttcactgggtagtagggtatagcactagagcctaagcaagcttatcctcctcactttagtatagctcgcagcagcagcagtctctcgattcctcggcgatcttcggtggcttaattggatcgagctggctagtgcgctctctctctctctctcatctctagcaggcaggaaaagagacaaccgaccgaccactactagcctagcctagagcaaattgactgtcgttatgatgatgatgatgtactgctaaagcttttattaacgacttcaataacatgtacgtcctgcgg

SEQ ID NO: 1523 - protein, 90 aa, Zea mays subsp. mays
  misc_feature (1)..(90): Ceres Seq. ID no. 14312508
MSSRRSSSHGNISEDEMNELVSKLQALLPSSRRRRGSGQASTAKLLKETCSYIKSLQREVDDLSDRLSDLLSTMDHNSPAAEIIRSILRS

SEQ ID NO: 1524 - protein, 86 aa, Zea mays subsp. mays
  misc_feature (1)..(86): Ceres Seq. ID no. 14312509
TQLFYSFNFAERPPVQVQRGTHHIHAVPSFVLKLIAPDRPCAELVRSFRQAAAAKQCDDDDEVRREREDRCRAEGRRRTATSPRTR

SEQ ID NO: 1525 - protein, 74 aa, Zea mays subsp. mays
  misc_feature (1)..(74): Ceres Seq. ID no. 14312510
MNELVSKLQALLPSSRRRRGSGQASTAKLLKETCSYIKSLQREVDDLSDRLSDLLSTMDHNSPAAEIIRSILRS

SEQ ID NO: 1526 - DNA, 421 bp, Zea mays subsp. mays
  misc_feature (1)..(421): Ceres Seq. ID no. 14312515
acctattggacaggcaacgtcctcatcttcatctcccaggttttcccctccaatcacccccaggtcttcctctcgcgagttgcggtctcgcggccccctccgccgaccgcaactcgcgggaggaacaccgggcgtgtaggagtgatcaagaacagggagaagcacaagggcagcttcgagaccatccacgtgctgcttggagctttttgctatgtctagttttttcctatttgttgtacaagaaaacataaaatggaattcaactttggtggccgcaaaagtttagagacttgatttcatataaagttaggctgaacattactgcaaacagttgtattttagtttagatttagagtacacttatgtatgtgttgtttgacaatgcttatttatgatatattgaatggtacttatttatatt

SEQ ID NO: 1527 - protein, 82 aa, Zea mays subsp. mays
  misc_feature (1)..(82): Ceres Seq. ID no. 14312516
LLDRQRPHLHLPGFPLQSPPGLPLASCGLAAPSADRNSREEHRACRSDQEQGEAQGQLRDHPRAAWSFLLCLVFSYLLYKKT

SEQ ID NO: 1528 - protein, 72 aa, Zea mays subsp. mays
  misc_feature (1)..(72): Ceres Seq. ID no. 14312517
TYWTGNVLIFISQVFPSNHPQVFLSRVAVSRPPPPTATRGRNTGRVGVIKNREKHKGSFETIHVLLGAFCYV

SEQ ID NO: 1529 - protein, 45 aa, Zea mays subsp. mays
  misc_feature (1)..(45): Ceres Seq. ID no. 14312518
PIGQATSSSSSPRFSPPITPRSSSRELRSRGPLRRPQLAGGTPGV

SEQ ID NO: 1530 - DNA, 807 bp, Zea mays subsp. mays
  misc_feature (1)..(807): Ceres Seq. ID no. 14312565
agtctgcaataggggatctctgtaaacaaccgatcctcatcagagctgggggaggaatatacaattacctttatcagctaagatcatcatctgatgaagctggtcaaacaaagtctgagggaagcagtatacttggtaaatttcagataacatggcgtacgaacctgggtgaaccaggccgtttgcagactcagaacattcatagcactccgactgcaagcaaagatgttaatctccgtgctgtgaaagttccacctattatatatgtggaaagagcatttatggtcaatctgtgccttacaaatcaaacggacaaaactgtgggcccttttgaagtatttctggctccaagcatgtcgggtgaagacagagctgttctagtcaatgggccacagaagttgattttacctttggtggaggcttttgagtctatcaaatttgatctgagcatggtgaccacccagctaggagtgcaaaagatttccggaattacaatgtacgccgtgcaggaaaagaagtactatgaacctttgcccgacatagagatttttgttgatgcagaatagcaacaccaaattgggacccatttgacgagctgaagatgcatttgtacttttcattaccatgggaggtctacatagtttacataaagcactggctgatgtatattgatacatgcgattgtcatattgatatcaaattgacttctgtcggatgtcactcaaccttggattaccacattctcactcaaccttgagctgcacattgatcatgctctgctaaagactgcacggattacaattcttc

SEQ ID NO: 1531 - protein, 187 aa, Zea mays subsp. mays
  misc_feature (1)..(187): Ceres Seq. ID no. 14312566
SAIGDLCKQPILIRAGGGIYNYLYQLRSSSDEAGQTKSEGSSILGKFQITWRTNLGEPGRLQTQNIHSTPTASKDVNLRAVKVPPIIYVERAFMVNLCLTNQTDKTVGPFEVFLAPSMSGEDRAVLVNGPQKLILPLVEAFESIKFDLSMVTTQLGVQKISGITMYAVQEKKYYEPLPDIEIFVDAE

SEQ ID NO: 1532 - protein, 94 aa, Zea mays subsp. mays
  misc_feature (1)..(94): Ceres Seq. ID no. 14312567
MVNLCLTNQTDKTVGPFEVFLAPSMSGEDRAVLVNGPQKLILPLVEAFESIKFDLSMVTTQLGVQKISGITMYAVQEKKYYEPLPDIEIFVDAE

SEQ ID NO: 1533 - DNA, 618 bp, Zea mays subsp. mays
  misc_feature (1)..(618): Ceres Seq. ID no. 14312650
agagtatccaaaagggatttgcatatccacgcattttctcagatgctttagaaacgttagttgctgatggatgcactctggactatatataggtagacaagacaccagtgctctttgcttcctcctcgcacaacaaagcagctcacttgagttcaattcagccatgaggagccaggtcgcagcagtagccatgtttttgctcctcctggccttgggtgctgaggccgacctctgcgtcacgcgtagcaggaccttcaaagggtggtgccaccagagcgagaactgcatcaccgtctgcaagagcgagggcaataccggcgggttctgcaagctcggggcttgcatgtgcaccaaagagtgtgtccgaagtactgacgctgctggtgctaataaagccccacagcaccatttgagttgatgagtagtaatgaagaacgcttttgttatgccagcgcaagctctagaattcgaggccgagatgaccaaaaataaatgattttgttactctactatatgagcgaatatcggttgtggttgttctcaacctagtgacagtttttcagaaccgccaatgttaagtacaagtaatagaaatcaattttcactgacggtcgaggt

SEQ ID NO: 1534 - protein, 115 aa, Zea mays subsp. mays
  misc_feature (1)..(115): Ceres Seq. ID no. 14312651
MHSGLYIGRQDTSALCFLLAQQSSSLEFNSAMRSQVAAVAMFLLLLALGAEADLCVTRSRTFKGWCHQSENCITVCKSEGNTGGFCKLGACMCTKECVRSTDAAGANKAPQHHLS

SEQ ID NO: 1535 - protein, 84 aa, Zea mays subsp. mays
  misc_feature (1)..(84): Ceres Seq. ID no. 14312652
MRSQVAAVAMFLLLLALGAEADLCVTRSRTFKGWCHQSENCITVCKSEGNTGGFCKLGACMCTKECVRSTDAAGANKAPQHHLS

SEQ ID NO: 1536 - protein, 75 aa, Zea mays subsp. mays
  misc_feature (1)..(75): Ceres Seq. ID no. 14312653
MFLLLLALGAEADLCVTRSRTFKGWCHQSENCITVCKSEGNTGGFCKLGACMCTKECVRSTDAAGANKAPQHHLS

SEQ ID NO: 1537 - DNA, 429 bp, Zea mays subsp. mays
  misc_feature (1)..(429): Ceres Seq. ID no. 14312687
cacacccacacagcaagccagcagagcagaaagcagccgcagccccagcccccacaagacgaggcaacaatggcgctagaagcagccaccgccccccgcgcactcctcgccgcgtgcctcgtcctgctggtcctcggcggcggcaccggcccgtcgtcggtgctgcgcggcgccggggcgcaggccggcgggcagtgcctgccgcagctgaaccgcctcctggcgtgccgcgcgtacctggtgcccggcgcgccggaccccagcgcggactgctgcagcgcgctgagcgccgtgtcgcacgagtgcgcggggggcggtggctgcttatatggctgtggctgccttgtgactcgtgtgggtctgtgggctgcggggtggttctaaagctctgcagccccgagtgtttatttattaattattgttgaggtt

SEQ ID NO: 1538 - protein, 140 aa, Zea mays subsp. mays
  misc_feature (1)..(140): Ceres Seq. ID no. 14312688
HPHSKPAEQKAAAAPAPTRRGNNGARSSHRPPRTPRRVPRPAGPRRRHRPVVGAARRRGAGRRAVPAAAEPPPGVPRVPGARRAGPQRGLLQRAERRVARVRGGRWLLIWLWLPCDSCGSVGCGVVLKLCSPECLFINYC

SEQ ID NO: 1539 - protein, 127 aa, Zea mays subsp. mays
  misc_feature (1)..(127): Ceres Seq. ID no. 14312689
HTHTASQQSRKQPQPQPPQDEATMALEAATAPRALLAACLVLLVLGGGTGPSSVLRGAGAQAGGQCLPQLNRLLACRAYLVPGAPDPSADCCSALSAVSHECAGGGGCLYGCGCLVTRVGLWAAGWF

SEQ ID NO: 1540 - protein, 104 aa, Zea mays subsp. mays
  misc_feature (1)..(104): Ceres Seq. ID no. 14312690
MALEAATAPRALLAACLVLLVLGGGTGPSSVLRGAGAQAGGQCLPQLNRLLACRAYLVPGAPDPSADCCSALSAVSHECAGGGGCLYGCGCLVTRVGLWAAGWF

SEQ ID NO: 1541 - DNA, 2798 bp, Zea mays subsp. mays
  misc_feature (1)..(2798): Ceres Seq. ID no. 14313475
ttttaatccgcttaactatttcacaagaacgtcgtgtcagcaaagcagctgcacgtgctttggcaatcctaggggagaatgagaacttgcgtcgagcaattagaggaaggccagttgcaaagaagggtctacgcattctatcaatggatggtggtggcatgaagggccttgcaactgttcaaatgcttaaacagatagagcaaggaactgggaaacgcatacatgaaatgtttgatctcatatgtggtacgtccactggtggcatgcttgcaatggctcttgggatcaagcagatgactttggatcagtgtgaagaaatatacacaaaacttggaaaacttgtatttgctgaacctatcccaaaggatgaagctgctacgtggaaggagaagcttgatcaacttttcaaaagttcgtcacaaagttttagagtggttgtacatgggtccaagcacagcgcagatcaattcgagaggttactaaaggaaatgtgtgccgatgaagatggtgaccttctaattgaatctgctgtaaaaggcattccaaaggtttttgctgtatccactttagtcagtgtcatgcctgctcaaccgtatatattccgaaactatcagtatcctcctggcactctggaggtatcaccaggaatggcagaaagtccatcaattagtgcaattggtactgctgtttctggtgcgccagttggtattaaacgtggtgccttcatggggagctgcaagcatcgcgtgtgggaagcgataagagcatcatctgcagcaccatattatttggatgatttctctgttgatgccaatcgttggcaagatggagctattgtagccaacaatcctacgatctttgccattagagaagcacaacttttgtggccagatacacgaatagattgtctagtttcgataggatgtggctcagttccaactaagagtcgtagaggtggatggcgctacttggacacagggcaagtgttaatagaaagtgcatgctcagtggagagagttgaagaaactttggatacactgataccaatgcttcctgaaatgcaatatttccgctttaatccagtggatgaacgatgtggtatggaattagatgaaactgatcctgctatctggcttaagttggaagctgcagctgatgagtacattcagaagaattttctggctttcaagaatctttgtgagcttctggtcccaaggtaccaagaggaagaaaagtcatctgatatttacaaatccctttcattttcaaggctgacatcattaaatcaaggtttcagcgaaagtaatcctaccttaggatggaggcgtgtggttttacttgtcgaggcttcctttagtcctgattttgggaagaaaataaatcatgcacgctcccttgaatctttctgctcccagaatggtattaggttagctctaatgaatagtgcttctgggtttgggaaaccagccactgcacttcctaccccgataacttctcccttgtttactggaagtttcccatctagtccacttctatatagtccagatggcactcaacggatcggtcgaattgacctagttccaccacttagtttggatggccacccaactacaaagtcctcaccaccaacatcaccattgaagtcaaggcagccatcagcacatgttcggtcattgtatgataaactgcagaatatgcctcaagttggtgtaatacacctggctcttcaaaatgattcaaccggttcagtattgagttggcagaatgatgtatttgtggttgctgaacctggagaacttgcagacagatttctgcaatctgtcaaaactagcttgtcaaccttgttgcgtgggcgtaatagaaagggtgcatattccttgtccaagatttcatgtttatctgagctggttgctgaatgtccatcttttgaaatcggtgggatacaccaccgctatataggtcgacaaacacaagtaatggaagataaccaagaaattggcgcatatatgtttaggaggacagtgcctgctgttcacatggcacctgaagatgttcgatggatggttggagcatggagggagagaatcattgtatgcagcggtaagtatggcctcgctcatggcctggtgaaggcattcatggattgtggcgccaaagcagtcatctcatcgtccatcgagcctccggattcccagacaatagtctaccatgggatggatgtcaatggaagcctagagaatgggaagtttgtcatcggggatgaagaagccgatgaatcggagcctgaacctgttagccctgtaagtgactgggaggacagcgacgtggagaaaggtggcaaccatgacatggatgatgaggagtacctggctcagttcatgtgcctgatgtacgacaaattgttccgtgagggtgtgactgtggatacagctctgcagcaagctctccgctcgcatcccaagttaaagtacagctgccacttacctcacgttttgtagttagggacattgacaaaccatacgggagtatagcaaaacggacatggacaacaggaaatgaataaggattgggtggattcatagtggggttatagaggtttatatcgtgttcgttgtgcaggcgtagtgacagagagtaccccctttctgaatctttgggcgagaaagcctatgtaaacctgtgtgctcatgagcagagtagttaagctgacgaataaaagcatgatgaagggcattgtaatctggatgtgcatttttgtttcagctaggagaatggacattcgcaatgttttggtgtcc

SEQ ID NO: 1542 - protein, 831 aa, Zea mays subsp. mays
  misc_feature (1)..(831): Ceres Seq. ID no. 14313476
LIRLTISQERRVSKAAARALAILGENENLRRAIRGRPVAKKGLRILSMDGGGMKGLATVQMLKQIEQGTGKRIHEMFDLICGTSTGGMLAMALGIKQMTLDQCEEIYTKLGKLVFAEPIPKDEAATWKEKLDQLFKSSSQSFRVVVHGSKHSADQFERLLKEMCADEDGDLLIESAVKGIPKVFAVSTLVSVMPAQPYIFRNYQYPPGTLEVSPGMAESPSISAIGTAVSGAPVGIKRGAFMGSCKHRVWEAIRASSAAPYYLDDFSVDANRWQDGAIVANNPTIFAIREAQLLWPDTRIDCLVSIGCGSVPTKSRRGGWRYLDTGQVLIESACSVERVEETLDTLIPMLPEMQYFRFNPVDERCGMELDETDPAIWLKLEAAADEYIQKNFLAFKNLCELLVPRYQEEEKSSDIYKSLSFSRLTSLNQGFSESNPTLGWRRVVLLVEASFSPDFGKKINHARSLESFCSQNGIRLALMNSASGFGKPATALPTPITSPLFTGSFPSSPLLYSPDGTQRIGRIDLVPPLSLDGHPTTKSSPPTSPLKSRQPSAHVRSLYDKLQNMPQVGVIHLALQNDSTGSVLSWQNDVFVVAEPGELADRFLQSVKTSLSTLLRGRNRKGAYSLSKISCLSELVAECPSFEIGGIHHRYIGRQTQVMEDNQEIGAYMFRRTVPAVHMAPEDVRWMVGAWRERIIVCSGKYGLAHGLVKAFMDCGAKAVISSSIEPPDSQTIVYHGMDVNGSLENGKFVIGDEEADESEPEPVSPVSDWEDSDVEKGGNHDMDDEEYLAQFMCLMYDKLFREGVTVDTALQQALRSHPKLKYSCHLPHVL

SEQ ID NO: 1543 - protein, 784 aa, Zea mays subsp. mays
  misc_feature (1)..(784): Ceres Seq. ID no. 14313477
MDGGGMKGLATVQMLKQIEQGTGKRIHEMFDLICGTSTGGMLAMALGIKQMTLDQCEEIYTKLGKLVFAEPIPKDEAATWKEKLDQLFKSSSQSFRVVVHGSKHSADQFERLLKEMCADEDGDLLIESAVKGIPKVFAVSTLVSVMPAQPYIFRNYQYPPGTLEVSPGMAESPSISAIGTAVSGAPVGIKRGAFMGSCKHRVWEAIRASSAAPYYLDDFSVDANRWQDGAIVANNPTIFAIREAQLLWPDTRIDCLVSIGCGSVPTKSRRGGWRYLDTGQVLIESACSVERVEETLDTLIPMLPEMQYFRFNPVDERCGMELDETDPAIWLKLEAAADEYIQKNFLAFKNLCELLVPRYQEEEKSSDIYKSLSFSRLTSLNQGFSESNPTLGWRRVVLLVEASFSPDFGKKINHARSLESFCSQNGIRLALMNSASGFGKPATALPTPITSPLFTGSFPSSPLLYSPDGTQRIGRIDLVPPLSLDGHPTTKSSPPTSPLKSRQPSAHVRSLYDKLQNMPQVGVIHLALQNDSTGSVLSWQNDVFVVAEPGELADRFLQSVKTSLSTLLRGRNRKGAYSLSKISCLSELVAECPSFEIGGIHHRYIGRQTQVMEDNQEIGAYMFRRTVPAVHMAPEDVRWMVGAWRERIIVCSGKYGLAHGLVKAFMDCGAKAVISSSIEPPDSQTIVYHGMDVNGSLENGKFVIGDEEADESEPEPVSPVSDWEDSDVEKGGNHDMDDEEYLAQFMCLMYDKLFREGVTVDTALQQALRSHPKLKYSCHLPHVL

SEQ ID NO: 1544 - protein, 779 aa, Zea mays subsp. mays
  misc_feature (1)..(779): Ceres Seq. ID no. 14313478
MKGLATVQMLKQIEQGTGKRIHEMFDLICGTSTGGMLAMALGIKQMTLDQCEEIYTKLGKLVFAEPIPKDEAATWKEKLDQLFKSSSQSFRVVVHGSKHSADQFERLLKEMCADEDGDLLIESAVKGIPKVFAVSTLVSVMPAQPYIFRNYQYPPGTLEVSPGMAESPSISAIGTAVSGAPVGIKRGAFMGSCKHRVWEAIRASSAAPYYLDDFSVDANRWQDGAIVANNPTIFAIREAQLLWPDTRIDCLVSIGCGSVPTKSRRGGWRYLDTGQVLIESACSVERVEETLDTLIPMLPEMQYFRFNPVDERCGMELDETDPAIWLKLEAAADEYIQKNFLAFKNLCELLVPRYQEEEKSSDIYKSLSFSRLTSLNQGFSESNPTLGWRRVVLLVEASFSPDFGKKINHARSLESFCSQNGIRLALMNSASGFGKPATALPTPITSPLFTGSFPSSPLLYSPDGTQRIGRIDLVPPLSLDGHPTTKSSPPTSPLKSRQPSAHVRSLYDKLQNMPQVGVIHLALQNDSTGSVLSWQNDVFVVAEPGELADRFLQSVKTSLSTLLRGRNRKGAYSLSKISCLSELVAECPSFEIGGIHHRYIGRQTQVMEDNQEIGAYMFRRTVPAVHMAPEDVRWMVGAWRERIIVCSGKYGLAHGLVKAFMDCGAKAVISSSIEPPDSQTIVYHGMDVNGSLENGKFVIGDEEADESEPEPVSPVSDWEDSDVEKGGNHDMDDEEYLAQFMCLMYDKLFREGVTVDTALQQALRSHPKLKYSCHLPHVL

SEQ ID NO: 1545 - DNA, 1387 bp, Zea mays subsp. mays
  misc_feature (1)..(1387): Ceres Seq. ID no. 14313491
aatcaaatcccccagcaagtcagccccgccccgccccgcgccgacgcctctccccgatcccgatctgtgtgcctggctgcctgcaacctccgtgggatggaggcggcgcggcagcagcaggaggagtgcccgtgcggcggggccgaggccgctgaccagttcgagcggctgcacgacgcggtgctgctcgacgtcctcaatcgcatcggcgacgtcaaggcgctcggccgctgcgccctcgtctcgcgccgcttccacgcgctcgtgccgctcgtcgactccgtcttcgtccgcgtcgactgcgtcatccctgacgacccgccgccctcgtcctcctcctcctcctcctcctcttccgccgcaccaggcaccccgccgcggcaggcgccagccccaaccgcgcgcgggcgcggcgcgctcgcgcacatcgtgcgcgtcctgctcggcggcatcgccaggcccatccacgcgctcggccagatcctctcccccgccgccgcggccgtctcccggcgctccgaggcactgcccgcttccccgcgcgcgcccgtcgcggacgtctctcaccactccccctccgaggtgctccgctccttcaaggagctgcggcgccttcacatcgagctgcccacgggcgagctcggcattgacgacggtgtgctccttaagtggaaggccgacttcggctccaccctcgtcagctgcgtcatcctcggcgcctcgtcgatctcgtccaagccgccgacagggtacactcaggcggaatcggaaactgctacggccgccactcccgataccagtcgggagactgaagagccggggagcctacctgattctctttatacaaatggaggactcaagcttcgcgttgtctggaccatcagctccctgattgccgcgtcggcgaggcattacttgctgcagccgattatctggaatcacgaattgctggagagcttggacctgacagatgctgacgggcaaggggtgctcaccatggacaagaggcagctgcaggaactgcgggtgcggcccgtctttccgtcagggagctcgcaccgcaccctcatgccggctctcagtatgcgtctgcactacgcaccgctcattgagctgcctgggggaacgctgctgaagggtgcgacactagtggcgatcaaaccaagcgaagatgccttgagggagggccaaggggctggggctgcaggtcctgttggtacatgctggatttcagaggcctttgaggagccatatcggactgcggcaaaggtgcttctcaagagaagggcatattgtcttgaaatgaactcgttctgagcactagggggtttacttccacagagttctacccttctgacaggtgaaatgccactttacagttctaaat

SEQ ID NO: 1546 - protein, 438 aa, Zea mays subsp. mays
  misc_feature (1)..(438): Ceres Seq. ID no. 14313492
NQIPQQVSPAPPRADASPRSRSVCLAACNLRGMEAARQQQEECPCGGAEAADQFERLHDAVLLDVLNRIGDVKALGRCALVSRRFHALVPLVDSVFVRVDCVIPDDPPPSSSSSSSSSSAAPGTPPRQAPAPTARGRGALAHIVRVLLGGIARPIHALGQILSPAAAAVSRRSEALPASPRAPVADVSHHSPSEVLRSFKELRRLHIELPTGELGIDDGVLLKWKADFGSTLVSCVILGASSISSKPPTGYTQAESETATAATPDTSRETEEPGSLPDSLYTNGGLKLRVVWTISSLIAASARHYLLQPIIWNHELLESLDLTDADGQGVLTMDKRQLQELRVRPVFPSGSSHRTLMPALSMRLHYAPLIELPGGTLLKGATLVAIKPSEDALREGQGAGAAGPVGTCWISEAFEEPYRTAAKVLLKRRAYCLEMNSF

SEQ ID NO: 1547 - protein, 406 aa, Zea mays subsp. mays
  misc_feature (1)..(406): Ceres Seq. ID no. 14313493
MEAARQQQEECPCGGAEAADQFERLHDAVLLDVLNRIGDVKALGRCALVSRRFHALVPLVDSVFVRVDCVIPDDPPPSSSSSSSSSSAAPGTPPRQAPAPTARGRGALAHIVRVLLGGIARPIHALGQILSPAAAAVSRRSEALPASPRAPVADVSHHSPSEVLRSFKELRRLHIELPTGELGIDDGVLLKWKADFGSTLVSCVILGASSISSKPPTGYTQAESETATAATPDTSRETEEPGSLPDSLYTNGGLKLRVVWTISSLIAASARHYLLQPIIWNHELLESLDLTDADGQGVLTMDKRQLQELRVRPVFPSGSSHRTLMPALSMRLHYAPLIELPGGTLLKGATLVAIKPSEDALREGQGAGAAGPVGTCWISEAFEEPYRTAAKVLLKRRAYCLEMNSF

SEQ ID NO: 1548 - protein, 296 aa, Zea mays subsp. mays
  misc_feature (1)..(296): Ceres Seq. ID no. 14313494
IKSPSKSAPPRPAPTPLPDPDLCAWLPATSVGWRRRGSSRRSARAAGPRPLTSSSGCTTRCCSTSSIASATSRRSAAAPSSRAASTRSCRSSTPSSSASTASSLTTRRPRPPPPPPPLPPHQAPRRGRRQPQPRAGAARSRTSCASCSAASPGPSTRSARSSPPPPRPSPGAPRHCPLPRARPSRTSLTTPPPRCSAPSRSCGAFTSSCPRASSALTTVCSLSGRPTSAPPSSAASSSAPRRSRPSRRQGTLRRNRKLLRPPLPIPVGRLKSRGAYLILFIQMEDSSFALSGPSAP

SEQ ID NO: 1549 - DNA, 521 bp, Zea mays subsp. mays
  misc_feature (1)..(521): Ceres Seq. ID no. 15169938
ggtgcaacgctggtggccatcaagccaagtgaggaaggaacaggggacacagtttggaatgaaactgctgatgcagcctgggtgttggatgcattcgaggagccatatagaacagcggcgaagatgcttctcaagcgaaggacctacagccttgagatgaattcattctaatctatgggagatggcattttggaagcttcagatgtgagaggatgttataactaatgttgtggatgcctttcatgcacctacttcggacgtggcaagtatgcgctattgtacgctatcagcaagaacatggatggaatcaaaacagaaattttgttaacttatgatgctggagtcgaaaggcaaaaccatggccgagttgattgtgttctctgagatcagatgtggcatagatagttttttttatatatatgtatccacatcaaggtactaactttatgtaatttctacttttggattgtggcattgtgccgcttgtttgcagaataacatgcaatgcgctctgttcttct

SEQ ID NO: 1550 - protein, 56 aa, Zea mays subsp. mays
  misc_feature (1)..(56): Ceres Seq. ID no. 15169939
GATLVAIKPSEEGTGDTVWNETADAAWVLDAFEEPYRTAAKMLLKRRTYSLEMNSF

SEQ ID NO: 1551 - protein, 52 aa, Zea mays subsp. mays
  misc_feature (1)..(52): Ceres Seq. ID no. 15169940
VQRWWPSSQVRKEQGTQFGMKLLMQPGCWMHSRSHIEQRRRCFSSEGPTALR

SEQ ID NO: 1552 - protein, 36 aa, Zea mays subsp. mays
  misc_feature (1)..(36): Ceres Seq. ID no. 15169941
MMLESKGKTMAELIVFSEIRCGIDSFFYIYVSTSRY

SEQ ID NO: 1553 - DNA, 438 bp, Zea mays subsp. mays
  misc_feature (1)..(438): Ceres Seq. ID no. 15170011
gattttgatgaggatgaactagaagctgaacttgcggatcttgagggggaggagttggaggcagagctgcttgcacctaccacaacagctccgtccacagctccagtgcgtgtacctactgctcagcagtccactaggccatctggtcagagtagcaaagctgaagacgacgaactggcagcactacaggcagaaatggctatgtaaatataggcattggcatggtcatcttggatttcagattctgcggttatctcgcaactctggtatactctgaggatcttcctaggaagacaagctttttcagaatcacaaacacaagctgcataccagcctaactgcttatgtatcatagcatgctatgttattgttttgtaatgaaatattttataggctaataaacatatttctattaataaattggttcgtgtcagtatt

SEQ ID NO: 1554 - protein, 68 aa, Zea mays subsp. mays
  misc_feature (1)..(68): Ceres Seq. ID no. 15170012
DFDEDELEAELADLEGEELEAELLAPTTTAPSTAPVRVPTAQQSTRPSGQSSKAEDDELAALQAEMAM

SEQ ID NO: 1555 - protein, 38 aa, Zea mays subsp. mays
  misc_feature (1)..(38): Ceres Seq. ID no. 15170013
MVILDFRFCGYLATLVYSEDLPRKTSFFRITNTSCIPA

SEQ ID NO: 1556 - DNA, 429 bp, Zea mays subsp. mays
  misc_feature (1)..(429): Ceres Seq. ID no. 15170018
attgtcattcctgagcaatggatgcctgcaataatcaatccaagcaaatcatcatcaaatatttgccaagaagattctcaaaatgggtctcaagagtgatatgatgttcgataagtccggttttttgtcctgtcctgtcgtgaaaagttctgaactgctagtctggcgcaatgccttggctgctactgttgcgtcaaagtgatattctggctgaccgcattctcttgtgctaattggcacaggtccgattgcatcattgagtccctcaagcatcggatgtgtatattcccaaagatgtaattatgccctagtcgtagttttccccccttcaataaatcagttccatagtatcatcacttgtgtcgtcgtcgcttaatttttgttgtatgtatagaactagcaggacgcttgtttttgtggtcgttttgt

SEQ ID NO: 1557 - protein, 39 aa, Zea mays subsp. mays
  misc_feature (1)..(39): Ceres Seq. ID no. 15170019
MGLKSDMMFDKSGFLSCPVVKSSELLVWRNALAATVASK

SEQ ID NO: 1558 - protein, 33 aa, Zea mays subsp. mays
  misc_feature (1)..(33): Ceres Seq. ID no. 15170020
MMFDKSGFLSCPVVKSSELLVWRNALAATVASK

SEQ ID NO: 1559 - protein, 32 aa, Zea mays subsp. mays
  misc_feature (1)..(32): Ceres Seq. ID no. 15170021
IVIPEQWMPAIINPSKSSSNICQEDSQNGSQE

SEQ ID NO: 1560 - DNA, 660 bp, Zea mays subsp. mays
  misc_feature (1)..(660): Ceres Seq. ID no. 15173998
attctcctctgcctctttcctcccggctcgcaaaaccctagtttcgaatctttaaccacaacagaaatggctttctgcaaaagtctcggtggtctactcagacaaggtgtggtttctcagaccggaaatattccggttacgtctgtgctcggttctctccggtacatgtctaccaagcttttcgttggaggtctgtcatggggaactgatgaccagtccttgagggaggcttttgcaaactttggtgaagtggtcgatgctaaagtcattgttgatagagaaacaggaaggtcaagaggttttggatttgtcaactttactgatgagaccgctgctaatactgccatttcagagatggatggaaaggatctgaatggacggagcattcgggtgaatgttgctaacgaaagaccaagtactccccggtatggcggaggtggtggctacggtggtggtggtggctacggtggtggtggctacggtggaggtagctatggagcaggtggtggtgatggtggcggttactaaacagagaagagtttcttgtgaaaagatttgatggtttttgtttagttgggtttctttgattgaatcttgtgttacaacttgaacctcgttagccattcatcgttttttcgattaacgtcttggattgatggt

SEQ ID NO: 1561 - protein, 175 aa, Zea mays subsp. mays
  misc_feature (1)..(175): Ceres Seq. ID no. 15173999
ILLCLFPPGSQNPSFESLTTTEMAFCKSLGGLLRQGVVSQTGNIPVTSVLGSLRYMSTKLFVGGLSWGTDDQSLREAFANFGEVVDAKVIVDRETGRSRGFGFVNFTDETAANTAISEMDGKDLNGRSIRVNVANERPSTPRYGGGGGYGGGGGYGGGGYGGGSYGAGGGDGGGY

SEQ ID NO: 1562 - protein, 153 aa, Zea mays subsp. mays
  misc_feature (1)..(153): Ceres Seq. ID no. 15174000
MAFCKSLGGLLRQGVVSQTGNIPVTSVLGSLRYMSTKLFVGGLSWGTDDQSLREAFANFGEVVDAKVIVDRETGRSRGFGFVNFTDETAANTAISEMDGKDLNGRSIRVNVANERPSTPRYGGGGGYGGGGGYGGGGYGGGSYGAGGGDGGGY

SEQ ID NO: 1563 - protein, 120 aa, Zea mays subsp. mays
  misc_feature (1)..(120): Ceres Seq. ID no. 15174001
MSTKLFVGGLSWGTDDQSLREAFANFGEVVDAKVIVDRETGRSRGFGFVNFTDETAANTAISEMDGKDLNGRSIRVNVANERPSTPRYGGGGGYGGGGGYGGGGYGGGSYGAGGGDGGGY

SEQ ID NO: 1564 - DNA, 823 bp, Zea mays subsp. mays
  misc_feature (1)..(823): Ceres Seq. ID no. 15174034
attttcgtctctgtaaacatctcttgctccatctcttctctgtgtctctctctgcgatgggttttccgacgggtataaaggagcttgagattccggattacatatttaagatactttacgtcatcggtttcttcagagacctggtcaacgctctctgtccttacatcggtttaccccattttttagacgatggcatttctcgacccggcccgatcgtacccgacaacacggccgcgactctcgcttacgaggtttccccggttgttcgtttctcggatcttcagaccgatctcgaagactgctgtacggtttgtctcttggactttgcatacgatgataaagttagacagcttccgaactgccgacacgtgttccacaatcgttgcatggaccgttggatcgtcgactgccgcaagatcacatgtccgatttgtcgggaccggttcttaccggccgaatattacgcgcggataaattccggttttggttcggtttggtacattgaagaatcggaaagtaatattctactataagaccctttgcatctgttctttagatattggtatcggatcagtattctgtgtttttcttttcggtaattctgtgttaagttttagttttgtagcaaaaagtgaaaagacatcattattaaagcccaatgcaacaaatccacaatcccatatgttttagggtttcattacaagtagctagcttgagtataaatagagtcttatgagaacttgtcttgtaacgaagagagttgcctctcaaacagctctttcacctttacattttatgatataaatcaaagtctatttgttct

SEQ ID NO: 1565 - protein, 176 aa, Zea mays subsp. mays
  misc_feature (1)..(176): Ceres Seq. ID no. 15174035
FRLCKHLLLHLFSVSLSAMGFPTGIKELEIPDYIFKILYVIGFFRDLVNALCPYIGLPHFLDDGISRPGPIVPDNTAATLAYEVSPVVRFSDLQTDLEDCCTVCLLDFAYDDKVRQLPNCRHVFHNRCMDRWIVDCRKITCPICRDRFLPAEYYARINSGFGSVWYIEESESNILL

SEQ ID NO: 1566 - protein, 158 aa, Zea mays subsp. mays
  misc_feature (1)..(158): Ceres Seq. ID no. 15174036
MGFPTGIKELEIPDYIFKILYVIGFFRDLVNALCPYIGLPHFLDDGISRPGPIVPDNTAATLAYEVSPVVRFSDLQTDLEDCCTVCLLDFAYDDKVRQLPNCRHVFHNRCMDRWIVDCRKITCPICRDRFLPAEYYARINSGFGSVWYIEESESNILL

SEQ ID NO: 1567 - protein, 94 aa, Zea mays subsp. mays
  misc_feature (1)..(94): Ceres Seq. ID no. 15174037
MAFLDPARSYPTTRPRLSLTRFPRLFVSRIFRPISKTAVRFVSWTLHTMIKLDSFRTADTCSTIVAWTVGSSTAARSHVRFVGTGSYRPNITRG

SEQ ID NO: 1568 - DNA, 904 bp, Zea mays subsp. mays
  misc_feature (1)..(904): Ceres Seq. ID no. 15174088
accggtctcaatggcgaagctcctctcccgctccaccgcctcgcgcgtcgcaaatcgtttcttctccacctccagagccgccgctccttctcgctctaacctcatctcccgtcgatcttcaccggcgctgttccaagccatgggattcatccctgattcgacccgtttgacgacgatccggacccggatggataggtccggtggatcgtattccccgctcaaatccggatccaatttcagcgacagggcacctacggagatggcgccgctgtttcccggctgcgactacgagcattggctcatcgtcatggagaagcccggcggcgaaaacgcgagtagacagcagatgatcgattgctatgttcagactcttgccaaaattgtcggaagtgaggaagaagctaagaggaagatctataatgtctcgtgcgagaggtattttgggtttggttgtgagatcgatgaggagacatcaaataaactcgaagggattcctggtgttctcttcgtgcttccggattcctatgttgatccagagtacaaagactacggagctgagttgtttgtgaatggagaagtagttccgcgtccaccagagagacagaggaagatactggagttaacgactcaaagaagctcggataaaccgaggtacaatgacagaaccagaaatgttcgacggagagataacatgcgttaagaccttcagtactcaagagtcttttgctaaacatctcctttcccttttgaacttcgttcgtattgcctttcttggtgtttgttatttgctccactctatacgaataatgtaaattgtgatcatggtgatgatggtattatggattatgttgtttctgttcgatcgcgcgaagcttattcaatagtacctcttagtattattttc

SEQ ID NO: 1569 - protein, 232 aa, Zea mays subsp. mays
  misc_feature (1)..(232): Ceres Seq. ID no. 15174089
PVSMAKLLSRSTASRVANRFFSTSRAAAPSRSNLISRRSSPALFQAMGFIPDSTRLTTIRTRMDRSGGSYSPLKSGSNFSDRAPTEMAPLFPGCDYEHWLIVMEKPGGENASRQQMIDCYVQTLAKIVGSEEEAKRKIYNVSCERYFGFGCEIDEETSNKLEGIPGVLFVLPDSYVDPEYKDYGAELFVNGEVVPRPPERQRKILELTTQRSSDKPRYNDRTRNVRRRDNMR

SEQ ID NO: 1570 - protein, 229 aa, Zea mays subsp. mays
  misc_feature (1)..(229): Ceres Seq. ID no. 15174090
MAKLLSRSTASRVANRFFSTSRAAAPSRSNLISRRSSPALFQAMGFIPDSTRLTTIRTRMDRSGGSYSPLKSGSNFSDRAPTEMAPLFPGCDYEHWLIVMEKPGGENASRQQMIDCYVQTLAKIVGSEEEAKRKIYNVSCERYFGFGCEIDEETSNKLEGIPGVLFVLPDSYVDPEYKDYGAELFVNGEVVPRPPERQRKILELTTQRSSDKPRYNDRTRNVRRRDNMR

SEQ ID NO: 1571 - protein, 186 aa, Zea mays subsp. mays
  misc_feature (1)..(186): Ceres Seq. ID no. 15174091
MGFIPDSTRLTTIRTRMDRSGGSYSPLKSGSNFSDRAPTEMAPLFPGCDYEHWLIVMEKPGGENASRQQMIDCYVQTLAKIVGSEEEAKRKIYNVSCERYFGFGCEIDEETSNKLEGIPGVLFVLPDSYVDPEYKDYGAELFVNGEVVPRPPERQRKILELTTQRSSDKPRYNDRTRNVRRRDNMR

SEQ ID NO: 1572 - DNA, 645 bp, Zea mays subsp. mays
  misc_feature (1)..(645): Ceres Seq. ID no. 15174145
aggaaacccttacatcagttaataatatctctaaacaatatgaacgacatgatgggtggatcttctcatgcggctccggcaccttcaccgtcggcgtttttccaacatcgccgacgtcatcacggtggcatgatgcacatgaccttcttctgggggaaaaacacggaggttctattcgacggatggccagggaccagtctgaccatgtattgggtctgcctagcctccattttcgtcacttccgcattgtcagagtggatttcgcgatgcggggtcatgaaagtcggtccagctagctttggcggcgggctagtccagacgttggtttacaccgtgagggcttgtttgtcttatttgatcatgctggccgtgatgtcattcaatggaggagtcttcttggctgcaatggctggttttggattagggtttatgatttttggaagtaggtcttttaaggacactggaagtaataacaatcacaccgaaattcaatcacattgttgattgattctttgtaggctttatttttcccccgtttaaataataataacgaaaaaaaattatttcaagattttaagattttagtattttttttgtctaagatataattggattttgtttacggtcatgttgattcaataaatt

SEQ ID NO: 1573 - protein, 167 aa, Zea mays subsp. mays
  misc_feature (1)..(167): Ceres Seq. ID no. 15174146
RKPLHQLIISLNNMNDMMGGSSHAAPAPSPSAFFQHRRRHHGGMMHMTFFWGKNTEVLFDGWPGTSLTMYWVCLASIFVTSALSEWISRCGVMKVGPASFGGGLVQTLVYTVRACLSYLIMLAVMSFNGGVFLAAMAGFGLGFMIFGSRSFKDTGSNNNHTEIQSHC

SEQ ID NO: 1574 - protein, 154 aa, Zea mays subsp. mays
  misc_feature (1)..(154): Ceres Seq. ID no. 15174147
MNDMMGGSSHAAPAPSPSAFFQHRRRHHGGMMHMTFFWGKNTEVLFDGWPGTSLTMYWVCLASIFVTSALSEWISRCGVMKVGPASFGGGLVQTLVYTVRACLSYLIMLAVMSFNGGVFLAAMAGFGLGFMIFGSRSFKDTGSNNNHTEIQSHC

SEQ ID NO: 1575 - protein, 151 aa, Zea mays subsp. mays
  misc_feature (1)..(151): Ceres Seq. ID no. 15174148
MMGGSSHAAPAPSPSAFFQHRRRHHGGMMHMTFFWGKNTEVLFDGWPGTSLTMYWVCLASIFVTSALSEWISRCGVMKVGPASFGGGLVQTLVYTVRACLSYLIMLAVMSFNGGVFLAAMAGFGLGFMIFGSRSFKDTGSNNNHTEIQSHC

SEQ ID NO: 1576 - DNA, 623 bp, Zea mays subsp. mays
  misc_feature (1)..(623): Ceres Seq. ID no. 15174293
aatcagagtagtgagtgccaaaaaaaagattcaaaagtcgccgagagcacaaaccctcctctaatggcgtctctctccatggcttccgttaaccttagcttctctcccttacgctctcctccaaaggtttccactcacgcttccgttcaattcgctcggttcagctcgtcgattcttgcctcagctcactgcatttctgggcttcgcgcggttcttcctcagaagatatccaccgttgtctctcagagttctcagaggcttcagactcttaccgttttcgctcataagggctacaagatgaagacccacaaggcctcagcgaagaggttcagggtgacgggtagagggaagatagtgaggaggagatccgggaagcagcatttgttagctaagaagaacaacaagaggaagctgcgtctttccaaaatgcatgaagtgagccggagtgactatgacaatgtgatcggcgctcttccctacctgaaagtcaaccgaaaggcgacttaagcagagccgagcttgattctttttcttacctacatttctcattttgtaatctaagttgtgataatactctctcttttgttttgtgattttttggtcaatgagttgatccttcttct

SEQ ID NO: 1577 - protein, 168 aa, Zea mays subsp. mays
  misc_feature (1)..(168): Ceres Seq. ID no. 15174294
NQSSECQKKDSKVAESTNPPLMASLSMASVNLSFSPLRSPPKVSTHASVQFARFSSSILASAHCISGLRAVLPQKISTVVSQSSQRLQTLTVFAHKGYKMKTHKASAKRFRVTGRGKIVRRRSGKQHLLAKKNNKRKLRLSKMHEVSRSDYDNVIGALPYLKVNRKAT

SEQ ID NO: 1578 - protein, 147 aa, Zea mays subsp. mays
  misc_feature (1)..(147): Ceres Seq. ID no. 15174295
MASLSMASVNLSFSPLRSPPKVSTHASVQFARFSSSILASAHCISGLRAVLPQKISTVVSQSSQRLQTLTVFAHKGYKMKTHKASAKRFRVTGRGKIVRRRSGKQHLLAKKNNKRKLRLSKMHEVSRSDYDNVIGALPYLKVNRKAT

SEQ ID NO: 1579 - protein, 142 aa, Zea mays subsp. mays
  misc_feature (1)..(142): Ceres Seq. ID no. 15174296
MASVNLSFSPLRSPPKVSTHASVQFARFSSSILASAHCISGLRAVLPQKISTVVSQSSQRLQTLTVFAHKGYKMKTHKASAKRFRVTGRGKIVRRRSGKQHLLAKKNNKRKLRLSKMHEVSRSDYDNVIGALPYLKVNRKAT

SEQ ID NO: 1580 - DNA, 863 bp, Zea mays subsp. mays
  misc_feature (1)..(863): Ceres Seq. ID no. 15174341
atccaaacacttatctttttctctctcttccctcttcaatcttcacattttctctatggagaatcatggcaacaagcgagtctgggaccagtcctctgactccaacactcagcgggtcgactcgcccgagtctaagattcgtcgagttgactcgtccgattcgggtattaactcgtccgagtctcaactcgaatcggtcctcgactcgtcggaggtgcagctacaagacgacatttttaacatgcttgacgacacggacaatgtgcccgagcgtgactcggtgcagggtcttgactcagtgatcaaaagcttcgaggatgagataaatgctccaggttcggattctggttccggtgacccggcccaggaacccgactccggggagctacaatctaacttgggctatcttctagaagcctccgacgacgagctcgggttgccgccgacggtgggtgacggcgaggaaatgggtcgggctgccccggaaatggcggagcttgccaggttcgtgggatttgaagacgacatacccagttatgatgcattcgggtttgggtcggggtttacggcggagaatgacggaggtgccggaggttttgtgacggtggatgggttgtttgactattcggacccgtcggcggatgttttgtggcggtcggagtcattacaagctatgtaggtggtggcggtggttttagtgaaacggtgcgtaggggtggaaaatgtaaatctgggaaaatattggcgttaaaaataggaggaggggtagcacagaaaggtaggaggtagatgtgaaaaagttgtagggttaggatttgtttgttgttttggttttttcgttgaattcaattgaaacaaacccc

SEQ ID NO: 1581 - protein, 225 aa, Zea mays subsp. mays
  misc_feature (1)..(225): Ceres Seq. ID no. 15174342
SKHLSFSLSSLFNLHIFSMENHGNKRVWDQSSDSNTQRVDSPESKIRRVDSSDSGINSSESQLESVLDSSEVQLQDDIFNMLDDTDNVPERDSVQGLDSVIKSFEDEINAPGSDSGSGDPAQEPDSGELQSNLGYLLEASDDELGLPPTVGDGEEMGRAAPEMAELARFVGFEDDIPSYDAFGFGSGFTAENDGGAGGFVTVDGLFDYSDPSADVLWRSESLQAM

SEQ ID NO: 1582 - protein, 207 aa, Zea mays subsp. mays
  misc_feature (1)..(207): Ceres Seq. ID no. 15174343
MENHGNKRVWDQSSDSNTQRVDSPESKIRRVDSSDSGINSSESQLESVLDSSEVQLQDDIFNMLDDTDNVPERDSVQGLDSVIKSFEDEINAPGSDSGSGDPAQEPDSGELQSNLGYLLEASDDELGLPPTVGDGEEMGRAAPEMAELARFVGFEDDIPSYDAFGFGSGFTAENDGGAGGFVTVDGLFDYSDPSADVLWRSESLQAM

SEQ ID NO: 1583 - protein, 145 aa, Zea mays subsp. mays
  misc_feature (1)..(145): Ceres Seq. ID no. 15174344
MLDDTDNVPERDSVQGLDSVIKSFEDEINAPGSDSGSGDPAQEPDSGELQSNLGYLLEASDDELGLPPTVGDGEEMGRAAPEMAELARFVGFEDDIPSYDAFGFGSGFTAENDGGAGGFVTVDGLFDYSDPSADVLWRSESLQAM

SEQ ID NO: 1584 - DNA, 912 bp, Zea mays subsp. mays
  misc_feature (1)..(912): Ceres Seq. ID no. 15174355
aacactacccacacgcctttcatcatcctttcgctactcccatcttcttcttcttttaatcttcttatcgccatagctctagcttgcaatagaagctgtacagttaaccttaaggttttattagtttttttggtttgttggaaagaaagaaaggaacgatgaaccactgggcggtccagccaaacgctttcggtgatcagagtgttgttgtctgcccaaaaccacgtcggattgctctccgtaacccttccctctaccaccatcccgctcgttctctccgttgttacttcagtcatcaacaagtggaggtgtgtgaatccgaggcagagactgatatcttagatatcatactcacaaaggatggttatggtacggaacaagttcaggctcaggtattagactcgccgtccccgtttttatgtgggtcgccgccgagcagagtcgctaaccctttaacccaggatgctcgtttcagagatgaactctcactggtctcttcatcgatctcgactccgctaggccaacctcagtcctcctcaggtaggaaaggaggatgtgttagaggcagttttggtagcagcccagcggttaggattgaagggttcgattgcctcgacagggacagtagaaactgcagcatccctgccttggcatgagaacccaacgtcggaaaccaccaaccacatactctgttgaattagctcacaaaaaccaattagtgcgtcgtacataatgagttaagtatatggagaatttgtggaaatctttgagggaagttgagagagagatagatccctttggagtttttctaaagagtgtgtaaataggagaaattttcttggctaagtttgtagtaatggtcattttgtaaaaagagtattaaggcagaaaatcagttgttgaggagagacc

SEQ ID NO: 1585 - protein, 165 aa, Zea mays subsp. mays
  misc_feature (1)..(165): Ceres Seq. ID no. 15174356
MNHWAVQPNAFGDQSVVVCPKPRRIALRNPSLYHHPARSLRCYFSHQQVEVCESEAETDILDIILTKDGYGTEQVQAQVLDSPSPFLCGSPPSRVANPLTQDARFRDELSLVSSSISTPLGQPQSSSGRKGGCVRGSFGSSPAVRIEGFDCLDRDSRNCSIPALA

SEQ ID NO: 1586 - DNA, 947 bp, Zea mays subsp. mays
  misc_feature (1)..(947): Ceres Seq. ID no. 15174396
ataacttgtttcttctcctctatcaaatcagatcaaaacttgtgtttcttgctcccaaaatattggataaatattctcataagttttgaaattgtgtttctttgttagcaaataaatatgagttgcaatggatgtagagttcttcgaaaaggttgcagcgaaacatgcatccttcgtccttgccttcaatggatcgaatccgccgagtcacaaggccacgctaccgtcttcgtggctaaattctttggccgtgccggtctaatgtcattcatctccgccgtacccgaaccaaaccgccctgctttgtttcagtcgttgttgtttgaagcgtgtgggaggacggtgaatccggttaacggagcggttggtatgttatggaccgggaactggcacgtgtgccaagcggcggttgaaactgttcttcgcggcggaactttacgacctatctcagatctacacgaatctccttcgttgaactcctcagatgagtctaccgagatctggcggatgcagcgtccagagggttccaggaaagaatctttggtcaaccgtaaacgatctaagaccgagcggtctgatccggaactgatccacgggttagctctaaccggtccggttgtcccggctccttttcttccaccgccgccgtttagcaaggcggttaatggggatcatccgggaagtccatcagaggagtctgtaacgacgacgtcgtgttatgaatatggaatcagcggcgatggatacggaaacaaaagagagagaaagttattaaacctttttgtttaaaaccgacgacgcaaactcttcgcactcagtttttttcgacggtcctttttagggcttttttttcggggtgaagccgcataattattggctaacataattattttctctatcgagaaatatgataattttggtgatataatactttgcggatgatgagt

SEQ ID NO: 1587 - protein, 223 aa, Zea mays subsp. mays
  misc_feature (1)..(223): Ceres Seq. ID no. 15174397
MSCNGCRVLRKGCSETCILRPCLQWIESAESQGHATVFVAKFFGRAGLMSFISAVPEPNRPALFQSLLFEACGRTVNPVNGAVGMLWTGNWHVCQAAVETVLRGGTLRPISDLHESPSLNSSDESTEIWRMQRPEGSRKESLVNRKRSKTERSDPELIHGLALTGPVVPAPFLPPPPFSKAVNGDHPGSPSEESVTTTSCYEYGISGDGYGNKRERKLLNLFV

SEQ ID NO: 1588 - protein, 175 aa, Zea mays subsp. mays
  misc_feature (1)..(175): Ceres Seq. ID no. 15174398
MSFISAVPEPNRPALFQSLLFEACGRTVNPVNGAVGMLWTGNWHVCQAAVETVLRGGTLRPISDLHESPSLNSSDESTEIWRMQRPEGSRKESLVNRKRSKTERSDPELIHGLALTGPVVPAPFLPPPPFSKAVNGDHPGSPSEESVTTTSCYEYGISGDGYGNKRERKLLNLFV

SEQ ID NO: 1589 - protein, 139 aa, Zea mays subsp. mays
  misc_feature (1)..(139): Ceres Seq. ID no. 15174399
MLWTGNWHVCQAAVETVLRGGTLRPISDLHESPSLNSSDESTEIWRMQRPEGSRKESLVNRKRSKTERSDPELIHGLALTGPVVPAPFLPPPPFSKAVNGDHPGSPSEESVTTTSCYEYGISGDGYGNKRERKLLNLFV

SEQ ID NO: 1590 - DNA, 666 bp, Zea mays subsp. mays
  misc_feature (1)..(666): Ceres Seq. ID no. 15175146
gcatgtgagttgctaattactactctcttcttctattattaactttcttcctcttcttcttcttcgcttccctctccagcatcgccatggcagctgctccgcctcttactctcctcatcgctctctctcttctcttcatttcactccagagatctgaatctctccccgagaatccatccatgattcttctaggcgacggattcgactggccgatctctcacggcgacgcattagacatcgacggaggagaaagctttgaagatgcggaggaggaagatgtcgcggatcgacggtcattgtactggaagaggaggagatactacatctcttacggcgcattgtcggcgaacagagtcccgtgtcctcccagatctggaagatcgtactacactcacaactgcttcagagctagaggtcaggtgcatccctacagtcgaggctgctcctccatcactcggtgccggagatagaagaaaccacgggggcattctcgtaattttccaatcacggactctgtttgtagttctcgttcgatttcgatgtgttgtgtagtaaaccgtgattagttacgtttgtttaaattaattaagcccgcggtattattattattcgagtgatatctatatgtattcaactttgtggtaattgttatttattttgtcggtg

SEQ ID NO: 1591 - protein, 127 aa, Zea mays subsp. mays
  misc_feature (1)..(127): Ceres Seq. ID no. 15175147
MAAAPPLTLLIALSLLFISLQRSESLPENPSMILLGDGFDWPISHGDALDIDGGESFEDAEEEDVADRRSLYWKRRRYYISYGALSANRVPCPPRSGRSYYTHNCFRARGQVHPYSRGCSSITRCRR

SEQ ID NO: 1592 - protein, 96 aa, Zea mays subsp. mays
  misc_feature (1)..(96): Ceres Seq. ID no. 15175148
MILLGDGFDWPISHGDALDIDGGESFEDAEEEDVADRRSLYWKRRRYYISYGALSANRVPCPPRSGRSYYTHNCFRARGQVHPYSRGCSSITRCRR

SEQ ID NO: 1593 - protein, 96 aa, Zea mays subsp. mays
  misc_feature (1)..(96): Ceres Seq. ID no. 15175149
MRRRKMSRIDGHCTGRGGDTTSLTAHCRRTESRVLPDLEDRTTLTTASELEVRCIPTVEAAPPSLGAGDRRNHGGILVIFQSRTLFVVLVRFRCVV

SEQ ID NO: 1594 - DNA, 780 bp, Zea mays subsp. mays
  misc_feature (1)..(780): Ceres Seq. ID no. 15175364
aaaatccgatccaaatccctccaccgccgtcccggatttaccaaaaacccggccaccaccgccatgggctccgcgagccgcgccatctcgtgcctgtgctgcccctgcaggtgcctcttcagctgcctgtgcagcatcctcgtctcgctcgccgtcacgctgggcctcctggccctcgccctctacctcatattgaagccgcgcatgatcgcggccaccgtcgactcggcctcgctctcccagttcgcgctctccgcttcctccacgctcgcctacgacctcaacgtcaccatgacggtgcgcaaccccaacacgcgggtggggctctactacgacgacgtccaggcgctggcctcgtacgagggccagcgcttcggctacgcgccgctcgacgccttctatcagggcacgggggcggccaccaagctggcgccggggttccgcggcacgcagctgctccagggcgacgtcgccgccggccagttcaggcagcagcagtccgcggggcgcttcgacgtcgacgtggatctcaacgccaagctcagggtcaagttctgggcgttcaaggcccacgggcccaacgcgaagatcacgtgcacgctctccgtccccgccgccgccagcgcctcgccctttcagcccacggattgcaaagtgtggttctgatttttggctgataggatagggatactctgcctgctgctgctgctgtacatcgccgtggacagcgaataacgctcgtgcgccctggtggccacaagacaagtttgtttttctgac

SEQ ID NO: 1595 - protein, 224 aa, Zea mays subsp. mays
  misc_feature (1)..(224): Ceres Seq. ID no. 15175365
NPIQIPPPPSRIYQKPGHHRHGLREPRHLVPVLPLQVPLQLPVQHPRLARRHAGPPGPRPLPHIEAAHDRGHRRLGLALPVRALRFLHARLRPQRHHDGAQPQHAGGALLRRRPGAGLVRGPALRLRAARRLLSGHGGGHQAGAGVPRHAAAPGRRRRRPVQAAAVRGALRRRRGSQRQAQGQVLGVQGPRAQREDHVHALRPRRRQRLALSAHGLQSVVLIFG

SEQ ID NO: 1596 - protein, 221 aa, Zea mays subsp. mays
  misc_feature (1)..(221): Ceres Seq. ID no. 15175366
KIRSKSLHRRPGFTKNPATTAMGSASRAISCLCCPCRCLFSCLCSILVSLAVTLGLLALALYLILKPRMIAATVDSASLSQFALSASSTLAYDLNVTMTVRNPNTRVGLYYDDVQALASYEGQRFGYAPLDAFYQGTGAATKLAPGFRGTQLLQGDVAAGQFRQQQSAGRFDVDVDLNAKLRVKFWAFKAHGPNAKITCTLSVPAAASASPFQPTDCKVWF

SEQ ID NO: 1597 - protein, 200 aa, Zea mays subsp. mays
  misc_feature (1)..(200): Ceres Seq. ID no. 15175367
MGSASRAISCLCCPCRCLFSCLCSILVSLAVTLGLLALALYLILKPRMIAATVDSASLSQFALSASSTLAYDLNVTMTVRNPNTRVGLYYDDVQALASYEGQRFGYAPLDAFYQGTGAATKLAPGFRGTQLLQGDVAAGQFRQQQSAGRFDVDVDLNAKLRVKFWAFKAHGPNAKITCTLSVPAAASASPFQPTDCKVWF

SEQ ID NO: 1598 - DNA, 1966 bp, Zea mays subsp. mays
  misc_feature (1)..(1966): Ceres Seq. ID no. 15175523
agctatcgcctattccttccctccctcgcattccggcaggctccgcaaacgtccgtgcgcccccgcgtcgccgcttcctccgtcccttccgttctcggcgaatcgaatccgctagcccccgacatttatggctgccgcgttaactcgcctccgatccgccgtcgagcggctcgggccttcccgcgcccgcgccttctcatcagccgctgctgaggccggggctgcgggaccgtgcagcgactctagggctttcgccgcggcctcggtggccgccggctcaggtctcgggatctggctgctgtcctcgaacccgcagccactcacagagtccggccaggcggaggatgccgccaccgcgggaggtggaggcaacagggccttctccgcagcttttggcggtgtcggagccaccggggagcgggagggcatgtttctgttcggagattcatatcgccgaagggtgttcttcaagtacgagaagaggattaggacgcgcagccctccagagaagatctttgagtacttcgcatccgtccacagcccagagggtgagatgtacatgttacctaccgacctgatgagggcggttgttcctgttttcccctcatctgagtccaaaaatgtcagggaagggagattgaagggggagcgccaccctggcgagctacaatgtgctccatctgagtttttcatgctattcgatacaaatggtgatggtgtcatctccttttctgagtatatcttctttgtaacattacttagtatccctgaatcaagcttccatgtggcttttaagatgtttgaccttgaccacaatggggaaattgacaaagacgagtttaggaaagtgatgacactgatgcgatcctataatagacaaggagctgcccatagggatggtttacgctttggacgcaaggttggtcagccagtggaaaatggtggactggtcgaatacttctttggcaaggatgggaatgaacatctacactatgataagttctctagttttttgaagaaattgcatgatgagattgtccgcttggagtttagtcactacgatgtgaaatcatccaacacaatacctgttaaggactttgcgttatccatggttgcttctgctgatatgatttacatagacaagttactggatagagttgaggatttggacgacaatcttgacctcaaggatctgcgtattacctttgaggagttcaaggcatttgctgatcttcgaagaaggttggaaccatttagaatggctatcttcagctacggcaaagtaaatggtctgttgacgaagcaggatctaaaacgtgccgcatcacatgtttgtggagtggacttgactgataaagtagtagacataattttccatgtgtttgatgctaactgtgatggtaacctgagttcagaggagttcctgaggtcattacaaagaagagaaagtgatattcgccagccagcaacgtcaggtttcctaggggtgatcgcctgttggctgaactgtacaaagtgttctcttcaacagatgctgtcccagtagattcttttttgacgctcatgacagtcttcagttgcccttggttgctctgtgcttattgagctggagaacgtcatcggggagttctgaagtgtgaagaggatttttgttgtaaatattaccctgcggcccctgcttagtagctcctacgttaccacgtagcagctgtaacctgtaaggaattccttccgttctcgttcaagggcttcgatgacatacatcttctcccctgacattaaatctccgtcgacttagctggagccttgctacctatcttgcttttagctcatccctgatgctaatattctgtggattgtggttgaacaatcacacttgtaagactagcttgggaatactatttttctaagagattttcaattttccaaggaaaaataaactaattttctttggaaatttcaaacg

SEQ ID NO: 1599 - protein, 472 aa, Zea mays subsp. mays
  misc_feature (1)..(472): Ceres Seq. ID no. 15175524
MAAALTRLRSAVERLGPSRARAFSSAAAEAGAAGPCSDSRAFAAASVAAGSGLGIWLLSSNPQPLTESGQAEDAATAGGGGNRAFSAAFGGVGATGEREGMFLFGDSYRRRVFFKYEKRIRTRSPPEKIFEYFASVHSPEGEMYMLPTDLMRAVVPVFPSSESKNVREGRLKGERHPGELQCAPSEFFMLFDTNGDGVISFSEYIFFVTLLSIPESSFHVAFKMFDLDHNGEIDKDEFRKVMTLMRSYNRQGAAHRDGLRFGRKVGQPVENGGLVEYFFGKDGNEHLHYDKFSSFLKKLHDEIVRLEFSHYDVKSSNTIPVKDFALSMVASADMIYIDKLLDRVEDLDDNLDLKDLRITFEEFKAFADLRRRLEPFRMAIFSYGKVNGLLTKQDLKRAASHVCGVDLTDKVVDIIFHVFDANCDGNLSSEEFLRSLQRRESDIRQPATSGFLGVIACWLNCTKCSLQQMLSQ

SEQ ID NO: 1600 - protein, 372 aa, Zea mays subsp. mays
  misc_feature (1)..(372): Ceres Seq. ID no. 15175525
MFLFGDSYRRRVFFKYEKRIRTRSPPEKIFEYFASVHSPEGEMYMLPTDLMRAVVPVFPSSESKNVREGRLKGERHPGELQCAPSEFFMLFDTNGDGVISFSEYIFFVTLLSIPESSFHVAFKMFDLDHNGEIDKDEFRKVMTLMRSYNRQGAAHRDGLRFGRKVGQPVENGGLVEYFFGKDGNEHLHYDKFSSFLKKLHDEIVRLEFSHYDVKSSNTIPVKDFALSMVASADMIYIDKLLDRVEDLDDNLDLKDLRITFEEFKAFADLRRRLEPFRMAIFSYGKVNGLLTKQDLKRAASHVCGVDLTDKVVDIIFHVFDANCDGNLSSEEFLRSLQRRESDIRQPATSGFLGVIACWLNCTKCSLQQMLSQ

SEQ ID NO: 1601 - protein, 330 aa, Zea mays subsp. mays
  misc_feature (1)..(330): Ceres Seq. ID no. 15175526
MYMLPTDLMRAVVPVFPSSESKNVREGRLKGERHPGELQCAPSEFFMLFDTNGDGVISFSEYIFFVTLLSIPESSFHVAFKMFDLDHNGEIDKDEFRKVMTLMRSYNRQGAAHRDGLRFGRKVGQPVENGGLVEYFFGKDGNEHLHYDKFSSFLKKLHDEIVRLEFSHYDVKSSNTIPVKDFALSMVASADMIYIDKLLDRVEDLDDNLDLKDLRITFEEFKAFADLRRRLEPFRMAIFSYGKVNGLLTKQDLKRAASHVCGVDLTDKVVDIIFHVFDANCDGNLSSEEFLRSLQRRESDIRQPATSGFLGVIACWLNCTKCSLQQMLSQ

SEQ ID NO: 1602 - DNA, 436 bp, Zea mays subsp. mays
  misc_feature (1)..(436): Ceres Seq. ID no. 15175885
attcctcggagaggagaagccgccgtcgcagcaatcacagcagcccggagaacggccaggtccgacaagatgcagatctttgtgaagacgctgacagggaagaccatcaccctcgaggtcgagagcagcgacaccatcgacaatgtcccacctgcgcctggcccacctgtgcctggcccgcctgctcctggcccgcctaagcctgatcccagcccgacgccaccatctccgccaaattaagcccatgttgcatggatggtcttggtacacatgcatgaagtattagagagcaacgggcaacttactccttatattcctacactaataatactcaggagtacttacttgaaaaaaagagagaaggatctcatgactgtaaccgaagggacattttctattgagttgggggtgtaacataaacccagcaccaaagctg

SEQ ID NO: 1603 - protein, 79 aa, Zea mays subsp. mays
  misc_feature (1)..(79): Ceres Seq. ID no. 15175886
IPRRGEAAVAAITAARRTARSDKMQIFVKTLTGKTITLEVESSDTIDNVPPAPGPPVPGPPAPGPPKPDPSPTPPSPPN

SEQ ID NO: 1604 - protein, 65 aa, Zea mays subsp. mays
  misc_feature (1)..(65): Ceres Seq. ID no. 15175887
SSERRSRRRSNHSSPENGQVRQDADLCEDADREDHHPRGREQRHHRQCPTCAWPTCAWPACSWPA

SEQ ID NO: 1605 - protein, 56 aa, Zea mays subsp. mays
  misc_feature (1)..(56): Ceres Seq. ID no. 15175888
MQIFVKTLTGKTITLEVESSDTIDNVPPAPGPPVPGPPAPGPPKPDPSPTPPSPPN

SEQ ID NO: 1606 - DNA, 1931 bp, Zea mays subsp. mays
  misc_feature (1)..(1931): Ceres Seq. ID no. 15176035
cccaagggtcggctaggtctaggtggtctccaagctttccgcctttccacgccaccattctccccacccgcgcgcctcagcaatccccatccagcatcgccgtttcgccgcggcaccgacacctcgccggccatgggcgcgtcctcctcgactggcaacccgtccccagaggcgcacgagcagcgggagcaggagactctcgcctccgccgccctctccctcccgctcctccgcgccgccttctcccgctccgccgccaacgcgctgccggatgccctcgcgccgccgcccgcctcctttcgtctgcccggatccccggcgccgccgccgccgcacttccacggcatcctcggggggctcggccccgccatcgcctcccaattcttcggccacggagctgccgcggtgacggacgggggcgccgggtgggtccagttcctcagggggttcaaccgctgctgcgcgcgcgtgacggcctcccgctcgctcgcactgctcctccgcgtgtacgctgccgcctgcgccggcgcgggggcaccctgcggcgtccagctccagccggacgagggcggtggtgacgaggatgggaaggtcgtgggggagctcgcgccggaggagatcgcagtgttcctctgggtgtgctgggtcatggcgtggagcgcttcggcctcgagggtggtcagtgacggaggagataaatcggagcccgtcacggtgctcctcccggacgtgacgcacctggtgctgtcggcgctcgtctcggcgggcgtcgtcacggatgatgcaggcgtttggggctgggacgtctccagcggtgggaagggggtgaaggtccaggagttcatgtcgtgggtgctgtccacgcctttcggccttgggaactgcctctcgcggtatgtgcgggacaaattccggtccctggctgctgactctgtggaggagagctctgtttcaactgttagcacaacctttgacacttctgatgtttatctgctaacacgggggagagcatgggcaattgccctcagcctaagaaacaagttgagtgaaaagctgctgtcagcttctgttattggaatggacacagaagacctcctttataggtcatctgttcatggaaaaggactgagccggttctggtcttgtgttgaggggtacaaagggccaatgctgattctactttcagcattctcaaaaggtggtggtgagaatgttgattctgatcgaagatgggtgattggtgtattgaccgaggagggatttgagaacaaagataccttttatggtagctctgggttcctttgtgccgcacatccaatattccgcatgctaccaccatctggcaaggaaaagaacttcatgtactgccacctacatcctcagataagagcttatgaagcgaatccaaagcccgttggcttagcatttggtggaacaattggaaatgagaggatctttcttgatgaagacttctcgggagttttagtacgacaccatgctgttgataaaacttatcaacatggctctctcatccccaatcagggttatttgcctgttgaggcttcagtgcttgatgttgaggtatgggggctgggtggagaagcaacgaaacgacagcagaatatgtacaagaagagggaggacatcttctcagagcagcgaagaaaggttgatctcaaaacttttgctagctgggaagactctccagagaagatgatgatggacatgatgtcggacccaaacacggttcgacgggaagaccggtgattttggtttgcagcctccggggatgtacagacgacagcgtttgttgcacataggagtattttgcttgcgcatttggctgggtcacacgctttatttaggttgaagtactaaaagaagatttgtacagaacgtaattcccaataaatgaaatggagattctggac

SEQ ID NO: 1607 - protein, 588 aa, Zea mays subsp. mays
  misc_feature (1)..(588): Ceres Seq. ID no. 15176036
PKGRLGLGGLQAFRLSTPPFSPPARLSNPHPASPFRRGTDTSPAMGASSSTGNPSPEAHEQREQETLASAALSLPLLRAAFSRSAANALPDALAPPPASFRLPGSPAPPPPHFHGILGGLGPAIASQFFGHGAAAVTDGGAGWVQFLRGFNRCCARVTASRSLALLLRVYAAACAGAGAPCGVQLQPDEGGGDEDGKVVGELAPEEIAVFLWVCWVMAWSASASRVVSDGGDKSEPVTVLLPDVTHLVLSALVSAGVVTDDAGVWGWDVSSGGKGVKVQEFMSWVLSTPFGLGNCLSRYVRDKFRSLAADSVEESSVSTVSTTFDTSDVYLLTRGRAWAIALSLRNKLSEKLLSASVIGMDTEDLLYRSSVHGKGLSRFWSCVEGYKGPMLILLSAFSKGGGENVDSDRRWVIGVLTEEGFENKDTFYGSSGFLCAAHPIFRMLPPSGKEKNFMYCHLHPQIRAYEANPKPVGLAFGGTIGNERIFLDEDFSGVLVRHHAVDKTYQHGSLIPNQGYLPVEASVLDVEVWGLGGEATKRQQNMYKKREDIFSEQRRKVDLKTFASWEDSPEKMMMDMMSDPNTVRREDR

SEQ ID NO: 1608 - protein, 544 aa, Zea mays subsp. mays
  misc_feature (1)..(544): Ceres Seq. ID no. 15176037
MGASSSTGNPSPEAHEQREQETLASAALSLPLLRAAFSRSAANALPDALAPPPASFRLPGSPAPPPPHFHGILGGLGPAIASQFFGHGAAAVTDGGAGWVQFLRGFNRCCARVTASRSLALLLRVYAAACAGAGAPCGVQLQPDEGGGDEDGKVVGELAPEEIAVFLWVCWVMAWSASASRVVSDGGDKSEPVTVLLPDVTHLVLSALVSAGVVTDDAGVWGWDVSSGGKGVKVQEFMSWVLSTPFGLGNCLSRYVRDKFRSLAADSVEESSVSTVSTTFDTSDVYLLTRGRAWAIALSLRNKLSEKLLSASVIGMDTEDLLYRSSVHGKGLSRFWSCVEGYKGPMLILLSAFSKGGGENVDSDRRWVIGVLTEEGFENKDTFYGSSGFLCAAHPIFRMLPPSGKEKNFMYCHLHPQIRAYEANPKPVGLAFGGTIGNERIFLDEDFSGVLVRHHAVDKTYQHGSLIPNQGYLPVEASVLDVEVWGLGGEATKRQQNMYKKREDIFSEQRRKVDLKTFASWEDSPEKMMMDMMSDPNTVRREDR

SEQ ID NO: 1609 - protein, 372 aa, Zea mays subsp. mays
  misc_feature (1)..(372): Ceres Seq. ID no. 15176038
MAWSASASRVVSDGGDKSEPVTVLLPDVTHLVLSALVSAGVVTDDAGVWGWDVSSGGKGVKVQEFMSWVLSTPFGLGNCLSRYVRDKFRSLAADSVEESSVSTVSTTFDTSDVYLLTRGRAWAIALSLRNKLSEKLLSASVIGMDTEDLLYRSSVHGKGLSRFWSCVEGYKGPMLILLSAFSKGGGENVDSDRRWVIGVLTEEGFENKDTFYGSSGFLCAAHPIFRMLPPSGKEKNFMYCHLHPQIRAYEANPKPVGLAFGGTIGNERIFLDEDFSGVLVRHHAVDKTYQHGSLIPNQGYLPVEASVLDVEVWGLGGEATKRQQNMYKKREDIFSEQRRKVDLKTFASWEDSPEKMMMDMMSDPNTVRREDR

SEQ ID NO: 1610 - DNA, 686 bp, Zea mays subsp. mays
  misc_feature (1)..(686): Ceres Seq. ID no. 15176141
gtgtgcactgtgcttcatcatctcctcctcctatcgtctacatttgtttcttggcgtacacgtttctacaggttaccagaaacctaacaatgagccaacctcccgtcggtgttcctcctcctcaaggttatccgccggagggatattcaaaagatgcttatccaccgcaaggatatcctcatcctcctcagcagggatatccgccacaaggctaccctccgcagcagggatatccgccgcaaggctaccctccacaaggctatccaccgcagcaaggttatccaccacagcagggatatcctccgcaagggtatcctcctccgtatgcgcctcaatatcctccgccaccgacgcagcagcatcagccacaaaagtccggtcctgggtgtctagaaggatgtcttgctgctctgtgctgttgctgtctcttggatgcttgcttctgactggagtatgtgctctcagagcttttgatttatttgcaagaaaactgtttagcaacacaagaaccttaagtaacttatgggatataaaaatgatggattgctgatactataatctcttgtctattcgctatctttcgttatgtttttgtcttcttgagttcataaattatgtttctatccacgttctagctcaggtttggatttaagactaatgggaatgtaaattgcttggtatgaatg

SEQ ID NO: 1611 - protein, 182 aa, Zea mays subsp. mays
  misc_feature (1)..(182): Ceres Seq. ID no. 15176142
CALCFIISSSYRLHLFLGVHVSTGYQKPNNEPTSRRCSSSSRLSAGGIFKRCLSTARISSSSSAGISATRLPSAAGISAARLPSTRLSTAARLSTTAGISSARVSSSVCASISSATDAAASATKVRSWVSRRMSCCSVLLLSLGCLLLTGVCALRAFDLFARKLFSNTRTLSNLWDIKMMDC

SEQ ID NO: 1612 - protein, 147 aa, Zea mays subsp. mays
  misc_feature (1)..(147): Ceres Seq. ID no. 15176143
VHCASSSPPPIVYICFLAYTFLQVTRNLTMSQPPVGVPPPQGYPPEGYSKDAYPPQGYPHPPQQGYPPQGYPPQQGYPPQGYPPQGYPPQQGYPPQQGYPPQGYPPPYAPQYPPPPTQQHQPQKSGPGCLEGCLAALCCCCLLDACF

SEQ ID NO: 1613 - protein, 118 aa, Zea mays subsp. mays
  misc_feature (1)..(118): Ceres Seq. ID no. 15176144
MSQPPVGVPPPQGYPPEGYSKDAYPPQGYPHPPQQGYPPQGYPPQQGYPPQGYPPQGYPPQQGYPPQQGYPPQGYPPPYAPQYPPPPTQQHQPQKSGPGCLEGCLAALCCCCLLDACF

SEQ ID NO: 1614 - DNA, 1667 bp, Zea mays subsp. mays
  misc_feature (1)..(1667): Ceres Seq. ID no. 15176145
aatctccccttctcttcctcttctcccttttcttaaacttcggaatccaggatcgtgggtcgatcggttctcagaatccgatcaagacccagtagttcgttttcatcgacacatccttcactgttttccaaaagaatggagatggaatcatgtaagctgttcatcggtgggatctcttgggagaccactgaagatcgtcttcgcgagtattttcagagtttcggtgaggttttggaggccgtcatcatgaaggatcgagccactggtcgtgctcgtggctttggtttccttgtcttctctgaccccattgttgctgagagagtcgtgtttctcagacacgtgattgatggtaaacttgttgaggcgaagaaggcagttccaagagatgatcacgtagtattgaacaaaagttacaacactagtctccaggggtcacctggcccagcaaacagcaagaagatctttgttggaggtttggcttcatcggtgacagaagctgagttcaaaaagtattttgctcagtttggggtgatcactgacgttgtggtgatgtatgaccacagaacccagcgaccgagaggcttcgggttcatctcttttgagtcagaggacgctgtagacaaagttctgcagaggacattccacgaactcaatggaaagatggttgaggtcaaactggctgttcctaaggaaatggctctgaaccctatccggaaccaaatgaatgttaatagctttggcagtagtagaatcagtgcattgctgatgaacgagtacacccaagggttcagcccgagtccaatctccggttatggagtcaaacctgaagttaggtacagtccaggattaggtaataggggtggtggattctcaccgtttggacatggatacggaattgagctgaactttgagccagatcagagtcagaactttgggtctggttccagtgcaggctttgggcggccccttagcccaggatatgctccgagtcttggcaggtacggtagccagattgagtcaggaggagctgggaacggtcctgtgctaaatgcagcaacaaagaaccatttatggggtaatggtggtgggctaggttacatgtcaaactcaccaatatctagaagcagcttcaatggaatgtcttcactaggcagcatcggagacaactcgagacgtaatagctaccgcagtgagggaggaggaggcttaggattagaagcaatgagagggggtcatgttggtggttacagcagcggctcaagcagcttggagacagactctttgtacagtgactcggcgtggctttcgctgcctgcaaaggcggaggaaagaatgggagcgtttgacttcatgtccagaggaccagctggctacatcaacaggcaaccaaacggaggaattgcagcttagagaagtgagaaactcattccatggagatcagatgatgttttgactgtttgcagaagagagatttttagaagatgaaaaaaaaaagtaattgttcaaaaaaaagtttatttactttcttactattttgattgttgttatagtttttatttttcaccctttttctaatttggggttttgtttcttttatcttgaagtaagaaaaatgtaaaatgagttatataatgagacaaagaaacaatgaagttgtgtattatgtt

SEQ ID NO: 1615 - protein, 424 aa, Zea mays subsp. mays
  misc_feature (1)..(424): Ceres Seq. ID no. 15176146
MEMESCKLFIGGISWETTEDRLREYFQSFGEVLEAVIMKDRATGRARGFGFLVFSDPIVAERVVFLRHVIDGKLVEAKKAVPRDDHVVLNKSYNTSLQGSPGPANSKKIFVGGLASSVTEAEFKKYFAQFGVITDVVVMYDHRTQRPRGFGFISFESEDAVDKVLQRTFHELNGKMVEVKLAVPKEMALNPIRNQMNVNSFGSSRISALLMNEYTQGFSPSPISGYGVKPEVRYSPGLGNRGGGFSPFGHGYGIELNFEPDQSQNFGSGSSAGFGRPLSPGYAPSLGRYGSQIESGGAGNGPVLNAATKNHLWGNGGGLGYMSNSPISRSSFNGMSSLGSIGDNSRRNSYRSEGGGGLGLEAMRGGHVGGYSSGSSSLETDSLYSDSAWLSLPAKAEERMGAFDFMSRGPAGYINRQPNGGIAA

SEQ ID NO: 1616 - protein, 422 aa, Zea mays subsp. mays
  misc_feature (1)..(422): Ceres Seq. ID no. 15176147
MESCKLFIGGISWETTEDRLREYFQSFGEVLEAVIMKDRATGRARGFGFLVFSDPIVAERVVFLRHVIDGKLVEAKKAVPRDDHVVLNKSYNTSLQGSPGPANSKKIFVGGLASSVTEAEFKKYFAQFGVITDVVVMYDHRTQRPRGFGFISFESEDAVDKVLQRTFHELNGKMVEVKLAVPKEMALNPIRNQMNVNSFGSSRISALLMNEYTQGFSPSPISGYGVKPEVRYSPGLGNRGGGFSPFGHGYGIELNFEPDQSQNFGSGSSAGFGRPLSPGYAPSLGRYGSQIESGGAGNGPVLNAATKNHLWGNGGGLGYMSNSPISRSSFNGMSSLGSIGDNSRRNSYRSEGGGGLGLEAMRGGHVGGYSSGSSSLETDSLYSDSAWLSLPAKAEERMGAFDFMSRGPAGYINRQPNGGIAA

SEQ ID NO: 1617 - protein, 387 aa, Zea mays subsp. mays
  misc_feature (1)..(387): Ceres Seq. ID no. 15176148
MKDRATGRARGFGFLVFSDPIVAERVVFLRHVIDGKLVEAKKAVPRDDHVVLNKSYNTSLQGSPGPANSKKIFVGGLASSVTEAEFKKYFAQFGVITDVVVMYDHRTQRPRGFGFISFESEDAVDKVLQRTFHELNGKMVEVKLAVPKEMALNPIRNQMNVNSFGSSRISALLMNEYTQGFSPSPISGYGVKPEVRYSPGLGNRGGGFSPFGHGYGIELNFEPDQSQNFGSGSSAGFGRPLSPGYAPSLGRYGSQIESGGAGNGPVLNAATKNHLWGNGGGLGYMSNSPISRSSFNGMSSLGSIGDNSRRNSYRSEGGGGLGLEAMRGGHVGGYSSGSSSLETDSLYSDSAWLSLPAKAEERMGAFDFMSRGPAGYINRQPNGGIAA

SEQ ID NO: 1618 - DNA, 1124 bp, Zea mays subsp. mays
  misc_feature (1)..(1124): Ceres Seq. ID no. 15176153
acaaaacaaaatctgaacttcaaaagcaaagcttcccactctcgttattctctaaaccattcccaagaaaaaaaaaatcaaaatgtcttcgttagttttcaaactctttttatttgtgtctctcttccaaatctcaatctctgctaggaaactagcacaagatgaaccaaaccagttccaatcattgaaataccacaaaggagctcttctctccggcaaaatctccattaacctattctggtacggaaaattcaaaccagctcaaagagcaatcatctccgatttcatcacttcgctttcacattcctcttcagaccaaccatctgtcgccacgtggtggaaaaccactgagaaatactacaaactcgccgcaggagataaaactccttctccttcactctcactcactctcaagtcacaaatcctcgacgagacttactctctcggaaaatctctaacagacagagacatccgcaagttagcctcaaaaggagatcaatacgatgcggttaacgttgttttgacttcagctgacgtggcggtaactggatttggtatgagtcgatgcgggacacacggacatgctcgtggtaatgcgggtaaacgcggatccaaattcgcttatatttgggtcggaaactccgaaacgcaatgcccgggtcaatgcgcgtggccatttcacgcaccggtgtacggtcctcagagcccgccgctcgtggcgccgaacaacgatgtgggactcgacggtatggtgattaacttagcgagtcttttagctggaaccgcaacgaacccctttggtaatggttattaccagggcccacaaaacgcaccgctcgaagctgcgtccgcgtgtcctggtgtttatgggaaaggagcttatcctggttacgctggaaatttacttgtcgatgctacgacgggaggtagttttaatgcgtatggtgcaaacggcaggaagttcttgctacctgcgttgtatgatcctacaacgtcggattgctctactatggtttgaggaagaaaaaatatgtttgatgtttcatcttttggttttgtagtagaaaatgatactattctagtgtaattcttttattttattcattaatattattctgagttcc

SEQ ID NO: 1619 - protein, 311 aa, Zea mays subsp. mays
  misc_feature (1)..(311): Ceres Seq. ID no. 15176154
MSSLVFKLFLFVSLFQISISARKLAQDEPNQFQSLKYHKGALLSGKISINLFWYGKFKPAQRAIISDFITSLSHSSSDQPSVATWWKTTEKYYKLAAGDKTPSPSLSLTLKSQILDETYSLGKSLTDRDIRKLASKGDQYDAVNVVLTSADVAVTGFGMSRCGTHGHARGNAGKRGSKFAYIWVGNSETQCPGQCAWPFHAPVYGPQSPPLVAPNNDVGLDGMVINLASLLAGTATNPFGNGYYQGPQNAPLEAASACPGVYGKGAYPGYAGNLLVDATTGGSFNAYGANGRKFLLPALYDPTTSDCSTMV

SEQ ID NO: 1620 - DNA, 1157 bp, Zea mays subsp. mays
  misc_feature (1)..(1157): Ceres Seq. ID no. 15176155
acaacattctcacgcagccctaaaactccttcgcctccctctctcgaatctctcttcctccttcatcatcaaaatggaattctggggagttgaggttagggcagggaagccacttaaagtgaaacctgatgaagactgtctcatccacctttcacaggcatctcttgataaagggaagaagggtgaaaccgccgtcttgtacgtgaccgttgacgggaagaagcttgtgattggaacacttgttcaagacaccatcccccagatcagctttgatctggtctttgagaaggagtttgagctctcacactcgtccaaaggaagcgtccacttcatcggctacaagtctcccaacatcgacgaagaggaggatttcccttgtgactcggaagaggaagaggaggaagttgaggttcctgctacttcaactgtcactacaaacggagcaacacctacttcgagtgttgttactgttgactcaaagccaaaggctgcggctaaggctaagcctgctgtagtgaagcctgaatcagacgaggatgatgatgagtctgacgaggaggatgattctgaagatgatggatctgactctgagaaagggatggatgttgatgaggatgattctgaggatgagaaagatgattctgaggaggaggaagaggatacccctaagaagcctgagacaagcaacaagaagaggccgattgaatctgcaacacctgtctctgctaagaagactaaaccagcagtagcagctacccctcagaaatcagaggagaagaagggagggcacacagctacaccacacccagctaaaaagggaggaaagagtcctatgaatgctaaccagagccccaaatctggaggtcaatcatccggatctggtggtaacaagaagccattcaacaactctggcaagcaatttggttctaacaacaagggcaacaaggggaagggaaagggcagcagagcctaagtgaagtgagatgttttgattttttagtagatgctctgtgagctgagatgaaagagatcggttttatttttatgtttatcctaagattttattctccttgtgggaattgctattttatgttattgcaacttttaaccttatggaattcagtattttgagaatggaaactcggaatgcaatcatg

SEQ ID NO: 1621 - protein, 323 aa, Zea mays subsp. mays
  misc_feature (1)..(323): Ceres Seq. ID no. 15176156
QHSHAALKLLRLPLSNLSSSFIIKMEFWGVEVRAGKPLKVKPDEDCLIHLSQASLDKGKKGETAVLYVTVDGKKLVIGTLVQDTIPQISFDLVFEKEFELSHSSKGSVHFIGYKSPNIDEEEDFPCDSEEEEEEVEVPATSTVTTNGATPTSSVVTVDSKPKAAAKAKPAVVKPESDEDDDESDEEDDSEDDGSDSEKGMDVDEDDSEDEKDDSEEEEEDTPKKPETSNKKRPIESATPVSAKKTKPAVAATPQKSEEKKGGHTATPHPAKKGGKSPMNANQSPKSGGQSSGSGGNKKPFNNSGKQFGSNNKGNKGKGKGSRA

SEQ ID NO: 1622 - protein, 299 aa, Zea mays subsp. mays
  misc_feature (1)..(299): Ceres Seq. ID no. 15176157
MEFWGVEVRAGKPLKVKPDEDCLIHLSQASLDKGKKGETAVLYVTVDGKKLVIGTLVQDTIPQISFDLVFEKEFELSHSSKGSVHFIGYKSPNIDEEEDFPCDSEEEEEEVEVPATSTVTTNGATPTSSVVTVDSKPKAAAKAKPAVVKPESDEDDDESDEEDDSEDDGSDSEKGMDVDEDDSEDEKDDSEEEEEDTPKKPETSNKKRPIESATPVSAKKTKPAVAATPQKSEEKKGGHTATPHPAKKGGKSPMNANQSPKSGGQSSGSGGNKKPFNNSGKQFGSNNKGNKGKGKGSRA

SEQ ID NO: 1623 - DNA, 1144 bp, Zea mays subsp. mays
  misc_feature (1)..(1144): Ceres Seq. ID no. 15176165
tagaacatcctaatcgaaaaatgaaattcgtctccatccgcggttcacccctgcaacaaaggcatggaagaagcagttcagttatgtctggcagctaaatccaacgacttgaaaaaggttcaaactttaattacctccggcgccgacgtttctcactttgacggcgacggtctaactccgttaatgcacgccgctaaaaccggaaacgccgaaatcatctctgcattactcgaagcaggagctccatggaacgctctgtccccgtctaatctctcagcaggagacttcgcaatggaagcaggacaccaagaagcgttcgatctcctcctcaaaaccggaatccaatccgagctaatcttgggaacaatcgcccgcaaagaaaccaagaacgaatactccaaccaagagtatctccaagaccgagtcaccttcagcgaagacaagatcatggacaacgaaagcaaaggagtgatgatgtcttgggagaagccgctaatggaagctcacgctaaagccatctgcaccaacggtggctccattctcaacgtcgggttcggtatgggactcgtcgatacagcgatacagcagtacaatccgaccaaacacacgatcatcgaagctcatccggatgtgtacaagcgtatgatcgagtcaggttggggcgagaaggagaacgtgaggattgttttcgggaggtggcaagatgttcttggcgagcttgatgagtgtggctacgatgggatctttttcgatacgtatggagagtattacgaagatttgtgggagtttcatcagaatctacccaagcttctgaagtctgatgggatttattcgtattttaatgggttttgtgggagtaatgcgttttttcatgttgtgtattgtaatctggtgacgttggagattgagagtttggggtttagcactcagttgattccgttgccggttaaggattgtcttggtgatgaagtttgggaaggtgtcaagcaaaagtattggcagcttgatacttattatctacctgtttgtcagtttagtgagtgaagttttacaacttccaagttttgtaatctctttgatacttttagttatgaaagtatcgattagctactaatttttttttagtagaaatttgccaaaatat

SEQ ID NO: 1624 - protein, 326 aa, Zea mays subsp. mays
  misc_feature (1)..(326): Ceres Seq. ID no. 15176166
MEEAVQLCLAAKSNDLKKVQTLITSGADVSHFDGDGLTPLMHAAKTGNAEIISALLEAGAPWNALSPSNLSAGDFAMEAGHQEAFDLLLKTGIQSELILGTIARKETKNEYSNQEYLQDRVTFSEDKIMDNESKGVMMSWEKPLMEAHAKAICTNGGSILNVGFGMGLVDTAIQQYNPTKHTIIEAHPDVYKRMIESGWGEKENVRIVFGRWQDVLGELDECGYDGIFFDTYGEYYEDLWEFHQNLPKLLKSDGIYSYFNGFCGSNAFFHVVYCNLVTLEIESLGFSTQLIPLPVKDCLGDEVWEGVKQKYWQLDTYYLPVCQFSE

SEQ ID NO: 1625 - protein, 286 aa, Zea mays subsp. mays
  misc_feature (1)..(286): Ceres Seq. ID no. 15176167
MHAAKTGNAEIISALLEAGAPWNALSPSNLSAGDFAMEAGHQEAFDLLLKTGIQSELILGTIARKETKNEYSNQEYLQDRVTFSEDKIMDNESKGVMMSWEKPLMEAHAKAICTNGGSILNVGFGMGLVDTAIQQYNPTKHTIIEAHPDVYKRMIESGWGEKENVRIVFGRWQDVLGELDECGYDGIFFDTYGEYYEDLWEFHQNLPKLLKSDGIYSYFNGFCGSNAFFHVVYCNLVTLEIESLGFSTQLIPLPVKDCLGDEVWEGVKQKYWQLDTYYLPVCQFSE

SEQ ID NO: 1626 - protein, 250 aa, Zea mays subsp. mays
  misc_feature (1)..(250): Ceres Seq. ID no. 15176168
MEAGHQEAFDLLLKTGIQSELILGTIARKETKNEYSNQEYLQDRVTFSEDKIMDNESKGVMMSWEKPLMEAHAKAICTNGGSILNVGFGMGLVDTAIQQYNPTKHTIIEAHPDVYKRMIESGWGEKENVRIVFGRWQDVLGELDECGYDGIFFDTYGEYYEDLWEFHQNLPKLLKSDGIYSYFNGFCGSNAFFHVVYCNLVTLEIESLGFSTQLIPLPVKDCLGDEVWEGVKQKYWQLDTYYLPVCQFSE

SEQ ID NO: 1627 - DNA, 638 bp, Zea mays subsp. mays
  misc_feature (1)..(638): Ceres Seq. ID no. 15176173
attaatttctttctcactctctcgaaatcacacgatgaaaagatcctccgccgtcacgtcaccgccatctctctccctctttctcctcctgctcctaccattgctagctcaatcctccgacgaccttatcgacaaaatctgcagagtgacgccgttcatcgacctctgtgaagcctctctccgccctctcactccctcaccttccgaccccaagtctctagcctcggccatggcttccgttgttcttggtaacatgactgatacgttaggctatatccaatcactgatcagacactctcacgatcctgcggcagagcgagcactagctcagtgcgctgagctgtaccggccggtggtcaagttcaacattcctcaggcgatcgacgcaatgcggcgaggagagttagggttcgcgacgtatgtgctcggagacgctgagaaacagactgacacttgccagaagtggatcaacagtgccggtgctgatgatgaaaattcggtggctcttacggctagaaacaagcaggttaagaatctttgtgacgtggccatttctgtgattaagtctctaatgaagggtcgttaagacaagaatctttgtttctgttgcagataataattatatattacatatttgt

SEQ ID NO: 1628 - protein, 194 aa, Zea mays subsp. mays
  misc_feature (1)..(194): Ceres Seq. ID no. 15176174
LISFSLSRNHTMKRSSAVTSPPSLSLFLLLLLPLLAQSSDDLIDKICRVTPFIDLCEASLRPLTPSPSDPKSLASAMASVVLGNMTDTLGYIQSLIRHSHDPAAERALAQCAELYRPVVKFNIPQAIDAMRRGELGFATYVLGDAEKQTDTCQKWINSAGADDENSVALTARNKQVKNLCDVAISVIKSLMKGR

SEQ ID NO: 1629 - protein, 183 aa, Zea mays subsp. mays
  misc_feature (1)..(183): Ceres Seq. ID no. 15176175
MKRSSAVTSPPSLSLFLLLLLPLLAQSSDDLIDKICRVTPFIDLCEASLRPLTPSPSDPKSLASAMASVVLGNMTDTLGYIQSLIRHSHDPAAERALAQCAELYRPVVKFNIPQAIDAMRRGELGFATYVLGDAEKQTDTCQKWINSAGADDENSVALTARNKQVKNLCDVAISVIKSLMKGR

SEQ ID NO: 1630 - protein, 118 aa, Zea mays subsp. mays
  misc_feature (1)..(118): Ceres Seq. ID no. 15176176
MASVVLGNMTDTLGYIQSLIRHSHDPAAERALAQCAELYRPVVKFNIPQAIDAMRRGELGFATYVLGDAEKQTDTCQKWINSAGADDENSVALTARNKQVKNLCDVAISVIKSLMKGR

SEQ ID NO: 1631 - DNA, 1102 bp, Zea mays subsp. mays
  misc_feature (1)..(1102): Ceres Seq. ID no. 15176185
acgcttgaactcgttattaattagacccaaaatgttaagagtaaccggaagtctctcagcggtatcatctccggcggcggtaactttctccgccgcactgagactctccgttgcccacactctcgctttctcatctcctcctccacatccccgctgcctctccacgttctctcgttcacttatcggcagacgcatctcttcgctccgaccacgcgttccttcaatgtacccgattaggctctctggcttctcggctctcaaagcgagagcttcgtttagcagtagtgggagtagtagtccaagcagagagattctggtgcagcatgtgcttgttaaggagggtgattctgagctctttgctgaactccagaagcgaatcttggatggagaggatatgagtgatcttgcagctgagtactcgatttgtccatccaagaaggatggtggtatacttggatgggtgaaattgggtcaaatggtaccagagtttgaggaagctgcgtttaaagcagagccgaatcatgtggtcaggtgtaaaacccaatttggctggcacttattgcaagttctatctgagagggaacctgtgaaagacatccaggtggaggagctgcattccaaaatgcaagatccagttttcatggaagaggctcagttaattgatgtcagagaacctgacgagatagccacagcatccttgccaggatttaaagtgttcccgctccgccaattcggaacatgggcaccagacatcacttcaaagctgaaccctgagaaggatacattcgtcctgtgtaaggttggtggcaggtcgatgcaggttgcgaactggctgcagtctcagggcttcaagagtgtgtacaatgtggctggtggaatacaagcctattccctcaaggttgacccatcaattcctacttactgacactgccacatcagagagttctagatcatcccatgcaatttactctctttattaaaaagatttttctatcgttaatccaaataattgccaatcgtattcggggaattcatttttaacagtaagtgcctgttttcgataaaattcaaatcacataaaaactgacgcgtaatgagagat

SEQ ID NO: 1632 - protein, 307 aa, Zea mays subsp. mays
  misc_feature (1)..(307): Ceres Seq. ID no. 15176186
RLNSLLIRPKMLRVTGSLSAVSSPAAVTFSAALRLSVAHTLAFSSPPPHPRCLSTFSRSLIGRRISSLRPRVPSMYPIRLSGFSALKARASFSSSGSSSPSREILVQHVLVKEGDSELFAELQKRILDGEDMSDLAAEYSICPSKKDGGILGWVKLGQMVPEFEEAAFKAEPNHVVRCKTQFGWHLLQVLSEREPVKDIQVEELHSKMQDPVFMEEAQLIDVREPDEIATASLPGFKVFPLRQFGTWAPDITSKLNPEKDTFVLCKVGGRSMQVANWLQSQGFKSVYNVAGGIQAYSLKVDPSIPTY

SEQ ID NO: 1633 - protein, 297 aa, Zea mays subsp. mays
  misc_feature (1)..(297): Ceres Seq. ID no. 15176187
MLRVTGSLSAVSSPAAVTFSAALRLSVAHTLAFSSPPPHPRCLSTFSRSLIGRRISSLRPRVPSMYPIRLSGFSALKARASFSSSGSSSPSREILVQHVLVKEGDSELFAELQKRILDGEDMSDLAAEYSICPSKKDGGILGWVKLGQMVPEFEEAAFKAEPNHVVRCKTQFGWHLLQVLSEREPVKDIQVEELHSKMQDPVFMEEAQLIDVREPDEIATASLPGFKVFPLRQFGTWAPDITSKLNPEKDTFVLCKVGGRSMQVANWLQSQGFKSVYNVAGGIQAYSLKVDPSIPTY

SEQ ID NO: 1634 - protein, 233 aa, Zea mays subsp. mays
  misc_feature (1)..(233): Ceres Seq. ID no. 15176188
MYPIRLSGFSALKARASFSSSGSSSPSREILVQHVLVKEGDSELFAELQKRILDGEDMSDLAAEYSICPSKKDGGILGWVKLGQMVPEFEEAAFKAEPNHVVRCKTQFGWHLLQVLSEREPVKDIQVEELHSKMQDPVFMEEAQLIDVREPDEIATASLPGFKVFPLRQFGTWAPDITSKLNPEKDTFVLCKVGGRSMQVANWLQSQGFKSVYNVAGGIQAYSLKVDPSIPTY

SEQ ID NO: 1635 - DNA, 843 bp, Zea mays subsp. mays
  misc_feature (1)..(843): Ceres Seq. ID no. 15176518
gtattcagacgaaagaacaagttttcagagtaaagcaacacttgagccaataataagcacacaacacaaagagaagctgatgcttgtcgcagtctccgttcgtcatcacgaccgttccgaagatctgaggacgaaagcaatctccttcagcctctattaatcaaaacattccagcaatcaatatataacgtgggtttgtgaagattttccgtaaaggcactaggtggtgatcatttttcaacatgaacaacccacatcctgatgatgatcatgaggacacaactgttgccggatttgaagtaccagtatcgccggtttcaagttacaacaatgtgtattccgcaaccgaagacgagacaagagacccaccagctgtaccgccgcatcttcaacactctctgttaggccatacaggtagcacggaattgccttgtgcaccacagagtgtcgtcctgaaccatctctatatcgaaaatcgagaccccccaagatccgttgtagcacttggtttctcgcatcggttcaggtctaagtatgtcactgtggtgatatacaagccggtccaaagaagaggaaacgccaatgtttgatgatgatgcctcttcttaatatagtgttgggatctcttgcttctgtatggattcagttcggtatatacaaaaaccagctggtccgaactaaatttcttcctatcagtttagggaattcgattgaaatcatctgtgtagacgtttatataaaatctacctgcattgtttgtaataactcgcttttggtttggttgtttaaccgaatccacatacatctctcttgaagatatgcatttaatcatgtttaaatttt

SEQ ID NO: 1636 - protein, 115 aa, Zea mays subsp. mays
  misc_feature (1)..(115): Ceres Seq. ID no. 15176519
MNNPHPDDDHEDTTVAGFEVPVSPVSSYNNVYSATEDETRDPPAVPPHLQHSLLGHTGSTELPCAPQSVVLNHLYIENRDPPRSVVALGFSHRFRSKYVTVVIYKPVQRRGNANV

SEQ ID NO: 1637 - protein, 74 aa, Zea mays subsp. mays
  misc_feature (1)..(74): Ceres Seq. ID no. 15176520
MMMPLLNIVLGSLASVWIQFGIYKNQLVRTKFLPISLGNSIEIICVDVYIKSTCIVCNNSLLVWLFNRIHIHLS

SEQ ID NO: 1638 - protein, 73 aa, Zea mays subsp. mays
  misc_feature (1)..(73): Ceres Seq. ID no. 15176521
MMPLLNIVLGSLASVWIQFGIYKNQLVRTKFLPISLGNSIEIICVDVYIKSTCIVCNNSLLVWLFNRIHIHLS

SEQ ID NO: 1639 - DNA, 1285 bp, Zea mays subsp. mays
  misc_feature (1)..(1285): Ceres Seq. ID no. 15176540
tataccagagttcctgaagaggtccatcctgctacagacatttggtgtccaaggccatcacgtatgtcaggaggtggagcatgttgtgatcccacctcatgtgccgcccgaggtggctcacgaactaccggagccagagaaggctcagagggacatttttgccttctttcgaggcaagatggaggtgcaccccaagaacatcagtggccgcttctacagcaagaaggtgaggactgaacttctacaacattatggccgcaatcgcaagttctaccttaagagaaagcggttcgacaactaccgatcagagatggcccggtcgttgttctgcctctgcccgctgggatgggcgccttggagtcctcggttcgtggaatcagtcctgctaggctgcattcccgttataattgctgatgacatacgtctgccgttccctccagtcctccagtggcaggagatctcgctgcaggtggctgagaaggacatagccagccttgggatggtgcttgaccatgtcgtggcaaccaatttgactgtgatacagaagaatttgtgggacccagtgaagcggagggctctggttttcaatcgtccgatggaagcgggcgacgctacatggcaagttttgagggagcttgaggttttgctggaccagtctcggaggaggagatctgttggatcctattcctggaggaggtgaagcacacagaaggtcatctgttgcagctgtgcacccatggtttgcgctctgcagttcacagcatgccgccctggctgacaacatcaacattgagtcgagacctgagcctgagatccacctctgacatggttttttctcaccagaaattcagaatgacgatctcaaaccagagctctacttctgacatggttttttctaatccagaaattcagaatattgatctcaagctagagatcccaaccttcagttaggtcgatgggaatatgggctgctagctccaccttcgttggcctgttgtctggttagtgcctaattggagatcccaatctcggttgacaagttgaccagctccctataacgtataggcaaatcgttcacacatttatttattcttttaagaactgagatgggtttgcttttcttgccatagaaagatcttactgcaatttacaggttgcagcttatttttttgtgtttattttttcggctgcacacttgtatagttgccgggctgttgtgtatgctacttaaattcttctgtaaatagaatggtgtcaaagaatgagttgattttaagataacgtg

SEQ ID NO: 1640 - protein, 232 aa, Zea mays subsp. mays
  misc_feature (1)..(232): Ceres Seq. ID no. 15176541
IPEFLKRSILLQTFGVQGHHVCQEVEHVVIPPHVPPEVAHELPEPEKAQRDIFAFFRGKMEVHPKNISGRFYSKKVRTELLQHYGRNRKFYLKRKRFDNYRSEMARSLFCLCPLGWAPWSPRFVESVLLGCIPVIIADDIRLPFPPVLQWQEISLQVAEKDIASLGMVLDHVVATNLTVIQKNLWDPVKRRALVFNRPMEAGDATWQVLRELEVLLDQSRRRRSVGSYSWRR

SEQ ID NO: 1641 - protein, 173 aa, Zea mays subsp. mays
  misc_feature (1)..(173): Ceres Seq. ID no. 15176542
MEVHPKNISGRFYSKKVRTELLQHYGRNRKFYLKRKRFDNYRSEMARSLFCLCPLGWAPWSPRFVESVLLGCIPVIIADDIRLPFPPVLQWQEISLQVAEKDIASLGMVLDHVVATNLTVIQKNLWDPVKRRALVFNRPMEAGDATWQVLRELEVLLDQSRRRRSVGSYSWRR

SEQ ID NO: 1642 - protein, 129 aa, Zea mays subsp. mays
  misc_feature (1)..(129): Ceres Seq. ID no. 15176543
MARSLFCLCPLGWAPWSPRFVESVLLGCIPVIIADDIRLPFPPVLQWQEISLQVAEKDIASLGMVLDHVVATNLTVIQKNLWDPVKRRALVFNRPMEAGDATWQVLRELEVLLDQSRRRRSVGSYSWRR

SEQ ID NO: 1643 - DNA, 972 bp, Zea mays subsp. mays
  misc_feature (1)..(972): Ceres Seq. ID no. 15176807
atcattcaggtcttcgtctttttcgtctctctctgttctctccatcgctgaacattcagatcgctagctggtcgtgcatctaatctactactattatatttcttcatcttcccatagttgagatcttaaccaaaaaaaaatgaacaaaaacacacggatcgatatcccctcttcgtcttcaccatccttagcttccgcagacggtgagctccacgaagacgacatcttcgcaatcgacataactcacgcgcctcgtccttctccgacgcagcaacaacacccacctgctcgtcaccttcaaagaagcaaaagcagtttgaaaaacgtggaagcttccggtatcctcgctgctctccccgagccttcaggaggaaacagttacctcaaccacgtctttcaccacaaacccgcctctgttctctccacttcagtctcctccacagcttcttcctcgtcttcttcaggcggcggtgcttccgctcgaaccatccccgccgctcctaaaccgcctcaagagaggcttccgtttacgtcttcttttatgaacggagggaagtttcctcagtcggctccagttcgagttccgtcggcgatgatgaatcgtcataagaaggagtttaagttgactgatgtggtggatgttgatgatgatgaggaaggggagatgcttccgcctcacgagatggtagctcgttctttggctcagtcttcgttgctgtcttgctcggtgcttgaaggagcaggaagaacacttaaagggagagatctccggcaggtaaggaatgctgttttcagaagaaccggttttattgattgaatttctctttttttcattctttgatttgttgtccccaattgaaccggttttatttggtttacagaaacattccaatgtattgttcatatatgttgtctacattacacgatttgttgtttacttcatattaatcagattgatgtgattgtttgctt

SEQ ID NO: 1644 - protein, 225 aa, Zea mays subsp. mays
  misc_feature (1)..(225): Ceres Seq. ID no. 15176808
MNKNTRIDIPSSSSPSLASADGELHEDDIFAIDITHAPRPSPTQQQHPPARHLQRSKSSLKNVEASGILAALPEPSGGNSYLNHVFHHKPASVLSTSVSSTASSSSSSGGGASARTIPAAPKPPQERLPFTSSFMNGGKFPQSAPVRVPSAMMNRHKKEFKLTDVVDVDDDEEGEMLPPHEMVARSLAQSSLLSCSVLEGAGRTLKGRDLRQVRNAVFRRTGFID

SEQ ID NO: 1645 - DNA, 589 bp, Zea mays subsp. mays
  misc_feature (1)..(589): Ceres Seq. ID no. 15176813
taaaaaccaaaaccaaaaacccaaaacctccaaaaggtgatgaacagggtgatattggcaagagatggcctagggatgaggtattggctcttatcaacatcagacgcagtatgagtagcatgaatgatgatcatcatcgtaaagatgacatcccgttaccatcatcatccacaaaagctgttcctctgtgggaaagaatatccaagaaaatgttggaggttgggtacaagagaagtgccaagagatgcaaagagaaatgggaaaacatcaacaagtattttagaaagacaaaagatgttaacaagaagaggccacttgactcaaggacttgtccttattttcaccaacttacagctttgtacagccaaccctccacagggaccaccaccaccgtcacagccgacacgtcagtcgaagagctagaaacccgacccgaggaaaaccgggttggatccggagattctgatattcctacagccatgcatgtagatggtgacagcgaaaaaagcaatgaacaattttcaggctttgatcttgcgttctaataaacctcaaaactatatatatttattatcagtttaattctctc

SEQ ID NO: 1646 - protein, 180 aa, Zea mays subsp. mays
  misc_feature (1)..(180): Ceres Seq. ID no. 15176814
KTKTKNPKPPKGDEQGDIGKRWPRDEVLALINIRRSMSSMNDDHHRKDDIPLPSSSTKAVPLWERISKKMLEVGYKRSAKRCKEKWENINKYFRKTKDVNKKRPLDSRTCPYFHQLTALYSQPSTGTTTTVTADTSVEELETRPEENRVGSGDSDIPTAMHVDGDSEKSNEQFSGFDLAF

SEQ ID NO: 1647 - protein, 144 aa, Zea mays subsp. mays
  misc_feature (1)..(144): Ceres Seq. ID no. 15176815
MSSMNDDHHRKDDIPLPSSSTKAVPLWERISKKMLEVGYKRSAKRCKEKWENINKYFRKTKDVNKKRPLDSRTCPYFHQLTALYSQPSTGTTTTVTADTSVEELETRPEENRVGSGDSDIPTAMHVDGDSEKSNEQFSGFDLAF

SEQ ID NO: 1648 - protein, 141 aa, Zea mays subsp. mays
  misc_feature (1)..(141): Ceres Seq. ID no. 15176816
MNDDHHRKDDIPLPSSSTKAVPLWERISKKMLEVGYKRSAKRCKEKWENINKYFRKTKDVNKKRPLDSRTCPYFHQLTALYSQPSTGTTTTVTADTSVEELETRPEENRVGSGDSDIPTAMHVDGDSEKSNEQFSGFDLAF

SEQ ID NO: 1649 - DNA, 817 bp, Zea mays subsp. mays
  misc_feature (1)..(817): Ceres Seq. ID no. 15176828
ctcgtccagggatcatcatgatttgattggcaacttaaccagaatcaatgatgaatgacctgagcaaatacaggtcaattttcactagattctattttcttggggaaatcaagtttctctgagacggttatcttccctatcatctgaaagtccctgagactttcgccgctctcatctctctctctcggttcgggtatgactcgtcacgtgatactgacatcagaagaaagaaactctccaccgaccacgatgatcaaacacgcggagaggaggaaggtgggagaggtagccggaggagccgcagctgagtgtgcggccgtgtggtgttgcggtccttgcgccgtggttaacctagttgttctcgctgtgtatagagttcccgcggccgtttgtaagaaagcttggcgacaaaccaaacggcaacgttttatgaggagacgacacggtttacttgcgtcagcggctgccgagagcaccgtgcacgctagactaaaggaggaagatccaacggctgaaattgttttcgaagaaaatgtagtgaatgtcgagttaaacgacgtcgtcgtgcttgaggatgagatgtttgaacgtttctatggggcaggattttggagaagcccgtcacagagggacacatcatcaggaagtatatgatttctttgtgaaaatattaataattaatttgatttatatgtgattctttaaaattatcatgcgggtatgtgaataggagaaatgtagtaatatttatacattgttcgtttttgtttcgttcgatttaaatataactacgtctcaattgggatttggggtggct

SEQ ID NO: 1650 - protein, 152 aa, Zea mays subsp. mays
  misc_feature (1)..(152): Ceres Seq. ID no. 15176829
MTRHVILTSEERNSPPTTMIKHAERRKVGEVAGGAAAECAAVWCCGPCAVVNLVVLAVYRVPAAVCKKAWRQTKRQRFMRRRHGLLASAAAESTVHARLKEEDPTAEIVFEENVVNVELNDVVVLEDEMFERFYGAGFWRSPSQRDTSSGSI

SEQ ID NO: 1651 - protein, 134 aa, Zea mays subsp. mays
  misc_feature (1)..(134): Ceres Seq. ID no. 15176830
MIKHAERRKVGEVAGGAAAECAAVWCCGPCAVVNLVVLAVYRVPAAVCKKAWRQTKRQRFMRRRHGLLASAAAESTVHARLKEEDPTAEIVFEENVVNVELNDVVVLEDEMFERFYGAGFWRSPSQRDTSSGSI

SEQ ID NO: 1652 - DNA, 642 bp, Zea mays subsp. mays
  misc_feature (1)..(642): Ceres Seq. ID no. 15177455
aatatcggctagggatgacgacgaggatggcaggattcggcgaggaagaaagtgggatctcagacagtgagatcatagagggttttctgcggccaaagattgaaggagaagcagtggcgattccgggattgatagtggaattgggggaggagttgtacactcgagagccatggctccttccgcagacagcccatcccatccttaaccctcgagagtggctctacttggggaaaccgaatcgaaataatttccccgttgatcacgaagggtgttgggttcgcattggaagtgccatcttgatccgatccgaggagactgatgaaataattgggggaacgtcgagattcagatatcgcttcaggaacaagggggacaaacatgctctgaggtggagtaattggttcatgaaagagtatcgtctctttaacccaacccctcatgttatttgcaagattactgaaaagctgtgctaagataaatttgtttctgttttaatatttttatttttgcaatggactcagattccattccattccttgtgtttcattcgaattttaataaatcaataagttcgggtggtttgattgattctgaatgtgctaatgaaaacctgtgctaagataaatttgtttctgttttaat

SEQ ID NO: 1653 - protein, 156 aa, Zea mays subsp. mays
  misc_feature (1)..(156): Ceres Seq. ID no. 15177456
YRLGMTTRMAGFGEEESGISDSEIIEGFLRPKIEGEAVAIPGLIVELGEELYTREPWLLPQTAHPILNPREWLYLGKPNRNNFPVDHEGCWVRIGSAILIRSEETDEIIGGTSRFRYRFRNKGDKHALRWSNWFMKEYRLFNPTPHVICKITEKLC

SEQ ID NO: 1654 - protein, 152 aa, Zea mays subsp. mays
  misc_feature (1)..(152): Ceres Seq. ID no. 15177457
MTTRMAGFGEEESGISDSEIIEGFLRPKIEGEAVAIPGLIVELGEELYTREPWLLPQTAHPILNPREWLYLGKPNRNNFPVDHEGCWVRIGSAILIRSEETDEIIGGTSRFRYRFRNKGDKHALRWSNWFMKEYRLFNPTPHVICKITEKLC

SEQ ID NO: 1655 - protein, 148 aa, Zea mays subsp. mays
  misc_feature (1)..(148): Ceres Seq. ID no. 15177458
MAGFGEEESGISDSEIIEGFLRPKIEGEAVAIPGLIVELGEELYTREPWLLPQTAHPILNPREWLYLGKPNRNNFPVDHEGCWVRIGSAILIRSEETDEIIGGTSRFRYRFRNKGDKHALRWSNWFMKEYRLFNPTPHVICKITEKLC

SEQ ID NO: 1656 - DNA, 1302 bp, Zea mays subsp. mays
  misc_feature (1)..(1302): Ceres Seq. ID no. 15177459
aagagaggaatcgataggactctgtaactcttcccttatatgagatctatagtttaacctaaacctaaaggtttatatatcaataatgatgctttcagtgatcgttgcaatccttgtctgccttgcaagctacatttaccgatcattgaagcctccaccgccgcgagtctgcggcgttcctcacggtcctccgattacttctccgagaatcaagctcagtgatggaagatatcttgcttatagagaatctggcgttgatagagccaatgctaatcacaagatcatcgttgttcatggatttaacaactccaaagacatggaacttcccatctctaaggatcttattgaggaactagggatatattttctgtttttcgatagagcagggtatggagaaagtgatccacaccctacacgtacggtcaaaagtgaagcatatgacattcaagaactcgctgataaactcaacatcggaccaaagttctatgttatagggttatcagtcggtgcttactcggtttatagctgcctcaaatatattccccacagattagctggagcagtcttagtggttccatttgtcagctattggtggactaaagtgcctcaggacatctcgagtaaagcgttcaagctattgcccgaagatgtccggtggacgtttagagtggctcattatgttccttggctcttgtattggtggttgactcatcaatggttttcgtcttcgagtataatctctggaaacagtgcgttactgagcgatacagatttggtcatcataaagaagatgttggagaatccgagtcctcacacggaaaaagtccggcaacagggagaccatgaatgtcttcaccgagacatgattgctggattcgcgacatgggagttcgacccaaccgaattggaaaacccgtttactgaaggtgtaggttcagtacacatgtggcagggtactgaagacagagtagttccacgagaaattaatgaatatatatcaaagaagctcccatggattaagtaccacgaagtccaaggttatggtcatcttctaagcgaggaggagcagaaatgtgaagacattattaaggcgcttcttgtggagtgatgatcatctatcaacggacactagtgctgaaggtggcatttaaacttttagtaaaaaataattcctttgataagtaagaggaatgttttagtcaaaaaaaagtaagaggaatgttattattgtaagtttgtgacaaaggagaaccacttaaacgtcctatattattatataaaactttattcttcaaagttgct

SEQ ID NO: 1657 - protein, 340 aa, Zea mays subsp. mays
  misc_feature (1)..(340): Ceres Seq. ID no. 15177460
MMLSVIVAILVCLASYIYRSLKPPPPRVCGVPHGPPITSPRIKLSDGRYLAYRESGVDRANANHKIIVVHGFNNSKDMELPISKDLIEELGIYFLFFDRAGYGESDPHPTRTVKSEAYDIQELADKLNIGPKFYVIGLSVGAYSVYSCLKYIPHRLAGAVLVVPFVSYWWTKVPQDISSKAFKLLPEDVRWTFRVAHYVPWLLYWWLTHQWFSSSSIISGNSALLSDTDLVIIKKMLENPSPHTEKVRQQGDHECLHRDMIAGFATWEFDPTELENPFTEGVGSVHMWQGTEDRVVPREINEYISKKLPWIKYHEVQGYGHLLSEEEQKCEDIIKALLVE

SEQ ID NO: 1658 - protein, 339 aa, Zea mays subsp. mays
  misc_feature (1)..(339): Ceres Seq. ID no. 15177461
MLSVIVAILVCLASYIYRSLKPPPPRVCGVPHGPPITSPRIKLSDGRYLAYRESGVDRANANHKIIVVHGFNNSKDMELPISKDLIEELGIYFLFFDRAGYGESDPHPTRTVKSEAYDIQELADKLNIGPKFYVIGLSVGAYSVYSCLKYIPHRLAGAVLVVPFVSYWWTKVPQDISSKAFKLLPEDVRWTFRVAHYVPWLLYWWLTHQWFSSSSIISGNSALLSDTDLVIIKKMLENPSPHTEKVRQQGDHECLHRDMIAGFATWEFDPTELENPFTEGVGSVHMWQGTEDRVVPREINEYISKKLPWIKYHEVQGYGHLLSEEEQKCEDIIKALLVE

SEQ ID NO: 1659 - protein, 263 aa, Zea mays subsp. mays
  misc_feature (1)..(263): Ceres Seq. ID no. 15177462
MELPISKDLIEELGIYFLFFDRAGYGESDPHPTRTVKSEAYDIQELADKLNIGPKFYVIGLSVGAYSVYSCLKYIPHRLAGAVLVVPFVSYWWTKVPQDISSKAFKLLPEDVRWTFRVAHYVPWLLYWWLTHQWFSSSSIISGNSALLSDTDLVIIKKMLENPSPHTEKVRQQGDHECLHRDMIAGFATWEFDPTELENPFTEGVGSVHMWQGTEDRVVPREINEYISKKLPWIKYHEVQGYGHLLSEEEQKCEDIIKALLVE

SEQ ID NO: 1660 - DNA, 680 bp, Zea mays subsp. mays
  misc_feature (1)..(680): Ceres Seq. ID no. 15177478
acataaaccctagaaacgtctaagtgcgatctctctctctcttcctaaagatatgcgggtggtgaatccatccttgtgtatcgacggtgcacaaccattggtgtacctccctcctcctcgctcttctcattttcccgctaatggaaaattccatgggcgttgttactatcctacgagcgtttctatgcaatcccagagcaaaagatctgtctttgcatgtaacgctgccctgaatgcaaaatgcagtcaagggcaaacacagactgttactcgggaatcaccgacaattacacaagctcctacacatggaaaggagaaatccccaaagcttgatgacggtggaagcgggttcccaccccgggatgatggtggtggtgggggcggaggaggcggtggagagagcttctctggtggattcttccttttcgggtttcttatgttcatgggttacttgaaagatttggagggcgaacatgaaaccagccactagctagagaggggaggaaggggaaacagacagacagagagatctctagacgaaatagagataataaaaagtttatactagtgctagcaattaggcacatatttgtatgaatcagacagatttttgttatctcgacataaaacaaaatgcttcatctttataacaaatgttcaaagatttggaactgaggttt

SEQ ID NO: 1661 - protein, 145 aa, Zea mays subsp. mays
  misc_feature (1)..(145): Ceres Seq. ID no. 15177479
MRVVNPSLCIDGAQPLVYLPPPRSSHFPANGKFHGRCYYPTSVSMQSQSKRSVFACNAALNAKCSQGQTQTVTRESPTITQAPTHGKEKSPKLDDGGSGFPPRDDGGGGGGGGGGESFSGGFFLFGFLMFMGYLKDLEGEHETSH

SEQ ID NO: 1662 - protein, 101 aa, Zea mays subsp. mays
  misc_feature (1)..(101): Ceres Seq. ID no. 15177480
MQSQSKRSVFACNAALNAKCSQGQTQTVTRESPTITQAPTHGKEKSPKLDDGGSGFPPRDDGGGGGGGGGGESFSGGFFLFGFLMFMGYLKDLEGEHETSH

SEQ ID NO: 1663 - protein, 73 aa, Zea mays subsp. mays
  misc_feature (1)..(73): Ceres Seq. ID no. 15177481
MQNAVKGKHRLLLGNHRQLHKLLHMERRNPQSLMTVEAGSHPGMMVVVGAEEAVERASLVDSSFSGFLCSWVT

SEQ ID NO: 1664 - DNA, 783 bp, Zea mays subsp. mays
  misc_feature (1)..(783): Ceres Seq. ID no. 15177508
aggatttgctgctcgcgccgtcataaaatctttctgcaacgacgaaccgatgacggtgaagagcatcttcgcccgtctccttctgcacgtctaccccggggaaacgttatccactgagatgtggcttgacgaccagaaggtgcactaccaaacgaatcttgtggttggggaagcttgtgccacaaaccaaacatgttcatatcgtggccgttttggccatatgttgggccatctggaaatcaaggaatagaatgtgctttgagaatattctaaataaatcacctaatgaaattatctgccatgcgagcgctctgatgatttcttggacaggtttgagcaaaagggagttgcagcctgcagggcttgattcaagaaggcgcaaagctgctggtcagggcagcgagcgttaagttggatgctcgcgttgtcgatcaagtggaagaggagaacgatgatatagagaattaaaagtttggtatagtgatcagctttctggtggaagcctgacgagaattgtctacttctggatcttggccatgtagctttgttctgcttctgttgtgttgttcttgtccgagtataaggtctacaatggcataatgcttgtaccatctttttatatggtaacttattttttctcatgcagtgcatgtgacttgaaactttgttaggacatagtttgtgaaagggaaatggacccaacattttctatagtcgattttggtatttgacgtctgtcacaaatgattatgaacagaagctatgtacttgtttgtattttgt

SEQ ID NO: 1665 - protein, 82 aa, Zea mays subsp. mays
  misc_feature (1)..(82): Ceres Seq. ID no. 15177509
GFAARAVIKSFCNDEPMTVKSIFARLLLHVYPGETLSTEMWLDDQKVHYQTNLVVGEACATNQTCSYRGRFGHMLGHLEIKE

SEQ ID NO: 1666 - protein, 66 aa, Zea mays subsp. mays
  misc_feature (1)..(66): Ceres Seq. ID no. 15177510
MTVKSIFARLLLHVYPGETLSTEMWLDDQKVHYQTNLVVGEACATNQTCSYRGRFGHMLGHLEIKE

SEQ ID NO: 1667 - protein, 52 aa, Zea mays subsp. mays
  misc_feature (1)..(52): Ceres Seq. ID no. 15177511
MCFENILNKSPNEIICHASALMISWTGLSKRELQPAGLDSRRRKAAGQGSER

SEQ ID NO: 1668 - DNA, 1001 bp, Zea mays subsp. mays
  misc_feature (1)..(1001): Ceres Seq. ID no. 15177518
atcaaccatggcttactcagctcccatatctccatccctatccttcttcaaaaacccccaactcaccagactctcgttccctttctccccactttactctcgccctagggttcagaatccaagtctgctcacgaagaacaagacgtggtcgtcgtccgtggtggtggcggcgacggcggcggagaagcagaagaagagataccctggagaatcgaaagggtttgtggaggagatgaggtttgtggcgatgagacttcacacgaaggagcaggccaaggaaggtgagaaagagacaaaatctcccgaggaacgtcctgtcgctaaatgggaaccgactgttgaaggttacttgaggtttttggtggatagcaagttggtttacgacacgcttgaagggattattcatcagtccactttcccaacttatgcggaattcaagaacactgggctggaaagggcagagaaattggacactgatctgaagtggttcaaagaacaaggctacgagattccagaaccaactgatactggtaaaaaatattctcagtatttaaaggatttagcagacaaggatcctccatcattcatttgtcacttctacaacatctacttcgcccacagcgctggtggtcgaatgattggaagaaaggtagcggaaaggattctcgacaatagagaactcgagttttacaaatgggacggcgacctttccggattgttgcagaacgtgagggaaaaactgaacaaagttgcagaggagtggacgagagaagagaagaatcattgtttggaagagaccgagaaatcgttcaagtattctggtgagatacttcgtctcatattgtcctgattcctctctttatatacgcgcttgtggcaactaaaatccctgctcaagttttttattcctgtattatatttttaaactcgcttctgcttgtttgtatcatcaaactcttatttgcttcaaagcttaatacgacgttggaagttcagcgttc

SEQ ID NO: 1669 - protein, 282 aa, Zea mays subsp. mays
  misc_feature (1)..(282): Ceres Seq. ID no. 15177519
STMAYSAPISPSLSFFKNPQLTRLSFPFSPLYSRPRVQNPSLLTKNKTWSSSVVVAATAAEKQKKRYPGESKGFVEEMRFVAMRLHTKEQAKEGEKETKSPEERPVAKWEPTVEGYLRFLVDSKLVYDTLEGIIHQSTFPTYAEFKNTGLERAEKLDTDLKWFKEQGYEIPEPTDTGKKYSQYLKDLADKDPPSFICHFYNIYFAHSAGGRMIGRKVAERILDNRELEFYKWDGDLSGLLQNVREKLNKVAEEWTREEKNHCLEETEKSFKYSGEILRLILS

SEQ ID NO: 1670 - protein, 280 aa, Zea mays subsp. mays
  misc_feature (1)..(280): Ceres Seq. ID no. 15177520
MAYSAPISPSLSFFKNPQLTRLSFPFSPLYSRPRVQNPSLLTKNKTWSSSVVVAATAAEKQKKRYPGESKGFVEEMRFVAMRLHTKEQAKEGEKETKSPEERPVAKWEPTVEGYLRFLVDSKLVYDTLEGIIHQSTFPTYAEFKNTGLERAEKLDTDLKWFKEQGYEIPEPTDTGKKYSQYLKDLADKDPPSFICHFYNIYFAHSAGGRMIGRKVAERILDNRELEFYKWDGDLSGLLQNVREKLNKVAEEWTREEKNHCLEETEKSFKYSGEILRLILS

SEQ ID NO: 1671 - protein, 205 aa, Zea mays subsp. mays
  misc_feature (1)..(205): Ceres Seq. ID no. 15177521
MRFVAMRLHTKEQAKEGEKETKSPEERPVAKWEPTVEGYLRFLVDSKLVYDTLEGIIHQSTFPTYAEFKNTGLERAEKLDTDLKWFKEQGYEIPEPTDTGKKYSQYLKDLADKDPPSFICHFYNIYFAHSAGGRMIGRKVAERILDNRELEFYKWDGDLSGLLQNVREKLNKVAEEWTREEKNHCLEETEKSFKYSGEILRLILS

SEQ ID NO: 1672 - DNA, 610 bp, Zea mays subsp. mays
  misc_feature (1)..(610): Ceres Seq. ID no. 15177530
gctaaagaaattcgattcctcttctccaacttcgtcgtcgtcgagcagagtcaagctttctaccgccatggatcctaacctcgcaaacaacccccaattgattcaattcctcagccaagagaaagaaagggcaatggcgaacgaagtggtggcgaagataacaagctcgtgctgggacaagtgcgtggacaagccaggaagcaaattcagctccagcgagacttcttgcctcagtaactgcgccttacgatacatggacatgactatgctcatcatgaaacgctttcagcagcagtgattttcattatcatcatgatcatgatgatgttacttctttcccttttatttattattattatgaaaaccgttttttttcttctcttctcatggcaactggtgttgaacccctgcgataatatttctcttggatgaattgttgtgggattagtttatggtaatgtgatttgagatttttatttcatggactaatgaatcagtgtggaatgttcagcttattaagattacggtgaaacgggcacatcgttggatatattgtgccccttttcaccataatctcaatgtgtcagcaaagttgaaaccagctctaaac

SEQ ID NO: 1673 - protein, 98 aa, Zea mays subsp. mays
  misc_feature (1)..(98): Ceres Seq. ID no. 15177531
LKKFDSSSPTSSSSSRVKLSTAMDPNLANNPQLIQFLSQEKERAMANEVVAKITSSCWDKCVDKPGSKFSSSETSCLSNCALRYMDMTMLIMKRFQQQ

SEQ ID NO: 1674 - protein, 76 aa, Zea mays subsp. mays
  misc_feature (1)..(76): Ceres Seq. ID no. 15177532
MDPNLANNPQLIQFLSQEKERAMANEVVAKITSSCWDKCVDKPGSKFSSSETSCLSNCALRYMDMTMLIMKRFQQQ

SEQ ID NO: 1675 - protein, 54 aa, Zea mays subsp. mays
  misc_feature (1)..(54): Ceres Seq. ID no. 15177533
MANEVVAKITSSCWDKCVDKPGSKFSSSETSCLSNCALRYMDMTMLIMKRFQQQ

SEQ ID NO: 1676 - DNA, 1022 bp, Zea mays subsp. mays
  misc_feature (1)..(1022): Ceres Seq. ID no. 15177682
aaaaaccacacattcaaaacttactctgaggaactgaacagagaagaagactagacagacagagaggagactctgtgtgtgtgtgaggaagcaacaaatgtccatatccatggcgttattctctccgccaatctcttctccacttcaaaactctaacctcatccccaagatcccactctctctcctctccaccaagcgcctctctctcgtcgccctcactcgagcctcgtccgacaacggtacgtcaacacccgcttccgcaaccaccgtggaggctccaactccaaagcctgcctctgtagaagaggttccggtaaaatctccggcggaaagcccctccgcgtctgaaaatggcgccgttggagcccaagagattgatgatatgacaaccaccacgatgacggagatcaagtttcaggacgcgaagtgggttaatggaacatgggacctgaaacagttcgagaaagaaggcaaaacggactgggactctgttatcgttgctgaggcaaagaggagaaagtggcttgaagataacccggagacaactagtaacgacgagcctgtcctcttcgacacctccatcattccatggtgggcatggatgaagagataccatctacccgaagctgaactcctcaatggtcgtgcggcgatggtagggttcttcatggcttactttgttgacagccttacaggagtaggacttgttgatcaaatggggaatttcttctgcaaaacactcttgtttgtggctgtagccggagttcttttcatccgcaagaacgaagatttggataaactaaagggtctgattgaagagacgacgttatatgacaagcaatggcaagcggcatggaaagagccggagtcatcatcatcatcaacggtttcttcaaagaagtgaagaaaatttatggcttaaaatgtttcctcttttgttatgtgatgatgataagtgacagtcccaagataatttctttattgtattactgatattgagattgtaatctttctggctttag

SEQ ID NO: 1677 - protein, 268 aa, Zea mays subsp. mays
  misc_feature (1)..(268): Ceres Seq. ID no. 15177683
MSISMALFSPPISSPLQNSNLIPKIPLSLLSTKRLSLVALTRASSDNGTSTPASATTVEAPTPKPASVEEVPVKSPAESPSASENGAVGAQEIDDMTTTTMTEIKFQDAKWVNGTWDLKQFEKEGKTDWDSVIVAEAKRRKWLEDNPETTSNDEPVLFDTSIIPWWAWMKRYHLPEAELLNGRAAMVGFFMAYFVDSLTGVGLVDQMGNFFCKTLLFVAVAGVLFIRKNEDLDKLKGLIEETTLYDKQWQAAWKEPESSSSSTVSSKK

SEQ ID NO: 1678 - protein, 264 aa, Zea mays subsp. mays
  misc_feature (1)..(264): Ceres Seq. ID no. 15177684
MALFSPPISSPLQNSNLIPKIPLSLLSTKRLSLVALTRASSDNGTSTPASATTVEAPTPKPASVEEVPVKSPAESPSASENGAVGAQEIDDMTTTTMTEIKFQDAKWVNGTWDLKQFEKEGKTDWDSVIVAEAKRRKWLEDNPETTSNDEPVLFDTSIIPWWAWMKRYHLPEAELLNGRAAMVGFFMAYFVDSLTGVGLVDQMGNFFCKTLLFVAVAGVLFIRKNEDLDKLKGLIEETTLYDKQWQAAWKEPESSSSSTVSSKK

SEQ ID NO: 1679 - protein, 173 aa, Zea mays subsp. mays
  misc_feature (1)..(173): Ceres Seq. ID no. 15177685
MTTTTMTEIKFQDAKWVNGTWDLKQFEKEGKTDWDSVIVAEAKRRKWLEDNPETTSNDEPVLFDTSIIPWWAWMKRYHLPEAELLNGRAAMVGFFMAYFVDSLTGVGLVDQMGNFFCKTLLFVAVAGVLFIRKNEDLDKLKGLIEETTLYDKQWQAAWKEPESSSSSTVSSKK

SEQ ID NO: 1680 - DNA, 1608 bp, Zea mays subsp. mays
  misc_feature (1)..(1608): Ceres Seq. ID no. 15177892
atatcaatagttcagttcgtctttctaaaacaggagaagaaagtgtttggcgatgaaaaagcacgcactttggctactatgcgttctggtgttaccggcgatagcctggggcaggaatcctgagaagaaggcaacgacttcgtccgggaggaaggaagatgacctggtaaccggtttgcctggccaaccaccggttaacttcagacattacgccggctacgtcaatctcgggccacgacagaagcaaaaggcgcttttctactggttcttcgaagcccaacgaaactcctcaggtcgtcctcttgtcctctggctcaacggaggacctggttgttcatcgatagcctatggagctgcacaagagctaggccctttccttgttcgcgccggcggtgacaaccttaccttcaataagttctcttggaacaaagaggccaatatgttgttcttggaagcaccggttggggttgggttctcgtataccaataactcaatggatcttcataagcttggagatcaagttagtgcagaggattctcttgctttcttgatcaactggttcatgaaatttcctgagtaccgatccaacgagttttacatcgccggagagagttacgccggtcactatgttccacaacttgcgaatgccatttacgacaggaacaagaaggttacaagaggctcgcacatcaatcttaagggtttcatgattggtaacgcggtgatcaatgaggaaacagacatggcaggactagtggactacgcatggagccacgctatagtatctgacgagatccacagcaacatccatggcatgtgccgttttgaggaagagcaaaagagcaaccagaccgtagaatgtaacgacaatttcaaagctttcatggaagcttacagcgatatcgatatatacagcatctatacgcccgtttgcctctcctcttcgtcttcttctccaagaaaacctaaactcatcgtgtctcctcgtctcctaacttcacacgacttgtgggatagcttaccggccgggtatgatccatgcactgaaggttatgccgaaaactattttaaccggaaagatgtgcagcttgcacttcatgcgaacgttacaaaccttccttatccgtattctccttgcagtggggtaataaaaagatggaatgatgctcctcccaccgtgattcccatcatccagaagcttttggcaggcggcctccgcatctggatctatagtggagatacggatgggagagttccagtaacatctacacgttatagcataaagaagatgagacctaaggtggtgtcaccgtggaggtcatggttccacaagagtcaagtagctggatgggttgaaacttacgccggaggattaacctttgccaccgtgagaggagccggtcatcaggttccggtctttgctccagcccaatctctttccttattctctcacttcctttcttccacccctttgccttcaaagcgtttctgatcattaccgccaccaaatcatgccaagttgttgttatgttttgaaactgtcgtttggtacacttatgtacccaattgatataatgagtttcaaatgattaataaaatattttaaac

SEQ ID NO: 1681 - protein, 479 aa, Zea mays subsp. mays
  misc_feature (1)..(479): Ceres Seq. ID no. 15177893
MKKHALWLLCVLVLPAIAWGRNPEKKATTSSGRKEDDLVTGLPGQPPVNFRHYAGYVNLGPRQKQKALFYWFFEAQRNSSGRPLVLWLNGGPGCSSIAYGAAQELGPFLVRAGGDNLTFNKFSWNKEANMLFLEAPVGVGFSYTNNSMDLHKLGDQVSAEDSLAFLINWFMKFPEYRSNEFYIAGESYAGHYVPQLANAIYDRNKKVTRGSHINLKGFMIGNAVINEETDMAGLVDYAWSHAIVSDEIHSNIHGMCRFEEEQKSNQTVECNDNFKAFMEAYSDIDIYSIYTPVCLSSSSSSPRKPKLIVSPRLLTSHDLWDSLPAGYDPCTEGYAENYFNRKDVQLALHANVTNLPYPYSPCSGVIKRWNDAPPTVIPIIQKLLAGGLRIWIYSGDTDGRVPVTSTRYSIKKMRPKVVSPWRSWFHKSQVAGWVETYAGGLTFATVRGAGHQVPVFAPAQSLSLFSHFLSSTPLPSKRF

SEQ ID NO: 1682 - protein, 350 aa, Zea mays subsp. mays
  misc_feature (1)..(350): Ceres Seq. ID no. 15177894
MLFLEAPVGVGFSYTNNSMDLHKLGDQVSAEDSLAFLINWFMKFPEYRSNEFYIAGESYAGHYVPQLANAIYDRNKKVTRGSHINLKGFMIGNAVINEETDMAGLVDYAWSHAIVSDEIHSNIHGMCRFEEEQKSNQTVECNDNFKAFMEAYSDIDIYSIYTPVCLSSSSSSPRKPKLIVSPRLLTSHDLWDSLPAGYDPCTEGYAENYFNRKDVQLALHANVTNLPYPYSPCSGVIKRWNDAPPTVIPIIQKLLAGGLRIWIYSGDTDGRVPVTSTRYSIKKMRPKVVSPWRSWFHKSQVAGWVETYAGGLTFATVRGAGHQVPVFAPAQSLSLFSHFLSSTPLPSKRF

SEQ ID NO: 1683 - protein, 332 aa, Zea mays subsp. mays
  misc_feature (1)..(332): Ceres Seq. ID no. 15177895
MDLHKLGDQVSAEDSLAFLINWFMKFPEYRSNEFYIAGESYAGHYVPQLANAIYDRNKKVTRGSHINLKGFMIGNAVINEETDMAGLVDYAWSHAIVSDEIHSNIHGMCRFEEEQKSNQTVECNDNFKAFMEAYSDIDIYSIYTPVCLSSSSSSPRKPKLIVSPRLLTSHDLWDSLPAGYDPCTEGYAENYFNRKDVQLALHANVTNLPYPYSPCSGVIKRWNDAPPTVIPIIQKLLAGGLRIWIYSGDTDGRVPVTSTRYSIKKMRPKVVSPWRSWFHKSQVAGWVETYAGGLTFATVRGAGHQVPVFAPAQSLSLFSHFLSSTPLPSKRF

SEQ ID NO: 1684 - DNA, 881 bp, Zea mays subsp. mays
  misc_feature (1)..(881): Ceres Seq. ID no. 15178112
acaccttgtttgactcaacaacgactcgtctaaccctttagcagcagccatgacaactcctccttgccggaccataaacgctaataatgctatcgccgcgccatcgccttcgggaatgatcttccacggtaagaggctcgtgaaatcaagctcacctggcttgaatctcccgacgaagagattggcttggagcttaagttctccggggaggtttctctcttctccagtggcctctagttctacatcggcggctgtgacatcgaattctacgaatcgactggaagctttagaagaagggattgagaaggtcatttatcaatgtagattcatggcgtttcttggaactttaggatctcttttgggatcggttctgtgtttcatcaagggatgtcagtacgtcggagactcgtttgtgcagtactctgtgaaccgtgggaaggtgatattacttctggtagaagccatagatacataccttctaggaactgtgatgttagtcttcgggatgggcctttacgagctcttcattagcaacctcacaacttcggaaaccatttcacacgacagtgtttccaatagatcgagtctctttggcatgttccccttaaaggagcgacctcaatggttagaggtgaaaacagttagtgagctgaaaacgaagctgggacatgttatagtgatgctactgttgattggtttgttcgacaagagcaggaaagttgccatcacttctgtcgcggatttgctatgtatctctgcttctatctttctttcttcggcttgtctcttcttgctctctaggctcaatggctcacactgagttaatcctgttgccttttttaaacacatgacactttgtattatgtgtataatgttttagt

SEQ ID NO: 1685 - protein, 256 aa, Zea mays subsp. mays
  misc_feature (1)..(256): Ceres Seq. ID no. 15178113
MTTPPCRTINANNAIAAPSPSGMIFHGKRLVKSSSPGLNLPTKRLAWSLSSPGRFLSSPVASSSTSAAVTSNSTNRLEALEEGIEKVIYQCRFMAFLGTLGSLLGSVLCFIKGCQYVGDSFVQYSVNRGKVILLLVEAIDTYLLGTVMLVFGMGLYELFISNLTTSETISHDSVSNRSSLFGMFPLKERPQWLEVKTVSELKTKLGHVIVMLLLIGLFDKSRKVAITSVADLLCISASIFLSSACLFLLSRLNGSH

SEQ ID NO: 1686 - protein, 234 aa, Zea mays subsp. mays
  misc_feature (1)..(234): Ceres Seq. ID no. 15178114
MIFHGKRLVKSSSPGLNLPTKRLAWSLSSPGRFLSSPVASSSTSAAVTSNSTNRLEALEEGIEKVIYQCRFMAFLGTLGSLLGSVLCFIKGCQYVGDSFVQYSVNRGKVILLLVEAIDTYLLGTVMLVFGMGLYELFISNLTTSETISHDSVSNRSSLFGMFPLKERPQWLEVKTVSELKTKLGHVIVMLLLIGLFDKSRKVAITSVADLLCISASIFLSSACLFLLSRLNGSH

SEQ ID NO: 1687 - protein, 163 aa, Zea mays subsp. mays
  misc_feature (1)..(163): Ceres Seq. ID no. 15178115
MAFLGTLGSLLGSVLCFIKGCQYVGDSFVQYSVNRGKVILLLVEAIDTYLLGTVMLVFGMGLYELFISNLTTSETISHDSVSNRSSLFGMFPLKERPQWLEVKTVSELKTKLGHVIVMLLLIGLFDKSRKVAITSVADLLCISASIFLSSACLFLLSRLNGSH

SEQ ID NO: 1688 - DNA, 1105 bp, Zea mays subsp. mays
  misc_feature (1)..(1105): Ceres Seq. ID no. 15178283
aaaccatgcaaaacccacgagcatcagatgactccagttcttccgacgtcgaagctgagatcagcgacggccttcctccgcttgacagatctcacagagccgtcgaagatgaagcttcgttggtgatgagagcagagatgtatcaatgttacatgaaggagcttcctcttccgacaaaccgcggttcggttattcccttcacaagttgggtcggtttaggcttctcaatcaaacagctttatggtcaacctttgcactacctcacgaacgtgctgttacaacgttgggatcaagctagattcgggtctgattctgagtaccagagtttggatttcatcatccatccttgtaaagctgaagctaccgtctggctcgttgaggaaatccatcgtctcacttcttctcatcttcagatcgctcagctttggggatctgatccgatgtatcactcgttggttgatcccatcgttcctgagctaccacgatcatgaaacaagttcttcaaccccttttcaagaatcttactttctaagattttaagtttagataatgaaatgtgaatgctcttttatcctttttactatttgtgcttctgtaattaccataagtcattccaagaatcatcttttcaaggattgaagtttctgtaataatctctttgaacacttacctttgagtaatgaaatgaaaccggttgttgttaaaaaaaaaaaaaaaaaagcttttttttttttttttttggataagagaaacgtcttttattcaatcccacttgcagagttttgacacgacttatgatgttcaacttaagagagaaagattcgaagaacacacacaacaaatgaggcaaggcaaagcaacccaagatcgaaagattcgccgcaagaaaacagctaaacattattcgcaagaaaataaatacaagaggataaaagtgtgcttcatcaggctgatattggagagtatttgagagatgaagacgagctttgaaaaaaggctttgtctttaggaaatcttggctttgactgttgttttaagttttgtttgaggtttatgatatgtaacctggtgttggatctatggaaagtctcgatttttatttatc

SEQ ID NO: 1689 - protein, 162 aa, Zea mays subsp. mays
  misc_feature (1)..(162): Ceres Seq. ID no. 15178284
TMQNPRASDDSSSSDVEAEISDGLPPLDRSHRAVEDEASLVMRAEMYQCYMKELPLPTNRGSVIPFTSWVGLGFSIKQLYGQPLHYLTNVLLQRWDQARFGSDSEYQSLDFIIHPCKAEATVWLVEEIHRLTSSHLQIAQLWGSDPMYHSLVDPIVPELPRS

SEQ ID NO: 1690 - protein, 161 aa, Zea mays subsp. mays
  misc_feature (1)..(161): Ceres Seq. ID no. 15178285
MQNPRASDDSSSSDVEAEISDGLPPLDRSHRAVEDEASLVMRAEMYQCYMKELPLPTNRGSVIPFTSWVGLGFSIKQLYGQPLHYLTNVLLQRWDQARFGSDSEYQSLDFIIHPCKAEATVWLVEEIHRLTSSHLQIAQLWGSDPMYHSLVDPIVPELPRS

SEQ ID NO: 1691 - protein, 121 aa, Zea mays subsp. mays
  misc_feature (1)..(121): Ceres Seq. ID no. 15178286
MRAEMYQCYMKELPLPTNRGSVIPFTSWVGLGFSIKQLYGQPLHYLTNVLLQRWDQARFGSDSEYQSLDFIIHPCKAEATVWLVEEIHRLTSSHLQIAQLWGSDPMYHSLVDPIVPELPRS

SEQ ID NO: 1692 - DNA, 898 bp, Zea mays subsp. mays
  misc_feature (1)..(898): Ceres Seq. ID no. 15178302
ctagattcttctgtaaccttcgtgtatttcctttttgccagcttcctcgtgaacacggtaaaacctttcacaaacatatataaatctctaagcctttcttcgtctgtttgcatctaaattttttcaacttccttctctttcgtcttcttctcagttaaagatccttcgtttcactcttacgatctttgtttacgtgatgtcttcggaggcggaggagtttgcagagttttcggctttgttcgagaggatgatccgacgaggcgaaggtctctctcgattcttacctctgatcttagctctagccggtgaagccgacgaggacggtgaatcaaccgatcagacggcgacacatagagagatcgtcatcgatccggtgaacaggagagtggtgatgatcagatcagctttgggggagttcttgaacggcgacttttcagagaaacaagggaggtcgccggcgtcgaaattgtcggtggagagcttgccacgtgtcgtgatcgggaaagatgaggagagaagaggctcgtgtccgatctgtctcgaggagtggtcggaaggtgacgtggcggcggagatgccgtgtaagcacaggttccactcgaagtgcgtggaggagtggctggggagacacgccacgtgtccgctgtgtaggtacgagatgcctgttgaagaagtggaggaagagaagaaagtaggggtttggattgggttctctgttggtaacggcgaaaggagaaacggagaagaagacggaggaggaagaagcgagggtggctcgaacactcgagatgaaacagaggcttaggtttcagttttagaaagaaacttgtgtatattcttttcgttttttttctttccattgtctttccaatttcaataaaagattggttgatgaact

SEQ ID NO: 1693 - protein, 202 aa, Zea mays subsp. mays
  misc_feature (1)..(202): Ceres Seq. ID no. 15178303
MSSEAEEFAEFSALFERMIRRGEGLSRFLPLILALAGEADEDGESTDQTATHREIVIDPVNRRVVMIRSALGEFLNGDFSEKQGRSPASKLSVESLPRVVIGKDEERRGSCPICLEEWSEGDVAAEMPCKHRFHSKCVEEWLGRHATCPLCRYEMPVEEVEEEKKVGVWIGFSVGNGERRNGEEDGGGRSEGGSNTRDETEA

SEQ ID NO: 1694 - protein, 185 aa, Zea mays subsp. mays
  misc_feature (1)..(185): Ceres Seq. ID no. 15178304
MIRRGEGLSRFLPLILALAGEADEDGESTDQTATHREIVIDPVNRRVVMIRSALGEFLNGDFSEKQGRSPASKLSVESLPRVVIGKDEERRGSCPICLEEWSEGDVAAEMPCKHRFHSKCVEEWLGRHATCPLCRYEMPVEEVEEEKKVGVWIGFSVGNGERRNGEEDGGGRSEGGSNTRDETEA

SEQ ID NO: 1695 - protein, 137 aa, Zea mays subsp. mays
  misc_feature (1)..(137): Ceres Seq. ID no. 15178305
MIRSALGEFLNGDFSEKQGRSPASKLSVESLPRVVIGKDEERRGSCPICLEEWSEGDVAAEMPCKHRFHSKCVEEWLGRHATCPLCRYEMPVEEVEEEKKVGVWIGFSVGNGERRNGEEDGGGRSEGGSNTRDETEA

SEQ ID NO: 1696 - DNA, 856 bp, Zea mays subsp. mays
  misc_feature (1)..(856): Ceres Seq. ID no. 15178359
acgacctaaaaaaatcagagattcgagttttcgtactcttctctctctcttaatacgattctgattctatttttctcaccaaccattgaaaattctccatagacctcttctctttttgctatccaattttatctgccatgggacacggaacaatggcgacaccaccgacaaccaccatcaccgccaagacgacgctcgtgttcacgtacggtactctaaagagaggattctcgaaccacgtcctgatgcaagatctgatccgatcaggcgacgcatctttaaaaggagtctaccaaacgctagagaaatatcccctcgtctgcggaccataccgagtccctttcctcctcaacaagcctggaacgggccatcgcgtgacgggagagctttacgtggtttctcctcgcggtctctcgcgtctggacgagcttgaagggatcgctaggggacattacgtgaggcaaccgatccgtctagctgctgctgagaaagaaggaggagatctggaagcagagcatgcgacgtcgtcgtgcgtggtggaagcgtattacgcgcacaagagctacgaggaggagctgtggaagaggaatggagggagatcgttcggcgcgtacacggagaacgaagcgcgtggatatgtgaagcgtaaggatcggccgcagcatcttaccttcttggaccatatccgtattttcgtttcttctccatgtgactgatttcgattattccctctctcattttttatcttattcaagggaaattaaataagaaagtacaaacgcaaacaactagtttcatctattctaaggggtcccacttgttcgtcgtacccgtacaacggttgttgttagttgtt

SEQ ID NO: 1697 - protein, 192 aa, Zea mays subsp. mays
  misc_feature (1)..(192): Ceres Seq. ID no. 15178360
MGHGTMATPPTTTITAKTTLVFTYGTLKRGFSNHVLMQDLIRSGDASLKGVYQTLEKYPLVCGPYRVPFLLNKPGTGHRVTGELYVVSPRGLSRLDELEGIARGHYVRQPIRLAAAEKEGGDLEAEHATSSCVVEAYYAHKSYEEELWKRNGGRSFGAYTENEARGYVKRKDRPQHLTFLDHIRIFVSSPCD

SEQ ID NO: 1698 - protein, 187 aa, Zea mays subsp. mays
  misc_feature (1)..(187): Ceres Seq. ID no. 15178361
MATPPTTTITAKTTLVFTYGTLKRGFSNHVLMQDLIRSGDASLKGVYQTLEKYPLVCGPYRVPFLLNKPGTGHRVTGELYVVSPRGLSRLDELEGIARGHYVRQPIRLAAAEKEGGDLEAEHATSSCVVEAYYAHKSYEEELWKRNGGRSFGAYTENEARGYVKRKDRPQHLTFLDHIRIFVSSPCD

SEQ ID NO: 1699 - protein, 156 aa, Zea mays subsp. mays
  misc_feature (1)..(156): Ceres Seq. ID no. 15178362
MQDLIRSGDASLKGVYQTLEKYPLVCGPYRVPFLLNKPGTGHRVTGELYVVSPRGLSRLDELEGIARGHYVRQPIRLAAAEKEGGDLEAEHATSSCVVEAYYAHKSYEEELWKRNGGRSFGAYTENEARGYVKRKDRPQHLTFLDHIRIFVSSPCD

SEQ ID NO: 1700 - DNA, 494 bp, Zea mays subsp. mays
  misc_feature (1)..(494): Ceres Seq. ID no. 15178579
ttgtatttgctgaggtgcttgaaggagtgaatctgtccttgctctcacgagtaatgtcatcgaggctttcccgagggacctacaatggtggactcctttcgacagaggccgggacgttggcccgtgtagttgcagatgccacgattactgcagccggttatctcggcacggacctccttctgaatgtcactcttctcccatcccttgtgatttgcatagtttccatcgcagcaacactctacacttacaacaatctctattgaagctattgttgctgtacaagtgtacaaagctaaaatgattcctgcccacaacgggtttgtatatttgttcaagcatggtttgtaaacatttggatcaagtttgtatgcaaaatttcttgtatttagtgcatttatgtaaatattcatcctgtaaagaactataaactatgagccactattgctggtttatgtattagcccatttatgatcaataaaaaaaaaaaaaaaaaa

SEQ ID NO: 1701 - protein, 86 aa, Zea mays subsp. mays
  misc_feature (1)..(86): Ceres Seq. ID no. 15178580
VFAEVLEGVNLSLLSRVMSSRLSRGTYNGGLLSTEAGTLARVVADATITAAGYLGTDLLLNVTLLPSLVICIVSIAATLYTYNNLY

SEQ ID NO: 1702 - protein, 69 aa, Zea mays subsp. mays
  misc_feature (1)..(69): Ceres Seq. ID no. 15178581
MSSRLSRGTYNGGLLSTEAGTLARVVADATITAAGYLGTDLLLNVTLLPSLVICIVSIAATLYTYNNLY

SEQ ID NO: 1703 - DNA, 630 bp, Zea mays subsp. mays
  misc_feature (1)..(630): Ceres Seq. ID no. 15178582
agttttcgctgggcaactgagaaggtcgctgtcaagatggagtttccaacccagtaaatccaagggccagaccgtgacctcataaaggtattatcccttgggcacagcctctcaagacctttttcctttttcccaccagtagctggctcctgcttgtctcctctgggttgctgctggccagctttactcccagaaggaacgttgtcataggtatggcagggctcacctggttaggcacttgctgcatcctggaggcatctttattggagggcagtcagcatctggggaaattctatttaacacgaagccgtgtaaaaccatcacagatttctgccaggtgtgggggctcacgcctataattccagcactttgggaggctgaggcgggtggatcacttgaggtcaggagttcgagaccagcctggccggcatggtgaaaccccgtctctgctgaaaatataaaaattagctaggtgtggtggcgcctacctgtggtcccagctactcaggatgctggggcaggagagttgcttgggcctgggaggcagaggttgcagtgagctgagattgcaccactacactccagcctgggcaacaagagcaaaagtccatctcaaaaaaaaaaaaaaaa

SEQ ID NO: 1704 - protein, 48 aa, Zea mays subsp. mays
  misc_feature (1)..(48): Ceres Seq. ID no. 15178583
MAGLTWLGTCCILEASLLEGSQHLGKFYLTRSRVKPSQISARCGGSRL

SEQ ID NO: 1705 - protein, 40 aa, Zea mays subsp. mays
  misc_feature (1)..(40): Ceres Seq. ID no. 15178584
MLGQESCLGLGGRGCSELRLHHYTPAWATRAKVHLKKKKK

SEQ ID NO: 1706 - DNA, 870 bp, Zea mays subsp. mays
  misc_feature (1)..(870): Ceres Seq. ID no. 15178805
aaaaacaggttaacaacaacacatacacatctctctctctctctcttcttcgttttatatttccattctttttcttcatttccgccatttctgttttattttggttgccgagaaaacgcaggaactcggtgacctaattatagtctcgtcgattgtctttttcagaattttcgacgaattttattgattaataattaattaatggcggaagaacatccatgtcagacgccggaaggccaccgtctctgcgttaacaactgcggtttcttcggaagctcagccaccatgaatctctgctccaactgctacggcgacctctgcctcaagaaccagcagcaagcttccatgaaatcaaccgtcgagtcctccctctccgccgcatctcctccgtcgtcaccggagatccagtcaatctccacgtcgacgatcgcgcccgtcgtccaaatttacgcggcggagatacagatagagaaacaaatccagcagcaacggcctaatcggtgcaccgtgtgcaggaaacgggtcgggttaaccgggttcatgtgccggtgcgggacgactttctgcgggacccacaggtatccggaggttcacggatgcacgttcgatttcaaatcggctgggcgcgaggagatcgcgaaggctaacccgttggttgtagccgcgaagctccagaagatatgatctgagccgttgcttgcgttgttcaccgtgaaacatacttttatgttacggacatgtgtttacgtaattaatggttgagacagttttcattcaccttttaattattttccttttcttccggaagaattttaaagttttataattgtgtggctttgtgcttgtaaaaaaaaagattttcttttgcgg

SEQ ID NO: 1707 - protein, 160 aa, Zea mays subsp. mays
  misc_feature (1)..(160): Ceres Seq. ID no. 15178806
MAEEHPCQTPEGHRLCVNNCGFFGSSATMNLCSNCYGDLCLKNQQQASMKSTVESSLSAASPPSSPEIQSISTSTIAPVVQIYAAEIQIEKQIQQQRPNRCTVCRKRVGLTGFMCRCGTTFCGTHRYPEVHGCTFDFKSAGREEIAKANPLVVAAKLQKI

SEQ ID NO: 1708 - protein, 132 aa, Zea mays subsp. mays
  misc_feature (1)..(132): Ceres Seq. ID no. 15178807
MNLCSNCYGDLCLKNQQQASMKSTVESSLSAASPPSSPEIQSISTSTIAPVVQIYAAEIQIEKQIQQQRPNRCTVCRKRVGLTGFMCRCGTTFCGTHRYPEVHGCTFDFKSAGREEIAKANPLVVAAKLQKI

SEQ ID NO: 1709 - protein, 112 aa, Zea mays subsp. mays
  misc_feature (1)..(112): Ceres Seq. ID no. 15178808
MKSTVESSLSAASPPSSPEIQSISTSTIAPVVQIYAAEIQIEKQIQQQRPNRCTVCRKRVGLTGFMCRCGTTFCGTHRYPEVHGCTFDFKSAGREEIAKANPLVVAAKLQKI

SEQ ID NO: 1710 - DNA, 1159 bp, Zea mays subsp. mays
  misc_feature (1)..(1159): Ceres Seq. ID no. 15178828
gagattatcatattattaaagattgagaatatacaactgtagcattgatctgagcaaactcgtttcttctatcatacactcttttgaccttaaacctcaaagattgctgatgaagccatgtgatggatgtctacgttctccccagtttctacgttttccggctgatgggttctctgcgtttcgcagttactccctgtcgaggagcagattcatggccgcttcctccacggatccgatggttggagaggaggcaaacggtggtgttacaatgcttccggctgttgaagacaagtacggtggcgtgatgacggagatgagtcgtcccatggatccttctgccttctctgcacttctcagatcctctctctctaactggactcttcagggaaagaagggagtgtggatcaaattgccgaggcagcttatcggtcttgctgaaactgctgttaaggagggattctggtttcatcacgcggagaaaaactacttgatgcttgtgtattggattcccaaacaagaccatacccttccttccaatgcatctcaccgtgttggcatagccgcctttgttctaaaccacaagaaagaggtgctagtggttcaagagaagacaggaagatttaaaggccaaggtatctggaagttccccaccggagtagtcaatgagggagaatacatccatgatggctcggtcagagaggtgaaagaggagacaggagtggatacagagtttgtccaagtattggctttcagacagacccacaaagctttctttgaaaagtcagatctgttcttcgtctgcatgatgaagcctctttctctggagatcaatgcacaagagtctgagatagaggcagctcagtggatgccatggggggaatacaacaagcaaccattcgtacagaaccatgagctgttaaggtatatgacagacatttgctctgctaaaaccaacggacactacgaaggcttcactcctctccccgtctctgcacctgatctacaaggcaacttgtacttcaacaaccgcgacctcagttctcgccaataacattcttttcccacaagaagcaaatcaaagttgttttctctgctctatgttaagcattttgacatttgaattatcttaagcgaaaacatttgcattcaatgctattcg

SEQ ID NO: 1711 - protein, 313 aa, Zea mays subsp. mays
  misc_feature (1)..(313): Ceres Seq. ID no. 15178829
MKPCDGCLRSPQFLRFPADGFSAFRSYSLSRSRFMAASSTDPMVGEEANGGVTMLPAVEDKYGGVMTEMSRPMDPSAFSALLRSSLSNWTLQGKKGVWIKLPRQLIGLAETAVKEGFWFHHAEKNYLMLVYWIPKQDHTLPSNASHRVGIAAFVLNHKKEVLVVQEKTGRFKGQGIWKFPTGVVNEGEYIHDGSVREVKEETGVDTEFVQVLAFRQTHKAFFEKSDLFFVCMMKPLSLEINAQESEIEAAQWMPWGEYNKQPFVQNHELLRYMTDICSAKTNGHYEGFTPLPVSAPDLQGNLYFNNRDLSSRQ

SEQ ID NO: 1712 - protein, 279 aa, Zea mays subsp. mays
  misc_feature (1)..(279): Ceres Seq. ID no. 15178830
MAASSTDPMVGEEANGGVTMLPAVEDKYGGVMTEMSRPMDPSAFSALLRSSLSNWTLQGKKGVWIKLPRQLIGLAETAVKEGFWFHHAEKNYLMLVYWIPKQDHTLPSNASHRVGIAAFVLNHKKEVLVVQEKTGRFKGQGIWKFPTGVVNEGEYIHDGSVREVKEETGVDTEFVQVLAFRQTHKAFFEKSDLFFVCMMKPLSLEINAQESEIEAAQWMPWGEYNKQPFVQNHELLRYMTDICSAKTNGHYEGFTPLPVSAPDLQGNLYFNNRDLSSRQ

SEQ ID NO: 1713 - protein, 271 aa, Zea mays subsp. mays
  misc_feature (1)..(271): Ceres Seq. ID no. 15178831
MVGEEANGGVTMLPAVEDKYGGVMTEMSRPMDPSAFSALLRSSLSNWTLQGKKGVWIKLPRQLIGLAETAVKEGFWFHHAEKNYLMLVYWIPKQDHTLPSNASHRVGIAAFVLNHKKEVLVVQEKTGRFKGQGIWKFPTGVVNEGEYIHDGSVREVKEETGVDTEFVQVLAFRQTHKAFFEKSDLFFVCMMKPLSLEINAQESEIEAAQWMPWGEYNKQPFVQNHELLRYMTDICSAKTNGHYEGFTPLPVSAPDLQGNLYFNNRDLSSRQ

SEQ ID NO: 1714 - DNA, 1283 bp, Zea mays subsp. mays
  misc_feature (1)..(1283): Ceres Seq. ID no. 15178832
aaataatgaaaaggggttaatagtctgcgtggatcttcagccgtttcagacacaatacccagaattttcgagctgaaaaattttgttcttctgcgttcccatcgagtttatcctctactctgtgtgcccctttgaatattcatacgacgacgcgtgattttggttttgaatagatagattagaagcaaggattggctatggaggatgcaaacgcgattaggtattggtgtcacatgtgctctcgatccgtgaatccagtcatcgaaggcgacgtaatcaactgcaacttctgccaaagcggattcgtcgaagaaatggacgaaactccagaacaggccaccaatgatcaccctcatcaagcttctgagtctctctgggctcccatcttgctcgggatgatgaacgatcatgatcagcatcagagagcctctgtcgaaaacgaagatgacaacaatgatgacgacgatgatgatggtcagattaacgatggagagttcgatttggaacggcacctggaagagatcatgaggagaaggaggagacactctgccgcgatcctcgatcttctccaagggatccgagccgggttatcggttgaatccgaaaacaaccaggataataacaatcaagataacgagcttgttgtcttgatcaactcctttaaccagaggataaggatccaagactccgtcgacgctagtgccgttccttctggatctttaggcgactattttatcggacctgggttcgagatgttgcttcagcgtttagctgagaatgatcccaacaacaggtacgggacgcctcccgcgacgaaggaagctgttgagtcgttggagacggttatggtggaggaaagtttggtgcagtgtactgtgtgtttggatgattttgagattggggttgaggcgaaagagatgccgtgtaagcataagtttcacagcgagtgtttgttgccgtggcttgagcttcatagctcgtgtcctgtgtgtagatatttgcttcctacgggggatgatgatggggaagctaagactgatggggagacgtcgagtaatgtttctatggagaacaatggaacatcggtggactcgagttcgaacaatccgtcggttaatgattgagggttagagtgtgaggggtcggtttggtgaagggtttgtgattagttggatgttactttggctgcagtacatagttttctcaggttttgttgaaagttggattttcaagttgttttttttgtttgacttttttttttctgattgtttcgagttttgatt

SEQ ID NO: 1715 - protein, 308 aa, Zea mays subsp. mays
  misc_feature (1)..(308): Ceres Seq. ID no. 15178833
MEDANAIRYWCHMCSRSVNPVIEGDVINCNFCQSGFVEEMDETPEQATNDHPHQASESLWAPILLGMMNDHDQHQRASVENEDDNNDDDDDDGQINDGEFDLERHLEEIMRRRRRHSAAILDLLQGIRAGLSVESENNQDNNNQDNELVVLINSFNQRIRIQDSVDASAVPSGSLGDYFIGPGFEMLLQRLAENDPNNRYGTPPATKEAVESLETVMVEESLVQCTVCLDDFEIGVEAKEMPCKHKFHSECLLPWLELHSSCPVCRYLLPTGDDDGEAKTDGETSSNVSMENNGTSVDSSSNNPSVND

SEQ ID NO: 1716 - protein, 296 aa, Zea mays subsp. mays
  misc_feature (1)..(296): Ceres Seq. ID no. 15178834
MCSRSVNPVIEGDVINCNFCQSGFVEEMDETPEQATNDHPHQASESLWAPILLGMMNDHDQHQRASVENEDDNNDDDDDDGQINDGEFDLERHLEEIMRRRRRHSAAILDLLQGIRAGLSVESENNQDNNNQDNELVVLINSFNQRIRIQDSVDASAVPSGSLGDYFIGPGFEMLLQRLAENDPNNRYGTPPATKEAVESLETVMVEESLVQCTVCLDDFEIGVEAKEMPCKHKFHSECLLPWLELHSSCPVCRYLLPTGDDDGEAKTDGETSSNVSMENNGTSVDSSSNNPSVND

SEQ ID NO: 1717 - protein, 269 aa, Zea mays subsp. mays
  misc_feature (1)..(269): Ceres Seq. ID no. 15178835
MDETPEQATNDHPHQASESLWAPILLGMMNDHDQHQRASVENEDDNNDDDDDDGQINDGEFDLERHLEEIMRRRRRHSAAILDLLQGIRAGLSVESENNQDNNNQDNELVVLINSFNQRIRIQDSVDASAVPSGSLGDYFIGPGFEMLLQRLAENDPNNRYGTPPATKEAVESLETVMVEESLVQCTVCLDDFEIGVEAKEMPCKHKFHSECLLPWLELHSSCPVCRYLLPTGDDDGEAKTDGETSSNVSMENNGTSVDSSSNNPSVND

SEQ ID NO: 1718 - DNA, 1011 bp, Zea mays subsp. mays
  misc_feature (1)..(1011): Ceres Seq. ID no. 15178847
ataaaaactaaaaattaagaaatagcgtcgaacgttctctctccctctctcaagtaacagagatccaaatagatggagaagggagagtcaacaagcacgtcttactccgacaccaacggctcaaacgaaccagatcacgacttcgaatgcaacatctgcttcgagttagctcaagaccccatcgtcactctctgcggccacctcttctgctggccttgcttgtaccgttggcttcaccaccactctcactcccaagaatgccctgtctgcaaagctctcgtccaagacgacaagctcgtccctctctacggccgcggcaagaaccagaccgaccctaggaccaaacgttaccccgggatgcggattcccaacaggccagctggtcagagacccgagacggcctctcctcctcctcagcagcctcagaacgacgcggcgagtaactttttcaactacgggattggtttgatgggtgggtttatgcccatggcgactaccaggattgggaacttcagctttggggttggtgggttgttgccttctttgtttaactttcagttccatgggtttcctgacgcggcgctctatggcaccgcgccgggttacccttttggtggttaccataacggtttccgtggagttcctggtggtaacaatgaaccgacggcgcctggtggagggcacccaagcgatgcagctctgaagaatatcctcattgtcgttggaatctgcgtgttcttcttccttttattgtgaaaacagtttgggtttttttttttattatccaggtatgatagttgcaaactctcttacttggtttgaacaatgtcttgtatatacgttacggtaatagcctgagtatgtgtctccttttcctacgtttgttttttgctatttgaagaagattacttggatcttctatacacaactctcgttttttaatcttatttgcttttgacgttgtatctgcatcttatgagaactagttggtgtggaaaataactattgcat

SEQ ID NO: 1719 - protein, 227 aa, Zea mays subsp. mays
  misc_feature (1)..(227): Ceres Seq. ID no. 15178848
MEKGESTSTSYSDTNGSNEPDHDFECNICFELAQDPIVTLCGHLFCWPCLYRWLHHHSHSQECPVCKALVQDDKLVPLYGRGKNQTDPRTKRYPGMRIPNRPAGQRPETASPPPQQPQNDAASNFFNYGIGLMGGFMPMATTRIGNFSFGVGGLLPSLFNFQFHGFPDAALYGTAPGYPFGGYHNGFRGVPGGNNEPTAPGGGHPSDAALKNILIVVGICVFFFLLL

SEQ ID NO: 1720 - protein, 132 aa, Zea mays subsp. mays
  misc_feature (1)..(132): Ceres Seq. ID no. 15178849
MRIPNRPAGQRPETASPPPQQPQNDAASNFFNYGIGLMGGFMPMATTRIGNFSFGVGGLLPSLFNFQFHGFPDAALYGTAPGYPFGGYHNGFRGVPGGNNEPTAPGGGHPSDAALKNILIVVGICVFFFLLL

SEQ ID NO: 1721 - DNA, 1079 bp, Zea mays subsp. mays
  misc_feature (1)..(1079): Ceres Seq. ID no. 15178850
attttcttctctctgtaaaataaaaataaacttaaaataaacaaaacagacaaaataaacattttggttttgtttttgggtattaatacttcttttttgtttgctttcctcgtaaaacccatgacccctttcttcctctcttgcttctaatcttcaagaaaaatgccttcttttgcttttggatctcatcaccatttggccaatcccactgactcgccgtacaccgtcgaaattagcatcgacggcgactcctccgacttagattccttgtctgaggtcgacttagagagcggcggtgtgacgaagctgcattccggtggtggtaagaagaggaggacgaggaggagaaagaagaagaagaaaaggaagaagaaagagagtagagattgcaggatctgccatctgcctttagagactactaaaaaagcagatgaggaaggtgaagattctgatgaacaagaagaacaaggtgaagaagaagatgaagcaagagacggtgaagaagaggaagagtattatggtttgcctttgcaattgggttgttcttgtaaaggtgatttgggtgtagctcacagtaagtgtgctgaaacttggttcaagatcaaaggaaacatgacatgtgagatatgcggggcaatggctataaacgtagctggggaacagtcaaacccagagagcaccgcctctacacattcacaagtggctgcaggacaaactcagagtagtcagacagagccaaggggaatctggcatggtcgccgtgtaatgaacttcttacttgccgctatggtctttgccttcattgtctcttggctttttcacttcaaagtcctcaagtgaaacaaactccatccatcccaccctctctctcttctcctggctcttgagccgcttgcaatcacttcatcaaatccctcctgttgcctgattgttcgttcacacgttttgtagctgtaaaaacttgttagtttttagattgttgttgtcacttgtgagctttacatcttcttgtataatatccatctctactcaggcttggtctaaacttgtgtgcaatcaagactagggtcttagctctt

SEQ ID NO: 1722 - protein, 225 aa, Zea mays subsp. mays
  misc_feature (1)..(225): Ceres Seq. ID no. 15178851
MPSFAFGSHHHLANPTDSPYTVEISIDGDSSDLDSLSEVDLESGGVTKLHSGGGKKRRTRRRKKKKKRKKKESRDCRICHLPLETTKKADEEGEDSDEQEEQGEEEDEARDGEEEEEYYGLPLQLGCSCKGDLGVAHSKCAETWFKIKGNMTCEICGAMAINVAGEQSNPESTASTHSQVAAGQTQSSQTEPRGIWHGRRVMNFLLAAMVFAFIVSWLFHFKVLK

SEQ ID NO: 1723 - DNA, 844 bp, Zea mays subsp. mays
  misc_feature (1)..(844): Ceres Seq. ID no. 15178852
aaagtggagagtcacaccagcgtcttcgtcttccatcaaactcctctctctaatcgaattgcgccaaagtagggttttgcaatctcaattgaaatagtttttgatcggaaaaaaagaatggtatctgggttaataaacgagaacccaactgtgtacgagagaaaagagcgtcgtgttcgtaccgattccaccaactccgatgagttctccgtagaacctatcgatcagctcgagatttttgatcatataagagatataagagatccagagcatccttattctcttgaacaactcaaagttctaactgaagactctgttgaagttgatgatctcaagagttatgtcagggttacattcactccaacggtggaacattgtagcatggcaaccattattggtctttctatccgggttaaacttatgcgcaaccttcctcctcgttacaagattgatataagggtagcacccggttctcatgcaacagaggctgcactcaataagcaactaaacgacaaggagcgtgtggcggctgcactagagaatccaaacctcgtggagatggttgatgaatgtctatctccatcatttgaatgatgcttgatgctctcaacgtacactatatcataatatgtctctgctcttgtccgcgaagattttgattcactaggactttgtgttcagtttcgatcctgttaaagactgaggatttattcacagaacaatatattgattttgtctcgttgtttccatcttaaatcacattcctttcactactgaacttgtcacacacttgttctcttacacatgtgctccttttgttgccattaaactaacagtttgtagc

SEQ ID NO: 1724 - protein, 158 aa, Zea mays subsp. mays
  misc_feature (1)..(158): Ceres Seq. ID no. 15178853
MVSGLINENPTVYERKERRVRTDSTNSDEFSVEPIDQLEIFDHIRDIRDPEHPYSLEQLKVLTEDSVEVDDLKSYVRVTFTPTVEHCSMATIIGLSIRVKLMRNLPPRYKIDIRVAPGSHATEAALNKQLNDKERVAAALENPNLVEMVDECLSPSFE

SEQ ID NO: 1725 - DNA, 738 bp, Zea mays subsp. mays
  misc_feature (1)..(738): Ceres Seq. ID no. 15178860
attcttttgtaagaaaaaagatcagaaggaaagaagagaagaaaaatgccgcatggaacgcttgaagttgttcttgtcagtgccaaaggtctggaggattctgattttctgaatagcatggatccttatgtgctcctcacttgccggactcaagatcagaagagcaatgttgcctcaggacaaggcacaactcctgagtggaatgagacatttatcttcaatgtctctgaaggaactacagagttaaaagccaaaatatttgacacagatgttggcacagaggatgatccccttggtgaagcaactattccattggaggcggttttcctggaaggagatatcccaccagctgcatacaatgtcgtgaaggatgaggagttcaaaggcgagatctggatcgcactatccttcaaaccttcggaaaaccgaagcaggggtttcgaagaggagtcttatggaggctggaaaaactctgaagcttcttactaaagaggaagaacagtaaatgtgtgttgctctttaatttattgagtcttgggaataaaatgttgagcttcccctcttggaaaggattttgttaagaccgtttcttcttattaatattattgttctgttcggtttgaaattcaaaactcttgagaatttgattcttttgtcaagaatttgtttcagtcttttttttttctttggtaatcaatttgtttcagtcttgttttggtatttaagaaaatattatac

SEQ ID NO: 1726 - protein, 147 aa, Zea mays subsp. mays
  misc_feature (1)..(147): Ceres Seq. ID no. 15178861
MPHGTLEVVLVSAKGLEDSDFLNSMDPYVLLTCRTQDQKSNVASGQGTTPEWNETFIFNVSEGTTELKAKIFDTDVGTEDDPLGEATIPLEAVFLEGDIPPAAYNVVKDEEFKGEIWIALSFKPSENRSRGFEEESYGGWKNSEASY

SEQ ID NO: 1727 - protein, 123 aa, Zea mays subsp. mays
  misc_feature (1)..(123): Ceres Seq. ID no. 15178862
MDPYVLLTCRTQDQKSNVASGQGTTPEWNETFIFNVSEGTTELKAKIFDTDVGTEDDPLGEATIPLEAVFLEGDIPPAAYNVVKDEEFKGEIWIALSFKPSENRSRGFEEESYGGWKNSEASY

SEQ ID NO: 1728 - DNA, 924 bp, Zea mays subsp. mays
  misc_feature (1)..(924): Ceres Seq. ID no. 15178873
ttgcttctccttccgacacaatggctacgttcctcacacctcttgtttcaatcaaacctacagtcttttcattcccgtcccaatccgtcacctctccacacagacaaaccaatgtactctcactcaaaccgtttccttctcccgcgggagcacagagctccagggtgagattcattccccacgcggtggagactgaagaaaaacccgcttcagaccctaacgcagagtcctcaaggcgtgtctacatcggaaacatacccagaactgtggataacgaacagctctcaaaactcgtcgaagaacacggcgccgctgaaaatgttcaggtgatgtatgataagtattcaggaagaagccgtaggtttggattcgctacaatgaaatcagttgaagatgccaatgctgtgattgacaagttaaatggcactaccattgaagggcgtgaggtgaaggttaacatcacggagaaacctatagcgtcatcatcgtctcctgatttgtcattgcttcagtctgaggattcggcgtttgtagatagtccttataaagtgtatgtagggaatctggcaaagactgttactaaacagatgcttgagaatttgttttctgagaaagggaaagtagtcagtgccaaggtttcaagagtgcctggaacttccaaatcctctgggtttgggtttgtgacattttctacagaagaggatgttgaagctgccattttggctctaaacaactctttgttggaaggacagaagattcgggtgaataaggcatagtgtgagaaagaagaggagtccttgtgccatcacaagaacgtgaaaagaatctctttttgtaatgcaaacatgtagagcttagtatcatcatctttgtatctttgtatcctttctaagatgaaaaaatgaaagcatttctttctgatcg

SEQ ID NO: 1729 - protein, 257 aa, Zea mays subsp. mays
  misc_feature (1)..(257): Ceres Seq. ID no. 15178874
ASPSDTMATFLTPLVSIKPTVFSFPSQSVTSPHRQTNVLSLKPFPSPAGAQSSRVRFIPHAVETEEKPASDPNAESSRRVYIGNIPRTVDNEQLSKLVEEHGAAENVQVMYDKYSGRSRRFGFATMKSVEDANAVIDKLNGTTIEGREVKVNITEKPIASSSSPDLSLLQSEDSAFVDSPYKVYVGNLAKTVTKQMLENLFSEKGKVVSAKVSRVPGTSKSSGFGFVTFSTEEDVEAAILALNNSLLEGQKIRVNKA

SEQ ID NO: 1730 - protein, 251 aa, Zea mays subsp. mays
  misc_feature (1)..(251): Ceres Seq. ID no. 15178875
MATFLTPLVSIKPTVFSFPSQSVTSPHRQTNVLSLKPFPSPAGAQSSRVRFIPHAVETEEKPASDPNAESSRRVYIGNIPRTVDNEQLSKLVEEHGAAENVQVMYDKYSGRSRRFGFATMKSVEDANAVIDKLNGTTIEGREVKVNITEKPIASSSSPDLSLLQSEDSAFVDSPYKVYVGNLAKTVTKQMLENLFSEKGKVVSAKVSRVPGTSKSSGFGFVTFSTEEDVEAAILALNNSLLEGQKIRVNKA

SEQ ID NO: 1731 - protein, 148 aa, Zea mays subsp. mays
  misc_feature (1)..(148): Ceres Seq. ID no. 15178876
MYDKYSGRSRRFGFATMKSVEDANAVIDKLNGTTIEGREVKVNITEKPIASSSSPDLSLLQSEDSAFVDSPYKVYVGNLAKTVTKQMLENLFSEKGKVVSAKVSRVPGTSKSSGFGFVTFSTEEDVEAAILALNNSLLEGQKIRVNKA

SEQ ID NO: 1732 - DNA, 826 bp, Zea mays subsp. mays
  misc_feature (1)..(826): Ceres Seq. ID no. 15178880
agcttcttctgccacattgccaaatcctcaaatcttctctcgagagagctaaaccaaaaagaaaatggcagcttcctcttctccatctctccttctaccactaggttcagcatctaggaatggtccaaccatgaagactccaagatgcatatctacaagagccatcacagcttcagaaacaagaaacaaaagctgtagccgtagagacgcaatgctattggttctcggcgtgtcaggactctcaatgagctacttgcctgcggcatatgcagctggtttgcctccagaggataaaccgaggctttgtgaagctgaatgcgagaaagagcttgaaaatgttccaatggtaactacagagtcagggcttcagtataaagatatcaaagttggtaaaggccctagtccccctgttggttatcaggttgctgctaactatgtagctatggttccttcagggcagatttttgacagttctttggagaaaggtctaccgtatctgttccgagttgggtctggccaggtgatcaagggacttgatgaaggactcttgactatgaaagctggtggcaaacgcagactttacattccagggcctttggcgtttccaaagggtctagtctcagctccagggaggccaagagttgcaccgaacagtcctgttgtatttgatgtgagcttagagtacattccagggcttgagtcagatgaagagtgaaactcttttttaaagttcagattataatatgaattacatatacatataacagacttttctgtgatggtgtctcatttatattttcatttcgttgtaaaaacaacctcaact

SEQ ID NO: 1733 - protein, 216 aa, Zea mays subsp. mays
  misc_feature (1)..(216): Ceres Seq. ID no. 15178881
MAASSSPSLLLPLGSASRNGPTMKTPRCISTRAITASETRNKSCSRRDAMLLVLGVSGLSMSYLPAAYAAGLPPEDKPRLCEAECEKELENVPMVTTESGLQYKDIKVGKGPSPPVGYQVAANYVAMVPSGQIFDSSLEKGLPYLFRVGSGQVIKGLDEGLLTMKAGGKRRLYIPGPLAFPKGLVSAPGRPRVAPNSPVVFDVSLEYIPGLESDEE

SEQ ID NO: 1734 - protein, 194 aa, Zea mays subsp. mays
  misc_feature (1)..(194): Ceres Seq. ID no. 15178882
MKTPRCISTRAITASETRNKSCSRRDAMLLVLGVSGLSMSYLPAAYAAGLPPEDKPRLCEAECEKELENVPMVTTESGLQYKDIKVGKGPSPPVGYQVAANYVAMVPSGQIFDSSLEKGLPYLFRVGSGQVIKGLDEGLLTMKAGGKRRLYIPGPLAFPKGLVSAPGRPRVAPNSPVVFDVSLEYIPGLESDEE

SEQ ID NO: 1735 - protein, 167 aa, Zea mays subsp. mays
  misc_feature (1)..(167): Ceres Seq. ID no. 15178883
MLLVLGVSGLSMSYLPAAYAAGLPPEDKPRLCEAECEKELENVPMVTTESGLQYKDIKVGKGPSPPVGYQVAANYVAMVPSGQIFDSSLEKGLPYLFRVGSGQVIKGLDEGLLTMKAGGKRRLYIPGPLAFPKGLVSAPGRPRVAPNSPVVFDVSLEYIPGLESDEE

SEQ ID NO: 1736 - DNA, 1241 bp, Zea mays subsp. mays
  misc_feature (1)..(1241): Ceres Seq. ID no. 15178884
atcacaaagctaaatacgaaagaaacatggggttcttgggtaagagtatattgtcgagtctccttgcaatatggttcttcacttcctgtgctttcactgaagaagtgaaccatgttaaccaaacgccttcctctgctcctgctccatctccttaccaccacggccaccaccacccacatcctccccatcaccaccaccctcaccctcacccaccggcaaaagcccctgtcaagccgccggtttctccaccttctaaacctccggttaagcctccagtttaccccccaaccaaatccccggttaagcccccaactaaacctccggttaagccaccagtttccccaccagcaaaacctcctgttaaacctccggtttaccctccgaccaaagctccagttaagcccccagtcaaacctccggttaagccaccagtttcaccaccggccaaacctccaataaagccaccagtttcaccaccggccaaacctccggttaagcccccggtttaccctccgaccaaagcccctgttaagcccccgaccaaagccccggctaagcctccggtctctcctccagccaaaccaccagtatcccctccagctaagccaccggtgaagccaccggtttacccgccaaaattcaacagaagcctaatcgcggttcagggtacggtcttctgcaaaagctgccagtacgcttctttcgattcactcattggcgccaaacccgttgaaggtgctcttgtgagactactgtgtaagagcaagaagaacatagtcgcggagaccaagacggacaagaacggatacttcttgttgttgggcccgaagacggtgacaaactacggtttcagaggatgtcgtgtgtatcttgtgaaatcaaaggactacaaatgcaataaagtgtcaaagctattcggtggagatgtcggtgccgtactcaagccggagaaaaggaaggggaaatctgcggtggtcattaatcagctcatctacggtatctttaacgttggaccgtttgcgttcgacccggtctgccccaaataaagatgatgatgatgctttgttactttcttgattatatcatgctcaaaagagttcgagggagacagagagttatgtctttatgcgttcgaattgtaatgttagctatagttttaagctaaatgcttgtgtttttatgaatgtgtccttaagagacgtcgtttgggtttcgtttgaataaaaatcgtcagctttaag

SEQ ID NO: 1737 - protein, 347 aa, Zea mays subsp. mays
  misc_feature (1)..(347): Ceres Seq. ID no. 15178885
HKAKYERNMGFLGKSILSSLLAIWFFTSCAFTEEVNHVNQTPSSAPAPSPYHHGHHHPHPPHHHHPHPHPPAKAPVKPPVSPPSKPPVKPPVYPPTKSPVKPPTKPPVKPPVSPPAKPPVKPPVYPPTKAPVKPPVKPPVKPPVSPPAKPPIKPPVSPPAKPPVKPPVYPPTKAPVKPPTKAPAKPPVSPPAKPPVSPPAKPPVKPPVYPPKFNRSLIAVQGTVFCKSCQYASFDSLIGAKPVEGALVRLLCKSKKNIVAETKTDKNGYFLLLGPKTVTNYGFRGCRVYLVKSKDYKCNKVSKLFGGDVGAVLKPEKRKGKSAVVINQLIYGIFNVGPFAFDPVCPK

SEQ ID NO: 1738 - protein, 339 aa, Zea mays subsp. mays
  misc_feature (1)..(339): Ceres Seq. ID no. 15178886
MGFLGKSILSSLLAIWFFTSCAFTEEVNHVNQTPSSAPAPSPYHHGHHHPHPPHHHHPHPHPPAKAPVKPPVSPPSKPPVKPPVYPPTKSPVKPPTKPPVKPPVSPPAKPPVKPPVYPPTKAPVKPPVKPPVKPPVSPPAKPPIKPPVSPPAKPPVKPPVYPPTKAPVKPPTKAPAKPPVSPPAKPPVSPPAKPPVKPPVYPPKFNRSLIAVQGTVFCKSCQYASFDSLIGAKPVEGALVRLLCKSKKNIVAETKTDKNGYFLLLGPKTVTNYGFRGCRVYLVKSKDYKCNKVSKLFGGDVGAVLKPEKRKGKSAVVINQLIYGIFNVGPFAFDPVCPK

SEQ ID NO: 1739 - DNA, 924 bp, Zea mays subsp. mays
  misc_feature (1)..(924): Ceres Seq. ID no. 15178887
gcgttatccaaacacacacttctcagtcctttcttggcgatagaaatggcttctcaatcttttactttggcgaatctaaggatctcccaaatcgattccttctacagtcagaaaccatcttctccaatacacttcttctccactagaaatccagtaaaatccctgaacctgacgaatccatggatggccggtgattcttctctctctctcgattcttccgcctccgtcttgcgaactaactcgacaacgcgcagaaagatcccaatcgccgtcgttgccagcttacccaccgcgaatccagaatctgcggtttctgatgcgaaaaagccaaaatggtcgtggagaggaatcaaatcatttgcaatgggagagctcgaagctaggaagctcaagtatcccaacaccggtactgaatcacttctcatgggtatcttgattgaaggaactagttttacttccaagtttttgagggcgcataagataacgctttacaaagttcgtgaagaaacaatcaagttactagggaaagcagatttgtattccttcagccctgaacatcctcctttaacccacgatgctcaaagagctcttgactctgctgtcaatcagaatctcaaagcaggtggtgctggggaaataatgccagcccatatattgctgggagtctggtctgaagttgaatctccaggtcataagatactggcaactcttggtttcactgatgaaaaagctaaagagttagagtcctttgcctctgaatctggatttctagatgaatagtgtcttgttacatttatcatcctccatttatgccatcttaattttcatactaaagcctccaaatttgtggttgcagtctgcaatgatgttcttatcggttcatcatactgattcttaattttcacttctttgcttttgcctaac

SEQ ID NO: 1740 - protein, 259 aa, Zea mays subsp. mays
  misc_feature (1)..(259): Ceres Seq. ID no. 15178888
ALSKHTLLSPFLAIEMASQSFTLANLRISQIDSFYSQKPSSPIHFFSTRNPVKSLNLTNPWMAGDSSLSLDSSASVLRTNSTTRRKIPIAVVASLPTANPESAVSDAKKPKWSWRGIKSFAMGELEARKLKYPNTGTESLLMGILIEGTSFTSKFLRAHKITLYKVREETIKLLGKADLYSFSPEHPPLTHDAQRALDSAVNQNLKAGGAGEIMPAHILLGVWSEVESPGHKILATLGFTDEKAKELESFASESGFLDE

SEQ ID NO: 1741 - protein, 244 aa, Zea mays subsp. mays
  misc_feature (1)..(244): Ceres Seq. ID no. 15178889
MASQSFTLANLRISQIDSFYSQKPSSPIHFFSTRNPVKSLNLTNPWMAGDSSLSLDSSASVLRTNSTTRRKIPIAVVASLPTANPESAVSDAKKPKWSWRGIKSFAMGELEARKLKYPNTGTESLLMGILIEGTSFTSKFLRAHKITLYKVREETIKLLGKADLYSFSPEHPPLTHDAQRALDSAVNQNLKAGGAGEIMPAHILLGVWSEVESPGHKILATLGFTDEKAKELESFASESGFLDE

SEQ ID NO: 1742 - protein, 198 aa, Zea mays subsp. mays
  misc_feature (1)..(198): Ceres Seq. ID no. 15178890
MAGDSSLSLDSSASVLRTNSTTRRKIPIAVVASLPTANPESAVSDAKKPKWSWRGIKSFAMGELEARKLKYPNTGTESLLMGILIEGTSFTSKFLRAHKITLYKVREETIKLLGKADLYSFSPEHPPLTHDAQRALDSAVNQNLKAGGAGEIMPAHILLGVWSEVESPGHKILATLGFTDEKAKELESFASESGFLDE

SEQ ID NO: 1743 - DNA, 705 bp, Zea mays subsp. mays
  misc_feature (1)..(705): Ceres Seq. ID no. 15178899
gcaagcgatttcgagaagaagctaaaaaaaatggcgtcaacacgtctcttcgttctctactgcttcttcttcgtcttctcaatcatcttctccgtttccgaatctaaagccttgcagcctcacgccgccgagtctttcaacgtcagcctcatccagaaactgaggagtagttgctcgtacacagtgatcatctcgacgagctgttcgtcgtcgaggtacacgcgcgaccaaatcagcgtggccttcggcgatgcatacggtaaccagatatacgcaccaaggcttgacgatccatccacaaagactttcgagcaatgttcatccgacacgttcgagataaacggaccatgcacttaccagatctgctacgtctatctctacaggtctggtcccgatggctggatccccgagagtgttaagataaacacacatggctccaaagccgtcaccttcccttataacaccctcgtccccgagagtatatggtacggtttcaattactgcaacagcgcctcgggttctagtgtcctatccattggtcttgtccttctggggtttgttgtcgccggttcaacattgcttttgtaaaatggttggtttgtgtgaacatattaggacttaatgctgaataaatgtgtaaaaactgttggggttctagagatgtccctattatctgtgtaatctatgatgaagttactacctgct

SEQ ID NO: 1744 - protein, 195 aa, Zea mays subsp. mays
  misc_feature (1)..(195): Ceres Seq. ID no. 15178900
ASDFEKKLKKMASTRLFVLYCFFFVFSIIFSVSESKALQPHAAESFNVSLIQKLRSSCSYTVIISTSCSSSRYTRDQISVAFGDAYGNQIYAPRLDDPSTKTFEQCSSDTFEINGPCTYQICYVYLYRSGPDGWIPESVKINTHGSKAVTFPYNTLVPESIWYGFNYCNSASGSSVLSIGLVLLGFVVAGSTLLL

SEQ ID NO: 1745 - protein, 185 aa, Zea mays subsp. mays
  misc_feature (1)..(185): Ceres Seq. ID no. 15178901
MASTRLFVLYCFFFVFSIIFSVSESKALQPHAAESFNVSLIQKLRSSCSYTVIISTSCSSSRYTRDQISVAFGDAYGNQIYAPRLDDPSTKTFEQCSSDTFEINGPCTYQICYVYLYRSGPDGWIPESVKINTHGSKAVTFPYNTLVPESIWYGFNYCNSASGSSVLSIGLVLLGFVVAGSTLLL

SEQ ID NO: 1746 - DNA, 1467 bp, Zea mays subsp. mays
  misc_feature (1)..(1467): Ceres Seq. ID no. 15178909
ataaataagaaaaatatttttttccaaacactaataataataaaactagtggattacaaaatatataaacaaaaataaaaattgtaatccctagtaactaaaaaaaaatcatataatgggtgtacattttggaatatctgtattatttgttgtttgtttgctaggtttatcagcaaatgctaaagatttcacaatcactgctcctccaggttctgatatcaccagcttattgttgaaaacattcaatgaggcatgccagttcccaaccaagagcagcgttttgatccctaaaggtgaatacaagcttaggcaaatagagatgatgggtccatgcaaagctcccataaggattactcttcaaggcactgtgaaagctgacggaaacgttaacgggaatgactactgggtcgctttccgcaggattaatgggtttaagttgaacggaggtggtgtctttgacggtgaaggtaacactgcatggagggctaataattgccacaaaatggcattaactcagtgcaagaaactccctatcagcatacggtttgatttcgtgactgacgctaagataagaggcataacctcgatggattcaaagaacttccacattaacgtgctcggggcaaggaacatgacattggaagaaatcacgatcattgcccctgaagagagtcccaacaccgatggaatccacgtgggaaggagtgttggagtccagatcatcaactcaaacatcaaaacaggagatgactgcatctctattggagacgggacgagagaccttcttgtcgaaagagttacatgcggtccgggacatggaatcagtattggaagcctcgatttatacgtgaaggaggaagacgtcactggcatcagggtcgtgaactgcaccctcataaacactgacaatggtgtaaggatcaagacatggccgtctgcagcttgctccaccaccgcctcgggtatccattttgagaatattatcctcaagaacgttaccaaccctatcctcatcgaccaagagtactgcccctggaaccgatgcaacaagaacaaaccatcaacaatcaagctggtggacataagcttcaagcatatcagaggaacatcagggaacaaagacgccgttaagcttttgtgcagcaagggatttccgtgcaagaacgtggagattggtgacattgacattaagtacaccggagccgatggtccagcgacattccaatgctccaacgtatctcccacgttgatgggaactcaggtccctaaagcatgtagcagcccagtgactaagctaccaggccagtaagaaatctcgatgcgataaccaatacacaatctaaaatgtacaacccataatgtatgttatattctttcatttgattttatttgtaaaaaaaaaaagcgtttttgctagctatcttgtataacatgcatcattcttgagaaaaaatataataactttat

SEQ ID NO: 1747 - protein, 397 aa, Zea mays subsp. mays
  misc_feature (1)..(397): Ceres Seq. ID no. 15178910
MGVHFGISVLFVVCLLGLSANAKDFTITAPPGSDITSLLLKTFNEACQFPTKSSVLIPKGEYKLRQIEMMGPCKAPIRITLQGTVKADGNVNGNDYWVAFRRINGFKLNGGGVFDGEGNTAWRANNCHKMALTQCKKLPISIRFDFVTDAKIRGITSMDSKNFHINVLGARNMTLEEITIIAPEESPNTDGIHVGRSVGVQIINSNIKTGDDCISIGDGTRDLLVERVTCGPGHGISIGSLDLYVKEEDVTGIRVVNCTLINTDNGVRIKTWPSAACSTTASGIHFENIILKNVTNPILIDQEYCPWNRCNKNKPSTIKLVDISFKHIRGTSGNKDAVKLLCSKGFPCKNVEIGDIDIKYTGADGPATFQCSNVSPTLMGTQVPKACSSPVTKLPGQ

SEQ ID NO: 1748 - protein, 329 aa, Zea mays subsp. mays
  misc_feature (1)..(329): Ceres Seq. ID no. 15178911
MMGPCKAPIRITLQGTVKADGNVNGNDYWVAFRRINGFKLNGGGVFDGEGNTAWRANNCHKMALTQCKKLPISIRFDFVTDAKIRGITSMDSKNFHINVLGARNMTLEEITIIAPEESPNTDGIHVGRSVGVQIINSNIKTGDDCISIGDGTRDLLVERVTCGPGHGISIGSLDLYVKEEDVTGIRVVNCTLINTDNGVRIKTWPSAACSTTASGIHFENIILKNVTNPILIDQEYCPWNRCNKNKPSTIKLVDISFKHIRGTSGNKDAVKLLCSKGFPCKNVEIGDIDIKYTGADGPATFQCSNVSPTLMGTQVPKACSSPVTKLPGQ

SEQ ID NO: 1749 - protein, 328 aa, Zea mays subsp. mays
  misc_feature (1)..(328): Ceres Seq. ID no. 15178912
MGPCKAPIRITLQGTVKADGNVNGNDYWVAFRRINGFKLNGGGVFDGEGNTAWRANNCHKMALTQCKKLPISIRFDFVTDAKIRGITSMDSKNFHINVLGARNMTLEEITIIAPEESPNTDGIHVGRSVGVQIINSNIKTGDDCISIGDGTRDLLVERVTCGPGHGISIGSLDLYVKEEDVTGIRVVNCTLINTDNGVRIKTWPSAACSTTASGIHFENIILKNVTNPILIDQEYCPWNRCNKNKPSTIKLVDISFKHIRGTSGNKDAVKLLCSKGFPCKNVEIGDIDIKYTGADGPATFQCSNVSPTLMGTQVPKACSSPVTKLPGQ

SEQ ID NO: 1750 - DNA, 1006 bp, Zea mays subsp. mays
  misc_feature (1)..(1006): Ceres Seq. ID no. 15178924
aagtgtaaacattgtattccacaaactgcacttttcaaacaaattttgtaaaaaggcactctaaaacaataaaccatatatataaacagcataaatctgttcagtatccaaatccctctgagtctcttacataaacatcaatcccaacgaatcatctatgaaaaaacccctttgagaaaaataatccaaaacaatgtacttttcatcgtctgtactaaaacgcctcattttgatcaatttcttagccatacaactactccttataagcagcgaattgcccttaaacacgaccaatgagtatctcaaccacaaatgcttggttagtgaaggaaaatacaagccgggaagtgaatacgagagacatttaaataatatcatcaaaatgttctacagtggcagttacagaggtttctacctgttcggtatgaataatgataacgctatcctccagtgccgcgccgattcctacgggaccaagtgccacgactgctttgccaccgccctcgctaagcttcgcaggaaatgtccgtggtataagggcatgataatttggtatgaccaatgtcttctcgccattactactacagatgctattgggaagatcgattacgacaataacttttgtatgtccaatgcaaagaagttgggaggagataagagcgcttttacaaggacttggaaaactctcatggacaatctgacgactttagctaccaccactaaaggtaaagatacgtacacaatgttctctgcgggggagacgttgtacaagggtgataagatgtatggaatggtgcagtgtacatatgacttatcactaagagcttgtaaggagtgtttggtttttaatagcgtgcgttttcaagattgcttgagtgatacaagaggagcgagatttgtgggtgggacctgtacttttaggtttgagttttatccttttatttctaagccggtcctaaatatttaatgagctaaataaatgttatactattggtttgaatttccc

SEQ ID NO: 1751 - protein, 257 aa, Zea mays subsp. mays
  misc_feature (1)..(257): Ceres Seq. ID no. 15178925
MYFSSSVLKRLILINFLAIQLLLISSELPLNTTNEYLNHKCLVSEGKYKPGSEYERHLNNIIKMFYSGSYRGFYLFGMNNDNAILQCRADSYGTKCHDCFATALAKLRRKCPWYKGMIIWYDQCLLAITTTDAIGKIDYDNNFCMSNAKKLGGDKSAFTRTWKTLMDNLTTLATTTKGKDTYTMFSAGETLYKGDKMYGMVQCTYDLSLRACKECLVFNSVRFQDCLSDTRGARFVGGTCTFRFEFYPFISKPVLNI

SEQ ID NO: 1752 - protein, 194 aa, Zea mays subsp. mays
  misc_feature (1)..(194): Ceres Seq. ID no. 15178926
MFYSGSYRGFYLFGMNNDNAILQCRADSYGTKCHDCFATALAKLRRKCPWYKGMIIWYDQCLLAITTTDAIGKIDYDNNFCMSNAKKLGGDKSAFTRTWKTLMDNLTTLATTTKGKDTYTMFSAGETLYKGDKMYGMVQCTYDLSLRACKECLVFNSVRFQDCLSDTRGARFVGGTCTFRFEFYPFISKPVLNI

SEQ ID NO: 1753 - protein, 180 aa, Zea mays subsp. mays
  misc_feature (1)..(180): Ceres Seq. ID no. 15178927
MNNDNAILQCRADSYGTKCHDCFATALAKLRRKCPWYKGMIIWYDQCLLAITTTDAIGKIDYDNNFCMSNAKKLGGDKSAFTRTWKTLMDNLTTLATTTKGKDTYTMFSAGETLYKGDKMYGMVQCTYDLSLRACKECLVFNSVRFQDCLSDTRGARFVGGTCTFRFEFYPFISKPVLNI

SEQ ID NO: 1754 - DNA, 744 bp, Zea mays subsp. mays
  misc_feature (1)..(744): Ceres Seq. ID no. 15178928
atcatcatcgtggaacgtggagctcacatactaaacaagatccgatctaaccccccggttctcgtcggaatctcttcacggttaaccggcgttcctcacccaccttttcgttccagttatggaagacgtgaagggaaaggagcttgttgatgatactcctcctcctgttgaacaaaatgatgaaactgagattcataaacagccatcgtctgagtccgaggaaaatgcgatcaagaaaaagtatggaggattgttgccaaagaagattcctttgatatccaaggatcatgagcgtgcgttttttgactcagctgattgggcattaggcaagcaaaaaggacaaaagccaaaagggcctttggaagctctccgaccaaaactgcagccaaccccgcaccagcaaccaagggcaagacgaatggccttatcttcaggcgataactctgaagacgctgaggctgacaccaacgaacctctggatgaccaacaagctagcgcatcagctgctgacaacgccaaggatgatggaggcatcgtcgatgctgctgacgccaaagacaacatcaagtcatgaacaaacatatcacaagtcagtttacagaagaataagcgaccaggcttgctttgcagtggttgtagtaatatcgagtctctctctttacattatattccatacttgggtaccagcaaatctgtatcaccatacaaaacctagtatctgaaacgtctatttggacgatttgc

SEQ ID NO: 1755 - protein, 151 aa, Zea mays subsp. mays
  misc_feature (1)..(151): Ceres Seq. ID no. 15178929
MEDVKGKELVDDTPPPVEQNDETEIHKQPSSESEENAIKKKYGGLLPKKIPLISKDHERAFFDSADWALGKQKGQKPKGPLEALRPKLQPTPHQQPRARRMALSSGDNSEDAEADTNEPLDDQQASASAADNAKDDGGIVDAADAKDNIKS

SEQ ID NO: 1756 - protein, 80 aa, Zea mays subsp. mays
  misc_feature (1)..(80): Ceres Seq. ID no. 15178930
MTNKLAHQLLTTPRMMEASSMLLTPKTTSSHEQTYHKSVYRRISDQACFAVVVVISSLSLYIIFHTWVPANLYHHTKPSI

SEQ ID NO: 1757 - DNA, 978 bp, Zea mays subsp. mays
  misc_feature (1)..(978): Ceres Seq. ID no. 15178931
atccatttcatcaacttcaacgagagagagagagagagagagagagtaaagggagagtaaccaaaccctaatttctatctccttctcctctgaactgaaaagttccctctgctcgaaaagctcccatggcgtttcgaagaaactgtgggttggagctcttggtagcttctttaactctaaccttcgctctgattcagctagtggaggcgaactcagatggagatgctctatacgctcttcgacagagcttgtcggatccagaccatgtgctccagagctgggatcagaatcttgtcaatccttgcacctggttccatgtctcctgtaaccaagacagccgcgtcactcgtgtggatttgggtaattcaaacctttctggacatcttacccctgagcttggcaagctcgaacatctacagtatctggagctgtacaaaaacaacatccaaggaactataccttctgaacttggaaaccttaaaagtctcatcagcttggatctttacaacaacaatcttaccgggcagattcctacttctttggggaagttgaagtctctggtctttctccgcctcaatgacaaccggttgactggttcaatccctagagagctcaccaaaattccaagccttaaagtctttgatgtgtcgaacaatgatttgtgtggaactatcccaatagaaggaccttttgaacacattcctttggagaactttgagaacaactcgagattggagggaccggagttactcggtcttgcaagctacgacaccaactgcaactgagacaactgagacaacacttcaccacttttatcaaatctcacatctattattattgtaataagtatatatatgtcagtagttgaaaaacaaagaagcaaaaaaagagcccaaagactggtgtctgtttaagtaaaaacatatacatgcgactttcgtgtgttttgcattgagaagtaatattggtattggtagc

SEQ ID NO: 1758 - protein, 219 aa, Zea mays subsp. mays
  misc_feature (1)..(219): Ceres Seq. ID no. 15178932
MAFRRNCGLELLVASLTLTFALIQLVEANSDGDALYALRQSLSDPDHVLQSWDQNLVNPCTWFHVSCNQDSRVTRVDLGNSNLSGHLTPELGKLEHLQYLELYKNNIQGTIPSELGNLKSLISLDLYNNNLTGQIPTSLGKLKSLVFLRLNDNRLTGSIPRELTKIPSLKVFDVSNNDLCGTIPIEGPFEHIPLENFENNSRLEGPELLGLASYDTNCN

SEQ ID NO: 1759 - protein, 111 aa, Zea mays subsp. mays
  misc_feature (1)..(111): Ceres Seq. ID no. 15178933
MEMLYTLFDRACRIQTMCSRAGIRILSILAPGSMSPVTKTAASLVWIWVIQTFLDILPLSLASSNIYSIWSCTKTTSKELYLLNLETLKVSSAWIFTTTILPGRFLLLWGS

SEQ ID NO: 1760 - protein, 109 aa, Zea mays subsp. mays
  misc_feature (1)..(109): Ceres Seq. ID no. 15178934
MLYTLFDRACRIQTMCSRAGIRILSILAPGSMSPVTKTAASLVWIWVIQTFLDILPLSLASSNIYSIWSCTKTTSKELYLLNLETLKVSSAWIFTTTILPGRFLLLWGS

SEQ ID NO: 1761 - DNA, 931 bp, Zea mays subsp. mays
  misc_feature (1)..(931): Ceres Seq. ID no. 15178935
ttgtccgaaaaaatctcagagctccgctgcaatggaggtcactgcgaacgaaccagatatgagaagctccaaatcctctccgagagtaacgataccgaacttcttcgtgtcgctctcctcggcatttacgcaaacaccttccgtgcgtacgaacaagcccagtttgcggcttctaccaccagcttcagactccgtcaagttgattcaagacttccatcgttctctactctccgcgaccgagaaattcgcaggcttcttccactcgctcgccgctgagaaccctctgtttcaggaagcggttcgcttgtcctccgagtttcgcggtgtttgcgacgagattcgtttgaggaacactacaagggttaggcttgccatgtcggatcacgggtttgcagcggttctgcctggagattcagttgcaggaatggtggttgctaacgggttgataaacttcctcaacatctacaacaccgtacttgttgtccgtctagtactcacctggttccccactgctcctcctgccattgttaaccccctcagcactctatgtgatccatacttgaacatattccggggagtcataccgcctcttggaggattagatttgtctcccattttggccttccttgttctcaacgccttcaccagcagtgctatggcgcttccttgtgagctcccaccagctgaaggagtgacttctccatcatcttgtgagacaaagtggatgaggaggagaaggttgagtagcaaccagaaccaaacaccgagctctgcttaaaccttattaaaaaaacaactcctcttttcttcgcttcaacatgtgacatatacttttcgagtaattttattcatctgcatctctggattctgagttttattttgtgtgtaaattttctttataaaatgaataaaaagaattgttactaaaaac

SEQ ID NO: 1762 - protein, 258 aa, Zea mays subsp. mays
  misc_feature (1)..(258): Ceres Seq. ID no. 15178936
CPKKSQSSAAMEVTANEPDMRSSKSSPRVTIPNFFVSLSSAFTQTPSVRTNKPSLRLLPPASDSVKLIQDFHRSLLSATEKFAGFFHSLAAENPLFQEAVRLSSEFRGVCDEIRLRNTTRVRLAMSDHGFAAVLPGDSVAGMVVANGLINFLNIYNTVLVVRLVLTWFPTAPPAIVNPLSTLCDPYLNIFRGVIPPLGGLDLSPILAFLVLNAFTSSAMALPCELPPAEGVTSPSSCETKWMRRRRLSSNQNQTPSSA

SEQ ID NO: 1763 - protein, 248 aa, Zea mays subsp. mays
  misc_feature (1)..(248): Ceres Seq. ID no. 15178937
MEVTANEPDMRSSKSSPRVTIPNFFVSLSSAFTQTPSVRTNKPSLRLLPPASDSVKLIQDFHRSLLSATEKFAGFFHSLAAENPLFQEAVRLSSEFRGVCDEIRLRNTTRVRLAMSDHGFAAVLPGDSVAGMVVANGLINFLNIYNTVLVVRLVLTWFPTAPPAIVNPLSTLCDPYLNIFRGVIPPLGGLDLSPILAFLVLNAFTSSAMALPCELPPAEGVTSPSSCETKWMRRRRLSSNQNQTPSSA

SEQ ID NO: 1764 - protein, 239 aa, Zea mays subsp. mays
  misc_feature (1)..(239): Ceres Seq. ID no. 15178938
MRSSKSSPRVTIPNFFVSLSSAFTQTPSVRTNKPSLRLLPPASDSVKLIQDFHRSLLSATEKFAGFFHSLAAENPLFQEAVRLSSEFRGVCDEIRLRNTTRVRLAMSDHGFAAVLPGDSVAGMVVANGLINFLNIYNTVLVVRLVLTWFPTAPPAIVNPLSTLCDPYLNIFRGVIPPLGGLDLSPILAFLVLNAFTSSAMALPCELPPAEGVTSPSSCETKWMRRRRLSSNQNQTPSSA

SEQ ID NO: 1765 - DNA, 1810 bp, Zea mays subsp. mays
  misc_feature (1)..(1810): Ceres Seq. ID no. 15178939
tttactccgtccattcacaaagagcgttcatttctgttttctctctcctctcttatttctcttttttccttttttttcttttttttgtttttttttttttttcctctttcgttttttttttctctcttcgttttagttgatttcgaaccctaagctaaaaaggggaaagaggtcttttctcgggaaacaaaacagatatttttccatctcattcatcgcagtgagaaaaaaagatgcagaatccgaggctcaaacaacagcaacaacaacaacaacaacaacaacaagctatgatgcagcaagctttgatgcaacaacaccactctctctatcatcctagccttatggctcctcctccccctcctcctcagatggagcctctaccaagtggaaaccttcctcctggtttcgatcccactacttgccgcagtgtgtatgctggcaacattcacacgcaggtcactgaggttcttcttcaagaaatttttgctagcaccggccctgttgagagctgtaagctcatcagaaaggataagtcatcatatggatttgttcactactttgatcgaagatctgctggtttggctatcatgtctcttaacggcaggcatctgtttggacagcctatcaaagttaattgggcttatgctactggtcaaagggaagacacatcaagccacttcaacatatttgtcggagacctcagtccagatgttactgatgcagctttgtttgagagcttctctgccttcaatacttgctcggatgcaagagtaatgtgggaccagaaaactggacgctcgagaggctttgggtttgtttccttccgcaatcagcaggatgctcaaaatgccataaatgaaatgaatggtaaatggttaagtagcagacaaatcagatgcaactgggcgacaaaaggtgctacttttggcgacgacaaacatagctctgatggcaaaagtgtcgttgaactcacaaacggctcagaggatggtagagagatctcaatcacaaacgaagaagctcctgaaaacaatcctcagtataccactgtgtatgtaggaaaccttgctcctgaagtaactcagcttgatctacaccgcctgttccatacacttggcgctggagtgattgaagaggtccgtgtccagcgagacaaaggctttggttttgtgagatacaatactcatgacgaggctgctcttgctattcagatgggcaactctcagcctttcctcttcaacagacagataaagtgttcatggggaaacaaaccaactccaataggcacagcctcaaacccgcttccaccaccagcgccagtggcagtccctggtctgtccccaatggacctcttagcctatgagaggcaactggctctagccaagatgcatcctcaggctcagcattctcttaggcatgccaatgcagccggagcaagtgctgctatgtacgatggtggttttcagaatgtagctgcggctcatcagcagctcatgtactatcagtaataaactcttggtgccttcgcgctgagataccttttctttctttcttcttaattttatcactttcttgttttcattttctagaccttgttcagagtcttatgtatgtgtctctctctcatttgaagtcgctgattttatatgcatgcttgctggttcgtaccctgagtcttacttggcttgcaagcaagcaataaaataacgttgaaataaaatggagtttggtttgggttctagacatgtttgtctgagagggagtagtagtgtcttgtattgtggttttgtaatggtaaacttggtcc

SEQ ID NO: 1766 - protein, 425 aa, Zea mays subsp. mays
  misc_feature (1)..(425): Ceres Seq. ID no. 15178940
MQNPRLKQQQQQQQQQQQAMMQQALMQQHHSLYHPSLMAPPPPPPQMEPLPSGNLPPGFDPTTCRSVYAGNIHTQVTEVLLQEIFASTGPVESCKLIRKDKSSYGFVHYFDRRSAGLAIMSLNGRHLFGQPIKVNWAYATGQREDTSSHFNIFVGDLSPDVTDAALFESFSAFNTCSDARVMWDQKTGRSRGFGFVSFRNQQDAQNAINEMNGKWLSSRQIRCNWATKGATFGDDKHSSDGKSVVELTNGSEDGREISITNEEAPENNPQYTTVYVGNLAPEVTQLDLHRLFHTLGAGVIEEVRVQRDKGFGFVRYNTHDEAALAIQMGNSQPFLFNRQIKCSWGNKPTPIGTASNPLPPPAPVAVPGLSPMDLLAYERQLALAKMHPQAQHSLRHANAAGASAAMYDGGFQNVAAAHQQLMYYQ

SEQ ID NO: 1767 - protein, 406 aa, Zea mays subsp. mays
  misc_feature (1)..(406): Ceres Seq. ID no. 15178941
MMQQALMQQHHSLYHPSLMAPPPPPPQMEPLPSGNLPPGFDPTTCRSVYAGNIHTQVTEVLLQEIFASTGPVESCKLIRKDKSSYGFVHYFDRRSAGLAIMSLNGRHLFGQPIKVNWAYATGQREDTSSHFNIFVGDLSPDVTDAALFESFSAFNTCSDARVMWDQKTGRSRGFGFVSFRNQQDAQNAINEMNGKWLSSRQIRCNWATKGATFGDDKHSSDGKSVVELTNGSEDGREISITNEEAPENNPQYTTVYVGNLAPEVTQLDLHRLFHTLGAGVIEEVRVQRDKGFGFVRYNTHDEAALAIQMGNSQPFLFNRQIKCSWGNKPTPIGTASNPLPPPAPVAVPGLSPMDLLAYERQLALAKMHPQAQHSLRHANAAGASAAMYDGGFQNVAAAHQQLMYYQ

SEQ ID NO: 1768 - protein, 405 aa, Zea mays subsp. mays
  misc_feature (1)..(405): Ceres Seq. ID no. 15178942
MQQALMQQHHSLYHPSLMAPPPPPPQMEPLPSGNLPPGFDPTTCRSVYAGNIHTQVTEVLLQEIFASTGPVESCKLIRKDKSSYGFVHYFDRRSAGLAIMSLNGRHLFGQPIKVNWAYATGQREDTSSHFNIFVGDLSPDVTDAALFESFSAFNTCSDARVMWDQKTGRSRGFGFVSFRNQQDAQNAINEMNGKWLSSRQIRCNWATKGATFGDDKHSSDGKSVVELTNGSEDGREISITNEEAPENNPQYTTVYVGNLAPEVTQLDLHRLFHTLGAGVIEEVRVQRDKGFGFVRYNTHDEAALAIQMGNSQPFLFNRQIKCSWGNKPTPIGTASNPLPPPAPVAVPGLSPMDLLAYERQLALAKMHPQAQHSLRHANAAGASAAMYDGGFQNVAAAHQQLMYYQ

SEQ ID NO: 1769 - DNA, 986 bp, Zea mays subsp. mays
  misc_feature (1)..(986): Ceres Seq. ID no. 15178973
gaaatccgcagattcccgtcgctacttcggccacatggctgcagcggcggcgtggaccggcgccgcatcccccaactcgctgctgctctcgcgctcgcctccccacgccgccgtgctcgcgccttcgccggggagctccatgcggaggcggctcctgctcggcgtcggcaccccggccgtggcggcgctggcggccgcggcgccgccagcggtgctgcaggacggggcggtcactgtgctcatcaccgccggcgcctactctcttgtgcgcgtcttcgacgagctcaccgagcggcggctcatcgaaaagagcttgagcaggaaggttgtgcacgtgctatccggcgtcctgttcatgtcatcttggcccctgttcagggaattgctgagaggtccactctattatgtcctggtgctgctgttcagcgttttagtcttctggcgtgagtcccccatcgggatcgtctccttgtcgatgatgagcggtggcgatggttttgctgacattgttgggaggaggtatggctcagcgaagctgccattcaatcggaagaagagctgggccgggagcatctcgatgttcatttctggtttcctgctgtccgcgatgatgatgctctacttctcaagcctgggttacattgatgttatctgggaagaggcacttggtaagctggcgcttgttgcactagcagcgacagtagtggagtgcgttcctgtgaccgaagttgtagatgacaacatatctgttcctttggccaccatgctggtagcttttctcttgtttagctccaaccgcacaatagttaattaaaatactactagtgcattatttaagacatgtgatgagttcttcagtgatgagttgtgcttacttttgcttcctatgtgatctctagtacttgatggcgacggcctaacatctcccagtttttggtgtctccttgccttggctgttttggtggaaaagtattgctagcttgtct

SEQ ID NO: 1770 - protein, 270 aa, Zea mays subsp. mays
  misc_feature (1)..(270): Ceres Seq. ID no. 15178974
KSADSRRYFGHMAAAAAWTGAASPNSLLLSRSPPHAAVLAPSPGSSMRRRLLLGVGTPAVAALAAAAPPAVLQDGAVTVLITAGAYSLVRVFDELTERRLIEKSLSRKVVHVLSGVLFMSSWPLFRELLRGPLYYVLVLLFSVLVFWRESPIGIVSLSMMSGGDGFADIVGRRYGSAKLPFNRKKSWAGSISMFISGFLLSAMMMLYFSSLGYIDVIWEEALGKLALVALAATVVECVPVTEVVDDNISVPLATMLVAFLLFSSNRTIVN

SEQ ID NO: 1771 - protein, 259 aa, Zea mays subsp. mays
  misc_feature (1)..(259): Ceres Seq. ID no. 15178975
MAAAAAWTGAASPNSLLLSRSPPHAAVLAPSPGSSMRRRLLLGVGTPAVAALAAAAPPAVLQDGAVTVLITAGAYSLVRVFDELTERRLIEKSLSRKVVHVLSGVLFMSSWPLFRELLRGPLYYVLVLLFSVLVFWRESPIGIVSLSMMSGGDGFADIVGRRYGSAKLPFNRKKSWAGSISMFISGFLLSAMMMLYFSSLGYIDVIWEEALGKLALVALAATVVECVPVTEVVDDNISVPLATMLVAFLLFSSNRTIVN

SEQ ID NO: 1772 - protein, 224 aa, Zea mays subsp. mays
  misc_feature (1)..(224): Ceres Seq. ID no. 15178976
MRRRLLLGVGTPAVAALAAAAPPAVLQDGAVTVLITAGAYSLVRVFDELTERRLIEKSLSRKVVHVLSGVLFMSSWPLFRELLRGPLYYVLVLLFSVLVFWRESPIGIVSLSMMSGGDGFADIVGRRYGSAKLPFNRKKSWAGSISMFISGFLLSAMMMLYFSSLGYIDVIWEEALGKLALVALAATVVECVPVTEVVDDNISVPLATMLVAFLLFSSNRTIVN

SEQ ID NO: 1773 - DNA, 950 bp, Zea mays subsp. mays
  misc_feature (1)..(950): Ceres Seq. ID no. 15178997
atcgtagtactgaacaagtgcgaagaaaaaaacatacatttttgtgtgtgtttgagtgaagaaggaaaaagtataaagagaagcgcagacgacgatctgcctactctgtctgtttgtctgtgtgcaagtaagtaatgtctgaagcagcagcacaaaaggcggctttcctcggtggacttgttgtctcattcaaggaacaaatgcacactgatgttctcgttcatcctggtgatcaatctccccccatcccgacccacaaggccatcctctcgtcaagatctaaggtcttcaggaacatgctagactccgatgaatgcaaggcctctgctgaggaatcgatcactctccccgacttgaaccacgacgagctccattctcttctcgagttcctctactccggcaacttaattgctccatacaatcagtaccgagccctctatctggctgctgacaaatacgacatcgcttatctccaagacgtttgccgcgaccatttcattgcatctctcacctctaggaacgtccttgacatcctggagctcgccagcatcccttctgacaccatcttgaaagccgctgccatcaaccttgtggtcaagcatatggaagatgtggttgttcccatgaaatacgagacttttgtgcagaggaaccccaatcttggcgttgagatcaccagagcttttctaagagagatcaaagctcaatccaaagacagcagatctgcttcttctaatcatcgccctcactctcgcttctactgattgatgaacaataaacagctacttgcctaatgtctcacttgccaaaggtgattgatgaatgatgatgccttcttcttcttcttattaaatttggaaagactttgttttagggatttatttcaaggtgttggttgatacatatacaatatctactagtattgtgaatttaactaaaatctgttatat

SEQ ID NO: 1774 - protein, 209 aa, Zea mays subsp. mays
  misc_feature (1)..(209): Ceres Seq. ID no. 15178998
MSEAAAQKAAFLGGLVVSFKEQMHTDVLVHPGDQSPPIPTHKAILSSRSKVFRNMLDSDECKASAEESITLPDLNHDELHSLLEFLYSGNLIAPYNQYRALYLAADKYDIAYLQDVCRDHFIASLTSRNVLDILELASIPSDTILKAAAINLVVKHMEDVVVPMKYETFVQRNPNLGVEITRAFLREIKAQSKDSRSASSNHRPHSRFY

SEQ ID NO: 1775 - protein, 187 aa, Zea mays subsp. mays
  misc_feature (1)..(187): Ceres Seq. ID no. 15178999
MHTDVLVHPGDQSPPIPTHKAILSSRSKVFRNMLDSDECKASAEESITLPDLNHDELHSLLEFLYSGNLIAPYNQYRALYLAADKYDIAYLQDVCRDHFIASLTSRNVLDILELASIPSDTILKAAAINLVVKHMEDVVVPMKYETFVQRNPNLGVEITRAFLREIKAQSKDSRSASSNHRPHSRFY

SEQ ID NO: 1776 - protein, 155 aa, Zea mays subsp. mays
  misc_feature (1)..(155): Ceres Seq. ID no. 15179000
MLDSDECKASAEESITLPDLNHDELHSLLEFLYSGNLIAPYNQYRALYLAADKYDIAYLQDVCRDHFIASLTSRNVLDILELASIPSDTILKAAAINLVVKHMEDVVVPMKYETFVQRNPNLGVEITRAFLREIKAQSKDSRSASSNHRPHSRFY

SEQ ID NO: 1777 - DNA, 949 bp, Zea mays subsp. mays
  misc_feature (1)..(949): Ceres Seq. ID no. 15179001
acttttttggccttatccaaaatctcttttgtgggtagaatcatctctgtcttaagccaatctctctctcattgtctctgtgtcgagagagagagaaatggcagcttcaacactaacacttccctgcttcaaactctacgatcaaccaagcctccttcttccccgcaacaaatcatctaaccaaacactccttaaattcaacttgtcgcctccaaaacctctcttgatctcctcacgtgccaacagttctccgcgattcagagccctcccggagaccatctccgtcaaacaggacgacacaactgctgatgacgacagtcctcctgcgaccatcaacactaagctctactttgggaaccttccttacaatgtcgacagtgcaactctcgctcagatcatccaagacttcgccaaccctgagctcgtcgaggttctctacaacagagacacaggacagagccgcgggttcgcctttgtgacgatgagcaacgtcgaagactgcaacgtcatcatcgagaacctcgatggaactgagtatcttggtaggacgttgaaggtgaactttgcagacaaaccgaagcctaacaaagaacctctgtatccagaaacagagtataagctgtttgttggtaacttgtcgtggaccgtcacttcggagtcgttagctggcgcgtttagagagtgtggagaagtggttggtgctagagttgtgtttgacggagacactgggaagtcaagaggttatggctttgtgtgttactcttccaaagctgaaatggaaaccgctcttgagtcgctggatgggcttgagctagagggtcgggcgattcgagtaaacttggctcaggggaagaagtactgatgtcatacaataacattttgagatttcatcgttagagattatgtttcaattaaactaaaataactctaaagatcgttgcatcttgcc

SEQ ID NO: 1778 - protein, 254 aa, Zea mays subsp. mays
  misc_feature (1)..(254): Ceres Seq. ID no. 15179002
MAASTLTLPCFKLYDQPSLLLPRNKSSNQTLLKFNLSPPKPLLISSRANSSPRFRALPETISVKQDDTTADDDSPPATINTKLYFGNLPYNVDSATLAQIIQDFANPELVEVLYNRDTGQSRGFAFVTMSNVEDCNVIIENLDGTEYLGRTLKVNFADKPKPNKEPLYPETEYKLFVGNLSWTVTSESLAGAFRECGEVVGARVVFDGDTGKSRGYGFVCYSSKAEMETALESLDGLELEGRAIRVNLAQGKKY

SEQ ID NO: 1779 - DNA, 1269 bp, Zea mays subsp. mays
  misc_feature (1)..(1269): Ceres Seq. ID no. 15179023
atatcatcttctagatatagtttctcttcttcttataaacttcgtatactccattttaaggaaacgggagagtacacgtagtgtgtcagagggtgagaatcccaatgaggatcttacccgagcctctaggttcggttccatgcctcattctcctcgtgtcgtcggttctattttcagcgactctatccctcgctcgtgtcgtcgaagttgttggttacgccgagagcaaaatcaaaaatccccatgcattcacaggactccgagtgacgattgaatgtaagggggagaaagggcattttgttacaaaaggttctggaaacattgatgaggaaggaaagttcggtctgaaagttcttcctcatgacattatctctgacgacggagccttaaaggaggagtgttatgcccagcttcacagtgcggcgggagcaccttgtccggctcacgacggccttgagtcaaacaagatcgtgtttctatacacatccggagacaaacacgttttgggcctcaaacaaaacctgaggtttacacctgaactttgtgtttccaaattcttttggcctatgcctaagttccctcctgttaagggatttgaacatcatttccctttacctccaccgtttcctaaattcaagaaaccttgcccacctccccctgaggaggttccaccaccaccaaaggtagagcttccgccacctgtcccggttcacgatccacccccgaaggtggagcttccaccaccggctcctaagaagccttgtcctcctaaatcgccgaagatagagcacccacctcctgttcccgtttacaagccgccaccaaagatagagcattcacctcctaagaagccatgcccaccgccggttcacgttcacaagccgccaccgaagaaggcatgccccccaaagatcgagcttccaccaccagtcccgatctacaagccgccgccgaagatagagcatccaccaatctacgtgccaccggtggtgattccgaagaagccgtgtccaccacttccaaagtttccacatcttcctcctaaatacattcaccatcccaagttcggcaaatggcctcccttgccaacacacccttgaaactttaaacgtttactcgtatattttttttaaaaattattgcatgcatgtttaatattttggttgcttttgtctcatttaatctttgtttgctttatctccgatcgagttatatatatgtagactgtttgcgtaactattccagcaataatatggtaatgattccttt

SEQ ID NO: 1780 - protein, 331 aa, Zea mays subsp. mays
  misc_feature (1)..(331): Ceres Seq. ID no. 15179024
MRILPEPLGSVPCLILLVSSVLFSATLSLARVVEVVGYAESKIKNPHAFTGLRVTIECKGEKGHFVTKGSGNIDEEGKFGLKVLPHDIISDDGALKEECYAQLHSAAGAPCPAHDGLESNKIVFLYTSGDKHVLGLKQNLRFTPELCVSKFFWPMPKFPPVKGFEHHFPLPPPFPKFKKPCPPPPEEVPPPPKVELPPPVPVHDPPPKVELPPPAPKKPCPPKSPKIEHPPPVPVYKPPPKIEHSPPKKPCPPPVHVHKPPPKKACPPKIELPPPVPIYKPPPKIEHPPIYVPPVVIPKKPCPPLPKFPHLPPKYIHHPKFGKWPPLPTHP

SEQ ID NO: 1781 - protein, 177 aa, Zea mays subsp. mays
  misc_feature (1)..(177): Ceres Seq. ID no. 15179025
MPKFPPVKGFEHHFPLPPPFPKFKKPCPPPPEEVPPPPKVELPPPVPVHDPPPKVELPPPAPKKPCPPKSPKIEHPPPVPVYKPPPKIEHSPPKKPCPPPVHVHKPPPKKACPPKIELPPPVPIYKPPPKIEHPPIYVPPVVIPKKPCPPLPKFPHLPPKYIHHPKFGKWPPLPTHP

SEQ ID NO: 1782 - DNA, 1081 bp, Zea mays subsp. mays
  misc_feature (1)..(1081): Ceres Seq. ID no. 15179026
atacttttttctaaggcgcctgaaaccatatagtatatacaatacatgatttgtgccgttgacctttcccccgtgtgtaaatgggcatatttcctgagtttggtggctggatcagtcagaacactcaacagcctaaaaaatctgaaaaagtgaaatccaagcctgtgagagagacaaaaactcacgatgagagagatgagacgaaggagcaattaaaactgtggagagatgcaaataagaaggaacaatatcatgaaccttctcctacggtgaaggtgcatacggaccataatattgatagcttttccagtataaaaatggaatttacattaggattgccacctcaagcagcttacgacgttttaactaatcaagacaacaaaacatactccagagaaatcaatggccgcccacttctgaaagccatatcaagaaaagttacatcagagagaggtatagggaataggccgatcctggaggttgataaagagttgtcatggaacttccttttcttttcaggaactatcccaatacgtctaaatgtcctcgaaaacccaaaagaactttcgacatataactggaaaaggagaaaaggaatggactacatggaaacgttcgaggtcaactatacagtagagccaatgtatgtcgatgcagaacgcttgtgcaagcacaagaagccgaagagtagagaagaatacagaaaatgtagtggtggaaaaggattgattgcgtccaaggttaaagttgaccagaattttaggccttcttttccttggaatctgccactgctgtcttcctactttcgccggttcactgttgagaccactaagaaagtggcggaagattttcaaacgcgggctggcgatatccgacatcggttgtaacgtctgagtcttgcgcaagggcgggggtgaaagcgacgaacaaattttcttagacatgatattaattatgttatatcgattatttgcatcggtaaaataagaaattttacaaccctgaaaaggcagaaaacagatgcaatatactatatggcttaatatacggtagattttcaataaactattccctctgttcc

SEQ ID NO: 1783 - protein, 268 aa, Zea mays subsp. mays
  misc_feature (1)..(268): Ceres Seq. ID no. 15179027
MGIFPEFGGWISQNTQQPKKSEKVKSKPVRETKTHDERDETKEQLKLWRDANKKEQYHEPSPTVKVHTDHNIDSFSSIKMEFTLGLPPQAAYDVLTNQDNKTYSREINGRPLLKAISRKVTSERGIGNRPILEVDKELSWNFLFFSGTIPIRLNVLENPKELSTYNWKRRKGMDYMETFEVNYTVEPMYVDAERLCKHKKPKSREEYRKCSGGKGLIASKVKVDQNFRPSFPWNLPLLSSYFRRFTVETTKKVAEDFQTRAGDIRHRL

SEQ ID NO: 1784 - protein, 189 aa, Zea mays subsp. mays
  misc_feature (1)..(189): Ceres Seq. ID no. 15179028
MEFTLGLPPQAAYDVLTNQDNKTYSREINGRPLLKAISRKVTSERGIGNRPILEVDKELSWNFLFFSGTIPIRLNVLENPKELSTYNWKRRKGMDYMETFEVNYTVEPMYVDAERLCKHKKPKSREEYRKCSGGKGLIASKVKVDQNFRPSFPWNLPLLSSYFRRFTVETTKKVAEDFQTRAGDIRHRL

SEQ ID NO: 1785 - DNA, 889 bp, Zea mays subsp. mays
  misc_feature (1)..(889): Ceres Seq. ID no. 15179044
aacagtgtcagagccgaaacaaacgtagcaaaaaaaaaaaacatagaaaatgtctgtcttcttacgcggaggaatcgccggaggatttcatctccgtagtcgtgactcctcagccgtcatcacgaaacgacgaatctcatccgttggagccgtaacaggacgaagcgtcaatccagcatcagccattgaacaacgtgccacatggttacctggtctcgaacctcctccctacctcgacggaaagttagctggagattacgggtttgacccgctcggtttaggagaggatccgaaaagtttgaaatggtatgttcaagcagagcttgtccacgctcgtttcgccatgctcggtgttgccggaatactcttcaccgacctacttcgtaccacagggattagcaacttgcctgtttggtacgaagccggagcaacgaaatttgattttgccagcacaaagactctcattgttgtacagtttctactcatggggtttgctgagaccaaaaggtatatggacttcgtctcaccaggatctcaagccgcagaaggaacattctttggacttgaagcagcactcgaagggctcgagcccggatatcctggagggccgctcttgaatccgctaggccttgctaaggatatcaagagcgctcacgactggaagcttaaggagatcaagaatggtcgtctagcgatgatggcgatgctagggttcttcgttcaagcctcagtgactcacactggtcctatcgataacctcgtcgagcatctctctaatccatggcataagaccatcattcaaaccctcttcacctctgcttcttagttttacatttcacatagcaaattcaatatactgctggagaagtgtatcaattacctttgtttc

SEQ ID NO: 1786 - protein, 258 aa, Zea mays subsp. mays
  misc_feature (1)..(258): Ceres Seq. ID no. 15179045
MSVFLRGGIAGGFHLRSRDSSAVITKRRISSVGAVTGRSVNPASAIEQRATWLPGLEPPPYLDGKLAGDYGFDPLGLGEDPKSLKWYVQAELVHARFAMLGVAGILFTDLLRTTGISNLPVWYEAGATKFDFASTKTLIVVQFLLMGFAETKRYMDFVSPGSQAAEGTFFGLEAALEGLEPGYPGGPLLNPLGLAKDIKSAHDWKLKEIKNGRLAMMAMLGFFVQASVTHTGPIDNLVEHLSNPWHKTIIQTLFTSAS

SEQ ID NO: 1787 - protein, 160 aa, Zea mays subsp. mays
  misc_feature (1)..(160): Ceres Seq. ID no. 15179046
MLGVAGILFTDLLRTTGISNLPVWYEAGATKFDFASTKTLIVVQFLLMGFAETKRYMDFVSPGSQAAEGTFFGLEAALEGLEPGYPGGPLLNPLGLAKDIKSAHDWKLKEIKNGRLAMMAMLGFFVQASVTHTGPIDNLVEHLSNPWHKTIIQTLFTSAS

SEQ ID NO: 1788 - DNA, 688 bp, Zea mays subsp. mays
  misc_feature (1)..(688): Ceres Seq. ID no. 15179062
acaaattggattgttatccagaacgaaattgttctagtttttaagttcactcgacacttttgcaatggcgatttctctccccaccgctcatgtctctccccctaagtcgtgtttctccttttcatcctcgtcgaagctatcttctcattcatccctgcgcttcggaatccgccacgaaagagttaactcgcggtcgtcgtctcgctgcgcctgcgccccactcactgttagagcaaagaagcaaaccttcaactcttttgatgatttattgctcaactctgacaaacctttactagtagacttctatgccacatggtgtggtccatgccagcttatggtacctatacttaatgaagtaagtgaaactctgagagataagattgcagtggtgaaaattgatactgaaaagtacccaagtcttgctaacaaataccaggttgaggctttacctacattcatcttattcaaagacgggaaactctgggaccgttttgagggagccttgcaagctaaccaactcgttgaacggatcgagacttctttacaagcgaagcaatagatgaacaaacagtccgttgtgacaacacgttcattattgattgacaaatttcttttcaatatatggcatcagccatttttcttttctgagtgacaaatttctcatgatatttggctacttttccgtcgc

SEQ ID NO: 1789 - protein, 164 aa, Zea mays subsp. mays
  misc_feature (1)..(164): Ceres Seq. ID no. 15179063
MAISLPTAHVSPPKSCFSFSSSSKLSSHSSLRFGIRHERVNSRSSSRCACAPLTVRAKKQTFNSFDDLLLNSDKPLLVDFYATWCGPCQLMVPILNEVSETLRDKIAVVKIDTEKYPSLANKYQVEALPTFILFKDGKLWDRFEGALQANQLVERIETSLQAKQ

SEQ ID NO: 1790 - DNA, 1615 bp, Zea mays subsp. mays
  misc_feature (1)..(1615): Ceres Seq. ID no. 15179094
aaaaaatatcgaggaagaacttcttcttcttctggtgttattgagctctttctctcttggcctcgcctcgcctctgaccacttcgctcctcgggcattaggtactttgtaagtatctgttgatatttctctgcaaagttttcaaaatgggagactcagaaaatgctcaccaaccttccaaaaagagaggtgctttgaaacagctgtctcgcgagaatccggatgatgatgatgatattggttcagctgaacttgagagtggcactttcaagaaggccagtgatgaggtgttggcgaccagaagaattgtcaaaatcaagcgcaaagagccatcatcagctgcaccaccagccgcagcatccaacccattcgccggaattcaattgctccctactgcacctgcttcaaccggttttggaacaaatgctcctctggctgagtctaaagtggctcctgctgaagctgtagttgacgacaaccaaaaggcagttgatgctgaagacggcgatgaagttgacagtaagaagaaggttgatgtcacagatgaagtctctgtaaagtctaaagtaaaggatgttgatgataatgagtgtggaaagacatctgatgctggtgtagaccaggcggtctcgggtgttagcaacgctgtggaaggagcagcacaaactgaggatcctcttgagaaggaatcaggaggtgatcagactgatataaaagaaaaagaaggcgaaggaagcgttgaagcagctaagaacggtgatgatgataataataacggctctttgagttcgttccagcagcattcgagtagcaaaaacgcattcaccggacttgccggcacacagtcctctggttcttccttctcatttggtgtggtgtctcaggatggtagttctggacctctcttcggctttggcctctcaaacagcaacaacacttcttccctcttcggtgcatctggatcttccattatcaagaagagcgaaggcactgggtttcctccaaagcaagaggtttccacagaaacaggggaagagaacgagaaagtcgccttctcagctgactcgatcatgtttgaatatcttgatgggggatggagggagcgtggcaaaggagaagtcaaggtcaacgtttcaagcaatggcggtaaagcaaggctggttatgagagctaaaggaaactacaggttgatccttaacgcgagtctctacccggagatgaaacttgcaagcatggacaagaaaggaatcacgttcgcttgtgtgaatagtgaaggccgagaaggtctctctacgtttgcactcaagttcaaagatccaacaatcgttgatgagtttcgcgtagctgttgacaaacataaagaaagtaaaccagtagaaacggctcctccgctgaagacacctgagaactctccaacggctacagatgctgcctgaagtgaaaggtaaaagaaaaacactgaagaaactctcctctttaccttttgtgtctttactttcaagtagttgaattttgaggcagagaaaactagagattcgaacaagtttgtttgttgttgttttcattttaaacagttgttgagactttctggttagcataagacttaaaaaatctgc

SEQ ID NO: 1791 - protein, 429 aa, Zea mays subsp. mays
  misc_feature (1)..(429): Ceres Seq. ID no. 15179095
MGDSENAHQPSKKRGALKQLSRENPDDDDDIGSAELESGTFKKASDEVLATRRIVKIKRKEPSSAAPPAAASNPFAGIQLLPTAPASTGFGTNAPLAESKVAPAEAVVDDNQKAVDAEDGDEVDSKKKVDVTDEVSVKSKVKDVDDNECGKTSDAGVDQAVSGVSNAVEGAAQTEDPLEKESGGDQTDIKEKEGEGSVEAAKNGDDDNNNGSLSSFQQHSSSKNAFTGLAGTQSSGSSFSFGVVSQDGSSGPLFGFGLSNSNNTSSLFGASGSSIIKKSEGTGFPPKQEVSTETGEENEKVAFSADSIMFEYLDGGWRERGKGEVKVNVSSNGGKARLVMRAKGNYRLILNASLYPEMKLASMDKKGITFACVNSEGREGLSTFALKFKDPTIVDEFRVAVDKHKESKPVETAPPLKTPENSPTATDAA

SEQ ID NO: 1792 - DNA, 791 bp, Zea mays subsp. mays
  misc_feature (1)..(791): Ceres Seq. ID no. 15179107
cagctcctcctccctcctatcatcctcttcctcaacgctccctcgtcattatataacacgaggatcagttcagagctgcttgacaaacactcacacctagcgaacagctatacacccaaccaggtggagagctgcaagccaccaagaccaaagtgatcgcaacctgtgcggcggcggcggcggcgacgatgagcaggaacaacggcaaggcgtcgaagctggagctcctgaggatgggcctgtcgagggcgaggggcgggccctcggcgacggcgcggcccggcggcggggacagcggcagcaacggccgcgcgacgacgtcgccgcgccgggtgtcctcctcgtcctcgtccaccgcgtcgccgccgagctcgtgcgtgtcgtccgagggcagccccgacgcggccgccgccgcgccggcgcccatggtcctggccgggtgcccccggtgcatgatgtacgtgatgctgtcccgcgaggacccccggtgcccccggtgccacaacgccgtgctgctcgacttcagcgagggcgaccagcgccgcccgcgtcagcgccggtgaaatggaaccaccacgagcgatcgagcacgtctgagttcgtcgttgccttcaagaagtcgtcgtcgtagcttcattttcccattcgcggccggagtttgtttcgattacccaaggaattattgcatagacctgtttcttccgagcggcacggtgccaaagggatcggtctaggtaataatttcatgctttgttagacaataataataagaataataatttcgtcttctc

SEQ ID NO: 1793 - protein, 124 aa, Zea mays subsp. mays
  misc_feature (1)..(124): Ceres Seq. ID no. 15179108
MSRNNGKASKLELLRMGLSRARGGPSATARPGGGDSGSNGRATTSPRRVSSSSSSTASPPSSCVSSEGSPDAAAAAPAPMVLAGCPRCMMYVMLSREDPRCPRCHNAVLLDFSEGDQRRPRQRR

SEQ ID NO: 1794 - protein, 109 aa, Zea mays subsp. mays
  misc_feature (1)..(109): Ceres Seq. ID no. 15179109
MGLSRARGGPSATARPGGGDSGSNGRATTSPRRVSSSSSSTASPPSSCVSSEGSPDAAAAAPAPMVLAGCPRCMMYVMLSREDPRCPRCHNAVLLDFSEGDQRRPRQRR

SEQ ID NO: 1795 - DNA, 1704 bp, Zea mays subsp. mays
  misc_feature (1)..(1704): Ceres Seq. ID no. 15179117
aaaaaaaaacgtaagcagacttggccatagtccactgtccaccgcagctccgtcgaccgtcgtacagacgctgccggcgacgcgcgaagaagaggccgcgaagatggccgactcgccaacgatcgatgccgtctttcacaacgcggtcatcgtcaccatggatgatgcgttccgcgtcctccaggacggcgcggtcgccgtcgccggcgaccgcatcgccgctgtgggcccctccgctgatgtcctcgccgccttcccctgcgccgtgcagaccctcgacctgggtggccgcattgtccttccagagctcgtaaacacacacgtgcacacatcgcagcagctggcgcgagggatcgccgacgacgttgatctgatgacgtggctgcacgggaggatctggccctatgagtcacacatgacggaggaagactcctatgcctccaccctcctctgcggcattgaactcatccggtctggggtgacatgctttgcagaagcaggtgggcagtttgtttcagaaatggcacgtgcagtggagttattaggctttagagcgtgtttgacaaagtcaacaatggattgtggtgatggtttgcctccaaattggagttgctgctccactgatgattgcattcagtcacagaaggaactatatgaaaagcatcataatacagctgatgggcgtatcaggatatggtttgggttgagacagataatgaatgcaaccgatcgtttactgcttgaaacaagagatattgcccagaagctaaatactggaatccatatgcatattgcagaaataccatatgaaaatcaacttatacttcggaccaaaggaattgatcatggcacagtgacatatttagagaaaattgatttcctgaggagtaatttactggctgcccattctgtttggttgaatgtacctgagataggctttttttcaaaggctggtgttaaggtttctcactgtcctgcatctgccatgcgtatgttggggtttgctcctattagagaaatgctggattctggtgtttgtgtctctcttggtacagatggagcaccaagcaataatagaatgagcattgtggatgagatgtacttagcgtccctaattaacaaaggtcgtgaggcatatatcagtggaacaacaaacccaactgctcttcctgctgagacggtgctgaagatggctactattaatggtgcaaaagcagttctgtgggacaatgaaataggttcgctggaggttggcaaaaaggcggacttggtggtggtgaatccatttacatggtccatggtccccttacatgacagcattgccaacattgtctactgcatgcggacagagaatattgagtctgttatgtgcaatggtcggtggatcatgaaggatcataaaatcatgaatctcaatgaggaggaggtaatttcttcagctgtgaaaagagcgaacgacctccttgcacgagcaggcataaatctccccagacggatgaactacgtatagttattctcttgctattttgtcatgtatttgccagtttccaccatgccgcgctaatcctagtgctgcaagcttgcatgttggcccggagacatgtttgcaggatcgtagtcatcgcttgcagtttctaccagtgttgaatagaaaataatgtgcagttgtacatgtggcttcagtaataaaagcaccatggaagc

SEQ ID NO: 1796 - protein, 502 aa, Zea mays subsp. mays
  misc_feature (1)..(502): Ceres Seq. ID no. 15179118
KKNVSRLGHSPLSTAAPSTVVQTLPATREEEAAKMADSPTIDAVFHNAVIVTMDDAFRVLQDGAVAVAGDRIAAVGPSADVLAAFPCAVQTLDLGGRIVLPELVNTHVHTSQQLARGIADDVDLMTWLHGRIWPYESHMTEEDSYASTLLCGIELIRSGVTCFAEAGGQFVSEMARAVELLGFRACLTKSTMDCGDGLPPNWSCCSTDDCIQSQKELYEKHHNTADGRIRIWFGLRQIMNATDRLLLETRDIAQKLNTGIHMHIAEIPYENQLILRTKGIDHGTVTYLEKIDFLRSNLLAAHSVWLNVPEIGFFSKAGVKVSHCPASAMRMLGFAPIREMLDSGVCVSLGTDGAPSNNRMSIVDEMYLASLINKGREAYISGTTNPTALPAETVLKMATINGAKAVLWDNEIGSLEVGKKADLVVVNPFTWSMVPLHDSIANIVYCMRTENIESVMCNGRWIMKDHKIMNLNEEEVISSAVKRANDLLARAGINLPRRMNYV

SEQ ID NO: 1797 - protein, 468 aa, Zea mays subsp. mays
  misc_feature (1)..(468): Ceres Seq. ID no. 15179119
MADSPTIDAVFHNAVIVTMDDAFRVLQDGAVAVAGDRIAAVGPSADVLAAFPCAVQTLDLGGRIVLPELVNTHVHTSQQLARGIADDVDLMTWLHGRIWPYESHMTEEDSYASTLLCGIELIRSGVTCFAEAGGQFVSEMARAVELLGFRACLTKSTMDCGDGLPPNWSCCSTDDCIQSQKELYEKHHNTADGRIRIWFGLRQIMNATDRLLLETRDIAQKLNTGIHMHIAEIPYENQLILRTKGIDHGTVTYLEKIDFLRSNLLAAHSVWLNVPEIGFFSKAGVKVSHCPASAMRMLGFAPIREMLDSGVCVSLGTDGAPSNNRMSIVDEMYLASLINKGREAYISGTTNPTALPAETVLKMATINGAKAVLWDNEIGSLEVGKKADLVVVNPFTWSMVPLHDSIANIVYCMRTENIESVMCNGRWIMKDHKIMNLNEEEVISSAVKRANDLLARAGINLPRRMNYV

SEQ ID NO: 1798 - protein, 450 aa, Zea mays subsp. mays
  misc_feature (1)..(450): Ceres Seq. ID no. 15179120
MDDAFRVLQDGAVAVAGDRIAAVGPSADVLAAFPCAVQTLDLGGRIVLPELVNTHVHTSQQLARGIADDVDLMTWLHGRIWPYESHMTEEDSYASTLLCGIELIRSGVTCFAEAGGQFVSEMARAVELLGFRACLTKSTMDCGDGLPPNWSCCSTDDCIQSQKELYEKHHNTADGRIRIWFGLRQIMNATDRLLLETRDIAQKLNTGIHMHIAEIPYENQLILRTKGIDHGTVTYLEKIDFLRSNLLAAHSVWLNVPEIGFFSKAGVKVSHCPASAMRMLGFAPIREMLDSGVCVSLGTDGAPSNNRMSIVDEMYLASLINKGREAYISGTTNPTALPAETVLKMATINGAKAVLWDNEIGSLEVGKKADLVVVNPFTWSMVPLHDSIANIVYCMRTENIESVMCNGRWIMKDHKIMNLNEEEVISSAVKRANDLLARAGINLPRRMNYV

SEQ ID NO: 1799 - DNA, 1225 bp, Zea mays subsp. mays
  misc_feature (1)..(1225): Ceres Seq. ID no. 15179121
agaatcttctctcttgacaaggagcaagcctaatcccagaaccccacggtcgtgagaccctagctgccgtcgccgccgccgctgaccggcgacggcgatctagatgggggcgtcggcctccgtgctctcgttcccaacggccgccgcgttcccagcagccgccaccgccgtcgccggggccgccggctgcttcgcgctcggctacctcctggccttcacccgcctcccgcgccacgccgccggcccaggttcgggagggacctccgatgacgattccgaggatgactcggaagaagatgatgacgaaaactccggccgcagtcgcgcggcgaagcgggcgggagggcagaagagggccgggctccggctgctctactgggcacggaacgtggtgaccaagtccgactctgccagggaggcggaaaggtcccggtctcaggccgcggccagtcccctggagatcgagaaccttgctgagataatagaagatttcaaaatggtgttggttgtgaggaatgatctgaagatggggaaggggaagattgccgcacagtgcagtcatgcaactcttgggctattcaaaaaactccaacagagagctccaaaatcactaagaaggtgggagcggtgtgggcaagttaaagtggttgtgaaaatagaaagcgaggaagacatgctagttttacaagggagagcaaagtctttaaatctgccaactcacataaccatagacgctggaagaacacagattgctccaaattcaaggacagtcatggctattctggggccagctgatatggttgatgatgttactggcggtctgaagcttttgtagaaaaccaccttgtcagcattttcaacttgggtcttcatagagcagtgctgggactttgcaggccacagtggtctctgcacttgtactgatgtgcggcagaagaatgaaccttggccccgttggttgacctgagtttcttgtccatgaatttatttggaaggagagcttgcattcttttttcacttgtaccgaccgttatctttggagttgtgatgttagcagttcgaattctggtgttgacaacttatagaccatcatttcttctgtaacatagataagaaaatactatttgactattgtccatttccccttttttattttctttttaataattcgtgcagtagtggacacaatactgagttgctttggagaagtcatcttgattgcggc

SEQ ID NO: 1800 - protein, 243 aa, Zea mays subsp. mays
  misc_feature (1)..(243): Ceres Seq. ID no. 15179122
MGASASVLSFPTAAAFPAAATAVAGAAGCFALGYLLAFTRLPRHAAGPGSGGTSDDDSEDDSEEDDDENSGRSRAAKRAGGQKRAGLRLLYWARNVVTKSDSAREAERSRSQAAASPLEIENLAEIIEDFKMVLVVRNDLKMGKGKIAAQCSHATLGLFKKLQQRAPKSLRRWERCGQVKVVVKIESEEDMLVLQGRAKSLNLPTHITIDAGRTQIAPNSRTVMAILGPADMVDDVTGGLKLL

SEQ ID NO: 1801 - DNA, 1957 bp, Zea mays subsp. mays
  misc_feature (1)..(1957): Ceres Seq. ID no. 15179123
aactgattatattttataacaataaccacaccggctaagcgccactgcacacgtcactcgctgtccgttctagcataccgcaccagacttcggcgccggtccgcgagcagatcaacagatggccacggcgacctacctctcctcctccttctcctcgccgccgccgccgtcatcacgcgcccgcctgcggcggcagacgaccagggcgggcgcgtcggcggcgacggaccgcccgcgcgaggtgctgtccccgaaacgccggctcccgctgcgggaggtgccgggtgactacggcccgccggtgctgggcgcggtccgcgaccggttcgagtacttctacgggccgggcggccgcgacggcttcttcgcctcccgcgtgcgcgcgcacggctccaccgtggtgcggctcaacatgccgccgggccccttcgtggcgcgcgacccgcgcgtggtggcgctcctggacgccgcctccttcccggtgctcttcgacacctcgctcgtcgacaagacggacctgttcacgggcaccttcatgccctccaccgacctcaccggcggctaccgcatgctctcgtacatcgaccccgccgagcccagccacggcccgctcaaggcgctcctcttctacctcctctcgcaccgtcggcagcacgtgatccccaagttccgcgaggtgtacggcgacctcttcggggtcgtggagaacgagctcgcccgggtcggcaaggccgacttcggccaccacaacgacgccgccgccttctccttcctctgccaggcgctgctggggcgcgaccccgccgagtccgcgctccatggcgacgggcccaagctgatcaccaagtgggtgctgttccagctcagcccgctgctcagcctcggcctgcccaagcacctcgaggactccctgctccactcgttccgcctcccgccggcgctggtcaggaaggactacggccggctcgccgacttcttccgcgacgcggccaggaccgtggtcgacgagggcgagcgcctcggcattgcgcgggaggaggcggtgcacaacatcctcttcgccacgtgcttcaactccttcggcggcatgaaaatcctgttcccgtcgctcgtcaagtggctgggccgcgccggcgcgcgcgcgcacggccggctggccacggaggtgcgcgacgccgtgcgcgcccacgccggcgaggtcaccatgaaggcgctggcggagatgccgctggtggagtcggccgtgtacgaggcgctgcgcatcgagccccccgtggccatgcagtacggccgcgccaagcgggacatggtggtggagagccacgactacggcttcgaggtgcgcgagggcgagatgctcttcggctaccagcccatggccaccaaggacccgcgcgtcttcgcgcgcgccgaggagtacgtgcccgacaggttcctcggggaggacggcgcgcagctgctccgccacgtcgtctggtccaacgggcccgagacggcgtcgcccacgctgcaggacaagcagtgcgccggcaaggacttcgtcgtgctcatcgcgcgccttctcgtcgccgagctcttcctccgctacgactccttcgacgtccaggtcggcgcctccgcgctggggtcgtcggtcaccatcacctcgctcaagaaagccaccttctgagttatgagctctgatcgaccgtccgtcaaagttgctagaggcgggcacgtgcaccaccgaatccctctcagaacttttttttttttgtagtgctatgctactgtgcgatcgtcaggtataacaaaatgtatattcttagtatagtgagagagcattttccccaggaacattcggtgtctggagatttgatgtcaggaaaaatttgctagcgatctgagggagacatgcacctactgttcatgttgcttatccatgacccatccatctatgtaaaatggcctgagatat

SEQ ID NO: 1802 - protein, 516 aa, Zea mays subsp. mays
  misc_feature (1)..(516): Ceres Seq. ID no. 15179124
MATATYLSSSFSSPPPPSSRARLRRQTTRAGASAATDRPREVLSPKRRLPLREVPGDYGPPVLGAVRDRFEYFYGPGGRDGFFASRVRAHGSTVVRLNMPPGPFVARDPRVVALLDAASFPVLFDTSLVDKTDLFTGTFMPSTDLTGGYRMLSYIDPAEPSHGPLKALLFYLLSHRRQHVIPKFREVYGDLFGVVENELARVGKADFGHHNDAAAFSFLCQALLGRDPAESALHGDGPKLITKWVLFQLSPLLSLGLPKHLEDSLLHSFRLPPALVRKDYGRLADFFRDAARTVVDEGERLGIAREEAVHNILFATCFNSFGGMKILFPSLVKWLGRAGARAHGRLATEVRDAVRAHAGEVTMKALAEMPLVESAVYEALRIEPPVAMQYGRAKRDMVVESHDYGFEVREGEMLFGYQPMATKDPRVFARAEEYVPDRFLGEDGAQLLRHVVWSNGPETASPTLQDKQCAGKDFVVLIARLLVAELFLRYDSFDVQVGASALGSSVTITSLKKATF

SEQ ID NO: 1803 - protein, 418 aa, Zea mays subsp. mays
  misc_feature (1)..(418): Ceres Seq. ID no. 15179125
MPPGPFVARDPRVVALLDAASFPVLFDTSLVDKTDLFTGTFMPSTDLTGGYRMLSYIDPAEPSHGPLKALLFYLLSHRRQHVIPKFREVYGDLFGVVENELARVGKADFGHHNDAAAFSFLCQALLGRDPAESALHGDGPKLITKWVLFQLSPLLSLGLPKHLEDSLLHSFRLPPALVRKDYGRLADFFRDAARTVVDEGERLGIAREEAVHNILFATCFNSFGGMKILFPSLVKWLGRAGARAHGRLATEVRDAVRAHAGEVTMKALAEMPLVESAVYEALRIEPPVAMQYGRAKRDMVVESHDYGFEVREGEMLFGYQPMATKDPRVFARAEEYVPDRFLGEDGAQLLRHVVWSNGPETASPTLQDKQCAGKDFVVLIARLLVAELFLRYDSFDVQVGASALGSSVTITSLKKATF

SEQ ID NO: 1804 - protein, 377 aa, Zea mays subsp. mays
  misc_feature (1)..(377): Ceres Seq. ID no. 15179126
MPSTDLTGGYRMLSYIDPAEPSHGPLKALLFYLLSHRRQHVIPKFREVYGDLFGVVENELARVGKADFGHHNDAAAFSFLCQALLGRDPAESALHGDGPKLITKWVLFQLSPLLSLGLPKHLEDSLLHSFRLPPALVRKDYGRLADFFRDAARTVVDEGERLGIAREEAVHNILFATCFNSFGGMKILFPSLVKWLGRAGARAHGRLATEVRDAVRAHAGEVTMKALAEMPLVESAVYEALRIEPPVAMQYGRAKRDMVVESHDYGFEVREGEMLFGYQPMATKDPRVFARAEEYVPDRFLGEDGAQLLRHVVWSNGPETASPTLQDKQCAGKDFVVLIARLLVAELFLRYDSFDVQVGASALGSSVTITSLKKATF

SEQ ID NO: 1805 - DNA, 763 bp, Zea mays subsp. mays
  misc_feature (1)..(763): Ceres Seq. ID no. 15179171
actgtgagaaaggagagaagaaaaataaataggcgaaagctttggacattaaggaagacactggagagtagtaataatgccttctcattctggagatgacaatgttcttcaagttctcatcaagaacttcgatgttcttgctcttccattggttgctctcgtctaccctctatatgcatcagtgaaagcaatagagacaaaatcattagcagaagacgagcaatggctcacctattgggttctctacgcaatcatctccctcttcgaactcattttctccaaactcctcgaatggttcccgatatggccgttcttgaagctggtggggatatgctggctagtgctaccacagtttaatggagcagaacacgtctacagacatttcatcaggccattctacatgaatcctcaaagagcttccaccaatatttggtacgttcctcagaaaaagttcaacttctttcccaaacgtgacgacgacgatatcctcactgctgccgagaaatacatggaaaaacacggcaccgacgcatttgagcgaatgatcgtcaggaaggatagttatgaaagagggaggagaggaggaggtggaggaagcaataactacatgatctttgatgatgattataggtactaagtttaccaagttcttgtcgttttgatcggtcactgatctgatcttaaacctgtttggctacattattaagtttgtaagctggttgtctgacttttgtttatctctatgacttttataattgccagg

SEQ ID NO: 1806 - protein, 186 aa, Zea mays subsp. mays
  misc_feature (1)..(186): Ceres Seq. ID no. 15179172
MPSHSGDDNVLQVLIKNFDVLALPLVALVYPLYASVKAIETKSLAEDEQWLTYWVLYAIISLFELIFSKLLEWFPIWPFLKLVGICWLVLPQFNGAEHVYRHFIRPFYMNPQRASTNIWYVPQKKFNFFPKRDDDDILTAAEKYMEKHGTDAFERMIVRKDSYERGRRGGGGGSNNYMIFDDDYRY

SEQ ID NO: 1807 - DNA, 723 bp, Zea mays subsp. mays
  misc_feature (1)..(723): Ceres Seq. ID no. 15179206
atattcttctccttccgagtggtcgttagatcagatctcttcgtgttttacatttccaatggcgtcctcctgtgttgctaatctttctctgtcaggtgtgtctcaatctcattatgtcaaggcaaatggaatgtctaccgcaaagctcaactcgatttgtaaaacctctgcattgagtatccagaagagatcaaaccggagtcgcaagttttcagtttctgcagagtatgggagtaggagaggaagtggtggtggtgatttcgtagctggttttcttcttggtggtgctttgtttggtgctgcagcctatatctttgctccacaaatacgaagatcgataatgagtgaagaagatgagtatggtttcaagaagccagatcaaccaagttactacgatgaaggtttagagaaaacaagggagaccttgaacgagaaaatcggacagcttaactcagctattgacaatgtctcttcgcgtttaagaggtcgagcaaagaagacttcttccccggtcgaaactgatccagaagttgaagctactacttgagaaagaacacaaaatactttgcttcttctctgtttttttttttttccattcgtaattgatctgttgtgcttcttcttcttatctgttgctgctgtgcttcagttagaactcgtgcaaagtggaaaaatatacagtcttttggttttagtgaattttaatttggtttaactcaattc

SEQ ID NO: 1808 - protein, 181 aa, Zea mays subsp. mays
  misc_feature (1)..(181): Ceres Seq. ID no. 15179207
YSSPSEWSLDQISSCFTFPMASSCVANLSLSGVSQSHYVKANGMSTAKLNSICKTSALSIQKRSNRSRKFSVSAEYGSRRGSGGGDFVAGFLLGGALFGAAAYIFAPQIRRSIMSEEDEYGFKKPDQPSYYDEGLEKTRETLNEKIGQLNSAIDNVSSRLRGRAKKTSSPVETDPEVEATT

SEQ ID NO: 1809 - protein, 162 aa, Zea mays subsp. mays
  misc_feature (1)..(162): Ceres Seq. ID no. 15179208
MASSCVANLSLSGVSQSHYVKANGMSTAKLNSICKTSALSIQKRSNRSRKFSVSAEYGSRRGSGGGDFVAGFLLGGALFGAAAYIFAPQIRRSIMSEEDEYGFKKPDQPSYYDEGLEKTRETLNEKIGQLNSAIDNVSSRLRGRAKKTSSPVETDPEVEATT

SEQ ID NO: 1810 - protein, 138 aa, Zea mays subsp. mays
  misc_feature (1)..(138): Ceres Seq. ID no. 15179209
MSTAKLNSICKTSALSIQKRSNRSRKFSVSAEYGSRRGSGGGDFVAGFLLGGALFGAAAYIFAPQIRRSIMSEEDEYGFKKPDQPSYYDEGLEKTRETLNEKIGQLNSAIDNVSSRLRGRAKKTSSPVETDPEVEATT

SEQ ID NO: 1811 - DNA, 601 bp, Zea mays subsp. mays
  misc_feature (1)..(601): Ceres Seq. ID no. 15179221
agaatgttgtagcaaaagaacagttccaccatggatcagcttggagaaagaagtacaaatactatcattgatgtgtttcatcagtattccaatataagttccaagctcgacggagaagaagagagcatcgacataaagactacatgtcaactcctagatatgatggtcatgggatctacattccgacctcaagttgactactttgtcgagtatttaaagttccaaaacgactacaaagtcataaacctggatcagtggatgggtttttacaggttctgcaatgagataagttttccggagatgacggaatacaatccagggcgtgcatggccattggttatcgacaattttgttgagtggattcgtgaaaaacaagcctgaaagcacacgacaagtttcaggctggtgctaaggacttggtctgtttcatgacattcatgtggtgtctcaatccctctccactatctcctttaatttgtaccaccttgtttgcgtaataaattgtccgatgggctaagataaaaaaacacactgtttgttttctcaaactctcttgtaggggatgagtagtttttttttaatgaatgaaaatgcaacgttt

SEQ ID NO: 1812 - protein, 116 aa, Zea mays subsp. mays
  misc_feature (1)..(116): Ceres Seq. ID no. 15179222
MDQLGERSTNTIIDVFHQYSNISSKLDGEEESIDIKTTCQLLDMMVMGSTFRPQVDYFVEYLKFQNDYKVINLDQWMGFYRFCNEISFPEMTEYNPGRAWPLVIDNFVEWIREKQA

SEQ ID NO: 1813 - protein, 73 aa, Zea mays subsp. mays
  misc_feature (1)..(73): Ceres Seq. ID no. 15179223
MMVMGSTFRPQVDYFVEYLKFQNDYKVINLDQWMGFYRFCNEISFPEMTEYNPGRAWPLVIDNFVEWIREKQA

SEQ ID NO: 1814 - protein, 72 aa, Zea mays subsp. mays
  misc_feature (1)..(72): Ceres Seq. ID no. 15179224
MVMGSTFRPQVDYFVEYLKFQNDYKVINLDQWMGFYRFCNEISFPEMTEYNPGRAWPLVIDNFVEWIREKQA

SEQ ID NO: 1815 - DNA, 752 bp, Zea mays subsp. mays
  misc_feature (1)..(752): Ceres Seq. ID no. 15179225
aacatcgaaccatggagaaatcaactagaaccctaatgatcataaccatcgtgataacctccatgttggtagggtttggaagctcagatctggatcaagacagagaagagtgtacggaccagttgatagcactctcaccatgtctcccatacgtgggaggaaacgcaaaggctccaacaaaagattgttgtggtggttttgatcaggttataacaaagagtgagaagtgtgtttgcatattggtcaaagacaaagatgatcctaatcttggcctcaagtttaacgcaacactagctgctcatatccccaccctttgtcatattacagctcctaacatcaccaagtgtatttcgcttctgcatttatctccaaactcgacactggctaaagagtttgagagtttaggaaggattgaatatgaaggaaagaccaactccacatctccttcacataatgttaaagatgggactggaggaggaaaagctgaacaagtgaagagtactggagagaagaagagttggttggctgttgagcttttaatatttgctctcttctctcatcttctcttcattatcccttctttcacatcttcctcctttatttaatgttacgttcttctgctttaatttatgttatatagttacatctaaatttatatatgcatgtgcatgcatatgatttatgcatgtaagtgagtgcaaacttgtaatgggtattgagattttaataacgaaagcgtagcttttaatctt

SEQ ID NO: 1816 - protein, 200 aa, Zea mays subsp. mays
  misc_feature (1)..(200): Ceres Seq. ID no. 15179226
HRTMEKSTRTLMIITIVITSMLVGFGSSDLDQDREECTDQLIALSPCLPYVGGNAKAPTKDCCGGFDQVITKSEKCVCILVKDKDDPNLGLKFNATLAAHIPTLCHITAPNITKCISLLHLSPNSTLAKEFESLGRIEYEGKTNSTSPSHNVKDGTGGGKAEQVKSTGEKKSWLAVELLIFALFSHLLFIIPSFTSSSFI

SEQ ID NO: 1817 - protein, 197 aa, Zea mays subsp. mays
  misc_feature (1)..(197): Ceres Seq. ID no. 15179227
MEKSTRTLMIITIVITSMLVGFGSSDLDQDREECTDQLIALSPCLPYVGGNAKAPTKDCCGGFDQVITKSEKCVCILVKDKDDPNLGLKFNATLAAHIPTLCHITAPNITKCISLLHLSPNSTLAKEFESLGRIEYEGKTNSTSPSHNVKDGTGGGKAEQVKSTGEKKSWLAVELLIFALFSHLLFIIPSFTSSSFI

SEQ ID NO: 1818 - protein, 189 aa, Zea mays subsp. mays
  misc_feature (1)..(189): Ceres Seq. ID no. 15179228
MIITIVITSMLVGFGSSDLDQDREECTDQLIALSPCLPYVGGNAKAPTKDCCGGFDQVITKSEKCVCILVKDKDDPNLGLKFNATLAAHIPTLCHITAPNITKCISLLHLSPNSTLAKEFESLGRIEYEGKTNSTSPSHNVKDGTGGGKAEQVKSTGEKKSWLAVELLIFALFSHLLFIIPSFTSSSFI

SEQ ID NO: 1819 - DNA, 586 bp, Zea mays subsp. mays
  misc_feature (1)..(586): Ceres Seq. ID no. 15179243
agtcagttttactgagtctctgttagcttcttcttcttctagatctgatcgcgattttcgccggaagaggtcttgttatatctatgggtcgtggaaacagctgtggtggaggtcaaagctcactcaattatctctttggtggtggtggtgatgctcctcctcctaagcccgctccagctccagctccagctccttctgctgagccaaccaaggctactgcacctgcacctgcacctgtagctgtgactgcaactgctctcaccaccgctactaccagcgttgagcctgcagaggtcaacaagcagatccctgctggtatcaaaactcctgttaacaactatgctcgagctgaaggacagaacaccggaaacttcctcactgaccgtccttcgaccaaagtccatgcagctcctggaggtggatcatccttggattatcttttcactggtggcaagtaaagtataataaaaacattatgtgtaatgcaaatgcgtatccattgtctccttgttgcattcgcacactataaaaactgtttgatgtgagcccagcctttaatgataagaagtcggtttcttgtcaatct

SEQ ID NO: 1820 - protein, 124 aa, Zea mays subsp. mays
  misc_feature (1)..(124): Ceres Seq. ID no. 15179244
MGRGNSCGGGQSSLNYLFGGGGDAPPPKPAPAPAPAPSAEPTKATAPAPAPVAVTATALTTATTSVEPAEVNKQIPAGIKTPVNNYARAEGQNTGNFLTDRPSTKVHAAPGGGSSLDYLFTGGK

SEQ ID NO: 1821 - DNA, 1350 bp, Zea mays subsp. mays
  misc_feature (1)..(1350): Ceres Seq. ID no. 15179271
ctaatcggtcatctgatgctactgtttccaaatcatttcctgaagaatttgaggatttggaatctgtgaggaatcagagaataaagccagaatctctggaaggtgatctggcagttactggagaaatgaacaaagatgatgacaacgggcatttagtttcacagcaggaacatcgcttcttgagcaactcccctggttttgatattgcacaatcgtgggctaagtagcgtgtgatggcaagtggaagcagtaaaaatgatgagcttgatgctgtcgctcttcctgttggtgtaaaacttagcaaagttcagtctgatcattctccagatatgcagactgaaactcttggtgctgacacaactgttgctagtggacatgctgcctttggattatctttttctgatgttcgtttggagaaagtaatggacgtatgtagttctgcgatcacatttctgaggaatagaatggataggcctcgaaagcgtggttcaaactcattatccagccgggctgccctgatgcttgatgcagaaagagaaccagaaaagacatggagccccatagttgaaatacattatgtagggggaacttatagaggtagatgtcaagaaggtgtccctgaaggaaagggacgtctaaccttcagtgacggaagcttttatgatggactctggaggtatggtaagagatctggtttggggactctatttcacagtaacggtgatgtataccatggaacgtggagggatgaccttattcatggaaagggctggtactattttcacagcggtgaccgctggtttgcaaatttttggaagggcaaggctaatggtgagggtagattttatgccaatgatgggagtatcttctttggccatttccgaaatggatggcgccatggggagagcctgttggtagatgcaaacggttcaaggtggatcgaagtttgggctgatggtgtacttatcaacagaactaaaatggagaaataaggttcagatctaaatacattttcctgatgtttctaaaacttggctcctcagatggctacgcttcaaagtctcagatattgcaaggcactctggtccggagcctctctactgtacacgaagtcgtcctatattcagtcttgaaagtcgtaaataggtgcgctgttgaggtttcgatgccctaatttcaaaggggcagactgcaggcgtttctgtatataccactagactgcaagtatgggaggatgcctttgttcatacggctgatggatcaagctgggaacagctatatacccaactgtacctgaacgtgaagtgtgtttgattagttccactgataacccatagatattttcttgtc

SEQ ID NO: 1822 - protein, 252 aa, Zea mays subsp. mays
  misc_feature (1)..(252): Ceres Seq. ID no. 15179272
MASGSSKNDELDAVALPVGVKLSKVQSDHSPDMQTETLGADTTVASGHAAFGLSFSDVRLEKVMDVCSSAITFLRNRMDRPRKRGSNSLSSRAALMLDAEREPEKTWSPIVEIHYVGGTYRGRCQEGVPEGKGRLTFSDGSFYDGLWRYGKRSGLGTLFHSNGDVYHGTWRDDLIHGKGWYYFHSGDRWFANFWKGKANGEGRFYANDGSIFFGHFRNGWRHGESLLVDANGSRWIEVWADGVLINRTKMEK

SEQ ID NO: 1823 - protein, 220 aa, Zea mays subsp. mays
  misc_feature (1)..(220): Ceres Seq. ID no. 15179273
MQTETLGADTTVASGHAAFGLSFSDVRLEKVMDVCSSAITFLRNRMDRPRKRGSNSLSSRAALMLDAEREPEKTWSPIVEIHYVGGTYRGRCQEGVPEGKGRLTFSDGSFYDGLWRYGKRSGLGTLFHSNGDVYHGTWRDDLIHGKGWYYFHSGDRWFANFWKGKANGEGRFYANDGSIFFGHFRNGWRHGESLLVDANGSRWIEVWADGVLINRTKMEK

SEQ ID NO: 1824 - protein, 189 aa, Zea mays subsp. mays
  misc_feature (1)..(189): Ceres Seq. ID no. 15179274
MDVCSSAITFLRNRMDRPRKRGSNSLSSRAALMLDAEREPEKTWSPIVEIHYVGGTYRGRCQEGVPEGKGRLTFSDGSFYDGLWRYGKRSGLGTLFHSNGDVYHGTWRDDLIHGKGWYYFHSGDRWFANFWKGKANGEGRFYANDGSIFFGHFRNGWRHGESLLVDANGSRWIEVWADGVLINRTKMEK

SEQ ID NO: 1825 - DNA, 2433 bp, Zea mays subsp. mays
  misc_feature (1)..(2433): Ceres Seq. ID no. 15179301
atcgaacatcggagagatgcgcgcgggcggcggcgcgcctccccgacacgcaccactctccccgaccgcctccgccactgccacgctagtacccgcttctgtcgccatgcccacgccgcgcctcgtacacctccgccacctcctctcattccgctccgcccttccccgcccgctgggtcccaaccaaagccacccgctccccgggtcggttcacccgtcccttctcctcccccgtgccatggctggtgtcgcatacgcaggtctggcgacggggtcggcggaatacgaggaggtgctcgggtgcctcgcgtcgctgataacgcagaaggtgcgcgcggacaccggcaaccgcggcaaccagtgggagctcatgtccaagtacgtccagatactggaactggaggaatccatcgcgcagttgaaagtggttcacgttgctgggaccaaagggaagggttcaacatgcacatttgctgagtcaatccttcgatcatgtggtttccacactgggctcttcacttcaccacatttgatggatgtccgcgagcgatttcggcttgatgggctggacatttcagaagaaaagtttattaggtatttctggtggtgctggaagacactgaaggacaagactggtgatggtgtaccgatgccggcctactttaggttccttgcactgctagcattcaagatcttttcagatgagcagcaggtggatgtcgtagtgctcgaggttggtttgggagggaagtatgatgcaacaaatgtggtcagagcacctgtagtttgtggaataacatcccttgggtatgatcatatggaaattcttggaaacacacttggagaaattactagagagaaggctgggatactgaagaaaggagttccagcgtatacagttccacagccagaagaggcaatgtctgtactgatgaagcgagctactgaattgggtgtttctcttcaagttgtccaccctttggacccacagaaattagaggatcaacctcttggactccatggtgagcaccaatacatgaatgcaggtcttgcaattgcattggctaatacctggcttgagaggcaaggccatttgaacagattacatgtcaaacattctggtaccttgccagatcagttcatcaaagggctgtcgagtgcttgtctgcatggtcgaggacagattattccaaattcacaagtgaactcagaaaatgatcgtgattcttcattggttttctatttggatggggcacatagctcagaaagcatggaaatgtgtgcaagatggtttgcccacgctacaaatagtgatggaatacagccaggtccttcggagcagcctcacactgatagggattccaggaagtttctccttttcaattgcatgactgtaagagatcctcagagattgctcccacgtcttctagatacatgtgctcaaaatggtctccactttgagcatgccttatttgtgccaaaccaatcacagtacaacaagcttggatcccttgcatccccaccttcagagcgtgaacaaattgatttgtcatggcagttgtcgcttcaaaaggtgtggggaaacctgcctcatcacaataaaggtctaaatgatgtaaactctagcggagctacctcggtttttgaatctcttccattggcaattaaatggctaagggaaactgctcaacaaaatcaatcgattcagtttcaggtcttagttaccggctcgctgcaccttgtcggcgatgtcttaagattgctcaagaacaataagtaacttcatttggaatggcacattgttcagattgaactggctgcctacggaccactaaggcactaactggagcttatcgaaatttgtgattgggatagcacaacataccaacttggttacaaggctggaagaaattgaaagacatttttatttcagttccaatcagcggtaaaattgttgtatttaatcgtttctttaagttcctggcgttatgtgccatcacatcctcactccagaaggatgtaaccaatttttagaatgtacaattagtggattctcagcgacacatctttgtatgattggtggacggatctgcgtagcctttgcaacagacaatcaagaagacgctttgacggcctgctaattcatttttggtggaatttatggctggaacgaaataacagaattttccaaagtcagcatagaagcgttaatcaagtggcccttgcagtcatcagatattgctagtagctgaggtcttgttgatctggtctagtgggtttttgttcttctccttttattttttcttttttaccctctcccctccggttctctggttttgtatcttccatttctttgctctctaatctaatatatttcggagtggcaagtcttttgccccttcctttcaaaaaaaaaaaaacaattagtggatt

SEQ ID NO: 1826 - protein, 592 aa, Zea mays subsp. mays
  misc_feature (1)..(592): Ceres Seq. ID no. 15179302
SNIGEMRAGGGAPPRHAPLSPTASATATLVPASVAMPTPRLVHLRHLLSFRSALPRPLGPNQSHPLPGSVHPSLLLPRAMAGVAYAGLATGSAEYEEVLGCLASLITQKVRADTGNRGNQWELMSKYVQILELEESIAQLKVVHVAGTKGKGSTCTFAESILRSCGFHTGLFTSPHLMDVRERFRLDGLDISEEKFIRYFWWCWKTLKDKTGDGVPMPAYFRFLALLAFKIFSDEQQVDVVVLEVGLGGKYDATNVVRAPVVCGITSLGYDHMEILGNTLGEITREKAGILKKGVPAYTVPQPEEAMSVLMKRATELGVSLQVVHPLDPQKLEDQPLGLHGEHQYMNAGLAIALANTWLERQGHLNRLHVKHSGTLPDQFIKGLSSACLHGRGQIIPNSQVNSENDRDSSLVFYLDGAHSSESMEMCARWFAHATNSDGIQPGPSEQPHTDRDSRKFLLFNCMTVRDPQRLLPRLLDTCAQNGLHFEHALFVPNQSQYNKLGSLASPPSEREQIDLSWQLSLQKVWGNLPHHNKGLNDVNSSGATSVFESLPLAIKWLRETAQQNQSIQFQVLVTGSLHLVGDVLRLLKNNK

SEQ ID NO: 1827 - protein, 587 aa, Zea mays subsp. mays
  misc_feature (1)..(587): Ceres Seq. ID no. 15179303
MRAGGGAPPRHAPLSPTASATATLVPASVAMPTPRLVHLRHLLSFRSALPRPLGPNQSHPLPGSVHPSLLLPRAMAGVAYAGLATGSAEYEEVLGCLASLITQKVRADTGNRGNQWELMSKYVQILELEESIAQLKVVHVAGTKGKGSTCTFAESILRSCGFHTGLFTSPHLMDVRERFRLDGLDISEEKFIRYFWWCWKTLKDKTGDGVPMPAYFRFLALLAFKIFSDEQQVDVVVLEVGLGGKYDATNVVRAPVVCGITSLGYDHMEILGNTLGEITREKAGILKKGVPAYTVPQPEEAMSVLMKRATELGVSLQVVHPLDPQKLEDQPLGLHGEHQYMNAGLAIALANTWLERQGHLNRLHVKHSGTLPDQFIKGLSSACLHGRGQIIPNSQVNSENDRDSSLVFYLDGAHSSESMEMCARWFAHATNSDGIQPGPSEQPHTDRDSRKFLLFNCMTVRDPQRLLPRLLDTCAQNGLHFEHALFVPNQSQYNKLGSLASPPSEREQIDLSWQLSLQKVWGNLPHHNKGLNDVNSSGATSVFESLPLAIKWLRETAQQNQSIQFQVLVTGSLHLVGDVLRLLKNNK

SEQ ID NO: 1828 - protein, 557 aa, Zea mays subsp. mays
  misc_feature (1)..(557): Ceres Seq. ID no. 15179304
MPTPRLVHLRHLLSFRSALPRPLGPNQSHPLPGSVHPSLLLPRAMAGVAYAGLATGSAEYEEVLGCLASLITQKVRADTGNRGNQWELMSKYVQILELEESIAQLKVVHVAGTKGKGSTCTFAESILRSCGFHTGLFTSPHLMDVRERFRLDGLDISEEKFIRYFWWCWKTLKDKTGDGVPMPAYFRFLALLAFKIFSDEQQVDVVVLEVGLGGKYDATNVVRAPVVCGITSLGYDHMEILGNTLGEITREKAGILKKGVPAYTVPQPEEAMSVLMKRATELGVSLQVVHPLDPQKLEDQPLGLHGEHQYMNAGLAIALANTWLERQGHLNRLHVKHSGTLPDQFIKGLSSACLHGRGQIIPNSQVNSENDRDSSLVFYLDGAHSSESMEMCARWFAHATNSDGIQPGPSEQPHTDRDSRKFLLFNCMTVRDPQRLLPRLLDTCAQNGLHFEHALFVPNQSQYNKLGSLASPPSEREQIDLSWQLSLQKVWGNLPHHNKGLNDVNSSGATSVFESLPLAIKWLRETAQQNQSIQFQVLVTGSLHLVGDVLRLLKNNK

SEQ ID NO: 1829 - DNA, 1778 bp, Zea mays subsp. mays
  misc_feature (1)..(1778): Ceres Seq. ID no. 15179320
atcttcccatacgagctgtgtttctccaagttcgctgctggccatatcgacgtcgtcatcctcgatccagacgagtgcgtgtgccatctccacgggtcttcgacagatttagcaagaatgtttggaagaggatctcctaggatgaacttgatccaagctgcaactatgaaaaaaatatcccccagatctactactaacaagcgcaagaagagaacatcaccaaaaggtattttgttacctattcttgcttattttcttgtaatagttggtcgtcacatgctttattttcaagaagagaacatcacatgctttattttcttgtaatagttggtcgtcttagagcaaactggaatagtggactagaaaagggtttagttgaaattcttcaagatcacaacaatgattgttataagggtcaaaatgggtggtcatcggaagcatggaatagaattgtcaagttattccatgagaaattctcttatgtcacatttacaaaatgccaaatccaagataaagagaaagagttaaagagagactacaaggctcttaaagaggcaaggcaacaaagcggggtatcatgggatgagaggttgtgtagaatagaagcagaagaacccatttggaataacctcaccactagtaacgagagacttaagaagtttcggactaaatctttcccactatttgaggctttaggagagctatatgatggaaatattgctgagggaaccatgaattttacttctattgagccttctcgacctcctgtcacacaaccttgtcaaggtgctgctacacagccttctcaagctgctttcacacttacacaaccttctcaaatcgctttcacacaaccttctctagctgctttcgcacgaccttctcgaaccgcttttagacatccttctctagccgctttcccacagccttctcaagccgcttttgcacagccttctcaaaccattttcacacagccttctgaagccactttcacacagccttctgaagccactttcacacagccttctgaagccactttcacacagccttctcaagccgctttcacacaaccttctcaagctaatatctcacaagccatttgtgatgaagatgatgagctcagagtattggatccaccagcccctgcatcagtgagcaaaagggcaaaaaatgttggtactggtaattcaagaacaagaattaacaagcgtacacaagatgggaatgtggttgagatgatgggaaggtttctagaaatgaaagaaaaacaagctgaggcggatgaaagggccacaactaatgcaaatgaggatgatttccctattcaaacatgcattgctattgtggatggaatggaagagttttctgatgatgagaaggttgattcttatgatgtttttaaggatgcccaaaaccgggccattttcatgactgccaaagatgctacgcgcataaaatggttgaggaagaagattgcaagaacatgatatgatatatgaagctaaagtaatgaaggatgattttgtagtatcgtccagcataaagaaagaaagctgcaatttgtgctattgtcagagatggatatttaactttagcaatttgcaactcttaagtaatctgttaaattaaagatgagatcttgcagacttttcttattacctaatggattctcttattagctgattcaaatctaatcatgcatattgtagtaaggactatgtatgttgaatcaatgactctggttcaattttaaatatcacatgtgttttaagtttctc

SEQ ID NO: 1830 - protein, 393 aa, Zea mays subsp. mays
  misc_feature (1)..(393): Ceres Seq. ID no. 15179321
MLYFLVIVGRLRANWNSGLEKGLVEILQDHNNDCYKGQNGWSSEAWNRIVKLFHEKFSYVTFTKCQIQDKEKELKRDYKALKEARQQSGVSWDERLCRIEAEEPIWNNLTTSNERLKKFRTKSFPLFEALGELYDGNIAEGTMNFTSIEPSRPPVTQPCQGAATQPSQAAFTLTQPSQIAFTQPSLAAFARPSRTAFRHPSLAAFPQPSQAAFAQPSQTIFTQPSEATFTQPSEATFTQPSEATFTQPSQAAFTQPSQANISQAICDEDDELRVLDPPAPASVSKRAKNVGTGNSRTRINKRTQDGNVVEMMGRFLEMKEKQAEADERATTNANEDDFPIQTCIAIVDGMEEFSDDEKVDSYDVFKDAQNRAIFMTAKDATRIKWLRKKIART

SEQ ID NO: 1831 - protein, 251 aa, Zea mays subsp. mays
  misc_feature (1)..(251): Ceres Seq. ID no. 15179322
MNFTSIEPSRPPVTQPCQGAATQPSQAAFTLTQPSQIAFTQPSLAAFARPSRTAFRHPSLAAFPQPSQAAFAQPSQTIFTQPSEATFTQPSEATFTQPSEATFTQPSQAAFTQPSQANISQAICDEDDELRVLDPPAPASVSKRAKNVGTGNSRTRINKRTQDGNVVEMMGRFLEMKEKQAEADERATTNANEDDFPIQTCIAIVDGMEEFSDDEKVDSYDVFKDAQNRAIFMTAKDATRIKWLRKKIART

SEQ ID NO: 1832 - DNA, 648 bp, Zea mays subsp. mays
  misc_feature (1)..(648): Ceres Seq. ID no. 15179323
ctcaacttttattaatttgtttcttgctattcataagaatctttttttttttgtaaactattcataagaatcttcacgcaaaagaacactagagtggtgaagaagtagctactttgcctcttcttttttaatttaaggttttcatttcttttgtggaaggaaacaatgttgcaaaggttggtcttccttctcatcgttctcctgattcagtcctctttcctttttgagatttcctctgctctccaggaaggaaaaacatgtatactaaacgacaactgtgacgctggattacactgtgaaacatgtctagccaacaataatttgagacccagatgctctcgaacccagcccatcaaccccatctcaaaggtaaagggattgcctttcaacaagtatgcatggttaacaacacacaactcgtttgcaagattggggcaagtgtcaaaaaccggttctgtaattttggctcctactaatcaacaagattcggtcacaagccaactcgcgaagccggataaccggactgaaataaacgatataataaaagcgatatgttaaggaaataaacgattgtaaagagcgaatacaagaacgataagaaatcgtattcgctaatgaacatggagtcgagatataatctctttcctt

SEQ ID NO: 1833 - protein, 130 aa, Zea mays subsp. mays
  misc_feature (1)..(130): Ceres Seq. ID no. 15179324
MLQRLVFLLIVLLIQSSFLFEISSALQEGKTCILNDNCDAGLHCETCLANNNLRPRCSRTQPINPISKVKGLPFNKYAWLTTHNSFARLGQVSKTGSVILAPTNQQDSVTSQLAKPDNRTEINDIIKAIC

SEQ ID NO: 1834 - DNA, 1080 bp, Zea mays subsp. mays
  misc_feature (1)..(1080): Ceres Seq. ID no. 15179361
attttcttctccgtttctcactgaataatcagaaaacaaagttttagggtttttgcctgcggaggttttgaaggctacaatggcggaagagcacaagcacgaggaatcgatcatggagaagatcgcggagaagatccatggccacgataactcttcttcttcagattcagatgacgagaagaaagcgtcgtctatcaagacgaagatctaccgcctcttcggaagagaaaagcctgtccacaaggtcttcggtggcggaaaacctgccgacatattcctatggaggaacaagaaggtatcaggaggagtgttgggtgctgcaactctctcctggatcttattcgagttactccaatacaacctcctcactctcttcggtcacgtctcgatccttgctctcgctgtgttgttcttgtggtctagtgctactaccttcattcacaagacgcctcctcatattcctgaagtgcacatccccgaggatgttgttctccagcttgcctctgggctcaggattgaaatcaatcgtggttttactcttcttaggaacatcgcattaggaagagatctcaagaagttccttatggttgttgctgggttgtgggttttgtccaaagttggtagctcatgcaacttcttgaccttgatctatatcgcaactgttcttctcttcactgtccccgtgctttacgaaaagtatgaggataaagtagatgactttggtgaaaaggcaatgaaggagatcaagaagcaatacgcggtgctcgatgagaaggttttgagcaaggtgatgagcaaaatccccagaggagccttcaacaagaagaaggattagaagagtgtgtaagtttctctcacagcatcatatcatcatctgagtcttccagattgatagattaatctcgaagcattgtttctttacttgttattggaagccgtcttggtttaataaaccctttagtctctctctgtggattttattcggggttttaaccaaaatttacacaacatatgaatttgaatgaaccctattattgttgattctgttatggaataccatcgtcttctttatgatagtct

SEQ ID NO: 1835 - protein, 251 aa, Zea mays subsp. mays
  misc_feature (1)..(251): Ceres Seq. ID no. 15179362
MAEEHKHEESIMEKIAEKIHGHDNSSSSDSDDEKKASSIKTKIYRLFGREKPVHKVFGGGKPADIFLWRNKKVSGGVLGAATLSWILFELLQYNLLTLFGHVSILALAVLFLWSSATTFIHKTPPHIPEVHIPEDVVLQLASGLRIEINRGFTLLRNIALGRDLKKFLMVVAGLWVLSKVGSSCNFLTLIYIATVLLFTVPVLYEKYEDKVDDFGEKAMKEIKKQYAVLDEKVLSKVMSKIPRGAFNKKKD

SEQ ID NO: 1836 - protein, 240 aa, Zea mays subsp. mays
  misc_feature (1)..(240): Ceres Seq. ID no. 15179363
MEKIAEKIHGHDNSSSSDSDDEKKASSIKTKIYRLFGREKPVHKVFGGGKPADIFLWRNKKVSGGVLGAATLSWILFELLQYNLLTLFGHVSILALAVLFLWSSATTFIHKTPPHIPEVHIPEDVVLQLASGLRIEINRGFTLLRNIALGRDLKKFLMVVAGLWVLSKVGSSCNFLTLIYIATVLLFTVPVLYEKYEDKVDDFGEKAMKEIKKQYAVLDEKVLSKVMSKIPRGAFNKKKD

SEQ ID NO: 1837 - protein, 140 aa, Zea mays subsp. mays
  misc_feature (1)..(140): Ceres Seq. ID no. 15179364
MATITLLLQIQMTRRKRRLSRRRSTASSEEKSLSTRSSVAENLPTYSYGGTRRYQEECWVLQLSPGSYSSYSNTTSSLSSVTSRSLLSLCCSCGLVLLPSFTRRLLIFLKCTSPRMLFSSLPLGSGLKSIVVLLFLGTSH

SEQ ID NO: 1838 - DNA, 1315 bp, Zea mays subsp. mays
  misc_feature (1)..(1315): Ceres Seq. ID no. 15179393
ctcaatctcttgttcctctaatagtctaattcatcctcctctctttcttcgaagttactttctccccgtttcgtatctgatcagtcaatctcgaagatagatccggaggttttgagctgaaacagagagagaaagaaacagagtaatggcgaacagagattcagagagaggaggaggagggaagcagaacaacaccaacaacaacaacaacaactatatctatgacgaaagctccagcgatactcattggacttcgtggctcgttccactgatcgtcgtggcgaatctcgccgtctttatcgccgttatgttcgttaacgactgtcccaagaagatcatcggaccaaacaaagcttgcgtcgctagattcctcggaagattctcttttcagcccctcagagagaaccccctctttggcccttcttcctctacattggagagaatgggagcgttggagtgggggaaagtagtacatgagcatcaaggatggagactcgtcacttgtatgtggctacacgctggtatccttcatctcctcaccaatatgttgagtttgatcttcattggtatccgccttgagcagcagtttggcttcataagagtcgggcttatctacttaatctctggtctcggtggaagcatactctcctctcttttccttcaagaaagtatctccgttggtgcttctggtgctctctttggacttcttggagctatgttgtctgaacttctcaccaattggactatctatgctaacaaggcggctgctttgttcacactcctgttcatcatagcgatcaacttaggactaggcttgcttcctcgggttgacaatttcgcgcatattggagggtttataaccgggttctgcctcggttttatcctccttgtccggccacagcacggttgggaaagttcccgcaccaacacttcccttaccaaacgcaagtatagcatctaccagtacgttctgttcatagttgcagtccttatacttgtggtttgtttaactgttggatcagtgatgcttttcaaaggagagaatggtaacaaacattgcaaatggtgtcatcgcctcagctgtttccccacttcgaaatggacctgttaatcatcatcatcatcattatcctctaaaaattcttatatgtgttcttcttgtagcagataatttgtttgttctttttgcctttgacctctcttgccttatataacatacatgtatattaccaaataaaacgatattgttggattgaaggtacgtaatctcattatagtacatctgtataaatagtaatattgttggattaaaggt

SEQ ID NO: 1839 - protein, 321 aa, Zea mays subsp. mays
  misc_feature (1)..(321): Ceres Seq. ID no. 15179394
MANRDSERGGGGKQNNTNNNNNNYIYDESSSDTHWTSWLVPLIVVANLAVFIAVMFVNDCPKKIIGPNKACVARFLGRFSFQPLRENPLFGPSSSTLERMGALEWGKVVHEHQGWRLVTCMWLHAGILHLLTNMLSLIFIGIRLEQQFGFIRVGLIYLISGLGGSILSSLFLQESISVGASGALFGLLGAMLSELLTNWTIYANKAAALFTLLFIIAINLGLGLLPRVDNFAHIGGFITGFCLGFILLVRPQHGWESSRTNTSLTKRKYSIYQYVLFIVAVLILVVCLTVGSVMLFKGENGNKHCKWCHRLSCFPTSKWTC

SEQ ID NO: 1840 - protein, 267 aa, Zea mays subsp. mays
  misc_feature (1)..(267): Ceres Seq. ID no. 15179395
MFVNDCPKKIIGPNKACVARFLGRFSFQPLRENPLFGPSSSTLERMGALEWGKVVHEHQGWRLVTCMWLHAGILHLLTNMLSLIFIGIRLEQQFGFIRVGLIYLISGLGGSILSSLFLQESISVGASGALFGLLGAMLSELLTNWTIYANKAAALFTLLFIIAINLGLGLLPRVDNFAHIGGFITGFCLGFILLVRPQHGWESSRTNTSLTKRKYSIYQYVLFIVAVLILVVCLTVGSVMLFKGENGNKHCKWCHRLSCFPTSKWTC

SEQ ID NO: 1841 - protein, 222 aa, Zea mays subsp. mays
  misc_feature (1)..(222): Ceres Seq. ID no. 15179396
MGALEWGKVVHEHQGWRLVTCMWLHAGILHLLTNMLSLIFIGIRLEQQFGFIRVGLIYLISGLGGSILSSLFLQESISVGASGALFGLLGAMLSELLTNWTIYANKAAALFTLLFIIAINLGLGLLPRVDNFAHIGGFITGFCLGFILLVRPQHGWESSRTNTSLTKRKYSIYQYVLFIVAVLILVVCLTVGSVMLFKGENGNKHCKWCHRLSCFPTSKWTC

SEQ ID NO: 1842 - DNA, 2148 bp, Zea mays subsp. mays
  misc_feature (1)..(2148): Ceres Seq. ID no. 15179416
agagttcttgtagtcttctcggcctcccgctaaccgccatccaccacaccgagccccaaggcccccaactcccgagccctcggacctccatccctgttcccatggctgtgcctccccggtgggcgaacctcgacatcgacctggtgacggaaatcatgaaccgcgccccgtgcgtaatcgaccgcgcgcgaatggccgccgtctgccaggcgtggctcgaggctgtcgcgcgggcagagcctctgacatttcagctcccgtcgctcctcctcccgcccgcggacgtgactggcgtctactgctacctcagcggcttccgcgaccacaacatgtttcccgggccccgctacttcggctcgtacgacggcggctggttcttcctcgcctacggccagactcgcgggcaccggctgttcaacatccgcaccggagaatcctacgagctacccgacgggctcgcggatatcttcactaacgatatccacagcatggtcgtcctcgccgccaccctctcgttcccgcctcatcacccgggatgcgccgccgcgggcatcgtcacctaccagccggacctcgacgcgccgcgccaacgccacttcgcgttctggcgcccaggggataggatggccgtctgcgacgttgtgcccgccgtgccaattgagccgggtttggaaccggaggacgtcgtgtactaccgggactccttccatttcctcacacaaggtgggcatatcctcgtgtgcagtccgatctttgatggtgaggggcatatcccaggagcgcttttagagttaatgcgcttccaggaagcgtggtgcactgacgagcagttcgtccgcgctcgctacctcgtggtatcccgcggggagctgctggtggtcgtcaggctcgctgcccaccatcacgcgccgacttcgtcgttcaaagtattccgggtgattctaaagtctaagacctgccggttcgaggaggttgcattgtgtggccggatgctgttcttggggcgaggatgctccaggtcatacgaggtgagtcagtacccggggttcaaggacagcatcttcttcttggacgataggagcttctacgacgacgccgagatgatgttcggcggagtcaatgagaggcagtattcttgcaacgacatcggtaggtggtcgccggaagggctgctgccttcccacgtcgaattctacttcccggagcgggttccttcttacaactctcctccagcttggcttctcccttgagatattaactgaaaatgtatgcactgtttggttcgcatatttgaaccaaacggcacccagatgtgttctgtttgttgcgtctagcattccaactattctgtactttgtgctactctatgtgaaatgtgcagaaaagttggaatgccagacgccacttcacagatcaatgcttatgtgcaaagtgctaaggtggatggtgtcatcactgatttccctgggactgctcacagatacaaactgaactcctgcacgagcatgggaaagaacatgccactattcatgcagcctccgcaaccaggtggcctcctttcaaccattctcccagatgcacagccaccagcagcagcgccaatgccgctcttgacggacgctgacgtcgcagaaccagccctacctccggtcagcaacaccaccacgactgcatcgccttcgcatgccgccctcagaatgcgaacccatgtcttgagcatcaccacattgctgatgctatgtgcttccctcctcatctgaagatagtcctgctcaacatcatacgcggcgtggcgcattagagctgaggattttcacattgagctgctaatagcaattctttccaccacctttatgtagctattttttttcttgttctgtctggtgttttggaggatggatggatgttcagcttgatacctcaacggtggcacttgagcgtgctgccagctgtctctaggtacattttggtacatacgtgtggtgatacattgtccatgtcaccgtttctactgccaacctgcctgtggagggcaaaatattccctacaaacatacagtttagggtctgtcttggatacacctcaatcctatcagggtgttctatgattcggtaaggctgtctccaatagatctgtatattgttatac

SEQ ID NO: 1843 - protein, 415 aa, Zea mays subsp. mays
  misc_feature (1)..(415): Ceres Seq. ID no. 15179417
SSCSLLGLPLTAIHHTEPQGPQLPSPRTSIPVPMAVPPRWANLDIDLVTEIMNRAPCVIDRARMAAVCQAWLEAVARAEPLTFQLPSLLLPPADVTGVYCYLSGFRDHNMFPGPRYFGSYDGGWFFLAYGQTRGHRLFNIRTGESYELPDGLADIFTNDIHSMVVLAATLSFPPHHPGCAAAGIVTYQPDLDAPRQRHFAFWRPGDRMAVCDVVPAVPIEPGLEPEDVVYYRDSFHFLTQGGHILVCSPIFDGEGHIPGALLELMRFQEAWCTDEQFVRARYLVVSRGELLVVVRLAAHHHAPTSSFKVFRVILKSKTCRFEEVALCGRMLFLGRGCSRSYEVSQYPGFKDSIFFLDDRSFYDDAEMMFGGVNERQYSCNDIGRWSPEGLLPSHVEFYFPERVPSYNSPPAWLLP

SEQ ID NO: 1844 - protein, 382 aa, Zea mays subsp. mays
  misc_feature (1)..(382): Ceres Seq. ID no. 15179418
MAVPPRWANLDIDLVTEIMNRAPCVIDRARMAAVCQAWLEAVARAEPLTFQLPSLLLPPADVTGVYCYLSGFRDHNMFPGPRYFGSYDGGWFFLAYGQTRGHRLFNIRTGESYELPDGLADIFTNDIHSMVVLAATLSFPPHHPGCAAAGIVTYQPDLDAPRQRHFAFWRPGDRMAVCDVVPAVPIEPGLEPEDVVYYRDSFHFLTQGGHILVCSPIFDGEGHIPGALLELMRFQEAWCTDEQFVRARYLVVSRGELLVVVRLAAHHHAPTSSFKVFRVILKSKTCRFEEVALCGRMLFLGRGCSRSYEVSQYPGFKDSIFFLDDRSFYDDAEMMFGGVNERQYSCNDIGRWSPEGLLPSHVEFYFPERVPSYNSPPAWLLP

SEQ ID NO: 1845 - protein, 364 aa, Zea mays subsp. mays
  misc_feature (1)..(364): Ceres Seq. ID no. 15179419
MNRAPCVIDRARMAAVCQAWLEAVARAEPLTFQLPSLLLPPADVTGVYCYLSGFRDHNMFPGPRYFGSYDGGWFFLAYGQTRGHRLFNIRTGESYELPDGLADIFTNDIHSMVVLAATLSFPPHHPGCAAAGIVTYQPDLDAPRQRHFAFWRPGDRMAVCDVVPAVPIEPGLEPEDVVYYRDSFHFLTQGGHILVCSPIFDGEGHIPGALLELMRFQEAWCTDEQFVRARYLVVSRGELLVVVRLAAHHHAPTSSFKVFRVILKSKTCRFEEVALCGRMLFLGRGCSRSYEVSQYPGFKDSIFFLDDRSFYDDAEMMFGGVNERQYSCNDIGRWSPEGLLPSHVEFYFPERVPSYNSPPAWLLP

SEQ ID NO: 1846 - DNA, 2191 bp, Zea mays subsp. mays
  misc_feature (1)..(2191): Ceres Seq. ID no. 15179424
gctggtgcttctacggggcctggcgatttgaattcgagtggtgcgtgtatagagcgtgagagagagaaaagagagtggctcttgcgctctgcagtccagttcttgaatccagagctgcgattcgtgctcgcctgacgccgatgggccggagcctgagcccgctgctacggcaggagctggacaacctggacaaggacgctgacagccgccgcgccgccatgaaggcgctcaagtcgtacgccagacacctggactccaagtccatcccgcacttcctcgccgaggtctccgacaccaccgcggccggcgccggcgccggcagcggcatgcccaccggcggcgagttcaccatctcgctctacgaggtgctggcgcgggtgcacggccgcaacatcgtgccgcagatcggcaacatcatggccaccatcatgtgcacgctctcctccagcgggggctccttcccgctccaccaggcctgctccaaggtggtgcccgccatcgcgcggcacggcatcgacccctccgcgcccgacggggagaaggccggcatcatcgcctccctctgcaggccgctctgcagcgcgctcatgggggggagccaggacgtcggcgccgcctccggcgcggcgctgtgcctgaaggcgctcgtcgagtccagcaactggaggttcgcgtccggggagctggtgaacgaggtctgcctcaaggtggccggggcgatgcacgacagcgcgacgcggtcgaacgcgcacatgggcctcgccatggccctggtgaagcacaacggcctgatcgcggaggcgtacgcgaggtccatcgtgcgctccgggctgcagatccttgatggggacacggcggatagcagctcccagaagcgcctctcggcgatccagatgatcaatttcttcatgaagttcgttgaccccaggtgcctgtcttcagagcttggcagggtgattgatgtgatggagcggtgccagaatgaccgcatgcctttcgtccgaggtgctgcgtttgaggcatcacagagtgcgaggaacatcgccgcgcagaagggatcaagacatgaggttggcacgagcccgatggttggctccaatttccacaagagaagggagaagagcccatgccggagcctctggggtgccaagcgcagccctgcagcctccaccatggctgctgcttctccagtccagttcagatccccggaatcgcaggttgtggattcatccatcatgaacggcagcacgctccacgactcaccggtctcagtcgggcagtcctcttgcaactttgatcagagtcggcgcacgaaccggaggttgtggagcaatgatgccgttgatgtttctctgaaggatggcttgttcattcagctttgctcaaacagcaattcctatgaagatgacttgggcgaggtctgtgacagtgaagtgactgatgctaactttgagtgtaccaacacatttgcagggtttgtgtcaccaagccacaatggttccatatcaagggacaagactcccagtcccagggcttcagacaggccgataaatattgatgacgtgaagatatactcaacaccaaggaagcttctccgattgcttcaaagctcatacgactctgactctgctagcaacatcggacagtccactgcaaagctcagaggcttgtcgtcaccagatcaggaacacaagggactagtgatctcatctgaacagatgcaatctctgcattcagacaacaagggtgatgagatgaaagatgagaacgaaaccatttatatgcagaacagcaaaggtcggactcagactctatccaatgctgatgcatcagtactttccactaccgaggctgagaacacatccatcaagacttcccctgaaattgagctcaatggggatgatgtctgtattacaagcagcatagggaagaccaggaagtatagagcaaaattcactttgtttctgagcgtgatcgtgatctttttagcaatcatcaccatgctcatcaggatagagaatgatgatgattcagcgtaccttgtccccacttaatattttgtatgcttcattgctgtctgtttaaattcctatttttattttatcactatagagtggtttgtgttttgaacaattttgcagtcatctatccatgaatgacagcaaataattaaattagaattttcatgctc

SEQ ID NO: 1847 - protein, 637 aa, Zea mays subsp. mays
  misc_feature (1)..(637): Ceres Seq. ID no. 15179425
MGRSLSPLLRQELDNLDKDADSRRAAMKALKSYARHLDSKSIPHFLAEVSDTTAAGAGAGSGMPTGGEFTISLYEVLARVHGRNIVPQIGNIMATIMCTLSSSGGSFPLHQACSKVVPAIARHGIDPSAPDGEKAGIIASLCRPLCSALMGGSQDVGAASGAALCLKALVESSNWRFASGELVNEVCLKVAGAMHDSATRSNAHMGLAMALVKHNGLIAEAYARSIVRSGLQILDGDTADSSSQKRLSAIQMINFFMKFVDPRCLSSELGRVIDVMERCQNDRMPFVRGAAFEASQSARNIAAQKGSRHEVGTSPMVGSNFHKRREKSPCRSLWGAKRSPAASTMAAASPVQFRSPESQVVDSSIMNGSTLHDSPVSVGQSSCNFDQSRRTNRRLWSNDAVDVSLKDGLFIQLCSNSNSYEDDLGEVCDSEVTDANFECTNTFAGFVSPSHNGSISRDKTPSPRASDRPINIDDVKIYSTPRKLLRLLQSSYDSDSASNIGQSTAKLRGLSSPDQEHKGLVISSEQMQSLHSDNKGDEMKDENETIYMQNSKGRTQTLSNADASVLSTTEAENTSIKTSPEIELNGDDVCITSSIGKTRKYRAKFTLFLSVIVIFLAIITMLIRIENDDDSAYLVPT

SEQ ID NO: 1848 - protein, 611 aa, Zea mays subsp. mays
  misc_feature (1)..(611): Ceres Seq. ID no. 15179426
MKALKSYARHLDSKSIPHFLAEVSDTTAAGAGAGSGMPTGGEFTISLYEVLARVHGRNIVPQIGNIMATIMCTLSSSGGSFPLHQACSKVVPAIARHGIDPSAPDGEKAGIIASLCRPLCSALMGGSQDVGAASGAALCLKALVESSNWRFASGELVNEVCLKVAGAMHDSATRSNAHMGLAMALVKHNGLIAEAYARSIVRSGLQILDGDTADSSSQKRLSAIQMINFFMKFVDPRCLSSELGRVIDVMERCQNDRMPFVRGAAFEASQSARNIAAQKGSRHEVGTSPMVGSNFHKRREKSPCRSLWGAKRSPAASTMAAASPVQFRSPESQVVDSSIMNGSTLHDSPVSVGQSSCNFDQSRRTNRRLWSNDAVDVSLKDGLFIQLCSNSNSYEDDLGEVCDSEVTDANFECTNTFAGFVSPSHNGSISRDKTPSPRASDRPINIDDVKIYSTPRKLLRLLQSSYDSDSASNIGQSTAKLRGLSSPDQEHKGLVISSEQMQSLHSDNKGDEMKDENETIYMQNSKGRTQTLSNADASVLSTTEAENTSIKTSPEIELNGDDVCITSSIGKTRKYRAKFTLFLSVIVIFLAIITMLIRIENDDDSAYLVPT

SEQ ID NO: 1849 - protein, 575 aa, Zea mays subsp. mays
  misc_feature (1)..(575): Ceres Seq. ID no. 15179427
MPTGGEFTISLYEVLARVHGRNIVPQIGNIMATIMCTLSSSGGSFPLHQACSKVVPAIARHGIDPSAPDGEKAGIIASLCRPLCSALMGGSQDVGAASGAALCLKALVESSNWRFASGELVNEVCLKVAGAMHDSATRSNAHMGLAMALVKHNGLIAEAYARSIVRSGLQILDGDTADSSSQKRLSAIQMINFFMKFVDPRCLSSELGRVIDVMERCQNDRMPFVRGAAFEASQSARNIAAQKGSRHEVGTSPMVGSNFHKRREKSPCRSLWGAKRSPAASTMAAASPVQFRSPESQVVDSSIMNGSTLHDSPVSVGQSSCNFDQSRRTNRRLWSNDAVDVSLKDGLFIQLCSNSNSYEDDLGEVCDSEVTDANFECTNTFAGFVSPSHNGSISRDKTPSPRASDRPINIDDVKIYSTPRKLLRLLQSSYDSDSASNIGQSTAKLRGLSSPDQEHKGLVISSEQMQSLHSDNKGDEMKDENETIYMQNSKGRTQTLSNADASVLSTTEAENTSIKTSPEIELNGDDVCITSSIGKTRKYRAKFTLFLSVIVIFLAIITMLIRIENDDDSAYLVPT

SEQ ID NO: 1850 - DNA, 721 bp, Zea mays subsp. mays
  misc_feature (1)..(721): Ceres Seq. ID no. 15179445
aaggctgcaaatcgggatttggagaaaccctagaaaccggcgagagaggtgaaatctttggggtcgagacgatgaagagcgactggtttaacttgcatcagattgcgagaaactcattcatagctacatcaaccgtgtacgcttccaccgaattcaactttgatcgaagaagcttctgcttttttgcaccagacagatctggctttgtcgtgttgaaatcggagaaggagttcaacaatgcactcagcaaagctcaagatggatctttgccatcggttttctacttcactgctgcgtggtgtggaccttgcaggcttatcgctcctgtaatgttggagctcggtaagaaatatccacatgttactacatacaaggtcgacattgatgagggcggtctttcaaatgctcttgggaagttaaacgtctctgctgtgccaacaatgcaattcttcaaagggggcgtcaagaaagcagagcttgtaggtgcagatgtcattaagctcaggagtatcatggaacatctctacaagtgagagagactctgtcacttgttttactttttttttttgctgcgctgcgtcaaagtaatgcaccaagtgattacgaacaaggaaacaaaaaaaaaactttgttaagatcgtattgaagactcactgtctcacggcatttatttatcaatgtacataatttttgtgattttatcaaaataagtttcattgct

SEQ ID NO: 1851 - protein, 176 aa, Zea mays subsp. mays
  misc_feature (1)..(176): Ceres Seq. ID no. 15179446
GCKSGFGETLETGERGEIFGVETMKSDWFNLHQIARNSFIATSTVYASTEFNFDRRSFCFFAPDRSGFVVLKSEKEFNNALSKAQDGSLPSVFYFTAAWCGPCRLIAPVMLELGKKYPHVTTYKVDIDEGGLSNALGKLNVSAVPTMQFFKGGVKKAELVGADVIKLRSIMEHLYK

SEQ ID NO: 1852 - protein, 153 aa, Zea mays subsp. mays
  misc_feature (1)..(153): Ceres Seq. ID no. 15179447
MKSDWFNLHQIARNSFIATSTVYASTEFNFDRRSFCFFAPDRSGFVVLKSEKEFNNALSKAQDGSLPSVFYFTAAWCGPCRLIAPVMLELGKKYPHVTTYKVDIDEGGLSNALGKLNVSAVPTMQFFKGGVKKAELVGADVIKLRSIMEHLYK

SEQ ID NO: 1853 - DNA, 903 bp, Zea mays subsp. mays
  misc_feature (1)..(903): Ceres Seq. ID no. 15179471
agaaaccgttcgtctcccccccctctctatctctctctagatggctcgttccctctcccttccactttctctctctaaaaaccgactcacagcagctgcagcctccttcctcccttcatcgcacctcttatccatccgatctcaatcctccgaccgtcgcggcgatctgtacgaattcgacatcgccgcgtcgcaatcgccctcggatccgttaattcagaagctagaggacgccgttcaccggatagtcgtccgaagatcggcacccgattggctcccgtttgttcccggtgcgtcgtactgggtccctcctcctggatctggatctcagactcacgggatcgctcagctcgtcgcgaagctggctaatccgttaacggacgaagaatctctctccaccaattcgtctcgcggatggccttcctctgattatttccttaaaggtaaaaaggcctagctttgtggtgtaacaggtgtgcagcctctattgatggagactaagaccgaggcgacttcaaatacagagtctcactccgaggatgaggaagggtaaagagaatgctactttgaagaatcaaccggcgcgtttgggtgggttgttacttaaactaaagatagaagaaataatgaagctagatctattggatctgtagattgttatgaatatgagccggggtgattctgatgacgactgaaccaagtcaagtgcaaagactcgccatatagactgctttactaatcctgaaatgtaaaaaaaaaagaataatagtagttagttgtagccattttacctctgtttagtgtaatcttttccttttttaaaaagctgttgtatatatttctgtttcattgctctttcagttatgtaaccagtttatgataaactcgaatgaataaaagggg

SEQ ID NO: 1854 - protein, 138 aa, Zea mays subsp. mays
  misc_feature (1)..(138): Ceres Seq. ID no. 15179472
MARSLSLPLSLSKNRLTAAAASFLPSSHLLSIRSQSSDRRGDLYEFDIAASQSPSDPLIQKLEDAVHRIVVRRSAPDWLPFVPGASYWVPPPGSGSQTHGIAQLVAKLANPLTDEESLSTNSSRGWPSSDYFLKGKKA

SEQ ID NO: 1855 - protein, 70 aa, Zea mays subsp. mays
  misc_feature (1)..(70): Ceres Seq. ID no. 15179473
KPFVSPPSLSLSRWLVPSPFHFLSLKTDSQQLQPPSSLHRTSYPSDLNPPTVAAICTNSTSPRRNRPRIR

SEQ ID NO: 1856 - DNA, 754 bp, Zea mays subsp. mays
  misc_feature (1)..(754): Ceres Seq. ID no. 15179480
atatctaaatcctctttctctctgcttcttcaaattttacagtttctttctaaagctgccctcgaattttacattaattacataaatgtccggaatcttagttaattctgccgctaactccctccgcttctcgccgggagctagccttcctcatccgaagccaaccagatcacacaacggcagcgcgcggttccccaccggagccaactcgttcagagcttccgcgcagactctcaacgcggagccaaccgtaacggaatccgttcgccggcgagcgtcgagcctctacgatctgctgaaagtcaacgaaacggcgtccttgccggagatcaagacggcgtaccggagcctagctaaagtctaccatcccgacgcgtcggagtcggacgggcgagatttcatggagatccacaaagcttacgcgacgctcgcggatccgacgacgagagcgatctacgattcgacgctgggagcgcgacggagacgtgtgcaggtcggggcgatgggtcgggcgggtcgggtgtattcgacgacccggagatgggagacggatcagtgttggtgatttaggtttcaggtgatgatgactttgcagcaagggcacttttttttacttcatttttccccttttgttacttttttttttttccttttgtcgtgtattgggaaaattaaggggaaagataagttttatcagtccttagctttaactttgttaacataaattatgaatagagagatgtatattattttt

SEQ ID NO: 1857 - protein, 159 aa, Zea mays subsp. mays
  misc_feature (1)..(159): Ceres Seq. ID no. 15179481
MSGILVNSAANSLRFSPGASLPHPKPTRSHNGSARFPTGANSFRASAQTLNAEPTVTESVRRRASSLYDLLKVNETASLPEIKTAYRSLAKVYHPDASESDGRDFMEIHKAYATLADPTTRAIYDSTLGARRRRVQVGAMGRAGRVYSTTRRWETDQCW

SEQ ID NO: 1858 - DNA, 1434 bp, Zea mays subsp. mays
  misc_feature (1)..(1434): Ceres Seq. ID no. 15179482
ccctttcgtcgtcgttttcttcttcaatcagacttttccaatcgccgacaccgttttaacttcgatggttccgtcaccgttaaacccgcaacagatccaacaattcctctcctccgtcctctcacagcgcgggcccaactccgtcccctacgacgagtccaccaagtggctaatccgccaacatctcctcaacctaatctcatcctacccttccctcgagcccaaaacggcgacgtttatccacaacgacggccgttccgtaaacctcctccaagctgacggaaccatcccgatgccttaccacggcgtcacctacaacatccccgtcatcatctggctcctcgagtcctaccctcgccaccctccttgcgtctacgtgaaccccaccgccgacatgatcatcaaacggccccacgcgcacgtcaccccctcggggctcgtctctctcccttatctgcagaactgggtttaccctagctccaatctcgtggatctcgtctccgatctcggcgccgccttcgctaacgatcctcctctctactcccgccgccgtccggggccttcaccgactccgccgccgtacgagacacgcccccctcctcctccgacggttgatcagagaccgttcccgccgtctccttacggcagagtgcagcacgttcaccaccaggacgacgcggcggaggttttcaagagaaacgcgatcaacaagatggtggaggtggtccacggcgatctagcctcgatgcggagagataaggaagccgaggcggagtcgatgctgagcttgcaaggaggtttgaagaggagagaggaggagatcaacagagggatgaaggagatggtggaggagaaggagacgctcgagcagcagctacagatcatctccatgaacaccgacgttctcgactcttgggttagagagaatcaagggaagactaatactgtagttgatgttgataaggcctttgagtgtgtggacgcgctctctaagcagatgctggagtgtactgcttcggatttggctatcgaagatgcggtttatgcgttggacaaggggtttcaagacggggttgttccgtttgatcagtacttgaggagtgtgaggttgctttcgagggaacagttctttcatagagccacggggtctaaagttagagctgcgcagatggaagctcaggttcatgccatcgcaggtagattacattcgtgaatgtgtctttggtgtgatggttgttcctctgtcagattgaatttaaagtgtctatatggctatatatacatctgtgtggacatacaagtttgaatggatcacgcctttttcttctttgttcggtttgtgttataagagaaccatctacattttgtgttttattgatctctttgatgaacgttattttctagtgcatcaattaggcttgataatgttactct

SEQ ID NO: 1859 - protein, 403 aa, Zea mays subsp. mays
  misc_feature (1)..(403): Ceres Seq. ID no. 15179483
PFVVVFFFNQTFPIADTVLTSMVPSPLNPQQIQQFLSSVLSQRGPNSVPYDESTKWLIRQHLLNLISSYPSLEPKTATFIHNDGRSVNLLQADGTIPMPYHGVTYNIPVIIWLLESYPRHPPCVYVNPTADMIIKRPHAHVTPSGLVSLPYLQNWVYPSSNLVDLVSDLGAAFANDPPLYSRRRPGPSPTPPPYETRPPPPPTVDQRPFPPSPYGRVQHVHHQDDAAEVFKRNAINKMVEVVHGDLASMRRDKEAEAESMLSLQGGLKRREEEINRGMKEMVEEKETLEQQLQIISMNTDVLDSWVRENQGKTNTVVDVDKAFECVDALSKQMLECTASDLAIEDAVYALDKGFQDGVVPFDQYLRSVRLLSREQFFHRATGSKVRAAQMEAQVHAIAGRLHS

SEQ ID NO: 1860 - protein, 382 aa, Zea mays subsp. mays
  misc_feature (1)..(382): Ceres Seq. ID no. 15179484
MVPSPLNPQQIQQFLSSVLSQRGPNSVPYDESTKWLIRQHLLNLISSYPSLEPKTATFIHNDGRSVNLLQADGTIPMPYHGVTYNIPVIIWLLESYPRHPPCVYVNPTADMIIKRPHAHVTPSGLVSLPYLQNWVYPSSNLVDLVSDLGAAFANDPPLYSRRRPGPSPTPPPYETRPPPPPTVDQRPFPPSPYGRVQHVHHQDDAAEVFKRNAINKMVEVVHGDLASMRRDKEAEAESMLSLQGGLKRREEEINRGMKEMVEEKETLEQQLQIISMNTDVLDSWVRENQGKTNTVVDVDKAFECVDALSKQMLECTASDLAIEDAVYALDKGFQDGVVPFDQYLRSVRLLSREQFFHRATGSKVRAAQMEAQVHAIAGRLHS

SEQ ID NO: 1861 - protein, 306 aa, Zea mays subsp. mays
  misc_feature (1)..(306): Ceres Seq. ID no. 15179485
MPYHGVTYNIPVIIWLLESYPRHPPCVYVNPTADMIIKRPHAHVTPSGLVSLPYLQNWVYPSSNLVDLVSDLGAAFANDPPLYSRRRPGPSPTPPPYETRPPPPPTVDQRPFPPSPYGRVQHVHHQDDAAEVFKRNAINKMVEVVHGDLASMRRDKEAEAESMLSLQGGLKRREEEINRGMKEMVEEKETLEQQLQIISMNTDVLDSWVRENQGKTNTVVDVDKAFECVDALSKQMLECTASDLAIEDAVYALDKGFQDGVVPFDQYLRSVRLLSREQFFHRATGSKVRAAQMEAQVHAIAGRLHS

SEQ ID NO: 1862 - DNA, 774 bp, Zea mays subsp. mays
  misc_feature (1)..(774): Ceres Seq. ID no. 15179490
gcagattaaatttctaacgacagtcatgtctccgtcaacggcgtcgagtttcgtcggctccatcttagcggttgacgccgccgtctctaccgcgattcacacggcggcgaagccattcctcccgccgttcatcctccttctcctggaaatctccgccgatttccgattctccttcccggtctccctatccctcctcctctcccctccactgcgcccgttcctcatccccttcctcctcggcctcctcctcgatctaatcttcgtcggaatcgtgaagctgatcttccgccgcccacgtcccgcttacaatcatccctcgatgtccgcagcagtatcggccgatcattactcgtttccctccggccacgcgtcccgcgtcttcttcgtcgccgcctcggttcacttcttcacttctgaagctcaagtggtttctccgagctactctttcttagacgggtgggtgagggatcgtggagagggagttgtgaaaggagaggtcttggtgggtgtgtggatctgggctacggtgactgctgtgtcgaggattctgttagggaggcattacgtgctcgacgtagctgctggtgcttgcttgggtgttctagaagctctctttgctcttcggtttctgagattcgaacagatcttggggtggtggtaagaacattgttattgttgttgatgtaatgtttgtgacatcaattgatttttttttcgattacattgtcaaaaacaatggttacttttatgtttcatgaattcaaagtttgtgtc

SEQ ID NO: 1863 - protein, 219 aa, Zea mays subsp. mays
  misc_feature (1)..(219): Ceres Seq. ID no. 15179491
QIKFLTTVMSPSTASSFVGSILAVDAAVSTAIHTAAKPFLPPFILLLLEISADFRFSFPVSLSLLLSPPLRPFLIPFLLGLLLDLIFVGIVKLIFRRPRPAYNHPSMSAAVSADHYSFPSGHASRVFFVAASVHFFTSEAQVVSPSYSFLDGWVRDRGEGVVKGEVLVGVWIWATVTAVSRILLGRHYVLDVAAGACLGVLEALFALRFLRFEQILGWW

SEQ ID NO: 1864 - protein, 211 aa, Zea mays subsp. mays
  misc_feature (1)..(211): Ceres Seq. ID no. 15179492
MSPSTASSFVGSILAVDAAVSTAIHTAAKPFLPPFILLLLEISADFRFSFPVSLSLLLSPPLRPFLIPFLLGLLLDLIFVGIVKLIFRRPRPAYNHPSMSAAVSADHYSFPSGHASRVFFVAASVHFFTSEAQVVSPSYSFLDGWVRDRGEGVVKGEVLVGVWIWATVTAVSRILLGRHYVLDVAAGACLGVLEALFALRFLRFEQILGWW

SEQ ID NO: 1865 - protein, 113 aa, Zea mays subsp. mays
  misc_feature (1)..(113): Ceres Seq. ID no. 15179493
MSAAVSADHYSFPSGHASRVFFVAASVHFFTSEAQVVSPSYSFLDGWVRDRGEGVVKGEVLVGVWIWATVTAVSRILLGRHYVLDVAAGACLGVLEALFALRFLRFEQILGWW

SEQ ID NO: 1866 - DNA, 1347 bp, Zea mays subsp. mays
  misc_feature (1)..(1347): Ceres Seq. ID no. 15179513
aacatcctcatagcaattaaacaccactgttctatatataaagctaaacggctttagctttacatgagtttcttgttttttttttaacttatttaaaaaagtcctcacatatatttctagtgataagagggagaggtttctcagcttttgtaatggaggagaagatacaaggacaaaacaagctctctgtaagttctttggatcagaaagtgattgtgagaagaagcttacaagttcaaggatcatcagaggatcaaagatttgtccttgaggaagatacgatgcaacaaagtgaagacctttcttctgttttgtcattcaaagacccaaactttctaagactactctctcttcagacactccaaaagccgccttgggagctcggagactatctcccacatgaagttccagagtttcattcacccaccaactactaccatcagaacccatctctggaaagaatcaatgaagccatctcaagccaagaacttcagttaaacccacaacgcaagcgcagaaacaacaacaacttggtagcagcatcagtgagcagagagaagagaaagagaaagagaacgaaaccaacaaagaacacagaagagatggagagtcagagaatgacgcacataacggttgaacgaaaccgcagacgccaaatgaacgtttatctcagctcactccgctctctcatcccatcttcttacatccttaggggagaccaagcgtcaatagtaggaggagctatagacttcgtgaagctcctcgagcaacagttacaatcactcgaagcgcaaaagataactcaacaaactgataccaaagacatttcgttagaacaaagtagtaaactgagaatcgatgccacggtgatagagagccacgtgaatctcaagatacagtgccagaagaaacaaggacagcttctcagatcaatcatttggttagagaagcttaggttcactgttcttcatctcaacgttacatctccatgcaatgcatctgcctcttattccttcaacctcaaggtacttaagaaaactaataacacaaatgaataaaacaaaaactcaatctcatgtttgttatttctcagatggaggacgactgtactttgacatcggccgatgagataacggcggcggttcgtcagatattggactgctgagttaagaacaagaaacccaaaaagcaaaaaaagtaacgttctttcataataataataagatgttttgttggtatgtaattggagtcttctcggcatggcactttgactttatttaaaagggttactctacagtactggggacaccatttgatagatgtatatcaagtttgaccttcgtattc

SEQ ID NO: 1867 - protein, 301 aa, Zea mays subsp. mays
  misc_feature (1)..(301): Ceres Seq. ID no. 15179514
MEEKIQGQNKLSVSSLDQKVIVRRSLQVQGSSEDQRFVLEEDTMQQSEDLSSVLSFKDPNFLRLLSLQTLQKPPWELGDYLPHEVPEFHSPTNYYHQNPSLERINEAISSQELQLNPQRKRRNNNNLVAASVSREKRKRKRTKPTKNTEEMESQRMTHITVERNRRRQMNVYLSSLRSLIPSSYILRGDQASIVGGAIDFVKLLEQQLQSLEAQKITQQTDTKDISLEQSSKLRIDATVIESHVNLKIQCQKKQGQLLRSIIWLEKLRFTVLHLNVTSPCNASASYSFNLKVLKKTNNTNE

SEQ ID NO: 1868 - protein, 258 aa, Zea mays subsp. mays
  misc_feature (1)..(258): Ceres Seq. ID no. 15179515
MQQSEDLSSVLSFKDPNFLRLLSLQTLQKPPWELGDYLPHEVPEFHSPTNYYHQNPSLERINEAISSQELQLNPQRKRRNNNNLVAASVSREKRKRKRTKPTKNTEEMESQRMTHITVERNRRRQMNVYLSSLRSLIPSSYILRGDQASIVGGAIDFVKLLEQQLQSLEAQKITQQTDTKDISLEQSSKLRIDATVIESHVNLKIQCQKKQGQLLRSIIWLEKLRFTVLHLNVTSPCNASASYSFNLKVLKKTNNTNE

SEQ ID NO: 1869 - protein, 151 aa, Zea mays subsp. mays
  misc_feature (1)..(151): Ceres Seq. ID no. 15179516
MESQRMTHITVERNRRRQMNVYLSSLRSLIPSSYILRGDQASIVGGAIDFVKLLEQQLQSLEAQKITQQTDTKDISLEQSSKLRIDATVIESHVNLKIQCQKKQGQLLRSIIWLEKLRFTVLHLNVTSPCNASASYSFNLKVLKKTNNTNE

SEQ ID NO: 1870 - DNA, 916 bp, Zea mays subsp. mays
  misc_feature (1)..(916): Ceres Seq. ID no. 15179538
ctccgcgtcgtccaggtcctcctcagatccgccaaacccgccgagacagagagatcgccatggccgcggcatcgcctccgctcctccccaccacggtcgtcccggcggccgcagcacccccgacacccgcgcccacggccatatcctccgcggacgccaccgacaccaacccagcggcgatccgggccttcctctcccgcctcctcgacaccacccggcgcgcgctgtcgggcgcccgcccctggtccgagctcgcggaccgctcggctctctcccgcccggagtccctcgccgaggccacgtcccgcttgcgcaagaacctggcctacttccgcgtcaactacgccgccgtggccgcgctgtgcctcgccgcggcgctcctggcgcaccccttctccctggccgcgctgctggcgctgctcgccgcctggtgcctcctctacgtgctccgccccgccgacgcgccccccgtctccgcgttcggccgcaccttctccgaccgcgaggtgctcggaggcctcgccgccgcctccgcgttcgtcgtcttcctcacgtcggtgggctcgctcatcttctccgcgctcgcgctggggaccgccatcgtctgcgcgcacggcgcgtgccgcgtgcccgaggacctcttcctcgacgatgttgaccaggctgccggcggcaccggcaacccgctgctgtcgctcatcgcctccgccaccggaggccgcgtctgatcatgagtctgtaatagatgctatgcttgaggtcactgccattttcttgatcgattattttcgcggaactatttatgcagctcaaaaattatactactatatatagctacggaaagcaacaaatcaaaccatatactggagtttgtttatgtatcatcgagcagaaatatattcttgttattcgtagc

SEQ ID NO: 1871 - protein, 277 aa, Zea mays subsp. mays
  misc_feature (1)..(277): Ceres Seq. ID no. 15179539
LRVVQVLLRSAKPAETERSPWPRHRLRSSPPRSSRRPQHPRHPRPRPYPPRTPPTPTQRRSGPSSPASSTPPGARCRAPAPGPSSRTARLSPARSPSPRPRPACARTWPTSASTTPPWPRCASPRRSWRTPSPWPRCWRCSPPGASSTCSAPPTRPPSPRSAAPSPTARCSEASPPPPRSSSSSRRWARSSSPRSRWGPPSSARTARAACPRTSSSTMLTRLPAAPATRCCRSSPPPPEAASDHESVIDAMLEVTAIFLIDYFRGTIYAAQKLYYYI

SEQ ID NO: 1872 - protein, 241 aa, Zea mays subsp. mays
  misc_feature (1)..(241): Ceres Seq. ID no. 15179540
PRRPGPPQIRQTRRDREIAMAAASPPLLPTTVVPAAAAPPTPAPTAISSADATDTNPAAIRAFLSRLLDTTRRALSGARPWSELADRSALSRPESLAEATSRLRKNLAYFRVNYAAVAALCLAAALLAHPFSLAALLALLAAWCLLYVLRPADAPPVSAFGRTFSDREVLGGLAAASAFVVFLTSVGSLIFSALALGTAIVCAHGACRVPEDLFLDDVDQAAGGTGNPLLSLIASATGGRV

SEQ ID NO: 1873 - protein, 222 aa, Zea mays subsp. mays
  misc_feature (1)..(222): Ceres Seq. ID no. 15179541
MAAASPPLLPTTVVPAAAAPPTPAPTAISSADATDTNPAAIRAFLSRLLDTTRRALSGARPWSELADRSALSRPESLAEATSRLRKNLAYFRVNYAAVAALCLAAALLAHPFSLAALLALLAAWCLLYVLRPADAPPVSAFGRTFSDREVLGGLAAASAFVVFLTSVGSLIFSALALGTAIVCAHGACRVPEDLFLDDVDQAAGGTGNPLLSLIASATGGRV

SEQ ID NO: 1874 - DNA, 1338 bp, Zea mays subsp. mays
  misc_feature (1)..(1338): Ceres Seq. ID no. 15179546
acggtcttgacgcggcgtggtagaagagcgtagaaattgaggaagccgctggaattctttgtttgtttgtgggatgctggtggattcgcgcgatccttgctgctgcttgagtgtagagcacgaactcttgcagttacttcctctctcaagagcttcccctgctaaacaaaactctagcttctcggtcctgacctcaaggctggctggctggacgttgatcagcgaatatgatctcagcactccccgtgctctgctatggggtcacagctagtgcgttgcaatcccaatcgatccaccaaataacatcctctacaagtcctgcaccagctttcttcaaactatcaagggacccctcatccttgacaatttgtagcccacaaatacaggcaataagaatccaatcactgcggggcaaccaaaatttgaaggccatagagatgagtgaagggaatagatggggctcagggatgaagctggatgtcatgggcatgacaattggatgcttcatatcgtgtccactgcatacgaacaacctgctgcctttcatctctaagatcctcgggtattccatcattgctgcttccactgttggcaagctccctcagatactgaaaattttgaagcatggaagtgttagaggactaagtgtggcatcctttgaacttgaggttgtcggctacacaattgctttggcatattgtattcataaaggacttcccttttcagcttatggggagctagcttttctgttaatccaagcaattattttggttgcaatcatttactattactcaccaccaatgggaaccaaaacatggatgaaagctttattatattgtggaatggctccaacggttttggctggaaaaatagatcctgctctttttgaagtcctttatgcttcacagcatgctatcttcttttttgctagagttccacaaatatggaagaattttacgaataaagggaccggcgagctaagcttccttacctgtttcatgaactttgctggttccatcgtaagagtttttaccagcatccaggagaagactcccttaagtgtgatcatgggctccgcaatcggcatcgtcatgaatggtacgctcttgggtcagatagtactgtaccagaagcccgctccgaagaaacagaagaaagaagattaagcaacatggagaagctgcggaaagttcttcctggttgtttaggattctgttgcaacactcgctccacatctgaacaaatggcaccagtataggaagttgttggcaacttgttacgagaaaagaacatagttggactattgctatataacaacatttctgtgctgttgttttt

SEQ ID NO: 1875 - protein, 312 aa, Zea mays subsp. mays
  misc_feature (1)..(312): Ceres Seq. ID no. 15179547
MISALPVLCYGVTASALQSQSIHQITSSTSPAPAFFKLSRDPSSLTICSPQIQAIRIQSLRGNQNLKAIEMSEGNRWGSGMKLDVMGMTIGCFISCPLHTNNLLPFISKILGYSIIAASTVGKLPQILKILKHGSVRGLSVASFELEVVGYTIALAYCIHKGLPFSAYGELAFLLIQAIILVAIIYYYSPPMGTKTWMKALLYCGMAPTVLAGKIDPALFEVLYASQHAIFFFARVPQIWKNFTNKGTGELSFLTCFMNFAGSIVRVFTSIQEKTPLSVIMGSAIGIVMNGTLLGQIVLYQKPAPKKQKKED

SEQ ID NO: 1876 - protein, 242 aa, Zea mays subsp. mays
  misc_feature (1)..(242): Ceres Seq. ID no. 15179548
MSEGNRWGSGMKLDVMGMTIGCFISCPLHTNNLLPFISKILGYSIIAASTVGKLPQILKILKHGSVRGLSVASFELEVVGYTIALAYCIHKGLPFSAYGELAFLLIQAIILVAIIYYYSPPMGTKTWMKALLYCGMAPTVLAGKIDPALFEVLYASQHAIFFFARVPQIWKNFTNKGTGELSFLTCFMNFAGSIVRVFTSIQEKTPLSVIMGSAIGIVMNGTLLGQIVLYQKPAPKKQKKED

SEQ ID NO: 1877 - protein, 232 aa, Zea mays subsp. mays
  misc_feature (1)..(232): Ceres Seq. ID no. 15179549
MKLDVMGMTIGCFISCPLHTNNLLPFISKILGYSIIAASTVGKLPQILKILKHGSVRGLSVASFELEVVGYTIALAYCIHKGLPFSAYGELAFLLIQAIILVAIIYYYSPPMGTKTWMKALLYCGMAPTVLAGKIDPALFEVLYASQHAIFFFARVPQIWKNFTNKGTGELSFLTCFMNFAGSIVRVFTSIQEKTPLSVIMGSAIGIVMNGTLLGQIVLYQKPAPKKQKKED

SEQ ID NO: 1878 - DNA, 1966 bp, Zea mays subsp. mays
  misc_feature (1)..(1966): Ceres Seq. ID no. 15179554
aggatcccgttctcagtcgccagccactggtcacagccaccgtctccctccttccccaacctcgccgctatcaggtggtggatgcagcagcgcggccgctccttcaacagccgctctcggagcttctcccgcgcccgcgtcgccatcgagggatcttaatctcacagccatccctcgatcatttcgtttgaactcggttctgaaattctgactgacgaacgcacgcaacgacctaccgtgatggacgccgccgccgccgccaccgttgtttctcttaacgggaagatgggggccgaggagaggaaggcgcagaagagctactgggaggagcattccaagaacctcaccgtcgaggccatgatgctggactcccgcgccgctgatctcgacaaggaggagcgccctgaggtcctgtctttgcttccttcatatgaaggaaaatctgtactagagcttggtgctggaataggccgtttcactggagaactcgctaaaacagctgggaatgttcttgctctggattttattgaaagtgcaattaaaaagaatgaaagcattaatggtcactacaagaatgcatcctttatgtgtgctgatgtgacatcccaggacctagtgcttcaagctaactccatcgatctgatattttcaaattggttattgatgtatctttcagatgaagaggttgaacagctagttcagagaatggtgaaatggttgaaggttggtggctatatcttctttagggaatcttgcttccatcaatctggagattcaaaaaggaaagttaatccgacacactatagggaaccaagtttttatactaaggttttcaaagaatgccatacctttgatcaagatgggaattctttcgaactttctctggttacttgcaagtgtattggtgcttatgttaaaaacaagaaaaaccaaaaccagatatgttggctatggcaaaaggtccattcaacggaagataaaggatttcaaagatttttggacaatgtgcagtacaaagccagcggaatattacgttacgagcgcatttttggagaaggttatgtgagcactggtggagttgagactacaaaagaatttgtggacaagctggatctcaaacctggacataaggtgcttgatgttggatgtggaattgggggaggtgacttttatatggccgaaaaatatgatgctcatgttgttggtattgatctttccataaacatggtatcatttgcacttgagcgtgccattgggcgcagttgctcagtggagtttgaagttgctgattgcactacgaagacatacccagacaacacatttgatgtcatatacagccgtgatactatccttcacatacatgacaaaccctctttgttcaaaagtttcttcaactggctgaagcctgggggcaaggtccttatcagtgactactgcaggagtcctgggaaaccatcagaggaatttgcagcatacattaagcagagaggttatgacctacatgctgtggaggcttatggacagatgttgaagagtgctggttttcgtgatgtcattgctgaggatcgaactgatcagttccttggtgttttagataaggagttagctgaatttgaaaagaacaaggatgatttcctgtctgacttcacccaggaggactacgatgatatcgtgaacggttggaaggcaaaactgcagaggagttctgctggtgaacagaggtgggggctgttcatcgccaccaaatgatgatgaagatgtgggctggacatgaaaataaagcatccttttattataattgatgccgcattacttattctgaacccaggttgcctgggtcagtacctactaccctgtttatcgtagtacgtggagagaactcgtccagttttacattcccgtcactgctttgccggagtgctgtggcaatccataaagtctaataaagtaacaataagctgtctgc

SEQ ID NO: 1879 - protein, 502 aa, Zea mays subsp. mays
  misc_feature (1)..(502): Ceres Seq. ID no. 15179555
MDAAAAATVVSLNGKMGAEERKAQKSYWEEHSKNLTVEAMMLDSRAADLDKEERPEVLSLLPSYEGKSVLELGAGIGRFTGELAKTAGNVLALDFIESAIKKNESINGHYKNASFMCADVTSQDLVLQANSIDLIFSNWLLMYLSDEEVEQLVQRMVKWLKVGGYIFFRESCFHQSGDSKRKVNPTHYREPSFYTKVFKECHTFDQDGNSFELSLVTCKCIGAYVKNKKNQNQICWLWQKVHSTEDKGFQRFLDNVQYKASGILRYERIFGEGYVSTGGVETTKEFVDKLDLKPGHKVLDVGCGIGGGDFYMAEKYDAHVVGIDLSINMVSFALERAIGRSCSVEFEVADCTTKTYPDNTFDVIYSRDTILHIHDKPSLFKSFFNWLKPGGKVLISDYCRSPGKPSEEFAAYIKQRGYDLHAVEAYGQMLKSAGFRDVIAEDRTDQFLGVLDKELAEFEKNKDDFLSDFTQEDYDDIVNGWKAKLQRSSAGEQRWGLFIATK

SEQ ID NO: 1880 - protein, 487 aa, Zea mays subsp. mays
  misc_feature (1)..(487): Ceres Seq. ID no. 15179556
MGAEERKAQKSYWEEHSKNLTVEAMMLDSRAADLDKEERPEVLSLLPSYEGKSVLELGAGIGRFTGELAKTAGNVLALDFIESAIKKNESINGHYKNASFMCADVTSQDLVLQANSIDLIFSNWLLMYLSDEEVEQLVQRMVKWLKVGGYIFFRESCFHQSGDSKRKVNPTHYREPSFYTKVFKECHTFDQDGNSFELSLVTCKCIGAYVKNKKNQNQICWLWQKVHSTEDKGFQRFLDNVQYKASGILRYERIFGEGYVSTGGVETTKEFVDKLDLKPGHKVLDVGCGIGGGDFYMAEKYDAHVVGIDLSINMVSFALERAIGRSCSVEFEVADCTTKTYPDNTFDVIYSRDTILHIHDKPSLFKSFFNWLKPGGKVLISDYCRSPGKPSEEFAAYIKQRGYDLHAVEAYGQMLKSAGFRDVIAEDRTDQFLGVLDKELAEFEKNKDDFLSDFTQEDYDDIVNGWKAKLQRSSAGEQRWGLFIATK

SEQ ID NO: 1881 - protein, 463 aa, Zea mays subsp. mays
  misc_feature (1)..(463): Ceres Seq. ID no. 15179557
MMLDSRAADLDKEERPEVLSLLPSYEGKSVLELGAGIGRFTGELAKTAGNVLALDFIESAIKKNESINGHYKNASFMCADVTSQDLVLQANSIDLIFSNWLLMYLSDEEVEQLVQRMVKWLKVGGYIFFRESCFHQSGDSKRKVNPTHYREPSFYTKVFKECHTFDQDGNSFELSLVTCKCIGAYVKNKKNQNQICWLWQKVHSTEDKGFQRFLDNVQYKASGILRYERIFGEGYVSTGGVETTKEFVDKLDLKPGHKVLDVGCGIGGGDFYMAEKYDAHVVGIDLSINMVSFALERAIGRSCSVEFEVADCTTKTYPDNTFDVIYSRDTILHIHDKPSLFKSFFNWLKPGGKVLISDYCRSPGKPSEEFAAYIKQRGYDLHAVEAYGQMLKSAGFRDVIAEDRTDQFLGVLDKELAEFEKNKDDFLSDFTQEDYDDIVNGWKAKLQRSSAGEQRWGLFIATK

SEQ ID NO: 1882 - DNA, 1013 bp, Zea mays subsp. mays
  misc_feature (1)..(1013): Ceres Seq. ID no. 15179558
aattccaggagctacagtcacacaaccaaagcaactcggccagcgcgcgggccgggtcgcatgggcgacgccggcgacaagtgtgcgctgcggctggccgccaccgcgaggaagtggctggaggacgtccgcgtcgaccgcgaaggccgcgtccaccccgccgtagccagcggggggcaggcgctcacctggctcgcgactgccggcgcccgcgtctcgctggccgagcccggccgcgtcgtctgctcgctccgcgtgggcgccccgctcaccgacgcggaggggaggtggcacgccggggccatcgcggtggcggcggacaacgtgtgcgcggcggcggtcttcacggctctgggcgcggacgtgctcaccgtccagtacagcctgtcctacttctcgcccgcccatctcgacgtgcgtgcgatgcgtgcgtacaccacggcatagctagtcaacgcccaaacagcaacacagcacaccacactacaccccccagatctttcattttttttgttccgcgccacctgattcgatctgcgtcgctgctccggccggcctcaaatcgcaggaggaggtggagatggaggggcgagtggtgggccggaaggcggcgctggcggccgcgacggtggaggtgcggaagaaagagtccggcgagctggtggcgatctgcaggcagtggatggcacctctctcgacaacaaaggtcagcacaagcacgagcagcaagctctgaataaatgcagaacgtctctcgccaacacacacaacggttgctgcactcctccggcaggggcggcacggcaacaccactggttgttggtagagagagaatagctgacggtgcagaggatgttgaggcgccgaggcggcgccgcgacggcttgtactctcgaggtagggaatcacttctgtgccgccggcgaggcttgttcagcctgagccttctcctgtttgttaaacgcaaacatcaaatggagaagaaattcatccataaattacatgttgaacat

SEQ ID NO: 1883 - protein, 245 aa, Zea mays subsp. mays
  misc_feature (1)..(245): Ceres Seq. ID no. 15179559
FQELQSHNQSNSASARAGSHGRRRRQVCAAAGRHREEVAGGRPRRPRRPRPPRRSQRGAGAHLARDCRRPRLAGRARPRRLLAPRGRPAHRRGGEVARRGHRGGGGQRVRGGGLHGSGRGRAHRPVQPVLLLARPSRRACDACVHHGIASQRPNSNTAHHTTPPRSFIFFVPRHLIRSASLLRPASNRRRRWRWRGEWWAGRRRWRPRRWRCGRKSPASWWRSAGSGWHLSRQQRSAQARAASSE

SEQ ID NO: 1884 - protein, 148 aa, Zea mays subsp. mays
  misc_feature (1)..(148): Ceres Seq. ID no. 15179560
NSRSYSHTTKATRPARGPGRMGDAGDKCALRLAATARKWLEDVRVDREGRVHPAVASGGQALTWLATAGARVSLAEPGRVVCSLRVGAPLTDAEGRWHAGAIAVAADNVCAAAVFTALGADVLTVQYSLSYFSPAHLDVRAMRAYTTA

SEQ ID NO: 1885 - protein, 128 aa, Zea mays subsp. mays
  misc_feature (1)..(128): Ceres Seq. ID no. 15179561
MGDAGDKCALRLAATARKWLEDVRVDREGRVHPAVASGGQALTWLATAGARVSLAEPGRVVCSLRVGAPLTDAEGRWHAGAIAVAADNVCAAAVFTALGADVLTVQYSLSYFSPAHLDVRAMRAYTTA

SEQ ID NO: 1886 - DNA, 1057 bp, Zea mays subsp. mays
  misc_feature (1)..(1057): Ceres Seq. ID no. 15179562
cctttccttctcgagctcttcgtccttcctctgtttccttcattcacacagagagagaaacgcaaaagactaaaactttgagaaaagagatgatggagtgggacaatcagcagcaacccagtaacaatccttcttcaaatcttcaagggatcgacgttaatggaggctcaggctcaggaggaatgtacgtgaaggtgatgaccgacgagcagctcgaaactctgaggaagcagattgctatctacgccaccatttgtgaacgtctcgttgagatgcacaaaaccctcacttctcaacaagatcttgcagggagagtgggaggtctatatgcagacccaacgtttggtcacaagatgacaggtggtaggcagaggtggactcctactccagttcagcttcagattctggagcgtatattcgaccaagggatagggacaccgagcaagcagaagatcaaagacataaccgaggagctgagccagcacggtcagatagctgagcaaaacgtctacaattggtttcagaaccggcgcgctcggtccaagaggaagcagcatggtggtggtggtggtggtgttggttcttctagtaacaacaacaatggtgagtctgaggtggaggctgaaactgagacggtgaatgagaagagaaagatgccagagagtcttcttgtgtttcctgatggaaacaagaatgccattgggacaacaagtgctactagtcctaggcctgaagatctttacttccagagccctgagatgagctctgatcttgacttgctaggagtcctatcaaacccaagggatgagcattttgtaggaaagatggggctgtctgaaagctacaacatgtatgatcatgttgaagattatggcatgtagggctgattaatacaagctgaggaaattggttcagtagtcagtcttaagcagttttagacacttttttaattattttgtttctgggtgttttaatcaaagtttgtgatgcattactttaatgtttactggatttagagtgattcctatctccttaacaataataatatttttctaag

SEQ ID NO: 1887 - protein, 292 aa, Zea mays subsp. mays
  misc_feature (1)..(292): Ceres Seq. ID no. 15179563
FPSRALRPSSVSFIHTERETQKTKTLRKEMMEWDNQQQPSNNPSSNLQGIDVNGGSGSGGMYVKVMTDEQLETLRKQIAIYATICERLVEMHKTLTSQQDLAGRVGGLYADPTFGHKMTGGRQRWTPTPVQLQILERIFDQGIGTPSKQKIKDITEELSQHGQIAEQNVYNWFQNRRARSKRKQHGGGGGGVGSSSNNNNGESEVEAETETVNEKRKMPESLLVFPDGNKNAIGTTSATSPRPEDLYFQSPEMSSDLDLLGVLSNPRDEHFVGKMGLSESYNMYDHVEDYGM

SEQ ID NO: 1888 - protein, 263 aa, Zea mays subsp. mays
  misc_feature (1)..(263): Ceres Seq. ID no. 15179564
MMEWDNQQQPSNNPSSNLQGIDVNGGSGSGGMYVKVMTDEQLETLRKQIAIYATICERLVEMHKTLTSQQDLAGRVGGLYADPTFGHKMTGGRQRWTPTPVQLQILERIFDQGIGTPSKQKIKDITEELSQHGQIAEQNVYNWFQNRRARSKRKQHGGGGGGVGSSSNNNNGESEVEAETETVNEKRKMPESLLVFPDGNKNAIGTTSATSPRPEDLYFQSPEMSSDLDLLGVLSNPRDEHFVGKMGLSESYNMYDHVEDYGM

SEQ ID NO: 1889 - protein, 262 aa, Zea mays subsp. mays
  misc_feature (1)..(262): Ceres Seq. ID no. 15179565
MEWDNQQQPSNNPSSNLQGIDVNGGSGSGGMYVKVMTDEQLETLRKQIAIYATICERLVEMHKTLTSQQDLAGRVGGLYADPTFGHKMTGGRQRWTPTPVQLQILERIFDQGIGTPSKQKIKDITEELSQHGQIAEQNVYNWFQNRRARSKRKQHGGGGGGVGSSSNNNNGESEVEAETETVNEKRKMPESLLVFPDGNKNAIGTTSATSPRPEDLYFQSPEMSSDLDLLGVLSNPRDEHFVGKMGLSESYNMYDHVEDYGM

SEQ ID NO: 1890 - DNA, 1207 bp, Zea mays subsp. mays
  misc_feature (1)..(1207): Ceres Seq. ID no. 15179585
aacacaaacaagaagcttgcattgttcgtttgctcgatcgttgcagataatggagaaccctgctccgagtatcgtagtgccccccattgccgcacctgtatcagcgaacttcagcagactcgccttccgcaacctgtacatccgacggacgggtccagacagcagggagatggtgactgtggagggaagaagaggctctagtgatcagacaggcgacatgaggtacgtgagtgacttccccgtctacgatggccgtggctccgacgccgtcctggtggctcgcgtgcagggcgtcacaaccacgttcgggaactccaaccagttcttcaccgtcgccttcgaggccggcaggctcaagggctccacgctccttaccgaaggagtggtgacggatggatcagatgaatgggcaatctacggcgggaccggagagtttgctatggcgagaggtgtcgtcaaaagaaggtaccttgccgatagggatggcgccgggaacactgacgagctcagcatgcaggttttctgcccggtgtttggctcatcacagcaaccaaacaagcaggactccagcatctctgtcaccaagattgggttatggggtggcgaaggagggtcggcgcaggacatcacgacgacggagccaccgcagcgcctgcacagcctcaccgttcgtgccggtggcgccgtcgactccatcgagttcacgtatactgacagaggtggccagaggcgcgccgctgggcgatggggtggacttggcggcaaccttcgaacgatcgatcttggcgacgccgaggatgtcagggaggtctcaggaacgtacggcacatttgaaggcgccaccacgctgacctcgttcagaattctcaccagcagcaggacatgggggccatggggcgtcgagaacgggacgcggttctgcatcaccgcgccggtcggcagcagcatcgtggggttctatggacgcgcgaccagcaggctcgtcgctgcgcttggtgtttacctgcgccgactttgatttgatctgaacagcaggctacctactagcaattgcctgctcgatcaattatctttcgtaccctttattattaatataatctcgatcggtcatcgtcctcctatgtcaatgtcaaataaaggtcatgtggtcatcgatattgttggatttatgggcttggtctaattaagaaattcaattaatttctag

SEQ ID NO: 1891 - protein, 338 aa, Zea mays subsp. mays
  misc_feature (1)..(338): Ceres Seq. ID no. 15179586
TQTRSLHCSFARSLQIMENPAPSIVVPPIAAPVSANFSRLAFRNLYIRRTGPDSREMVTVEGRRGSSDQTGDMRYVSDFPVYDGRGSDAVLVARVQGVTTTFGNSNQFFTVAFEAGRLKGSTLLTEGVVTDGSDEWAIYGGTGEFAMARGVVKRRYLADRDGAGNTDELSMQVFCPVFGSSQQPNKQDSSISVTKIGLWGGEGGSAQDITTTEPPQRLHSLTVRAGGAVDSIEFTYTDRGGQRRAAGRWGGLGGNLRTIDLGDAEDVREVSGTYGTFEGATTLTSFRILTSSRTWGPWGVENGTRFCITAPVGSSIVGFYGRATSRLVAALGVYLRRL

SEQ ID NO: 1892 - protein, 322 aa, Zea mays subsp. mays
  misc_feature (1)..(322): Ceres Seq. ID no. 15179587
MENPAPSIVVPPIAAPVSANFSRLAFRNLYIRRTGPDSREMVTVEGRRGSSDQTGDMRYVSDFPVYDGRGSDAVLVARVQGVTTTFGNSNQFFTVAFEAGRLKGSTLLTEGVVTDGSDEWAIYGGTGEFAMARGVVKRRYLADRDGAGNTDELSMQVFCPVFGSSQQPNKQDSSISVTKIGLWGGEGGSAQDITTTEPPQRLHSLTVRAGGAVDSIEFTYTDRGGQRRAAGRWGGLGGNLRTIDLGDAEDVREVSGTYGTFEGATTLTSFRILTSSRTWGPWGVENGTRFCITAPVGSSIVGFYGRATSRLVAALGVYLRRL

SEQ ID NO: 1893 - protein, 282 aa, Zea mays subsp. mays
  misc_feature (1)..(282): Ceres Seq. ID no. 15179588
MVTVEGRRGSSDQTGDMRYVSDFPVYDGRGSDAVLVARVQGVTTTFGNSNQFFTVAFEAGRLKGSTLLTEGVVTDGSDEWAIYGGTGEFAMARGVVKRRYLADRDGAGNTDELSMQVFCPVFGSSQQPNKQDSSISVTKIGLWGGEGGSAQDITTTEPPQRLHSLTVRAGGAVDSIEFTYTDRGGQRRAAGRWGGLGGNLRTIDLGDAEDVREVSGTYGTFEGATTLTSFRILTSSRTWGPWGVENGTRFCITAPVGSSIVGFYGRATSRLVAALGVYLRRL

SEQ ID NO: 1894 - DNA, 789 bp, Zea mays subsp. mays
  misc_feature (1)..(789): Ceres Seq. ID no. 15179603
gagaaatcaatcaatcacagatctgttttcgcatctgcatcttcttcgaaacatcaaacaccatggcgatccccttagctaagcttctgatctccgccgttgcggttttcatgctcgtctccgcttcgttcgcgacctctgaaatgccgttcatggtggttcacaagaaagctactctcaacaggctcaaatctggcgccgagcgtgtcctcgtttccttcgatatctataaccaaggatctgcggcggcgtatgatgtgactctgactgacaatacctgggataagaaaacttttgaagttgtgaatggaaacacttcaagaacatgggagagacttgatgcaggaggtattctgtctcactctttcgaattagaggccagggttaaaggacgcttccatggtgctcctgctcttgttactttccacatccccacaaaggcaactctacagcaagcgtactcaactccattactacctctagacatcctcgcagacgtgcctccaacagacctgcttgctctggcaaagaggatgttggcaaaatatggatcactcgtttcagtgatctccatggtggttttgttcgtacacttggtagcaacaccttcatcgaagtccaatgcagcaaaagggagcagcaagaagaaacgctaaattagtgaaacgatggtgagaaaggtttgcatggtgctttgttgtgtttagcagttaagcactgtttcagaacttgtacgaattagagaatatactttaattttggtgtttcagaggactatcttaaagagtt

SEQ ID NO: 1895 - protein, 217 aa, Zea mays subsp. mays
  misc_feature (1)..(217): Ceres Seq. ID no. 15179604
EINQSQICFRICIFFETSNTMAIPLAKLLISAVAVFMLVSASFATSEMPFMVVHKKATLNRLKSGAERVLVSFDIYNQGSAAAYDVTLTDNTWDKKTFEVVNGNTSRTWERLDAGGILSHSFELEARVKGRFHGAPALVTFHIPTKATLQQAYSTPLLPLDILADVPPTDLLALAKRMLAKYGSLVSVISMVVLFVHLVATPSSKSNAAKGSSKKKR

SEQ ID NO: 1896 - protein, 197 aa, Zea mays subsp. mays
  misc_feature (1)..(197): Ceres Seq. ID no. 15179605
MAIPLAKLLISAVAVFMLVSASFATSEMPFMVVHKKATLNRLKSGAERVLVSFDIYNQGSAAAYDVTLTDNTWDKKTFEVVNGNTSRTWERLDAGGILSHSFELEARVKGRFHGAPALVTFHIPTKATLQQAYSTPLLPLDILADVPPTDLLALAKRMLAKYGSLVSVISMVVLFVHLVATPSSKSNAAKGSSKKKR

SEQ ID NO: 1897 - protein, 181 aa, Zea mays subsp. mays
  misc_feature (1)..(181): Ceres Seq. ID no. 15179606
MLVSASFATSEMPFMVVHKKATLNRLKSGAERVLVSFDIYNQGSAAAYDVTLTDNTWDKKTFEVVNGNTSRTWERLDAGGILSHSFELEARVKGRFHGAPALVTFHIPTKATLQQAYSTPLLPLDILADVPPTDLLALAKRMLAKYGSLVSVISMVVLFVHLVATPSSKSNAAKGSSKKKR

SEQ ID NO: 1898 - DNA, 1004 bp, Zea mays subsp. mays
  misc_feature (1)..(1004): Ceres Seq. ID no. 15179607
aatatttgtgtgattcatccaaaccctaaaaagcgggtttaaaggaagggaccattttgtcgttatttctcagaagatgaactcactcgctatccgagtttccaagcttctgagatcctctccgatatctcctcctctaggcaatcaatcccctcttctttcacctaaatcatctgggagtgtagcagtcactgcttggaggtcttggttctcgactggtcccatcgacgaggaagggttggaagaagattttgaagaaaccatctcagaaagacccgccgagcttcagcctcatggtgttgatccccgtaaaggttggggctttcgcggtgtccacagggccatcatttgtgggaaggtagggcaagcaccattacagaagatcttgaggaacgggcggacagtgaccatcttcactgttggaacaggcggcatgtttgatcagaagcttatgggagcaactaaccagcctaaacctgctcagtggcatagaatcgctgtccacaacgaagtgcttggctcttacgctgtccaaaagctcgctaaaaactcgtcggtttatgtcgaaggtgatattgagactagagtgtataatgacagcatcagcagtgaagtgaagagtatccctgagatttgcattcgtcgtgatggcaagattcggctgatcaaatacggggaaagcgttagcaagatctctttcgatgagctaaaagaaggattgatttagtcggagcaagaatatccctgtggccggaggacacactgattcaacgttttggttgtccattgtgagagagcactgagttttttcttatgaatattaaggccatttatgtaattgtcgatcaaaactaagctagttctgcgtctgttccttagtataagctgctcgtcaccaaacacattttgtcgggatggtttttatcatagctgtactactgccgatcagtaatttagcctgctaaattacaaatttgatgaagactctttttttgttctcatac

SEQ ID NO: 1899 - protein, 216 aa, Zea mays subsp. mays
  misc_feature (1)..(216): Ceres Seq. ID no. 15179608
MNSLAIRVSKLLRSSPISPPLGNQSPLLSPKSSGSVAVTAWRSWFSTGPIDEEGLEEDFEETISERPAELQPHGVDPRKGWGFRGVHRAIICGKVGQAPLQKILRNGRTVTIFTVGTGGMFDQKLMGATNQPKPAQWHRIAVHNEVLGSYAVQKLAKNSSVYVEGDIETRVYNDSISSEVKSIPEICIRRDGKIRLIKYGESVSKISFDELKEGLI

SEQ ID NO: 1900 - DNA, 1438 bp, Zea mays subsp. mays
  misc_feature (1)..(1438): Ceres Seq. ID no. 15179613
attacttaacccattttgccaatcaatcactcttcacttcttcccactcctacttttttcctttctaagcaatctctctctctcatactatctgcacagcactactaacagagctatttgctatattgtaaaaggaagatgtttggacaaagcttcgcggaggatcttgattgtggcaacttctttgacaacatggacgatcttcttgattttcccggtggtgatatcgatgtcggtttcggcataggtgactccgactcttttcctaacatctggactactcatcaggacacatggcctgcagcttctgatcctctcttcgcttccaacacaaactctgactcatcacctgagctctatgttccgtttgaagatattgttaaggtggaaagaccaaaatgctttgtagaggaatccttagttgagaagaaggaagattcgtttttcacaaacacggattcatcatcttctcatagccaattcaggagctcaagtccagtgtcggtactcgaaagcagctcctcatcgtctcatacaaccaacacaacctcacttgtcctccctggaaagcacggtcgtccacgcacaaaacgtcctcgtccacaggtccaggagaaagataaagtcaacgacaatgtctttggggcggattcgcgcctcatcattagaataccaaagcagtttctctctgaccacagcaagatgataaccaagaagaagaagaagaaggccaaggttgtttcttcatcttcttggtcggagattgatcttgaaaccaatggaaacaacaatgtagattcgtgttcttcagagcagaatcctgttaggaaatgtatgcactgtgaggtcaccaagaccccacaatggaggctcgggcctatgggcccaaagacgctttgcaatgcttgcgatgtacgttacaaatcgggaaggcttttcccggagtaccggccagctgctagcccaacgtttactccagctcttcactcaaactcccacaagaaggtggctgaaatgagaaacaagagatgcagcaatggaagctacacaaacgaagagaatgatctgcatgatctggttttgaacaatgcctacattggcataggagtaggaaagagtcagagagtagaaaagttttagctttagaagagatggatgaagaggagcaatcaattgaggaaggggtcaaagttagatgagagttgattgtgttgtattttgtattatttgtagtgtgaatgggcaaaactcttgaaacaaaggaagagtaagttggggaagagcagaagattttgaagatactagagagagagttaggtgttgaattttacattaaatcttcctctcctttttcttcctttcaattctttgtacttttattgtgaggattctttttgtagttgatttgtttagctaaattattatttttgtttttgtt

SEQ ID NO: 1901 - protein, 333 aa, Zea mays subsp. mays
  misc_feature (1)..(333): Ceres Seq. ID no. 15179614
MFGQSFAEDLDCGNFFDNMDDLLDFPGGDIDVGFGIGDSDSFPNIWTTHQDTWPAASDPLFASNTNSDSSPELYVPFEDIVKVERPKCFVEESLVEKKEDSFFTNTDSSSSHSQFRSSSPVSVLESSSSSSHTTNTTSLVLPGKHGRPRTKRPRPQVQEKDKVNDNVFGADSRLIIRIPKQFLSDHSKMITKKKKKKAKVVSSSSWSEIDLETNGNNNVDSCSSEQNPVRKCMHCEVTKTPQWRLGPMGPKTLCNACDVRYKSGRLFPEYRPAASPTFTPALHSNSHKKVAEMRNKRCSNGSYTNEENDLHDLVLNNAYIGIGVGKSQRVEKF

SEQ ID NO: 1902 - protein, 315 aa, Zea mays subsp. mays
  misc_feature (1)..(315): Ceres Seq. ID no. 15179615
MDDLLDFPGGDIDVGFGIGDSDSFPNIWTTHQDTWPAASDPLFASNTNSDSSPELYVPFEDIVKVERPKCFVEESLVEKKEDSFFTNTDSSSSHSQFRSSSPVSVLESSSSSSHTTNTTSLVLPGKHGRPRTKRPRPQVQEKDKVNDNVFGADSRLIIRIPKQFLSDHSKMITKKKKKKAKVVSSSSWSEIDLETNGNNNVDSCSSEQNPVRKCMHCEVTKTPQWRLGPMGPKTLCNACDVRYKSGRLFPEYRPAASPTFTPALHSNSHKKVAEMRNKRCSNGSYTNEENDLHDLVLNNAYIGIGVGKSQRVEKF

SEQ ID NO: 1903 - DNA, 1391 bp, Zea mays subsp. mays
  misc_feature (1)..(1391): Ceres Seq. ID no. 15179967
acaatctcagattctttgacttttgtctcctctctagattattgcattcgtgtatgagcttaaaccggttccggttaagaatggccgaggaaatctcaaagacaaagctcggatcttcctccgcctctgcttcggtctccggttcatctgctgcctcagctgcaaccaacgccgcgaaatccagatggaacatcttatggcccagttccctccgctggatccccacctccaccgacaacatcatcgccgccgagaaccgccttctctccatcctcaagacgccttatgtacaagagcaagtcaatattggctctggaccaccaggttcgaaagtcaggtggtttaggtcttcaagcgatgagtctaggttcatcaacactgttacctttgacgccaaggaaggttctcctacgcttgtgatggttcatggttatggtgcttctcaaggcttcttctttcgtaacttcgatgctctcgctagtcggtttagggtcattgctattgatcaacttgggtggggtggatcgagtaggcctgattttacttgtaaaagcactgaagaaacagaggcgtggtttattgactcatttgaggaatggcgtaagtccaagaatcttagtaacttcattctgttaggacattcttttggaggttatgttgctgctaagtacgcgcttaagcatcctgagcatgttcagcacttggttctggtgggatctgctggtttctcagctgaatcagatgccaagtccgagtggctgactaagtttagagcaacgtggaaaggtgctcttctaaatcatctatgggagtccaatttcactcctcagaagctgattagagggttaggtccttggggtccgggtcttgtgaaccggtatacaagtgcaagatttggagcacattctgtgggaactgtgctaacagatgaggaatccagattgctcaccgattatgtgtatcatacgttggctgcaaaggctagtggagagttgtgcttgaaatacatcttctcctttggagcatttgctcggaagccactcttacaaagtgcatcagagtggaaagtgccaacaacttttatctatggaatgaatgattggatgaactatcaaggtgcagtggaagcacggaaacacatgaaggtcccttgcgaaatcattcgtgttccacagggtggccattttgtgttcatagacaacccagctggttttcattcagcagtgatgtatgcttgccgcaagtatatatctcaagactcttctcatcaagaactcattccagatggttttcaattggtttaatcgtgctattgttcattttaccttatcaactttactttattaaaaatgtacaaaaaccatatataaaagagaaacaattattttctt

SEQ ID NO: 1904 - protein, 433 aa, Zea mays subsp. mays
  misc_feature (1)..(433): Ceres Seq. ID no. 15179968
NLRFFDFCLLSRLLHSCMSLNRFRLRMAEEISKTKLGSSSASASVSGSSAASAATNAAKSRWNILWPSSLRWIPTSTDNIIAAENRLLSILKTPYVQEQVNIGSGPPGSKVRWFRSSSDESRFINTVTFDAKEGSPTLVMVHGYGASQGFFFRNFDALASRFRVIAIDQLGWGGSSRPDFTCKSTEETEAWFIDSFEEWRKSKNLSNFILLGHSFGGYVAAKYALKHPEHVQHLVLVGSAGFSAESDAKSEWLTKFRATWKGALLNHLWESNFTPQKLIRGLGPWGPGLVNRYTSARFGAHSVGTVLTDEESRLLTDYVYHTLAAKASGELCLKYIFSFGAFARKPLLQSASEWKVPTTFIYGMNDWMNYQGAVEARKHMKVPCEIIRVPQGGHFVFIDNPAGFHSAVMYACRKYISQDSSHQELIPDGFQLV

SEQ ID NO: 1905 - protein, 416 aa, Zea mays subsp. mays
  misc_feature (1)..(416): Ceres Seq. ID no. 15179969
MSLNRFRLRMAEEISKTKLGSSSASASVSGSSAASAATNAAKSRWNILWPSSLRWIPTSTDNIIAAENRLLSILKTPYVQEQVNIGSGPPGSKVRWFRSSSDESRFINTVTFDAKEGSPTLVMVHGYGASQGFFFRNFDALASRFRVIAIDQLGWGGSSRPDFTCKSTEETEAWFIDSFEEWRKSKNLSNFILLGHSFGGYVAAKYALKHPEHVQHLVLVGSAGFSAESDAKSEWLTKFRATWKGALLNHLWESNFTPQKLIRGLGPWGPGLVNRYTSARFGAHSVGTVLTDEESRLLTDYVYHTLAAKASGELCLKYIFSFGAFARKPLLQSASEWKVPTTFIYGMNDWMNYQGAVEARKHMKVPCEIIRVPQGGHFVFIDNPAGFHSAVMYACRKYISQDSSHQELIPDGFQLV

SEQ ID NO: 1906 - protein, 407 aa, Zea mays subsp. mays
  misc_feature (1)..(407): Ceres Seq. ID no. 15179970
MAEEISKTKLGSSSASASVSGSSAASAATNAAKSRWNILWPSSLRWIPTSTDNIIAAENRLLSILKTPYVQEQVNIGSGPPGSKVRWFRSSSDESRFINTVTFDAKEGSPTLVMVHGYGASQGFFFRNFDALASRFRVIAIDQLGWGGSSRPDFTCKSTEETEAWFIDSFEEWRKSKNLSNFILLGHSFGGYVAAKYALKHPEHVQHLVLVGSAGFSAESDAKSEWLTKFRATWKGALLNHLWESNFTPQKLIRGLGPWGPGLVNRYTSARFGAHSVGTVLTDEESRLLTDYVYHTLAAKASGELCLKYIFSFGAFARKPLLQSASEWKVPTTFIYGMNDWMNYQGAVEARKHMKVPCEIIRVPQGGHFVFIDNPAGFHSAVMYACRKYISQDSSHQELIPDGFQLV

SEQ ID NO: 1907 - DNA, 811 bp, Zea mays subsp. mays
  misc_feature (1)..(811): Ceres Seq. ID no. 15179986
aaatgcagcaaaaaccttacatctgatagaaaagaagagcttcgttcgctaaaaagatgagtttgatcctcagattcagacaacacttatcaacaaggttatcacaaacctccagatcaccactcgcttctcttctcaacggtcgccggagtttcggacaaccggcgggaaaacaagatgaagaggaagaagaagaaatagatcagaggaagctcccaaccgactacgacgccgcgacattcgatccgacagaacaccgaagtccgccaacggaccgcgtgttccgcctcgtcgacgagatctcgtctctaacgctatcggaaatctcagagctcggcgcgattatactgaagaagagagggatcacggagacaccaaccgtcgccgttatgaagcccggagctgtcgctgccggcgggatcgctcagggcggaggcggtggcggagcgagtgaagaagcgaaagtggagaagacagtgtttgagataaagcttgagggttttgaagcgtctgggaagatcaagattattaaggaggtgaggagctttactgatctgggacttaaggaagcgaaggagttggtggagaagactccttcggttttgaaagctggtgtttctaaagaggaaggtgagaagattgttgacaagcttaaggctcttggtgctaaagttgttcttgagtgagtttcttgatcttcgattttctttttctttggttccattttaataggagctaataatgtaatagatttacacttaagcagctttgtctcattgctataattggtggaagtacatcaatgtttggg

SEQ ID NO: 1908 - protein, 209 aa, Zea mays subsp. mays
  misc_feature (1)..(209): Ceres Seq. ID no. 15179987
MSLILRFRQHLSTRLSQTSRSPLASLLNGRRSFGQPAGKQDEEEEEEIDQRKLPTDYDAATFDPTEHRSPPTDRVFRLVDEISSLTLSEISELGAIILKKRGITETPTVAVMKPGAVAAGGIAQGGGGGGASEEAKVEKTVFEIKLEGFEASGKIKIIKEVRSFTDLGLKEAKELVEKTPSVLKAGVSKEEGEKIVDKLKALGAKVVLE

SEQ ID NO: 1909 - DNA, 1061 bp, Zea mays subsp. mays
  misc_feature (1)..(1061): Ceres Seq. ID no. 15179996
attcaccaatctctaaccaatagtcacacactcacaatggccaccgtcgctaacttctcagccaaccgaatcaccaccgtgattccacggccaacatccgccgttgcctcaacctcctccttcgtattcttcgaccccaaacccaactcactgatcctaaagcagagatgggtaaaaaatccctcgaaaagaagcttctcagccgtgaaggtcaaggccggtgcggcatcgccggggaaggtgggtacaccggcggtgaatgacgagaaagtgcaaaagattcacagcggagaggagttcgacgaagcgcttaagaaggccaagaacaagcttgtggttgtggagtttgccacgagtaagagtgatcagagcaacaagatatatccgtttatggtggagctgagcaggacatgtaacgacgtcgatttcttgctcgtcatgggtgatgagtctgaaacgaccagagagctttgtcggagagagaagatcgagaaagttcctcacttcagcttttataagagcatggagaaaatacacgaggaagaaggtattggaccggaccagctaatgggggacgtactatattacggagacagccactcggcggttgtgcagctgcacggccgagctgatgtggagaagcttattgatgagaaccgtactggaggcaagctgattgtactcgacgtcggtctgaaacactgtgggccatgtgtcaaggtttatccgacggtgctgaagctttcccggtcgatgtcggagaccatcgtgttcgctagaatgaacggggacgagaacgatagctgtatggagtttctaaaggacatgaatgttatcgaagtgcccacgttcttgttcattagaaacggtgatatttgtgggcggtatgttggttccggtaaaggagaacttattggagagattctccggtactcaggcgtccgtgtcacttattaagttgtatcaaaactcgatttattgaaaggaaatgcttttgtgggttttgtttgtaccatccgagaccggttaatatgaaaaaaacgcatgtgattcttggtttg

SEQ ID NO: 1910 - protein, 318 aa, Zea mays subsp. mays
  misc_feature (1)..(318): Ceres Seq. ID no. 15179997
IHQSLTNSHTLTMATVANFSANRITTVIPRPTSAVASTSSFVFFDPKPNSLILKQRWVKNPSKRSFSAVKVKAGAASPGKVGTPAVNDEKVQKIHSGEEFDEALKKAKNKLVVVEFATSKSDQSNKIYPFMVELSRTCNDVDFLLVMGDESETTRELCRREKIEKVPHFSFYKSMEKIHEEEGIGPDQLMGDVLYYGDSHSAVVQLHGRADVEKLIDENRTGGKLIVLDVGLKHCGPCVKVYPTVLKLSRSMSETIVFARMNGDENDSCMEFLKDMNVIEVPTFLFIRNGDICGRYVGSGKGELIGEILRYSGVRVTY

SEQ ID NO: 1911 - protein, 306 aa, Zea mays subsp. mays
  misc_feature (1)..(306): Ceres Seq. ID no. 15179998
MATVANFSANRITTVIPRPTSAVASTSSFVFFDPKPNSLILKQRWVKNPSKRSFSAVKVKAGAASPGKVGTPAVNDEKVQKIHSGEEFDEALKKAKNKLVVVEFATSKSDQSNKIYPFMVELSRTCNDVDFLLVMGDESETTRELCRREKIEKVPHFSFYKSMEKIHEEEGIGPDQLMGDVLYYGDSHSAVVQLHGRADVEKLIDENRTGGKLIVLDVGLKHCGPCVKVYPTVLKLSRSMSETIVFARMNGDENDSCMEFLKDMNVIEVPTFLFIRNGDICGRYVGSGKGELIGEILRYSGVRVTY

SEQ ID NO: 1912 - protein, 188 aa, Zea mays subsp. mays
  misc_feature (1)..(188): Ceres Seq. ID no. 15179999
MVELSRTCNDVDFLLVMGDESETTRELCRREKIEKVPHFSFYKSMEKIHEEEGIGPDQLMGDVLYYGDSHSAVVQLHGRADVEKLIDENRTGGKLIVLDVGLKHCGPCVKVYPTVLKLSRSMSETIVFARMNGDENDSCMEFLKDMNVIEVPTFLFIRNGDICGRYVGSGKGELIGEILRYSGVRVTY

SEQ ID NO: 1913 - DNA, 1395 bp, Zea mays subsp. mays
  misc_feature (1)..(1395): Ceres Seq. ID no. 15180012
acaggttccctgatatcggtggccagcagccgactttgtggttagtccattctcttccggcgggatacgttgcggaccacttcgctcagctgctcgcgacggcggcttgtaccctgatttgggtggggaggatgcctgatatccagctgggatgccacactataaggtcccatggtaccaaagtggcaacattacacatgtatgactggattatacttttatgtcttgctgtacttgatggactgttaaacataatcgagccctttcaccgctttgttggacgcgacatgatgaccgacttgagttatcccctcaagggcaacacaatcccattttgggctgttccactgattgcgatcgtgctacccttggttatctttgctgtcatttacttcaaaaagaaaaatgtctatgatttacaccacggcatactagggatcttgtattcagtgcttataactgctgtgatcactgatgcaattaaggatggtgttggtcgccctcggccagatttcttttggcgttgttttcctgatggcaaacctaattttaataatataaccaccgatgtgatatgccatggagaaaagagtgtcatcaaggaaggtcataagagtttcccaagtgggcattcttcatggtctttcgctggtctaggttttcttgcatggtacttggctggaaaacttaaagcttttgatcgcaaaggtcacattgcaaaactgtgcttagtttttctgcctctacttgtcgcgtcacttgtggctgtttctcgagttgatgattactggcatcactggcaagatgtctttgccggcggcatcataggtcttacagttgcttcattctgttacctgcagttcttcccatatccctttgacaatgatgccctatggccacacgcatacttccaacagctagctgagacacacagtaatggtaatgcaaactcaatcaacataagacctacagagtttgaagatgaaccagatgaccatggtgacattgtcctgagggacaccagccctatcttggagtcaatggagtctggcaggagaccatgaagaagcatgccactgtgggtttgtccaaggtgcccttcaaattctggaagcgtgatgagttttgtggtttcatcatgtagccgtccaacgtaaaaacagtatggaggtatatctaccaccacctgatgatttgatgatccacagactgtcgtggttagctgtaaatgacagcgaatgtttatgtttctagtgacaatgtgaatatttggttttgcacggctgtgatatgggaagtttgtttcgaggttaccctttggctgtaatgaaattgtccgacgacctgcagatggattgcaaacggtctttagggggcaatcactccatccaagat

SEQ ID NO: 1914 - protein, 353 aa, Zea mays subsp. mays
  misc_feature (1)..(353): Ceres Seq. ID no. 15180013
RFPDIGGQQPTLWLVHSLPAGYVADHFAQLLATAACTLIWVGRMPDIQLGCHTIRSHGTKVATLHMYDWIILLCLAVLDGLLNIIEPFHRFVGRDMMTDLSYPLKGNTIPFWAVPLIAIVLPLVIFAVIYFKKKNVYDLHHGILGILYSVLITAVITDAIKDGVGRPRPDFFWRCFPDGKPNFNNITTDVICHGEKSVIKEGHKSFPSGHSSWSFAGLGFLAWYLAGKLKAFDRKGHIAKLCLVFLPLLVASLVAVSRVDDYWHHWQDVFAGGIIGLTVASFCYLQFFPYPFDNDALWPHAYFQQLAETHSNGNANSINIRPTEFEDEPDDHGDIVLRDTSPILESMESGRRP

SEQ ID NO: 1915 - protein, 310 aa, Zea mays subsp. mays
  misc_feature (1)..(310): Ceres Seq. ID no. 15180014
MPDIQLGCHTIRSHGTKVATLHMYDWIILLCLAVLDGLLNIIEPFHRFVGRDMMTDLSYPLKGNTIPFWAVPLIAIVLPLVIFAVIYFKKKNVYDLHHGILGILYSVLITAVITDAIKDGVGRPRPDFFWRCFPDGKPNFNNITTDVICHGEKSVIKEGHKSFPSGHSSWSFAGLGFLAWYLAGKLKAFDRKGHIAKLCLVFLPLLVASLVAVSRVDDYWHHWQDVFAGGIIGLTVASFCYLQFFPYPFDNDALWPHAYFQQLAETHSNGNANSINIRPTEFEDEPDDHGDIVLRDTSPILESMESGRRP

SEQ ID NO: 1916 - protein, 288 aa, Zea mays subsp. mays
  misc_feature (1)..(288): Ceres Seq. ID no. 15180015
MYDWIILLCLAVLDGLLNIIEPFHRFVGRDMMTDLSYPLKGNTIPFWAVPLIAIVLPLVIFAVIYFKKKNVYDLHHGILGILYSVLITAVITDAIKDGVGRPRPDFFWRCFPDGKPNFNNITTDVICHGEKSVIKEGHKSFPSGHSSWSFAGLGFLAWYLAGKLKAFDRKGHIAKLCLVFLPLLVASLVAVSRVDDYWHHWQDVFAGGIIGLTVASFCYLQFFPYPFDNDALWPHAYFQQLAETHSNGNANSINIRPTEFEDEPDDHGDIVLRDTSPILESMESGRRP

SEQ ID NO: 1917 - DNA, 1308 bp, Zea mays subsp. mays
  misc_feature (1)..(1308): Ceres Seq. ID no. 15180036
ataaggtctttttaccactccttcccttcaccttctctgatttggattttgtcaatctcatcgattcgattcttctcccaatcaaatctctctccaattctctcatcaggaaagttcaaatttttctccatcattctctctctttggtgctttcccctcgttaaaaaaaaaacgaaaatttgagataaagagaaaccttccatggcagcagctatgagcgagaaggaagctatggttgatcctttcctggtcgaagctcttcagaaccctcgtcatcgtctcacaattctgcgtatggagctggacatacaaaagttctttcaaagcccagagcagcagcaatacgagttccctccttacccaacctcctacctccgcctcgctgctcaccgcgtggcccaccactacggcctcttcaccactgccttagacggtgctgctctagacggctccgggaacaggatcctcgtcaccaagaccggtgagagcagctacccttacgtctgtttgtctgagattcccgtgaagcagcctgaggctaacgggaggaggcctcagggcttcaagctcgccatcaaggcgaggcctaacggagggtctggtggggcgggtggtgggtcgggtgtggagaggaatctgttgaggagcgttgaggagaggaaagaggagtatgagaaggccagggcgcggatctttaacagtcctaatagttcagactctgaagactcttcaactcgagctcctcctcctcctgttcagcagacaaaacataacaacagtagactcccagctagacacgaggccgagagtgttgttgatgaggagaggaacggtgttggaaggacttcacgggtcgccattattagagatagagagaaagatcgttatgatcctgattatgaccggaacaggtacgtgagggttactccaccggtacaaaacttcagcccgatgccgccgattcatcttcctttccatgacggagttttcccacagatgccaagaactcaacccagtataagctatggacatcccttgaaccctgctatgacttctactaacgctcctgcttatacagagtggcctagtgtcacagtgagttatgcacagacattgcatgcttcagacccaaatcatttcaggcaccagaatccctgacctttggtcctgatcaaaccatgtctgtatgcttttatattaggatgtagtcttagtattttttcttctgctcttgttgaaaacattggccgcacaagacatttttactctgttgttacaaattatattaacaatatcaagcttttgcat

SEQ ID NO: 1918 - protein, 318 aa, Zea mays subsp. mays
  misc_feature (1)..(318): Ceres Seq. ID no. 15180037
MAAAMSEKEAMVDPFLVEALQNPRHRLTILRMELDIQKFFQSPEQQQYEFPPYPTSYLRLAAHRVAHHYGLFTTALDGAALDGSGNRILVTKTGESSYPYVCLSEIPVKQPEANGRRPQGFKLAIKARPNGGSGGAGGGSGVERNLLRSVEERKEEYEKARARIFNSPNSSDSEDSSTRAPPPPVQQTKHNNSRLPARHEAESVVDEERNGVGRTSRVAIIRDREKDRYDPDYDRNRYVRVTPPVQNFSPMPPIHLPFHDGVFPQMPRTQPSISYGHPLNPAMTSTNAPAYTEWPSVTVSYAQTLHASDPNHFRHQNP

SEQ ID NO: 1919 - protein, 314 aa, Zea mays subsp. mays
  misc_feature (1)..(314): Ceres Seq. ID no. 15180038
MSEKEAMVDPFLVEALQNPRHRLTILRMELDIQKFFQSPEQQQYEFPPYPTSYLRLAAHRVAHHYGLFTTALDGAALDGSGNRILVTKTGESSYPYVCLSEIPVKQPEANGRRPQGFKLAIKARPNGGSGGAGGGSGVERNLLRSVEERKEEYEKARARIFNSPNSSDSEDSSTRAPPPPVQQTKHNNSRLPARHEAESVVDEERNGVGRTSRVAIIRDREKDRYDPDYDRNRYVRVTPPVQNFSPMPPIHLPFHDGVFPQMPRTQPSISYGHPLNPAMTSTNAPAYTEWPSVTVSYAQTLHASDPNHFRHQNP

SEQ ID NO: 1920 - protein, 308 aa, Zea mays subsp. mays
  misc_feature (1)..(308): Ceres Seq. ID no. 15180039
MVDPFLVEALQNPRHRLTILRMELDIQKFFQSPEQQQYEFPPYPTSYLRLAAHRVAHHYGLFTTALDGAALDGSGNRILVTKTGESSYPYVCLSEIPVKQPEANGRRPQGFKLAIKARPNGGSGGAGGGSGVERNLLRSVEERKEEYEKARARIFNSPNSSDSEDSSTRAPPPPVQQTKHNNSRLPARHEAESVVDEERNGVGRTSRVAIIRDREKDRYDPDYDRNRYVRVTPPVQNFSPMPPIHLPFHDGVFPQMPRTQPSISYGHPLNPAMTSTNAPAYTEWPSVTVSYAQTLHASDPNHFRHQNP

SEQ ID NO: 1921 - DNA, 1246 bp, Zea mays subsp. mays
  misc_feature (1)..(1246): Ceres Seq. ID no. 15180040
atatctcttatcccctccttctctcccaatagtctcacagtcccctctagaaatatgtcttcagcttattgttcctccgccgtggcggtttccaccgcagccaccgtttcctccgccactacctttaacccactattctccttccattcgaatttcaaactcttctatcgcatcacaccaaaacccttcaaactcgtcgccaaatgccctactcctcctctcttcctccatctaaatacccatcgccaccgcctcttctgcgccgccgaagacgaaatcccgccgtcatccgaagaagacgaggaagaaaacgaagaagacgaagacgcagatgagacacagacgacgcaagctagcgttgaggaagggaggctgtacgttgggaacttgccttacacaatcactgcctctgagctctcccagcttttcggagaagctggaaacgtcatcgatgttcagattgtgtacgataaagtcactgacagaagcagagggtttggattcgtaaccatgggaaccatcgaagaagctaaagaagcgattcagatgttcaacagctctcaaatcggtggaaggacggtgaaagtgaacttcccggaggtgcctagaggcggagagagggaagtgatgaggactaagattcgtgatagtaacaagagttatgttgacagtcctcataagatctatgcggggaaccttggttggaatctaacgtcgcaaggtcttaaagatgcgtttgggaatcagcctggggtgcttggtgctaaagttatctacgaaagaaacagtgggaggtctagggggtttggtttcgtctcttttgagtcggaaggagagcttcagtctgctctgagtgctatgaatggtgtggtaagggtcttggtttggtgatttgggttgggtttgagactgactagttgttggtttcggtttatttcttaggaagtggaaggacgagcgctgcgtctaaacttggcttcggagagagctactaccgagtctcgttcttctgtagcaggaggagagactgaagagggcagtctagagagcagtgaggtggtttcgaacattagtacatgaagcagcagaagcacagtagattctactgagggctagcaaaatgaacactgttatgagttatgactatgttgttgtactctactacggctaaagaaaaaatatataaatatatgagataaacgacaggagatttagctgtaatcttattaaaaaatgcttgttccat

SEQ ID NO: 1922 - protein, 296 aa, Zea mays subsp. mays
  misc_feature (1)..(296): Ceres Seq. ID no. 15180041
ISLIPSFSPNSLTVPSRNMSSAYCSSAVAVSTAATVSSATTFNPLFSFHSNFKLFYRITPKPFKLVAKCPTPPLFLHLNTHRHRLFCAAEDEIPPSSEEDEEENEEDEDADETQTTQASVEEGRLYVGNLPYTITASELSQLFGEAGNVIDVQIVYDKVTDRSRGFGFVTMGTIEEAKEAIQMFNSSQIGGRTVKVNFPEVPRGGEREVMRTKIRDSNKSYVDSPHKIYAGNLGWNLTSQGLKDAFGNQPGVLGAKVIYERNSGRSRGFGFVSFESEGELQSALSAMNGVVRVLVW

SEQ ID NO: 1923 - protein, 278 aa, Zea mays subsp. mays
  misc_feature (1)..(278): Ceres Seq. ID no. 15180042
MSSAYCSSAVAVSTAATVSSATTFNPLFSFHSNFKLFYRITPKPFKLVAKCPTPPLFLHLNTHRHRLFCAAEDEIPPSSEEDEEENEEDEDADETQTTQASVEEGRLYVGNLPYTITASELSQLFGEAGNVIDVQIVYDKVTDRSRGFGFVTMGTIEEAKEAIQMFNSSQIGGRTVKVNFPEVPRGGEREVMRTKIRDSNKSYVDSPHKIYAGNLGWNLTSQGLKDAFGNQPGVLGAKVIYERNSGRSRGFGFVSFESEGELQSALSAMNGVVRVLVW

SEQ ID NO: 1924 - DNA, 1274 bp, Zea mays subsp. mays
  misc_feature (1)..(1274): Ceres Seq. ID no. 15180051
aacacaccaatctctcgccagaaaacacagaggatctcaatctcagatcgagagagaatgggtttctcttcccaagaaaacccttcttctctttacttcttcttcttctgtctctgtctctccacagtctctgcttacacaaacacaagcagcaacaatggtgtggaaggaggaagaagagagctagcttcttggagatgcaattggtttagagggagttgggtttatgatgtaacgtacccactttacgatccttacaaatgtccattcatagatccacagtttaactgcaagaagtatggtcgtcccgacaatctttatcttaagtatcgatggcaaccttcctcttgctctctccccagattcaatgggttgtatttcttgaggaagatgagagggaagaagataatgttcgttggagattcactaagcacaaatatgtggcaatctcttgcttgtctaattcacgcttgggttcctaacgctcgttacactcttcttcgccaaaagggtctcgcttccctcaccttcgaggactacggagtgacgttgaagctatacagaacacagttcttagtggatttagatgccgagaacgttggaagagtgcttaagcttgattccattaagcaaggcaaaatgtggagaggcatggacgtcttgattttcaacagttggcattggtggacccatatcgatcacatccagccgtgggactacatggaagatgggaaccgattgtacaaagacatgaacagactggtcgcttattacaaaggaatgaccacttgggctcgatgggttaatgcattcgtcaatccatctaagaccaaggttttcttcaatggtgtttctcctgtccattacgatggaagggattggggagagccaatgaagtcatgtaagagtcagacacaaccattctacgggaggaagtatccaggagggccaccagtggcttgggtgattttaaacaaagtgtttaggagattgaagaaaccagtctattggctcgacataaccggtctatctcagcttcgtaaagatgctcatccttctgcttacagtgggaaccatcctggtaatgactgtagccactggtgtcttcctggtctacctgatacttggaacgtactcttttactctgctcttttttcttgaagtctattttgttttatcatcaatgtataagttaccgaatagtctatttctttagttaattaactttgaattgtggtcgcttgattcttgactgaaataacgttttagatacc

SEQ ID NO: 1925 - protein, 386 aa, Zea mays subsp. mays
  misc_feature (1)..(386): Ceres Seq. ID no. 15180052
NTPISRQKTQRISISDRERMGFSSQENPSSLYFFFFCLCLSTVSAYTNTSSNNGVEGGRRELASWRCNWFRGSWVYDVTYPLYDPYKCPFIDPQFNCKKYGRPDNLYLKYRWQPSSCSLPRFNGLYFLRKMRGKKIMFVGDSLSTNMWQSLACLIHAWVPNARYTLLRQKGLASLTFEDYGVTLKLYRTQFLVDLDAENVGRVLKLDSIKQGKMWRGMDVLIFNSWHWWTHIDHIQPWDYMEDGNRLYKDMNRLVAYYKGMTTWARWVNAFVNPSKTKVFFNGVSPVHYDGRDWGEPMKSCKSQTQPFYGRKYPGGPPVAWVILNKVFRRLKKPVYWLDITGLSQLRKDAHPSAYSGNHPGNDCSHWCLPGLPDTWNVLFYSALFS

SEQ ID NO: 1926 - protein, 367 aa, Zea mays subsp. mays
  misc_feature (1)..(367): Ceres Seq. ID no. 15180053
MGFSSQENPSSLYFFFFCLCLSTVSAYTNTSSNNGVEGGRRELASWRCNWFRGSWVYDVTYPLYDPYKCPFIDPQFNCKKYGRPDNLYLKYRWQPSSCSLPRFNGLYFLRKMRGKKIMFVGDSLSTNMWQSLACLIHAWVPNARYTLLRQKGLASLTFEDYGVTLKLYRTQFLVDLDAENVGRVLKLDSIKQGKMWRGMDVLIFNSWHWWTHIDHIQPWDYMEDGNRLYKDMNRLVAYYKGMTTWARWVNAFVNPSKTKVFFNGVSPVHYDGRDWGEPMKSCKSQTQPFYGRKYPGGPPVAWVILNKVFRRLKKPVYWLDITGLSQLRKDAHPSAYSGNHPGNDCSHWCLPGLPDTWNVLFYSALFS

SEQ ID NO: 1927 - protein, 256 aa, Zea mays subsp. mays
  misc_feature (1)..(256): Ceres Seq. ID no. 15180054
MRGKKIMFVGDSLSTNMWQSLACLIHAWVPNARYTLLRQKGLASLTFEDYGVTLKLYRTQFLVDLDAENVGRVLKLDSIKQGKMWRGMDVLIFNSWHWWTHIDHIQPWDYMEDGNRLYKDMNRLVAYYKGMTTWARWVNAFVNPSKTKVFFNGVSPVHYDGRDWGEPMKSCKSQTQPFYGRKYPGGPPVAWVILNKVFRRLKKPVYWLDITGLSQLRKDAHPSAYSGNHPGNDCSHWCLPGLPDTWNVLFYSALFS

SEQ ID NO: 1928 - DNA, 1138 bp, Zea mays subsp. mays
  misc_feature (1)..(1138): Ceres Seq. ID no. 15180067
aaaaacactttccgtcagctgcaagaaaggagaaccaattctccctcgaaaaaaaagtcccgtcgttttcctcacagttccttcggcctccgcttccactcccacccgccccgccgtcgcgatgcacaagacggctcaggcatggttcaccggcgggaccgccgcctcctccggcgccgctgccgagtcgcagccgtccctgctcgctgactggaactcgtacgcccccacccgctccgacgcctcctcctcctccccgctccccttcgacatcgaagccgccgtccgctccgccaacgacaccgtctccggcaccttaagctcggtgaccaagggcgtgcgggagctgccggggagcttccagagcgccaccagcagcttcccctccggaaaggctctcatgtacttcggcctcttcctcgccaccggcatcttcttcgtcttcatcgccttcgcgctcttcctccccgtcatggtgctcatgccacagaagttcgccatctccttcacgctcgggtgcgcgctcatcattgcctcgctcttcgcgcttaaggggccagccaaccagctcgcccacatgacttccaaggagaggctaccgttttcagttggatttattggatgcatggtcggtacaatttatgtttctatggtgcttcacagctatttcctctctgtgatcttctcagtccttcaggttctggcccttgcatattacaccatatcctacttccctggaggatctagtggactgaaattcatctcgtctggtctgttgtcctcggcaacaagttgttttggtcgatgaccttcctttgtcaattgtcatacatttatttgatcataccatgttatcgctttaagatttttgtatgtagctgctgatcatccctttgaggctttgtttggtactctagtattgactcatctacatgtgttgaggtggattgatgtgtaaattagtttaagttacatcccatgatcccaatccacctcaatacatgtggattgtggtcaatactagagtacccaaactaggtctgatagagattccatggtgtttcctctcctgtcatcctgtttgtttgtctagacttggactggtgttgaatatataattatatagattatagagtgg

SEQ ID NO: 1929 - protein, 268 aa, Zea mays subsp. mays
  misc_feature (1)..(268): Ceres Seq. ID no. 15180068
KTLSVSCKKGEPILPRKKSPVVFLTVPSASASTPTRPAVAMHKTAQAWFTGGTAASSGAAAESQPSLLADWNSYAPTRSDASSSSPLPFDIEAAVRSANDTVSGTLSSVTKGVRELPGSFQSATSSFPSGKALMYFGLFLATGIFFVFIAFALFLPVMVLMPQKFAISFTLGCALIIASLFALKGPANQLAHMTSKERLPFSVGFIGCMVGTIYVSMVLHSYFLSVIFSVLQVLALAYYTISYFPGGSSGLKFISSGLLSSATSCFGR

SEQ ID NO: 1930 - protein, 228 aa, Zea mays subsp. mays
  misc_feature (1)..(228): Ceres Seq. ID no. 15180069
MHKTAQAWFTGGTAASSGAAAESQPSLLADWNSYAPTRSDASSSSPLPFDIEAAVRSANDTVSGTLSSVTKGVRELPGSFQSATSSFPSGKALMYFGLFLATGIFFVFIAFALFLPVMVLMPQKFAISFTLGCALIIASLFALKGPANQLAHMTSKERLPFSVGFIGCMVGTIYVSMVLHSYFLSVIFSVLQVLALAYYTISYFPGGSSGLKFISSGLLSSATSCFGR

SEQ ID NO: 1931 - protein, 135 aa, Zea mays subsp. mays
  misc_feature (1)..(135): Ceres Seq. ID no. 15180070
MYFGLFLATGIFFVFIAFALFLPVMVLMPQKFAISFTLGCALIIASLFALKGPANQLAHMTSKERLPFSVGFIGCMVGTIYVSMVLHSYFLSVIFSVLQVLALAYYTISYFPGGSSGLKFISSGLLSSATSCFGR

SEQ ID NO: 1932 - DNA, 1116 bp, Zea mays subsp. mays
  misc_feature (1)..(1116): Ceres Seq. ID no. 15180098
acagcagccaggattccagaaacagagaggccaggtgccaagcaaaggcggtgcagtgcaggcagggcgtgtggagaagcagagcagcgggcggcgcacctgcacttggcagctctggccatggcggatcaccagaggattcaccctgtagacctggaggccggcaaccggccgacgacgccgctggtgccgggagcctcgttccggtcggacaagggcgacccagcgcagcgcgcgaacaaccaccaccaccaacagcaacaacgaggctacgtctacgtccccgggccgctgcctccgccgccgcgtcgcgccgcgccaccggcgccgcctctgccgccgccgaagcggcgcgggcggggctgctgctgccggttcctctgctgcgccgtgataaccgcggtcgtgctggcggtgctcgccgcggcggcggcgggcgcgctgtacctgttgctggaccccaaggcgccgcggtactcggtggaccggctctccgtgtcggcgttccaggtggacccgtcgacgtttacggcgcgggccgggttcgacgtggcggtgacggcggcgaaccccaactcgcgcatcggcatccagtacgagcccgggtccagcctgggcgtgtggtaccagtcgtaccgcctggcgcggggcgcgctgccgcccttctaccagggccaccgcaacaccacggtgctggcgctggccatggccggggaggtgcagctgggcggcgccgccgtggccgggatgcgggacgcgcggcgttcgggcgccgtgccgctcgtgttccgcgccgacgtgcccgtgcgcgtcgagctcggcaccttcaagctctggaaggtcacgtccagggtgcgctgcgacctcgtcgtcgacaggctcatggacgtcagcagccccatcaagatcaaggccagcaactgcaagttcggcctcaagctgtgatccgttcgtcgccgcgttggattcttttggctggctgagtgctggacctgcttgctggtagtatttgcgcaggtgcagacgtgcagtgcactcccgccaacctcgtcggtgttcatcccggctgtgtacagatggcagtgtatcattgctgttatagaggaataattttgc

SEQ ID NO: 1933 - protein, 326 aa, Zea mays subsp. mays
  misc_feature (1)..(326): Ceres Seq. ID no. 15180099
SSQDSRNREARCQAKAVQCRQGVWRSRAAGGAPALGSSGHGGSPEDSPCRPGGRQPADDAAGAGSLVPVGQGRPSAAREQPPPPTATTRLRLRPRAAASAAASRRATGAASAAAEAARAGLLLPVPLLRRDNRGRAGGARRGGGGRAVPVAGPQGAAVLGGPALRVGVPGGPVDVYGAGRVRRGGDGGEPQLAHRHPVRARVQPGRVVPVVPPGAGRAAALLPGPPQHHGAGAGHGRGGAAGRRRRGRDAGRAAFGRRAARVPRRRARARRARHLQALEGHVQGALRPRRRQAHGRQQPHQDQGQQLQVRPQAVIRSSPRWILLAG

SEQ ID NO: 1934 - protein, 314 aa, Zea mays subsp. mays
  misc_feature (1)..(314): Ceres Seq. ID no. 15180100
TAARIPETERPGAKQRRCSAGRACGEAEQRAAHLHLAALAMADHQRIHPVDLEAGNRPTTPLVPGASFRSDKGDPAQRANNHHHQQQQRGYVYVPGPLPPPPRRAAPPAPPLPPPKRRGRGCCCRFLCCAVITAVVLAVLAAAAAGALYLLLDPKAPRYSVDRLSVSAFQVDPSTFTARAGFDVAVTAANPNSRIGIQYEPGSSLGVWYQSYRLARGALPPFYQGHRNTTVLALAMAGEVQLGGAAVAGMRDARRSGAVPLVFRADVPVRVELGTFKLWKVTSRVRCDLVVDRLMDVSSPIKIKASNCKFGLKL

SEQ ID NO: 1935 - protein, 274 aa, Zea mays subsp. mays
  misc_feature (1)..(274): Ceres Seq. ID no. 15180101
MADHQRIHPVDLEAGNRPTTPLVPGASFRSDKGDPAQRANNHHHQQQQRGYVYVPGPLPPPPRRAAPPAPPLPPPKRRGRGCCCRFLCCAVITAVVLAVLAAAAAGALYLLLDPKAPRYSVDRLSVSAFQVDPSTFTARAGFDVAVTAANPNSRIGIQYEPGSSLGVWYQSYRLARGALPPFYQGHRNTTVLALAMAGEVQLGGAAVAGMRDARRSGAVPLVFRADVPVRVELGTFKLWKVTSRVRCDLVVDRLMDVSSPIKIKASNCKFGLKL

SEQ ID NO: 1936 - DNA, 956 bp, Zea mays subsp. mays
  misc_feature (1)..(956): Ceres Seq. ID no. 15180122
ggctagtgcacccccacatgtggcgctcgcatgcgctctcccctttaacttttgcgcgtaggaggctaaagagggtgccgctgcagcgtttttggccccctacctagctacagtggtagcggagggggcaccgctgaacaaattctgaggtccagcggtgagcgtagtctagcaggcagcctccagaagccccagcccctatgtccgccactccgctaggtctccagtttagtctccatctccgtccggtcgtccaccactcaactcccactcttgcggtccgcagtccgaccaacagcaaggtaattaagttgatgtttttttattttagtgatctactcgttgatgcatattcaagtaatgaaaacatattgtatgcatattctatgaccttactgaaattctctttggtacgttatacccaactgcaaatcagttttataagggtttttgtgatataaaggatttaattgatagatggtgttgcagtagtgactctactattaaacaattccatgagttgttggtggaaactcatgatgatgaacttaaacttgatcgtttcttatatgatgagataaatttggctgaatgagatgcattgagtgaattagaaaagtacatggcagctccttttctgaagcatagtggccgtcattttgatatcttgtcttggtggcaggcccaacaaaaggaatatccggttctttcgctcattgctcatgatgtgtataggtttcacttttggacaaaccgaatgtccattgtctctggcagctatttgtacatatttcgcatagcgtcaaactatcagtatgcttgtacgtgacatgagtgtagatataatttctcactcatgtcacgtacaagcaactgtaatactccgacactactgctagtcagtgaataccttgtaatcttgtatacgaaaaaaaaaatgcatctcaattcaaccc

SEQ ID NO: 1937 - protein, 86 aa, Zea mays subsp. mays
  misc_feature (1)..(86): Ceres Seq. ID no. 15180123
MSATPLGLQFSLHLRPVVHHSTPTLAVRSPTNSKVIKLMFFYFSDLLVDAYSSNENILYAYSMTLLKFSLVRYTQLQISFIRVFVI

SEQ ID NO: 1938 - protein, 68 aa, Zea mays subsp. mays
  misc_feature (1)..(68): Ceres Seq. ID no. 15180124
MAAPFLKHSGRHFDILSWWQAQQKEYPVLSLIAHDVYRFHFWTNRMSIVSGSYLYIFRIASNYQYACT

SEQ ID NO: 1939 - protein, 48 aa, Zea mays subsp. mays
  misc_feature (1)..(48): Ceres Seq. ID no. 15180125
MFFYFSDLLVDAYSSNENILYAYSMTLLKFSLVRYTQLQISFIRVFVI

SEQ ID NO: 1940 - DNA, 1444 bp, Zea mays subsp. mays
  misc_feature (1)..(1444): Ceres Seq. ID no. 15180145
aactgtcattagcatatttcccatgccggtcctgcccctggctccgttcgttgtcttctatctcccctgggcgtcatcttctacctctcgctctctgtgttcattcgagtttgtttccccaacagcctttccttcccttctctcgccgcagatcttgcccgtgaaggtgaaggtaggagattggagatctcgccagagtgggtgccctgcgccgcagacgccattggacactgttctcctcggttctcaaggggtcgacaccagtgtccagatctcgttgaaccctacctgttgcacatttggctgccaggagccgagccctccccacatttagctgttggtttgtgcactttagtttgaataatagtatgaacgatgaggtggttccccatggatgaaacgaatgcatgcattgtcgaagagcaagagtgggcattgacttgtattggatatgatgatcttgagacacacactacactggggagtgcacatgctatacatgatattgattgggattcaataatagtagaagaaatgactagtgaagaaggaagaaatgatgttactagtgaacaaggactctactttcaacttggactagctactgaagatgacaaaagggaagatgattgtagtgctccccgttttggaaatagcattccatgtgaagatgaattgggagcagtcattccatgttcagatttagtgcttgatgagactaggaccatatatggtatgaacaatccagtaatggagcctagtagcttgtgtgcaaaaatgcaccactttagactcgcaatcagacaatacgccataaataaagaatttgagcttggaattgaggctaccaacaagactagatttagagggtattgtaaagggcctgattgcccctggagcattcatgctagaccggagaccaaaggggctataacaattcaagtgatcgtcttgaatggcaaacatacttgtacctccagtggtagacgaaagacggctacacctacaggagcttgggttgcggcacgtgcgcttccattactaatgaagaagcctcatatgggtgctaaggagctacaaactacattgcatgacacttttggttgtaccattgcatatgacacagtttggcacggtaaagagaaagctttgaaggaattatttggcagttgggaagagagctttcagcttttgtggccttggagagaagcagttatgcaaaagtcgccggatagtgtcattgagcttgatgtaaaaatggatgagggtcgtcctttcttcagttgattcttttgtgcacttggtccatgcatttatggattcaagggtggttgctgaccataccttagtgttgacttgatgaaagtcgcctaaagggggtgaataggcaagtctgaaatttataaactttaagacaactacaagccgggttagcgttagaaac

SEQ ID NO: 1941 - protein, 303 aa, Zea mays subsp. mays
  misc_feature (1)..(303): Ceres Seq. ID no. 15180146
MRWFPMDETNACIVEEQEWALTCIGYDDLETHTTLGSAHAIHDIDWDSIIVEEMTSEEGRNDVTSEQGLYFQLGLATEDDKREDDCSAPRFGNSIPCEDELGAVIPCSDLVLDETRTIYGMNNPVMEPSSLCAKMHHFRLAIRQYAINKEFELGIEATNKTRFRGYCKGPDCPWSIHARPETKGAITIQVIVLNGKHTCTSSGRRKTATPTGAWVAARALPLLMKKPHMGAKELQTTLHDTFGCTIAYDTVWHGKEKALKELFGSWEESFQLLWPWREAVMQKSPDSVIELDVKMDEGRPFFS

SEQ ID NO: 1942 - protein, 298 aa, Zea mays subsp. mays
  misc_feature (1)..(298): Ceres Seq. ID no. 15180147
MDETNACIVEEQEWALTCIGYDDLETHTTLGSAHAIHDIDWDSIIVEEMTSEEGRNDVTSEQGLYFQLGLATEDDKREDDCSAPRFGNSIPCEDELGAVIPCSDLVLDETRTIYGMNNPVMEPSSLCAKMHHFRLAIRQYAINKEFELGIEATNKTRFRGYCKGPDCPWSIHARPETKGAITIQVIVLNGKHTCTSSGRRKTATPTGAWVAARALPLLMKKPHMGAKELQTTLHDTFGCTIAYDTVWHGKEKALKELFGSWEESFQLLWPWREAVMQKSPDSVIELDVKMDEGRPFFS

SEQ ID NO: 1943 - protein, 250 aa, Zea mays subsp. mays
  misc_feature (1)..(250): Ceres Seq. ID no. 15180148
MTSEEGRNDVTSEQGLYFQLGLATEDDKREDDCSAPRFGNSIPCEDELGAVIPCSDLVLDETRTIYGMNNPVMEPSSLCAKMHHFRLAIRQYAINKEFELGIEATNKTRFRGYCKGPDCPWSIHARPETKGAITIQVIVLNGKHTCTSSGRRKTATPTGAWVAARALPLLMKKPHMGAKELQTTLHDTFGCTIAYDTVWHGKEKALKELFGSWEESFQLLWPWREAVMQKSPDSVIELDVKMDEGRPFFS

SEQ ID NO: 1944 - DNA, 1978 bp, Zea mays subsp. mays
  misc_feature (1)..(1978): Ceres Seq. ID no. 15180149
ctcttcccccgcgcggcggccgcgggagtgttcgtgttcctcacttctcccgcttgcgtccccgacactccctcagatccgcggccgtttcccgatccgaggggcattccagccctaaatagcggccggtgagcaggtctccttccgccggcgcggaccacctggagggagtttatcctggagccgtcttcctcctcgcctccttttgcggcgcggcgcggaggccggagtcgcttggaggcccagctgtgtttgggttgatttcttcgtttgtcgcagggcctgtcttctgcctctgcttttgcttcgaagcaatggcgaatgcaagcaagcacttgcaaccttcaagtcaagcaggcaatgacaagaagtatcagggcacgctggttgcttcaccagcaaaggccatttcacctaagtgtgtgaaccgcattgtgccatcgaagcaactgatcttgggtgggggttcaataggccatgtggcatcatttctgatcaaggtcgttgctcttgaggcagtgagaagagtttctaaaacaagatgccctttcatatggaattctgttcaagcattgcagatccttgtgtatcctccatttagctggatccaaagatgggcaccgctcggatttctcgtgcagggaattcagaaactatccatgccactgttgtttctgtcagtcacaacaacagtaagtgagctgtcttccaagcatgatgatgaaccagataacaatacagaacattctgagacaccttccgaaacaaatgaattggcgtcaacttctggcacaagcgatgctgctgatggcacaaaggaaatcgtgcaagagaactggcttgtgttacttttcagggagcttgagaagcaaggcatcactttgcctgagaggtttactgaagatgagttacgcagattttatgttgctgcaaatggcgactttcaaagtttactctcttcggttaagaagacaattcattggagggaaacatttcacatacttacattgcaagaacttgatagatggtctcacttagtcttttggcatgggtttgacacgatgcttcggccttgtttagtagttcgtcttggacttgcatgctctagcatacctcctcatgatagaccccgtttcgggcaagcagtagtttctcaaattgaccatggcgttgtaaatttgatcaatgaagaagattcaaggattaccgttttactggattgccatgggatttcgccattcagatttccaatgcaaatgatgaggtcgttcatcactgtggttcaagaaaactacccgaatcgtcttggggtattgtttgtcatccgtcttcctccagttgtcagagttattgcacagacatttcttcaagtcttgaaaccagctacaaagcagaagttgcgttttgagggagattcgtacaagaaggcattggcggagttcctgcaggctgtgccagcgtttctgggcggtaaatgcagctgcccgcgatgtgagagtcctcgtgatgattcagtgatacaggcaggggaagggagcaagaagcagccccgcttggtcagcgttgatgacgggttacctgtcacagacttggacttcgacttggatgaagagatcccatcaccttatagctgcgagaacgccatcagggctgcgataatcggcctgctgatggtgtgcatcttcgtcgcgtttctggctgggatgatcgaccctgcatccgttccagccagtgcctgagagcttgtggaatagagcatgcacgtacatgtgttgctaattaggatgcagggtgctgtatttcttggcaggcttcttgtatgttgtcgtcagaccgccatagagcgctttctcccagtgtgagcgagcgcatgaataatatatatcctctgtgtcaaatgttggttagcagttcaattcgggcctactagatttcactattttcttttttatcttgatcgggcctactgaatttttgc

SEQ ID NO: 1945 - protein, 474 aa, Zea mays subsp. mays
  misc_feature (1)..(474): Ceres Seq. ID no. 15180150
MANASKHLQPSSQAGNDKKYQGTLVASPAKAISPKCVNRIVPSKQLILGGGSIGHVASFLIKVVALEAVRRVSKTRCPFIWNSVQALQILVYPPFSWIQRWAPLGFLVQGIQKLSMPLLFLSVTTTVSELSSKHDDEPDNNTEHSETPSETNELASTSGTSDAADGTKEIVQENWLVLLFRELEKQGITLPERFTEDELRRFYVAANGDFQSLLSSVKKTIHWRETFHILTLQELDRWSHLVFWHGFDTMLRPCLVVRLGLACSSIPPHDRPRFGQAVVSQIDHGVVNLINEEDSRITVLLDCHGISPFRFPMQMMRSFITVVQENYPNRLGVLFVIRLPPVVRVIAQTFLQVLKPATKQKLRFEGDSYKKALAEFLQAVPAFLGGKCSCPRCESPRDDSVIQAGEGSKKQPRLVSVDDGLPVTDLDFDLDEEIPSPYSCENAIRAAIIGLLMVCIFVAFLAGMIDPASVPASA

SEQ ID NO: 1946 - protein, 359 aa, Zea mays subsp. mays
  misc_feature (1)..(359): Ceres Seq. ID no. 15180151
MPLLFLSVTTTVSELSSKHDDEPDNNTEHSETPSETNELASTSGTSDAADGTKEIVQENWLVLLFRELEKQGITLPERFTEDELRRFYVAANGDFQSLLSSVKKTIHWRETFHILTLQELDRWSHLVFWHGFDTMLRPCLVVRLGLACSSIPPHDRPRFGQAVVSQIDHGVVNLINEEDSRITVLLDCHGISPFRFPMQMMRSFITVVQENYPNRLGVLFVIRLPPVVRVIAQTFLQVLKPATKQKLRFEGDSYKKALAEFLQAVPAFLGGKCSCPRCESPRDDSVIQAGEGSKKQPRLVSVDDGLPVTDLDFDLDEEIPSPYSCENAIRAAIIGLLMVCIFVAFLAGMIDPASVPASA

SEQ ID NO: 1947 - DNA, 1313 bp, Zea mays subsp. mays
  misc_feature (1)..(1313): Ceres Seq. ID no. 15180152
acagcaagtagatggacacgcagcacggcaacttttattgcttgtcccgtcgtgcctgcctgccgcgccctcctcatcctcctcctccctcttcctcttgcgcgtcgccaccaccaaattccaaaccgcaatcccgccgcaatccgctccccgcgcgcgaaatcggctcacgcgtcctccgcttttcggctcacgggtcgctgaattgttctttctgctcgctcgctcgctgacttccactcaactgctcgcctggccgcctcctgctagtgcttcaatcgcccggcccccactcgcttgaaggcttccggaagctcgatcccttccgctcgctagctggctgcacagatcttcctcccgaggttcctctttctaccgtcgagtcgaatcggatcaccggagctatcggattcctcaaaatccgagactttggccgcccgccaccccgtctcagtggcggagctgctccgtctggtccgcctctgcctctctggcttgggggcgctctagggttcccgcgcgcgcgccccgtgatgctcgggaatggcgcttaaggccacggcgcagggcgccgcggaggcggccgtagcggccatcggccggggctacgacgttgtttccgacgtccgcctcaagtactgcaagggcaagctcgcggacccggacgcgcgactcattgacgtttcccgcgatggggtccaggacgtcctgctccccggcgggatcaaggtcgctgccgtccccaagtccgtcacgtgtgacaagggcgagcgcacgcggttccgctccgacgtcctctcctttcagcagatgtcagagctgttcaaccgggagctatcgttgaccgggaaaattccctccggcatgttcaatagcatgtttgatttttccgggtgctggcagaaagatgcagctaacaccaagtcacttgcttttgatggctggtacatttcgctatatacgctcgcactgtcaaaatctcgtattctactccgggatcatgttactcaggcagttccttcaacctgggaccctgctgctttggcaaggtttattgataagtttggaacacacatagttgtcggtgtaaaaatgggagggaaagatgttatatatttgaaacaacaacattcgtcaagcttgcaaccagctgctgtgcagaaacgactcaaggacatgtcggacatgagatttctggatggaaatggacagtatgacatgaacaacaagcatgtgcacgggaaggacaagcatgatgcaagagatcaacggctaagatttgttactctgagctaatgacattgcagttttcc

SEQ ID NO: 1948 - protein, 250 aa, Zea mays subsp. mays
  misc_feature (1)..(250): Ceres Seq. ID no. 15180153
MALKATAQGAAEAAVAAIGRGYDVVSDVRLKYCKGKLADPDARLIDVSRDGVQDVLLPGGIKVAAVPKSVTCDKGERTRFRSDVLSFQQMSELFNRELSLTGKIPSGMFNSMFDFSGCWQKDAANTKSLAFDGWYISLYTLALSKSRILLRDHVTQAVPSTWDPAALARFIDKFGTHIVVGVKMGGKDVIYLKQQHSSSLQPAAVQKRLKDMSDMRFLDGNGQYDMNNKHVHGKDKHDARDQRLRFVTLS

SEQ ID NO: 1949 - protein, 161 aa, Zea mays subsp. mays
  misc_feature (1)..(161): Ceres Seq. ID no. 15180154
MSELFNRELSLTGKIPSGMFNSMFDFSGCWQKDAANTKSLAFDGWYISLYTLALSKSRILLRDHVTQAVPSTWDPAALARFIDKFGTHIVVGVKMGGKDVIYLKQQHSSSLQPAAVQKRLKDMSDMRFLDGNGQYDMNNKHVHGKDKHDARDQRLRFVTLS

SEQ ID NO: 1950 - protein, 143 aa, Zea mays subsp. mays
  misc_feature (1)..(143): Ceres Seq. ID no. 15180155
MFNSMFDFSGCWQKDAANTKSLAFDGWYISLYTLALSKSRILLRDHVTQAVPSTWDPAALARFIDKFGTHIVVGVKMGGKDVIYLKQQHSSSLQPAAVQKRLKDMSDMRFLDGNGQYDMNNKHVHGKDKHDARDQRLRFVTLS

SEQ ID NO: 1951 - DNA, 1440 bp, Zea mays subsp. mays
  misc_feature (1)..(1440): Ceres Seq. ID no. 15180204
atttccaccacctcgcaccaggctccactcctctccttcccttccctccccctttcgctcccctcctcgctcgcctcgcttctcgccgagccacccgaccaattcccccgccccccgcgcgcccagatcgccgccattcccttccccgccctgccgcgacgatcccgctgccaccgcaccttctccctcccgtcgtcctcccctccccgcagctggcggtcggtcggtcggacggaggaagccacagccggcggccagagagcgccgcagcgtgcccgcggatgggctggtaggaggcggcggcggcggtgactgtgttagcggcggcggcggcagccatgtatttcgccaaactcgatgactcgcccatgttccggacgcagatacaatcacttgaggagagtgctgaattgctgagagagagatgtttgaagttccataaaggttgccgtaagtatactgaaggactaggggaagcatacgatggagatattgcatttgccagctcacttgaaacatttggaggaggccacaatgatccaatgagtgtcgcttttggtgggcctgtaatgaccaaatttacaattgccttaagagaaattggaacatacaaggaagtcctgcgctcccaggttgagcacatgttaaatgacagattactgaattttgttgacattgatttgcatgatgtgaaggatgctcataagcgctttgacaaggctagcctctcatatgaccagattcgtgaaaagtacctatcattgaagaaaggtacccgaccggacataacaacagcaattgaagatgagcttcacagtgctagatcttcatttgagcaagctcgtttcaacctggtcacttcactttcccatgtcgaggcaaagaagagatttgaatttttggaggctgttagtgcgacaatggattcacatcttcgttattttaaacaaggatatgaactattgcatcaaatggagccatatattaatcagattcttgcttatgcacagcaatcacgagaaagagcaaacaaggaacaagcttctcttgtagagaggatgcatgagtacaaaaggcagatagatcgggaaagtcggtcttctataaatggtttgaatgattcttataatggtgatcgaatgcagacaattggcagaagttcacataaacagatcgaggcagttatgcagtcaacttcaaaaggaaaggtcgagaccattcgtcaaggttatctttcgaaaagatcttcaaacttgagagctgactggaaaagaaggttcttcgtacttgatagtcgaggaatgctgtactactatcggaaacaaattactcggccacctgtaggtctccgatgtaacattcgttgttgaaatgctcattaagttggcataatattttgttccatgatgcatgatatattttaattcagatattttcctc

SEQ ID NO: 1952 - protein, 343 aa, Zea mays subsp. mays
  misc_feature (1)..(343): Ceres Seq. ID no. 15180205
MYFAKLDDSPMFRTQIQSLEESAELLRERCLKFHKGCRKYTEGLGEAYDGDIAFASSLETFGGGHNDPMSVAFGGPVMTKFTIALREIGTYKEVLRSQVEHMLNDRLLNFVDIDLHDVKDAHKRFDKASLSYDQIREKYLSLKKGTRPDITTAIEDELHSARSSFEQARFNLVTSLSHVEAKKRFEFLEAVSATMDSHLRYFKQGYELLHQMEPYINQILAYAQQSRERANKEQASLVERMHEYKRQIDRESRSSINGLNDSYNGDRMQTIGRSSHKQIEAVMQSTSKGKVETIRQGYLSKRSSNLRADWKRRFFVLDSRGMLYYYRKQITRPPVGLRCNIRC

SEQ ID NO: 1953 - protein, 333 aa, Zea mays subsp. mays
  misc_feature (1)..(333): Ceres Seq. ID no. 15180206
MFRTQIQSLEESAELLRERCLKFHKGCRKYTEGLGEAYDGDIAFASSLETFGGGHNDPMSVAFGGPVMTKFTIALREIGTYKEVLRSQVEHMLNDRLLNFVDIDLHDVKDAHKRFDKASLSYDQIREKYLSLKKGTRPDITTAIEDELHSARSSFEQARFNLVTSLSHVEAKKRFEFLEAVSATMDSHLRYFKQGYELLHQMEPYINQILAYAQQSRERANKEQASLVERMHEYKRQIDRESRSSINGLNDSYNGDRMQTIGRSSHKQIEAVMQSTSKGKVETIRQGYLSKRSSNLRADWKRRFFVLDSRGMLYYYRKQITRPPVGLRCNIRC

SEQ ID NO: 1954 - protein, 275 aa, Zea mays subsp. mays
  misc_feature (1)..(275): Ceres Seq. ID no. 15180207
MSVAFGGPVMTKFTIALREIGTYKEVLRSQVEHMLNDRLLNFVDIDLHDVKDAHKRFDKASLSYDQIREKYLSLKKGTRPDITTAIEDELHSARSSFEQARFNLVTSLSHVEAKKRFEFLEAVSATMDSHLRYFKQGYELLHQMEPYINQILAYAQQSRERANKEQASLVERMHEYKRQIDRESRSSINGLNDSYNGDRMQTIGRSSHKQIEAVMQSTSKGKVETIRQGYLSKRSSNLRADWKRRFFVLDSRGMLYYYRKQITRPPVGLRCNIRC

SEQ ID NO: 1955 - DNA, 1904 bp, Zea mays subsp. mays
  misc_feature (1)..(1904): Ceres Seq. ID no. 15180208
accattcgcccccctcacgtcccatcgcgccgctcccttcgtcctggggtgtcctcctccatggccaccgccaccgccgcctgccgctcgcccacggccgccgccgccgcgccctgacgctgctgctgctgctagactgctagaggaggaggccggggcaggcagctcgcgagctcgatcgcctggcgggcccgagctggagtcgatggtgctggatctcaatgccgagtcgccgacgcccggctcggcctcggccgcctcgagctccagcgtcgtagtgggcgggggcttcttccggttcgacctgctcggagggacacccgacgaggagggttgctcgccctcgccacccatcgtgacgcgccagctcttccccttgccgtacccggacgctgcaggtagcaccgccgcctcgacggcgtcgaacgggtcgccgccgccggaggtggcgggggcatgggcgcgccgcccagcggatctcggggcgccggcgctggcacaggggaaggtgatgtctgcgccttcgtcgcccgcggttttgtctcctgccgccgggaagaagagccggcgggggcccaggtcgcggagctcgcaataccggggcgtcaccttctacaggaggaccggccgctgggagtcacacatctgggactgcgggaagcaggtctacctgggtggatttgatactgcgcacgccgcagcaagggcctatgatcgcgctgccatcaagttcagaggccttgacgccgacatcaacttccagttgaaggactatgaagatgacttgaagcagatgaggaattggactaaggaggagtttgttcacatactccgacgtcaaagcactgggtttgccagggggagctcaaagtaccgcggtgtgacactacacaagtgtggtcggtgggaagctcggatgggtcagcttctcggaaagaagtacatctaccttggtctatttgacagtgaaatcgaagcagcaagagcgtatgatagggcagccattcgcttcaatggaccggatgctgttaggaactttgattctgtttcctatgatggagatgtcccacttccacctgcaattgagaaagatgtggttgatggagacatccttgatctgaatttgaggatttcacaacctaacgtgcatgatctcagaagtgatggtaccctgactggttttggattaagttgtaattctcctgaagcttcaagctccattgtttctcagccaatgggcccccagtggcctgtccatcctcacagcagatcgatgcggccccagcatccacatctgtatgcatctccttgtccaggcttctttgtgaacctcagggaggcgcctatgcaggaagaggagaaccggtccgagccggcgtgtccccagccgttcccctcctgggcatggcaaacgcagggctcccgtgccccagttctccctgccaccactgcagcatcatcaggattctctaccgccgctgccaccggcgtggacgcggccacagccggccacagcgtgccgccgccgtctggtagcctccggcagttctcgggctaccaccagctccgcttccccccaaccgcctgacggagacagaccacctcctgttgagttggcggcggcggcggcgtctcatagctggccggtggttggctggctgcccatgcaacgccacgccggtgggtgcgggtcggtattcggtaacagtcgccactgttgggtatggttttgtgggactacagaggatgcagtgatctctcgctgctgctgtgtgctgtctctctcgctccctctacccacccacacctgtttgtaatatgaatttatcgccctctcgcgctcgtgattcgtccatcttcgtttcgttttgatggccaccggatgggatcatgagcgtgttgcg

SEQ ID NO: 1956 - protein, 528 aa, Zea mays subsp. mays
  misc_feature (1)..(528): Ceres Seq. ID no. 15180209
PFAPLTSHRAAPFVLGCPPPWPPPPPPAARPRPPPPRPDAAAAARLLEEEAGAGSSRARSPGGPELESMVLDLNAESPTPGSASAASSSSVVVGGGFFRFDLLGGTPDEEGCSPSPPIVTRQLFPLPYPDAAGSTAASTASNGSPPPEVAGAWARRPADLGAPALAQGKVMSAPSSPAVLSPAAGKKSRRGPRSRSSQYRGVTFYRRTGRWESHIWDCGKQVYLGGFDTAHAAARAYDRAAIKFRGLDADINFQLKDYEDDLKQMRNWTKEEFVHILRRQSTGFARGSSKYRGVTLHKCGRWEARMGQLLGKKYIYLGLFDSEIEAARAYDRAAIRFNGPDAVRNFDSVSYDGDVPLPPAIEKDVVDGDILDLNLRISQPNVHDLRSDGTLTGFGLSCNSPEASSSIVSQPMGPQWPVHPHSRSMRPQHPHLYASPCPGFFVNLREAPMQEEENRSEPACPQPFPSWAWQTQGSRAPVLPATTAASSGFSTAAATGVDAATAGHSVPPPSGSLRQFSGYHQLRFPPTA

SEQ ID NO: 1957 - protein, 460 aa, Zea mays subsp. mays
  misc_feature (1)..(460): Ceres Seq. ID no. 15180210
MVLDLNAESPTPGSASAASSSSVVVGGGFFRFDLLGGTPDEEGCSPSPPIVTRQLFPLPYPDAAGSTAASTASNGSPPPEVAGAWARRPADLGAPALAQGKVMSAPSSPAVLSPAAGKKSRRGPRSRSSQYRGVTFYRRTGRWESHIWDCGKQVYLGGFDTAHAAARAYDRAAIKFRGLDADINFQLKDYEDDLKQMRNWTKEEFVHILRRQSTGFARGSSKYRGVTLHKCGRWEARMGQLLGKKYIYLGLFDSEIEAARAYDRAAIRFNGPDAVRNFDSVSYDGDVPLPPAIEKDVVDGDILDLNLRISQPNVHDLRSDGTLTGFGLSCNSPEASSSIVSQPMGPQWPVHPHSRSMRPQHPHLYASPCPGFFVNLREAPMQEEENRSEPACPQPFPSWAWQTQGSRAPVLPATTAASSGFSTAAATGVDAATAGHSVPPPSGSLRQFSGYHQLRFPPTA

SEQ ID NO: 1958 - protein, 358 aa, Zea mays subsp. mays
  misc_feature (1)..(358): Ceres Seq. ID no. 15180211
MSAPSSPAVLSPAAGKKSRRGPRSRSSQYRGVTFYRRTGRWESHIWDCGKQVYLGGFDTAHAAARAYDRAAIKFRGLDADINFQLKDYEDDLKQMRNWTKEEFVHILRRQSTGFARGSSKYRGVTLHKCGRWEARMGQLLGKKYIYLGLFDSEIEAARAYDRAAIRFNGPDAVRNFDSVSYDGDVPLPPAIEKDVVDGDILDLNLRISQPNVHDLRSDGTLTGFGLSCNSPEASSSIVSQPMGPQWPVHPHSRSMRPQHPHLYASPCPGFFVNLREAPMQEEENRSEPACPQPFPSWAWQTQGSRAPVLPATTAASSGFSTAAATGVDAATAGHSVPPPSGSLRQFSGYHQLRFPPTA

SEQ ID NO: 1959 - DNA, 1610 bp, Zea mays subsp. mays
  misc_feature (1)..(1610): Ceres Seq. ID no. 15180226
agatcagatgagctcgtgcacagggtcctcggccgcagaagatacggcgaacgcattcaaaatccatctccttccaaaagcgtcgagtcgagccgatccaccttcccgaacaacgccgcccgccgcccttcgaatccgaaggaagccgcaacaacgaccccatccgaatctctcgcaacgatcaccaccgccaacttatcttcctcgttcgggtcgcccccaccctcgcccgccgtccagcagcgaaaccttcacccttcctcgtcccgccaccccccgcacgccatggtgcagaggaagcccgcgcgcaagcgcaaggagcccaaatgccccgacgccgtgccggcctggggcggcggccgtggcccgggaagcagggctggcgatggcggcatagccccggcgcaactccccaactacatgagggcgacgagctgctccggcgccaaggccggcgccgcacaagcccactccgcgccgcagccggggagggcgagcgtggcgcgggcggctgccgcggcgccgcgggcgggcagggccacgtgctcctccgccatgaaggggcccggggcgcgcgcgtgcccgtacgcgttctgctccgtcaagggccacgcccacgcgccgcccctgcgcagcttcgtggcggcgcggaggcgggggcagcagagcatgaagctcaagggcgcctcgccgttccgcaagcccacggtgggttgggacgcgagccgcggcgacgtctccgcggagggcctgggcgcggcttccgtgggcggttcgtgcgcgtccagcggcgtggtctcggttgagcggtcgacgacgaccaggcatcgcgggcgtgaagagaagaaggccttggtggtggaggtggcggatcatgaatgcgacgacgacttgggcgccggcgagtctgacatctccgaggagctgggtgcgaaccatggaggaaacagtactgaaggtggcatatcgtcggtcgacagcatttccagctcgctcagtgggataagctaccaagacgttagctctgcctgtgcctacggagcatcctctcatcatcaccatcagaggaggaggacatccgaagaaaagggtgcccagcaactgcgtccttccaaacccggtccaaaggcggagaaggtcggtctcagacatgaggcggtggacggtcggagggccgctgaggagtggatggtcgactacgctctccggaaggaagtcaagaggctggctcgtgctcagaagaggaaagttgagatgcttgtccaggccttcgaatctgttctgcccacggtagcaatagcaagcgagaagaagcccgggcaacacgatggccttcgaaagcatgcatgtagctgacagatagatagatagaatcatagatagccgacactcatcttgagtcaggtagtagtaggacgtgacaatttgagtcaggtagatgaaacgtttcaattcagtcaaacactagtcacaacggatacaaggtttgatgctccaccaaccactgatccgttgtgaacttgtagtagaagcaggccaccgctggcaatgtggcatgccatgccatcaacctaacatggaccattctgaatgtcggctcaaaacgtgac

SEQ ID NO: 1960 - protein, 451 aa, Zea mays subsp. mays
  misc_feature (1)..(451): Ceres Seq. ID no. 15180227
RSDELVHRVLGRRRYGERIQNPSPSKSVESSRSTFPNNAARRPSNPKEAATTTPSESLATITTANLSSSFGSPPPSPAVQQRNLHPSSSRHPPHAMVQRKPARKRKEPKCPDAVPAWGGGRGPGSRAGDGGIAPAQLPNYMRATSCSGAKAGAAQAHSAPQPGRASVARAAAAAPRAGRATCSSAMKGPGARACPYAFCSVKGHAHAPPLRSFVAARRRGQQSMKLKGASPFRKPTVGWDASRGDVSAEGLGAASVGGSCASSGVVSVERSTTTRHRGREEKKALVVEVADHECDDDLGAGESDISEELGANHGGNSTEGGISSVDSISSSLSGISYQDVSSACAYGASSHHHHQRRRTSEEKGAQQLRPSKPGPKAEKVGLRHEAVDGRRAAEEWMVDYALRKEVKRLARAQKRKVEMLVQAFESVLPTVAIASEKKPGQHDGLRKHACS

SEQ ID NO: 1961 - protein, 356 aa, Zea mays subsp. mays
  misc_feature (1)..(356): Ceres Seq. ID no. 15180228
MVQRKPARKRKEPKCPDAVPAWGGGRGPGSRAGDGGIAPAQLPNYMRATSCSGAKAGAAQAHSAPQPGRASVARAAAAAPRAGRATCSSAMKGPGARACPYAFCSVKGHAHAPPLRSFVAARRRGQQSMKLKGASPFRKPTVGWDASRGDVSAEGLGAASVGGSCASSGVVSVERSTTTRHRGREEKKALVVEVADHECDDDLGAGESDISEELGANHGGNSTEGGISSVDSISSSLSGISYQDVSSACAYGASSHHHHQRRRTSEEKGAQQLRPSKPGPKAEKVGLRHEAVDGRRAAEEWMVDYALRKEVKRLARAQKRKVEMLVQAFESVLPTVAIASEKKPGQHDGLRKHACS

SEQ ID NO: 1962 - protein, 311 aa, Zea mays subsp. mays
  misc_feature (1)..(311): Ceres Seq. ID no. 15180229
MRATSCSGAKAGAAQAHSAPQPGRASVARAAAAAPRAGRATCSSAMKGPGARACPYAFCSVKGHAHAPPLRSFVAARRRGQQSMKLKGASPFRKPTVGWDASRGDVSAEGLGAASVGGSCASSGVVSVERSTTTRHRGREEKKALVVEVADHECDDDLGAGESDISEELGANHGGNSTEGGISSVDSISSSLSGISYQDVSSACAYGASSHHHHQRRRTSEEKGAQQLRPSKPGPKAEKVGLRHEAVDGRRAAEEWMVDYALRKEVKRLARAQKRKVEMLVQAFESVLPTVAIASEKKPGQHDGLRKHACS

SEQ ID NO: 1963 - DNA, 919 bp, Zea mays subsp. mays
  misc_feature (1)..(919): Ceres Seq. ID no. 15180249
aagtttgcagaaacgaaagcagcagcccaattgggagctccaccccacacaacccaacccgccacctctcatggcgactgctgcgaccaccaccaggaggccgagcggccccgtcctctcggccgcgcactaccgctacgcctcgcccacgcgcgtctcgctctccggcgccgggcagtccgtcagcgtcagcgtctcgtcgtcgtcgcggggccgacggacctgcatgtgctcgccgaccagccacccgggctcgttccgctgcagcctgcacaaggagcgcgcgacgaagccgccgccgccgcacgggcacggcaagccgacctccccgccgccgcccctgaccaccaccagccgtctgtgcgcggcgggcaggcggatgggcagcgcgctggtgcggatcggcgccgtcgagggcggccagtgcgcgcgccgcgcgctcgcggcaaccgcccgcccgtcccccgccgcggcgcagcaccgccgccgcgtcggcgccggcgccggcgccgcccggccccgccccagccgcctctccgccgtctccgtggccggcgaccgccccggcgacaacggccacctatagacccgccgccgccttgccaccgtaccgtgtagagctagcctagcggcactagtagtaacagtatagtactagcatcgtagtaataataataaaaaaaaactggagcggcggttaactagaagaaagaacagagcagagccgggaggttggagcgctggatcaggactagttttgggagcctggtccatggatcatcatcaccatccagggaaaaaggctctctctctctttctctctcttgtacgtgtacatagaattgcagatgatgggatgcatgcgagtgtccagtttggatttcttggatggataaacatgaccggaggaatggagact

SEQ ID NO: 1964 - protein, 205 aa, Zea mays subsp. mays
  misc_feature (1)..(205): Ceres Seq. ID no. 15180250
KFAETKAAAQLGAPPHTTQPATSHGDCCDHHQEAERPRPLGRALPLRLAHARLALRRRAVRQRQRLVVVAGPTDLHVLADQPPGLVPLQPAQGARDEAAAAARARQADLPAAAPDHHQPSVRGGQADGQRAGADRRRRGRPVRAPRARGNRPPVPRRGAAPPPRRRRRRRRPAPPQPPLRRLRGRRPPRRQRPPIDPPPPCHRTV

SEQ ID NO: 1965 - protein, 194 aa, Zea mays subsp. mays
  misc_feature (1)..(194): Ceres Seq. ID no. 15180251
SLQKRKQQPNWELHPTQPNPPPLMATAATTTRRPSGPVLSAAHYRYASPTRVSLSGAGQSVSVSVSSSSRGRRTCMCSPTSHPGSFRCSLHKERATKPPPPHGHGKPTSPPPPLTTTSRLCAAGRRMGSALVRIGAVEGGQCARRALAATARPSPAAAQHRRRVGAGAGAARPRPSRLSAVSVAGDRPGDNGHL

SEQ ID NO: 1966 - protein, 171 aa, Zea mays subsp. mays
  misc_feature (1)..(171): Ceres Seq. ID no. 15180252
MATAATTTRRPSGPVLSAAHYRYASPTRVSLSGAGQSVSVSVSSSSRGRRTCMCSPTSHPGSFRCSLHKERATKPPPPHGHGKPTSPPPPLTTTSRLCAAGRRMGSALVRIGAVEGGQCARRALAATARPSPAAAQHRRRVGAGAGAARPRPSRLSAVSVAGDRPGDNGHL

SEQ ID NO: 1967 - DNA, 1144 bp, Zea mays subsp. mays
  misc_feature (1)..(1144): Ceres Seq. ID no. 15180261
cgttgatgaatgtttgaaacttcttttcctcttccacacactagcacaatcaaagaaataccgacaagatgctacaactcttctgctggaggccttgctgatggttttctctctgtccagtgatactgtttcacaggagcttgctgaagtgaacaccatttccagaaagttgttctctcattttattcagattccgtctgtggctatacagatcaaagacataatgctttctgcaccagctgaaaggagactacagcttcaggacatggtccgagcttcagtcaagggcagataacggtgccagtggctacgagtgcacactcagaacagaatattcaggatagttgcagtaaaaaccctgggtccacatctgaagcttctgattgtgttgcaactcacgggaataatgacaatgaagttgttgatgatgactgggatgacgattgggatgctttccaatctcttcctgcaattgcaaatgatggtgttgattctggagaaatctctcttacaactaggtacaatgaacagatccctcaagaaaatagcagttacggttcttgtaatgcggatattacagctcgtgctatggaagacataacttgtgtggacaaggaacttgaggagccctctgatttgcaattctcaagtactgaacaacagcctaaacatgatttaccagggtcatcccacgaaggttgtgctaaacttgaaagacatccatctgttgattgcaaagagcaattagctgatgatgagacagcagatgaactgcagcagcaggttcatgaagacactgatcatgtaaataaagatagcgaagttctctctgcagaaattcatggggttaaattggatatccttgatgaagatgttgaagatgattccccaatgaattcaaacaatctatcagatatcgcagaggaagagtcctagggttggtacaatgcaacgagggtggaccgcaagcttgtcgagatagtagagaagagctgtccggttcctctgatgctggcataccagattttagtatgtcaggacacgtgatgagcaagagcggaggaaatgagcaaaatgttattttgcctgtatcaatatatattgcacgagataaaaataatataaggttacaaccatgattttt

SEQ ID NO: 1968 - protein, 115 aa, Zea mays subsp. mays
  misc_feature (1)..(115): Ceres Seq. ID no. 15180262
MEDITCVDKELEEPSDLQFSSTEQQPKHDLPGSSHEGCAKLERHPSVDCKEQLADDETADELQQQVHEDTDHVNKDSEVLSAEIHGVKLDILDEDVEDDSPMNSNNLSDIAEEES

SEQ ID NO: 1969 - protein, 97 aa, Zea mays subsp. mays
  misc_feature (1)..(97): Ceres Seq. ID no. 15180263
VDECLKLLFLFHTLAQSKKYRQDATTLLLEALLMVFSLSSDTVSQELAEVNTISRKLFSHFIQIPSVAIQIKDIMLSAPAERRLQLQDMVRASVKGR

SEQ ID NO: 1970 - protein, 64 aa, Zea mays subsp. mays
  misc_feature (1)..(64): Ceres Seq. ID no. 15180264
MTMKLLMMTGMTIGMLSNLFLQLQMMVLILEKSLLQLGTMNRSLKKIAVTVLVMRILQLVLWKT

SEQ ID NO: 1971 - DNA, 1022 bp, Zea mays subsp. mays
  misc_feature (1)..(1022): Ceres Seq. ID no. 15180273
gccagttgccaccagccactaggacgtcgctgcttccacgcctcctttactcctgctccaacggtgtattccaagcacagcgagaaagcggagacctttgcgcgagtgcgctctcgttctacctccagcagcagcagcagcggcgccgcagcggcatgccgaggagacggcacggagggttccggctcggctggaagctgctcggcgtctggcgctgggcggcgctctgccggcgccgccgccgcggccgcgggtacctccgcctgcacccgcgccaacaaggaggaggcagcgacagatccccgcccctccaggcgggtgtagcagcggtgtgcgccacgaagcagaagaagcagcagcagcagcagcgggatgactctgccgactcgcctcggatgctcacgtgggggcggtcgctggcgcggcggatgagcctcctgcgccggcgtgcgggagggaagggccggctgctggaggacgaggacgccgcggaggccaccacgcccaaggggcaggtggccgtgtacgtgggcggcgccgagcccggggcagagtcgatgcggtacgtggtccccgtggtgtacttcaaccacccgctgttcggggagctgctgcgcgaggccgaggaggagttcggcttccagcaccccggcgggatcaccatcccgtgcgcggcctcgcgcttcgagcgcgccgccgccgtcgtcgccgcgggcggcggcgccgggaagaaggtgcccgctggctggtggtagtgctagcagcatgtggcccacacggtggccgctgtacataccacacgtgcatgctcctgaccctcttcccctcagcggctcagcctcaggcaggaggtgaggaggatcccgattcccatggggaacgatccttcttctttttctttctcattagtttgactctttttttttttgcctctgttggacaccaaaataaacggacggtccggtccatgggcccggacggtccgcgtgtcccgagattagattaactcggatgtttatccg

SEQ ID NO: 1972 - protein, 250 aa, Zea mays subsp. mays
  misc_feature (1)..(250): Ceres Seq. ID no. 15180274
QLPPATRTSLLPRLLYSCSNGVFQAQRESGDLCASALSFYLQQQQQRRRSGMPRRRHGGFRLGWKLLGVWRWAALCRRRRRGRGYLRLHPRQQGGGSDRSPPLQAGVAAVCATKQKKQQQQQRDDSADSPRMLTWGRSLARRMSLLRRRAGGKGRLLEDEDAAEATTPKGQVAVYVGGAEPGAESMRYVVPVVYFNHPLFGELLREAEEEFGFQHPGGITIPCAASRFERAAAVVAAGGGAGKKVPAGWW

SEQ ID NO: 1973 - protein, 199 aa, Zea mays subsp. mays
  misc_feature (1)..(199): Ceres Seq. ID no. 15180275
MPRRRHGGFRLGWKLLGVWRWAALCRRRRRGRGYLRLHPRQQGGGSDRSPPLQAGVAAVCATKQKKQQQQQRDDSADSPRMLTWGRSLARRMSLLRRRAGGKGRLLEDEDAAEATTPKGQVAVYVGGAEPGAESMRYVVPVVYFNHPLFGELLREAEEEFGFQHPGGITIPCAASRFERAAAVVAAGGGAGKKVPAGWW

SEQ ID NO: 1974 - DNA, 841 bp, Zea mays subsp. mays
  misc_feature (1)..(841): Ceres Seq. ID no. 15180292
gttttttcgtcttcctcgcagcgccgccgctccatcttccgctgatccgctcgctcccgcctctcgccacgcaggcggcggcgctcaggcccgtgatttcagcgacggcgtcagcggcttcccctcccgtctcttcccagtcgcctcgcgccctcgcctccggtcctccgcacaccggccggtgaccctgcatccaccatgactggtgtcagcactgggagaccggcgggtcggaggccccgcaggaggcggaggcggagcccgcgacgccgacgtccgtggggagccagctgcggcggccggccgagtgcccgccggcgccgcggaagccggcgtgggcgcctccgccgccgtccacgcccgcctacaagcgcagcaggccgtccccgccctcctccgcggcgccggcgccggcgcgccgggccttcttccccgtcgcgcgcgacctcaccaccgtgttccgcgccctggcgccgcccaagaagcggatccgcgcgggctgacgacgggggcggtggcgttctccctggcgcgcagcacgggacgggaccggcgtggcgtggatctggtgcccagtccgccattggccgtggcgacgccgtcagtcatcagtaggtgcgcggtcatggcatggtacagagctctcgtacaaataagttctgttttttttatttggggggagggggagtgtagaattgggaaagaggctgttgtttacgtatgggggaggatgaatggggcattgaaagcttgtaaagagaattcctacagatttgttcattgtatttgttaaactatacttgctgacagtttgagaaaaatagtgaactttcacctgaat

SEQ ID NO: 1975 - protein, 138 aa, Zea mays subsp. mays
  misc_feature (1)..(138): Ceres Seq. ID no. 15180293
MTGVSTGRPAGRRPRRRRRRSPRRRRPWGASCGGRPSARRRRGSRRGRLRRRPRPPTSAAGRPRPPPRRRRRRAGPSSPSRATSPPCSAPWRRPRSGSARADDGGGGVLPGAQHGTGPAWRGSGAQSAIGRGDAVSHQ

SEQ ID NO: 1976 - DNA, 1268 bp, Zea mays subsp. mays
  misc_feature (1)..(1268): Ceres Seq. ID no. 15180309
acctctctcctcccttccctcgcctcgctcctctctatcctcatcgagcagcagcggccgagaagcacgcattcagcagatccggggacacctcagctagggacgcagtggtacaagaaggcgccgtcgagtgccttgtctgggcgctcgacccctcctcctcctcgtcgtcgtcgaaggtgcgggaggtggccctccgcgccatcgacgtgttgtgcctgtcgccgcccaactctaccgggcgtctcctcgccgccgggttcctcgaccgcgtcctctccctcctccgcaatggcgacaacacgctgctgcggcactgcgcgctgaaggccgcgcaccgcctgtgctaggtgtcggaggaggtgaagaaggcgatgagcgacgccgggttcatgccggagctggtgggcgtcctcggcgcgtccagtaagtccctcgaggcacgggagatggcgggcgagtcgctgtgcgccctggttaccgtgccccgcaaccggaagcggttcgtccaggaggaccgcgacgtggcgcgggtgctgcagctgctgggccccgacgaggagaaggagaagcccgcgccggcgaggcggttcctgctttcgacggtggcgcacctcacggacagcagctccggccggaggaagatcatgtcctcggagcacatcaggaatctcgagaagcttgcggaggcctatgtcccagacgccaaacggatcgtgaagaggcttggcgggagcaggctgaggagcattttccatggcatttggagcctgtaatgttgtgttgtaacccttggaggcaagacaagcagtcaagcacgcagtagtagtgtctctggctaacacatacagtactattgttccttgcatcgtttgttactgtgaaggaatcaaagaatgagtcacccagtgatttgcggaacatggcggccgggatgatgatgagcccgccgaggctcagccccaacaacggctgggattagatggttggatgatcggatgacaggcaattgaaaaagagaattgatcttttttatgggcgaagtgttgaagatggctttggtgaaggaaatgtcttgttagcatcaagtaagtggcgatatcacaacccctacaagcttgtgccttaaaacaagaggatacaagaagttggagtgcttttgtgaaggcttttgcgaatcacttgaagcgttagtacttttgtgaatgattttgtaaagtgtttgcaaatatgtgcaaaacataataacatgtgtaggttttgtgaat

SEQ ID NO: 1977 - protein, 133 aa, Zea mays subsp. mays
  misc_feature (1)..(133): Ceres Seq. ID no. 15180310
MSDAGFMPELVGVLGASSKSLEAREMAGESLCALVTVPRNRKRFVQEDRDVARVLQLLGPDEEKEKPAPARRFLLSTVAHLTDSSSGRRKIMSSEHIRNLEKLAEAYVPDAKRIVKRLGGSRLRSIFHGIWSL

SEQ ID NO: 1978 - protein, 127 aa, Zea mays subsp. mays
  misc_feature (1)..(127): Ceres Seq. ID no. 15180311
MPELVGVLGASSKSLEAREMAGESLCALVTVPRNRKRFVQEDRDVARVLQLLGPDEEKEKPAPARRFLLSTVAHLTDSSSGRRKIMSSEHIRNLEKLAEAYVPDAKRIVKRLGGSRLRSIFHGIWSL

SEQ ID NO: 1979 - protein, 115 aa, Zea mays subsp. mays
  misc_feature (1)..(115): Ceres Seq. ID no. 15180312
LSPPFPRLAPLYPHRAAAAEKHAFSRSGDTSARDAVVQEGAVECLVWALDPSSSSSSSKVREVALRAIDVLCLSPPNSTGRLLAAGFLDRVLSLLRNGDNTLLRHCALKAAHRLC

SEQ ID NO: 1980 - DNA, 681 bp, Zea mays subsp. mays
  misc_feature (1)..(681): Ceres Seq. ID no. 15180320
gacgcacaccaagtctactctcacctcctccgtctctcagatccacgctgcctagttgttcggacttcagaccccgccgtgcgctgcccatggccgcgggtcgcggcgacgccgcgagcatggtggcagtgggtctggtgtggggcgccaccaacgcgctgatgcggcggggcgcgctcgtctgggaccgccgcgcccgtgcctgcccctccggtaacgtcctccggcggtgggcggagctgctcctgacgtggcagtactcggcgccgttcgccgccaacctgagcgcgtccgcggccttcttcgcgctcctcggcgccgcgcccatctccgtggccgtccccgtcaccaacgccgtcactttcgccgccacggccgccgccgccgcggccctcggcgagcgcgtccggccagcgcccgcggtccttggtaccacgctcatcgtcctcggcgtctgggtctgcatctcgtagacttaggctgaagatctgcttggtttggttctggcattacagtcgcatgggaaataaaaaggaagttttgagggcaattctcaggattccatttcacccctctgtgctgtgttgccaattgccatatgagtgaattatgcccagtttgttgatggcagcggcgtttcattagctagatggtcagaatataatgcagtttcgttctggt

SEQ ID NO: 1981 - protein, 156 aa, Zea mays subsp. mays
  misc_feature (1)..(156): Ceres Seq. ID no. 15180321
RTPSLLSPPPSLRSTLPSCSDFRPRRALPMAAGRGDAASMVAVGLVWGATNALMRRGALVWDRRARACPSGNVLRRWAELLLTWQYSAPFAANLSASAAFFALLGAAPISVAVPVTNAVTFAATAAAAAALGERVRPAPAVLGTTLIVLGVWVCIS

SEQ ID NO: 1982 - protein, 127 aa, Zea mays subsp. mays
  misc_feature (1)..(127): Ceres Seq. ID no. 15180322
MAAGRGDAASMVAVGLVWGATNALMRRGALVWDRRARACPSGNVLRRWAELLLTWQYSAPFAANLSASAAFFALLGAAPISVAVPVTNAVTFAATAAAAAALGERVRPAPAVLGTTLIVLGVWVCIS

SEQ ID NO: 1983 - protein, 117 aa, Zea mays subsp. mays
  misc_feature (1)..(117): Ceres Seq. ID no. 15180323
MVAVGLVWGATNALMRRGALVWDRRARACPSGNVLRRWAELLLTWQYSAPFAANLSASAAFFALLGAAPISVAVPVTNAVTFAATAAAAAALGERVRPAPAVLGTTLIVLGVWVCIS

SEQ ID NO: 1984 - DNA, 1336 bp, Zea mays subsp. mays
  misc_feature (1)..(1336): Ceres Seq. ID no. 15180331
ctcgtcatggcgcaactcccttgccccgccgccgccgccgccgctaatgtagcggccgggaaagaagagactgccacctgggaggacgcgctggacctggatgactccgacatctgcttcgttccccctcccctcccctactcattcgacgccaccgcctcccagccccagcaggacaaacccccgcactctttccaccaccagccccaccgcatccccggccccactgccgccgtccaggacacgattcttccccgctccgccccccgtccgcctctctcatcgagacgcggggacgccgacttcctgctgcccccgtggctctgcgctctccagttccttgggaaggaccgcgcgtgggaacggccgggtatcaggacgattaaggacaacaaggaattgattcgagcacctttggtggctggggtggtgacgttgtgcaggccaaacgggctcggagatctcttcttggttctaaaggatccaaccgactcaatcggtgcttcagttcacaagaaagttcttttggaggagaataatggccatgatatctcaattgggtgtgctgttgtttttattaaggtagctgttttccgtccgtctgacaagttgtgctacctcaatgttaccaaaggaaaagtgatcaaggtttttagtaaaaattgtgctgccccagctaagcaagtgatttcaccaaatacttctgaaagaagtcaaggcgaagattctgccagcaatacaatgatgagaattttaggtcgtgaagacatgatgcccagtaacgagatgacagttactgaggtttctcatgaacacagtgcaacacctgattcaactaattgcacttcaacgtgggatatttatggtaggtttttttgggaagtaacaaggaagataaattgctggtaggagatccgcataacaagcatacatcaagctgcagtactgatgggcatccccagcaaaatttgagtattccaaacactataggttgcttctcaaccccgaaagaaaatgttaataccagcagcggatcacatctcaaacgcaaaaaggttgtatcagaatggacagatgagcagctttctgaactgtttgctgactactagcattgtagtatatatctgataaacgagttgttagatttctagaagtcaatgtattgcagttatattactgatgtgagctttgtaagaacttgacaagttttgtacagttgcacctatagcatctagagctgtgtatggttgttgtccagctcacttttctgaaacggttgtcatgccggtctttcattgtaacaattttatgaatctgccttctgataattgaactt

SEQ ID NO: 1985 - protein, 302 aa, Zea mays subsp. mays
  misc_feature (1)..(302): Ceres Seq. ID no. 15180332
LVMAQLPCPAAAAAANVAAGKEETATWEDALDLDDSDICFVPPPLPYSFDATASQPQQDKPPHSFHHQPHRIPGPTAAVQDTILPRSAPRPPLSSRRGDADFLLPPWLCALQFLGKDRAWERPGIRTIKDNKELIRAPLVAGVVTLCRPNGLGDLFLVLKDPTDSIGASVHKKVLLEENNGHDISIGCAVVFIKVAVFRPSDKLCYLNVTKGKVIKVFSKNCAAPAKQVISPNTSERSQGEDSASNTMMRILGREDMMPSNEMTVTEVSHEHSATPDSTNCTSTWDIYGRFFWEVTRKINCW

SEQ ID NO: 1986 - protein, 300 aa, Zea mays subsp. mays
  misc_feature (1)..(300): Ceres Seq. ID no. 15180333
MAQLPCPAAAAAANVAAGKEETATWEDALDLDDSDICFVPPPLPYSFDATASQPQQDKPPHSFHHQPHRIPGPTAAVQDTILPRSAPRPPLSSRRGDADFLLPPWLCALQFLGKDRAWERPGIRTIKDNKELIRAPLVAGVVTLCRPNGLGDLFLVLKDPTDSIGASVHKKVLLEENNGHDISIGCAVVFIKVAVFRPSDKLCYLNVTKGKVIKVFSKNCAAPAKQVISPNTSERSQGEDSASNTMMRILGREDMMPSNEMTVTEVSHEHSATPDSTNCTSTWDIYGRFFWEVTRKINCW

SEQ ID NO: 1987 - DNA, 1699 bp, Zea mays subsp. mays
  misc_feature (1)..(1699): Ceres Seq. ID no. 15180382
atgatgcatctcgtacccgagaagtgcaagacaagaacgtggctcctaatgtttcatctactgatttaccactgatccctcaagtgtacgggttcctcctgcagcacatatccgaaggcatgctgggaggctgcttaccattctctctcttctacctaattcaaagaaggaaattatttctgatgctgtatggtgcaaatggctcgaggattgtgctagtgggcgaattccctgcaatgatataaaactaaaaagttactgcaggttaacattattgaatatattatgttctgagagtccaaatacaagaaaagcctctgatgaatatcctgactcagaaagtgagtataaaagaaactgtccccagtttggagatgcactattcttgctaaatccagagttacctcttgaagttcatgtggacaacagtggttttgggattttaagagtttcaagagataattgtaaggaagatggaggtattggaggctctggctctgaaactgtgaactctgtagatgatgctgaagctgcatccaaaagtgtccctttgatggatgttgtgtttgttcatggccttcgtggcggcccattcaactcatggcgaattgctgatgacaaatcatcaactaccaaagctggtttagtggaaagcattgacgaggatgctgggaaagagggtacatgctggccaagagaatggcttgcggcagattttcctcaagcacgtttttttacggtcaaatacaagacaaatttgacccaatggactggagccagcttgcctcttcaggaggtgagctctatgctgctgaggaagttggtggctgctgggattggtagtcggcctgtcattttcgtgacacatagcatgggaggactggtggttaaacagcttttatatcaagcaaagctgaataactatgacaagttcctgaataatactattgggctagttttctatagttgtccgcattttggcagtaaacttgcagacatgccatggcgtatgggtttagtgtttcgtcctgctccttcgattggggagttaagaagtgggtctccaagactagttgaactgaacgattttgtgcgtcaacgacacaacaaaggatttcttgatgttcttagttttagtgagacccaggtcacaccgattgttgaaggatatggcggttgggcacttcgtatggagatagtgccaattgaatctgcatacccaggctttggggagcttgtcgttctaccgtccactgatcatataaattcatgtaagccagttaacaagaacgatccttcttatgcggaaaccttggcatttttggagaagaacttcaaattatgtctggagagagcagagtcctaggtcttgtcattggcgccgtggagttttcagcaatctgaaggcttcattttccatttaccgccagagacttttctcccgttaacgacgaatggtggttgatctgaccaaatgatctgggcgtgctgtggtttatgaagctcgcaccgaactttgtagtaacattgcacatagcggttaggctgtaaatagctgtcatttaccttttagttgacatgagttgcccccatgtaagatcaagctatataccccaatgcctgtatcgtctcaacagttttcagcaacagatttttttacaaaacaatctcataatatataagccattttcataaaatt

SEQ ID NO: 1988 - protein, 270 aa, Zea mays subsp. mays
  misc_feature (1)..(270): Ceres Seq. ID no. 15180383
MDVVFVHGLRGGPFNSWRIADDKSSTTKAGLVESIDEDAGKEGTCWPREWLAADFPQARFFTVKYKTNLTQWTGASLPLQEVSSMLLRKLVAAGIGSRPVIFVTHSMGGLVVKQLLYQAKLNNYDKFLNNTIGLVFYSCPHFGSKLADMPWRMGLVFRPAPSIGELRSGSPRLVELNDFVRQRHNKGFLDVLSFSETQVTPIVEGYGGWALRMEIVPIESAYPGFGELVVLPSTDHINSCKPVNKNDPSYAETLAFLEKNFKLCLERAES

SEQ ID NO: 1989 - protein, 186 aa, Zea mays subsp. mays
  misc_feature (1)..(186): Ceres Seq. ID no. 15180384
MLLRKLVAAGIGSRPVIFVTHSMGGLVVKQLLYQAKLNNYDKFLNNTIGLVFYSCPHFGSKLADMPWRMGLVFRPAPSIGELRSGSPRLVELNDFVRQRHNKGFLDVLSFSETQVTPIVEGYGGWALRMEIVPIESAYPGFGELVVLPSTDHINSCKPVNKNDPSYAETLAFLEKNFKLCLERAES

SEQ ID NO: 1990 - protein, 164 aa, Zea mays subsp. mays
  misc_feature (1)..(164): Ceres Seq. ID no. 15180385
MGGLVVKQLLYQAKLNNYDKFLNNTIGLVFYSCPHFGSKLADMPWRMGLVFRPAPSIGELRSGSPRLVELNDFVRQRHNKGFLDVLSFSETQVTPIVEGYGGWALRMEIVPIESAYPGFGELVVLPSTDHINSCKPVNKNDPSYAETLAFLEKNFKLCLERAES

SEQ ID NO: 1991 - DNA, 2689 bp, Zea mays subsp. mays
  misc_feature (1)..(2689): Ceres Seq. ID no. 15180386
tcacagcgtcgtgacgtcgtcctctgcttcgcaagcgcccgagccgcgcgccgccgaacccgccgcctcctccagcctccgggcacatcggagcacccagccaatcgcacctcgacacggcggcaccggaggaacccctccttcttggtcgtagcctccgtggcctccctcccctcaccccttccggtgttggattgagggtggagcggagatccgccacggcttggattgatccctggatcgatacgccatataatttgggattctaaggtcccggtgcagcttcttctcgcagaagtttaccctctatgcccctctctaagcccacccttgtgattccgccgtgacgcctcatccacgggagaaacgccatgatgtcaaggtttgcccacttggggaagagcagaaaactcgctgaaacccttttggttgcctcaaagcccaatactgctagtggccaaaacattgcttcaagctttgcattcggcttgggttattccagcaggacatttttgcatgggaaggttcataatggtccaaacacctcctacatgctgggaagagcaaatgatagcttacattggagcactggtgtgaggaaattctcaattctttcatcttgtagccagaatgcatttcagaatcagattgcttggaagcgacttgtagcactgggttctcgtgcaccaaaagcatctccaatttttagtaaggttgcttgtgccattggcttggctgtgagtaggtctaatataactccttaccttgtcgcttttattgcgggagaggtaatgctagctcagaagacatctgcagatggagaatactacccaatacgtgagcgagctcaggatggccgtatttacgttacctctctaatatattcggcagtagaattggtaattataatcttcagatcaatatatttggcattgctgttcactccaagtatactgatggccccatttgcagagactcttggcagtaagtataggaaaacatggcttcgacttgtccatcgtactttggagcttgcaggtcctgcgtttatcaaatggggccaatgggctgcaacacgccctgatctgtttccaagtgacctttgtactgaattgtcaaagctgcacacaaaagcaccagctcacagctttacctatactaagaaaactgttgagaaagcttttggtcgaaagctatcagacatttttgaaaattttgaagaggaccctgttgcatctggaagtgttgctcaagtgcatcgggctgttctacgattccggtatcctaatcggcagacaaagcgtgtaactgttgcagtaaaagtaaggcatcctggtgtaggggactcgataagaagagatttcaatatcatcaatgccgtagcaaaaatatctagatatatccccacgctgaattggttgcgcctagatgagagtgtacaacagtttgctgtcttcatgatgtctcaagttgaccttgcaagggaagctgctcatctgagccggtttatctacaacttccgaaggtggaaggatgtatctttcccaagacctctctatccacttgttcatcctgctgttttagttgagacttacgagcatggggagagtgtttcacactatgttgatgaccttgaaggacatgatcgaattaaaagtgctctggcccatattggtactcacgcgctcctgaaaatgctactggttgataatttcgtccatgcagatatgcacccaggaaatattttagtccgtgtcgcacaaccaaagaactcaaataacacccttataaagtcaaggccacatgtagtcttcctggatgtaggaatgactgctgaactttcaagtaatgaccgtgtgaatttacttgagttcttcaaggctgttgctcgccgagatggtcgtacagctgcagaaagtactctaaagttgtcaaaacaacagaattgtccaaatccaaaagcttttattgaggaagttgaacgatcattctctttttggggcactgctgaaggtgatgctatccacccagctgagtgtatgcaccaactgcttgagcaagttcgatgtcataaagtgaatatcgatggcaatgtttgtactgtcatggtgactacattagttcttgagggctggcaacgtaagttggatccagattataatgttatgaagactctgcaaactttactttttaaggaagactgggcgaagtctcttcaatacactatccaagggctcatggcgccttagggtcgtccgcaatcctttctaaagttttgatctggtttgtgttcgaccggaggatcctcttctctcaccatcacgattctggcttcttttctacttaatttcacgtttcgtttctctgtacctgtcctggcgttgtgctgctaaagcagccttgatgataaagtaataactgcagtaaaaattttcagaagctaccagagtactatgctgctcagctctgggctgtcttcttatatgttcttgaagggccaaagaattaggtccttttcccccctcctaccaacacttttgacaatagctcttagatgatgtagcaaaaggcgttctgttctgatgatctttttgtaactggagaggttgtatccgtggactggagagttgcttatgtacagacagagatactgttaatctcgaaggaatccacttgtcaactgacaatc

SEQ ID NO: 1992 - protein, 625 aa, Zea mays subsp. mays
  misc_feature (1)..(625): Ceres Seq. ID no. 15180387
MMSRFAHLGKSRKLAETLLVASKPNTASGQNIASSFAFGLGYSSRTFLHGKVHNGPNTSYMLGRANDSLHWSTGVRKFSILSSCSQNAFQNQIAWKRLVALGSRAPKASPIFSKVACAIGLAVSRSNITPYLVAFIAGEVMLAQKTSADGEYYPIRERAQDGRIYVTSLIYSAVELVIIIFRSIYLALLFTPSILMAPFAETLGSKYRKTWLRLVHRTLELAGPAFIKWGQWAATRPDLFPSDLCTELSKLHTKAPAHSFTYTKKTVEKAFGRKLSDIFENFEEDPVASGSVAQVHRAVLRFRYPNRQTKRVTVAVKVRHPGVGDSIRRDFNIINAVAKISRYIPTLNWLRLDESVQQFAVFMMSQVDLAREAAHLSRFIYNFRRWKDVSFPRPLYPLVHPAVLVETYEHGESVSHYVDDLEGHDRIKSALAHIGTHALLKMLLVDNFVHADMHPGNILVRVAQPKNSNNTLIKSRPHVVFLDVGMTAELSSNDRVNLLEFFKAVARRDGRTAAESTLKLSKQQNCPNPKAFIEEVERSFSFWGTAEGDAIHPAECMHQLLEQVRCHKVNIDGNVCTVMVTTLVLEGWQRKLDPDYNVMKTLQTLLFKEDWAKSLQYTIQGLMAP

SEQ ID NO: 1993 - protein, 624 aa, Zea mays subsp. mays
  misc_feature (1)..(624): Ceres Seq. ID no. 15180388
MSRFAHLGKSRKLAETLLVASKPNTASGQNIASSFAFGLGYSSRTFLHGKVHNGPNTSYMLGRANDSLHWSTGVRKFSILSSCSQNAFQNQIAWKRLVALGSRAPKASPIFSKVACAIGLAVSRSNITPYLVAFIAGEVMLAQKTSADGEYYPIRERAQDGRIYVTSLIYSAVELVIIIFRSIYLALLFTPSILMAPFAETLGSKYRKTWLRLVHRTLELAGPAFIKWGQWAATRPDLFPSDLCTELSKLHTKAPAHSFTYTKKTVEKAFGRKLSDIFENFEEDPVASGSVAQVHRAVLRFRYPNRQTKRVTVAVKVRHPGVGDSIRRDFNIINAVAKISRYIPTLNWLRLDESVQQFAVFMMSQVDLAREAAHLSRFIYNFRRWKDVSFPRPLYPLVHPAVLVETYEHGESVSHYVDDLEGHDRIKSALAHIGTHALLKMLLVDNFVHADMHPGNILVRVAQPKNSNNTLIKSRPHVVFLDVGMTAELSSNDRVNLLEFFKAVARRDGRTAAESTLKLSKQQNCPNPKAFIEEVERSFSFWGTAEGDAIHPAECMHQLLEQVRCHKVNIDGNVCTVMVTTLVLEGWQRKLDPDYNVMKTLQTLLFKEDWAKSLQYTIQGLMAP

SEQ ID NO: 1994 - protein, 565 aa, Zea mays subsp. mays
  misc_feature (1)..(565): Ceres Seq. ID no. 15180389
MLGRANDSLHWSTGVRKFSILSSCSQNAFQNQIAWKRLVALGSRAPKASPIFSKVACAIGLAVSRSNITPYLVAFIAGEVMLAQKTSADGEYYPIRERAQDGRIYVTSLIYSAVELVIIIFRSIYLALLFTPSILMAPFAETLGSKYRKTWLRLVHRTLELAGPAFIKWGQWAATRPDLFPSDLCTELSKLHTKAPAHSFTYTKKTVEKAFGRKLSDIFENFEEDPVASGSVAQVHRAVLRFRYPNRQTKRVTVAVKVRHPGVGDSIRRDFNIINAVAKISRYIPTLNWLRLDESVQQFAVFMMSQVDLAREAAHLSRFIYNFRRWKDVSFPRPLYPLVHPAVLVETYEHGESVSHYVDDLEGHDRIKSALAHIGTHALLKMLLVDNFVHADMHPGNILVRVAQPKNSNNTLIKSRPHVVFLDVGMTAELSSNDRVNLLEFFKAVARRDGRTAAESTLKLSKQQNCPNPKAFIEEVERSFSFWGTAEGDAIHPAECMHQLLEQVRCHKVNIDGNVCTVMVTTLVLEGWQRKLDPDYNVMKTLQTLLFKEDWAKSLQYTIQGLMAP

SEQ ID NO: 1995 - DNA, 1103 bp, Zea mays subsp. mays
  misc_feature (1)..(1103): Ceres Seq. ID no. 15180424
attcatccaacactactccaagtttaatttcccacaccaaacctcagctcccaccgatcggttccatcaacctaacaatccctcgcttgttagcccgcgcgcgtgtgtcgtgtgcgctgcgtgcgtcccatggctcagcctcgcgtgcacccaaacgcggcggcggcggcgggtgacctggagatgggcggcaacggcggcgtgttcccgccgctgccagttcgcgggcagcccgcctccgtgaaccagcagcagctcggcggcggcccccacacctgggtgggcaacgacgccaacacgctgctggtggtggccacgctgatcaccacgctcacctaccagttcggcaccagcatccccggcggctactggcagcaggacacgacggcggcgtcgagggacggcaaggagcaggtcacgtaccgcgccggcgaccccatcatgcgcgacctgcaccggccaaggtactgggtgttcatgggcgcgagctgggtggggttcgcgagctccatgatgatgacgctgagcctgctggtgcggatgcccgttgactcgcgccacgtgcgctggtccttcgtggtggcctactccagcctggtgctcaccttcgtggtgtcgcagcccaagacgcacctgtcgctggacctcctcatctgggccgccgtcctcgtcttcctctggatcatcgtcagcctccacccggaccgccgcgcgcgcgtcatccaggagctctgctgcggtggccgcgagacctgaagcagagcaaaccccgaccgacgtaccacgaatgattagttgttgctttttttcttttctttttttggtgacgatggggtaattgactgtcttttctcttctagtcgaccaagatgtaaacaaaatatcccgctgcacaaggtagccagagcctatgtccttgattgagcgctatagtgctctacattcgtatcaagtagaatctagataggcagatgaacacgctggcatgatttagcgtaatcttttcggcacccgcctgcaatttaaaaaactagactagatatttccatgtcaacgtgtaaagaaaaaaaagaaaaatcaatggccattcgctagttttcttt

SEQ ID NO: 1996 - protein, 208 aa, Zea mays subsp. mays
  misc_feature (1)..(208): Ceres Seq. ID no. 15180425
MAQPRVHPNAAAAAGDLEMGGNGGVFPPLPVRGQPASVNQQQLGGGPHTWVGNDANTLLVVATLITTLTYQFGTSIPGGYWQQDTTAASRDGKEQVTYRAGDPIMRDLHRPRYWVFMGASWVGFASSMMMTLSLLVRMPVDSRHVRWSFVVAYSSLVLTFVVSQPKTHLSLDLLIWAAVLVFLWIIVSLHPDRRARVIQELCCGGRET

SEQ ID NO: 1997 - protein, 190 aa, Zea mays subsp. mays
  misc_feature (1)..(190): Ceres Seq. ID no. 15180426
MGGNGGVFPPLPVRGQPASVNQQQLGGGPHTWVGNDANTLLVVATLITTLTYQFGTSIPGGYWQQDTTAASRDGKEQVTYRAGDPIMRDLHRPRYWVFMGASWVGFASSMMMTLSLLVRMPVDSRHVRWSFVVAYSSLVLTFVVSQPKTHLSLDLLIWAAVLVFLWIIVSLHPDRRARVIQELCCGGRET

SEQ ID NO: 1998 - protein, 104 aa, Zea mays subsp. mays
  misc_feature (1)..(104): Ceres Seq. ID no. 15180427
MRDLHRPRYWVFMGASWVGFASSMMMTLSLLVRMPVDSRHVRWSFVVAYSSLVLTFVVSQPKTHLSLDLLIWAAVLVFLWIIVSLHPDRRARVIQELCCGGRET

SEQ ID NO: 1999 - DNA, 1606 bp, Zea mays subsp. mays
  misc_feature (1)..(1606): Ceres Seq. ID no. 15180463
ataccataccacgccacagcagcatatatgccactgcccaggcagccagccatgccgccaccaccccgatcccggcacagaactcagtgccagacgcggacagcgagcgcgaccacatctatctaggacccgtatctctctctctcctcccgaccagcacgtcacgtgccacggacaggggtcaagcgcggtcgccgatgtcggcggcgggcggcagcggcagccgcgcccgcgccacctcgcggcccgcggcggcagcatggctgctgctggcgctggccacagcagcagcagcgtcggcgctggcgctgccagcggccgcgggcggcttcagctgccgtcctgggtcccggccggtgctcttcaacttcggggactccaactccgacacgggcggcatggcggcggccaaggggtggcacctcacgcgcccggagggccgcgccttcttcccacgccccaccggccggttctgcgacggccgcctcgccatcgacttcctctgcgaaagcttgaacatcagctatttgagcccatttctgaaggcgttaggctccaattacagcaacggtgcaaatttcgccattgctggcgcagcaacgcaaccgcgagatgttccatttgcgttgcacatacaagtgcaggagttcttgtacttcagagatagatccttggaactcatcgatcaaggtctaagtggtccaattgatgcacaaggattccaaaacgctctatatatgatagacatagggcagaacgatgtaaacgctcttctgtcaaacttgccctatgatcaagttattgccaaattcccaccaattcttgctgagattaaggacgctgtccagactctatatagcaacggtagcctaaacttctggatacatgggacgggggctctgggttgcttgccgcagaagcttgccatacctaggaaaaacgacagcgatcttgatcagtatggctgtctcaagacctataacagagctgcagttgcgttcaacgcagcgctgggcagcctctgcgacgagctgagtgcgcagatgaaagacgcgacgcttgtgtacacggacctgttccccatcaagtatggtcttgtcgccaaccacactaaatatggctttgacaagccgctgatgacatgctgtgggtacggagggcctccctacaactacgacttcagcaagggttgccagtctaaggatgtggcggcctgcgaagacggctcgaagttcgtcagctgggatggcgtgcacctgacggaggcggccaatgcggttgtggccaaagcgatactgagctcacagtactccaagcccagtctcaagtttgatcagttctgcagagcctgatacttgttagtttaggcagatttactgaacacaacctggcacttcaaagtcaaaatgggtgggcttctgataatttgattaccttatttacccgtcagggatgtgacccatcattgatctgtcagccatagcccataggccataactttggataggtgaaacttccaaatattgtgggccacatgtaccttcaaactacatgtcctatctgatatgttctcatcaaagagagaaatacaccatgggttattaag

SEQ ID NO: 2000 - protein, 449 aa, Zea mays subsp. mays
  misc_feature (1)..(449): Ceres Seq. ID no. 15180464
TIPRHSSIYATAQAASHAATTPIPAQNSVPDADSERDHIYLGPVSLSLLPTSTSRATDRGQARSPMSAAGGSGSRARATSRPAAAAWLLLALATAAAASALALPAAAGGFSCRPGSRPVLFNFGDSNSDTGGMAAAKGWHLTRPEGRAFFPRPTGRFCDGRLAIDFLCESLNISYLSPFLKALGSNYSNGANFAIAGAATQPRDVPFALHIQVQEFLYFRDRSLELIDQGLSGPIDAQGFQNALYMIDIGQNDVNALLSNLPYDQVIAKFPPILAEIKDAVQTLYSNGSLNFWIHGTGALGCLPQKLAIPRKNDSDLDQYGCLKTYNRAAVAFNAALGSLCDELSAQMKDATLVYTDLFPIKYGLVANHTKYGFDKPLMTCCGYGGPPYNYDFSKGCQSKDVAACEDGSKFVSWDGVHLTEAANAVVAKAILSSQYSKPSLKFDQFCRA

SEQ ID NO: 2001 - protein, 384 aa, Zea mays subsp. mays
  misc_feature (1)..(384): Ceres Seq. ID no. 15180465
MSAAGGSGSRARATSRPAAAAWLLLALATAAAASALALPAAAGGFSCRPGSRPVLFNFGDSNSDTGGMAAAKGWHLTRPEGRAFFPRPTGRFCDGRLAIDFLCESLNISYLSPFLKALGSNYSNGANFAIAGAATQPRDVPFALHIQVQEFLYFRDRSLELIDQGLSGPIDAQGFQNALYMIDIGQNDVNALLSNLPYDQVIAKFPPILAEIKDAVQTLYSNGSLNFWIHGTGALGCLPQKLAIPRKNDSDLDQYGCLKTYNRAAVAFNAALGSLCDELSAQMKDATLVYTDLFPIKYGLVANHTKYGFDKPLMTCCGYGGPPYNYDFSKGCQSKDVAACEDGSKFVSWDGVHLTEAANAVVAKAILSSQYSKPSLKFDQFCRA

SEQ ID NO: 2002 - protein, 317 aa, Zea mays subsp. mays
  misc_feature (1)..(317): Ceres Seq. ID no. 15180466
MAAAKGWHLTRPEGRAFFPRPTGRFCDGRLAIDFLCESLNISYLSPFLKALGSNYSNGANFAIAGAATQPRDVPFALHIQVQEFLYFRDRSLELIDQGLSGPIDAQGFQNALYMIDIGQNDVNALLSNLPYDQVIAKFPPILAEIKDAVQTLYSNGSLNFWIHGTGALGCLPQKLAIPRKNDSDLDQYGCLKTYNRAAVAFNAALGSLCDELSAQMKDATLVYTDLFPIKYGLVANHTKYGFDKPLMTCCGYGGPPYNYDFSKGCQSKDVAACEDGSKFVSWDGVHLTEAANAVVAKAILSSQYSKPSLKFDQFCRA

SEQ ID NO: 2003 - DNA, 1266 bp, Zea mays subsp. mays
  misc_feature (1)..(1266): Ceres Seq. ID no. 15180467
actccgccccaccactggtcaacgaatctttcctgcactgtcctgtccgccgccgctcaacctcatcggaactccactcctcctcacccccacagcaactcccacctcatggagaaagctgcgcacgttgccgccggcgcgacgcaagagcaggaatcgtctccgaacaggcttgacgacgcagcgaggcatcatggctctgctgaagcgattcctgaaagacttgcggtggtcacaggaggaaacaaaggagttggcctagaagtatgccgccagcttgctctcaagggtgtgacagttatccttacagcaagggatgagaaacgaggaaaagatgctgccgatacccttcgccgtgaatgccaactcccaaatatcatattccatcagctcgatgtcagagatgatgatagtgccaccacattggcccggtatgtagaaagaagatatgggaagctcgacatcttggtgaacaatgcagctatttcaggaattgtagcagatgaggaaggcctgaaagctcttaacattgatgcagagacatggacatctggcagggcagctaatcttctgaaagaagtattccagaataccaatgatgaggcattcaactgtctgaataccaattactatggatgcaaacgggtaacagaagctcttcttccacttctgaagctatctacatcaggaggagcaaggattgtcaatgcctcctcacttgcgtcggagctgaaggtgtggagctcctgcattcctgcacgaacagagaagatatctatgttactcaccctgattatattgttgccagagaatgccaaatgagaagctgcgaaacgatttgagcaacattgacatctgggacgaggaccggatagaagcagtgctcgacacattcttggaggacctgaggagcgggcggctggaagaggctgggtggcccgtgatgctaccagcctacagcgtatcgaaaatggtcatcaatctgtacaccaggatcatggcaaggaggtatccggagatgcgcatcaactgtgtgcgacctggctttgtcaagacggacatcaactggaatctgggggtcctgacgcctgaacaaggtgcgagagggccagtcatgctagctctcctccccgatgatggaccaactgggtgctattttgatcagacagaaatggtgaacgtctggtgattgaatatttgtcgtctgctaaaaaaaaaaaaaaaaaaaaaaaaaaaaaaaaaaaaaaaaaaaaaaaaaaaaaaaag

SEQ ID NO: 2004 - protein, 273 aa, Zea mays subsp. mays
  misc_feature (1)..(273): Ceres Seq. ID no. 15180468
TPPHHWSTNLSCTVLSAAAQPHRNSTPPHPHSNSHLMEKAAHVAAGATQEQESSPNRLDDAARHHGSAEAIPERLAVVTGGNKGVGLEVCRQLALKGVTVILTARDEKRGKDAADTLRRECQLPNIIFHQLDVRDDDSATTLARYVERRYGKLDILVNNAAISGIVADEEGLKALNIDAETWTSGRAANLLKEVFQNTNDEAFNCLNTNYYGCKRVTEALLPLLKLSTSGGARIVNASSLASELKVWSSCIPARTEKISMLLTLIILLPENAK

SEQ ID NO: 2005 - protein, 237 aa, Zea mays subsp. mays
  misc_feature (1)..(237): Ceres Seq. ID no. 15180469
MEKAAHVAAGATQEQESSPNRLDDAARHHGSAEAIPERLAVVTGGNKGVGLEVCRQLALKGVTVILTARDEKRGKDAADTLRRECQLPNIIFHQLDVRDDDSATTLARYVERRYGKLDILVNNAAISGIVADEEGLKALNIDAETWTSGRAANLLKEVFQNTNDEAFNCLNTNYYGCKRVTEALLPLLKLSTSGGARIVNASSLASELKVWSSCIPARTEKISMLLTLIILLPENAK

SEQ ID NO: 2006 - DNA, 1485 bp, Zea mays subsp. mays
  misc_feature (1)..(1485): Ceres Seq. ID no. 15180486
catttccgtgaaagatctcagatcttgtgtcaaggaattgaagacactgctagatagttttgagaagaagaataagaagttattatcgaatctagctaataagaaaccttccggtcaatgggaagaaatcaagaagattcctctgctcacagcttccaactttgaggaaatctgtggagagaagactccagtatgcatcattggtgttttcgggtcaaacaaagccaaggggcagcttgaagcagtcctgtctgagatatctaagaagactctgataagggggcagaactataattccaaaaatgatgtctcctatgctttgctggataaggacaaataatctgcattcctgtcatcgtttgacaagtctggatacaggtcatctgacaagctgctcatcgcctacaaggaacccattattattatgttattattatttagaactgaaggaagatttggatgcaatgtttcccatgtgaatacatacagtggaattgcagaaaaatcaatggataagtttgctgcattgatatcatctttcagataccccggcccccgtgccagtggccttcgtgctcctttaaaggatgtaaaaaacacactttctgtgagatctattcttaaagctccagaaaaaggcacattcagacgcacagtaaagaaaacaggtctaggcccagaacttgaattttgattgatgtcttttttgaaatctaatgattccattgagagttcattttcctctccaagattcaaccttatagcattgctatcgtctggtgatagatatgcattaccgagcttcaacgaactgaactcgagctttgctgtttcatctatgatcgttatttccatatccgagtccgccattcagttatgcagagagcggcagctttaaatgcattttacaatgggtacatatgcattgcaaattctgacctcgcatgatgtgcatgttcaatcagatcctgctggacgtctggttatcacaggggatccagagcagcctgataatccttgggggatcactccgttcaagaaggtggtcaacttgccatcaagaatcaatcctcaccaaacatccgctgttgtcacgcttcatggtcagctgtttgtgcgtgcaccatttgggtcatcctgatatgtagatatgaaatcatttttagttcagttttgttgactgtggcacctcttcaccggtgatattccttgatatcactagggtttatgtcagttctgttgaggaaataggatttcatttgagcagatacatgatgtcaagctgacttagcagaacccttctgtggttggatgctggttgctggttttgcgatctgttgccaccttgtttattgttacagtagtgccataaaattagctggttcatgcgtgtattccagtttcgtagagaaaggagatgttggtcgtagtagggctaatttgacattatgattacttattattctttaaatacctctctagaac

SEQ ID NO: 2007 - protein, 112 aa, Zea mays subsp. mays
  misc_feature (1)..(112): Ceres Seq. ID no. 15180487
ISVKDLRSCVKELKTLLDSFEKKNKKLLSNLANKKPSGQWEEIKKIPLLTASNFEEICGEKTPVCIIGVFGSNKAKGQLEAVLSEISKKTLIRGQNYNSKNDVSYALLDKDK

SEQ ID NO: 2008 - protein, 89 aa, Zea mays subsp. mays
  misc_feature (1)..(89): Ceres Seq. ID no. 15180488
MLLLFRTEGRFGCNVSHVNTYSGIAEKSMDKFAALISSFRYPGPRASGLRAPLKDVKNTLSVRSILKAPEKGTFRRTVKKTGLGPELEF

SEQ ID NO: 2009 - protein, 80 aa, Zea mays subsp. mays
  misc_feature (1)..(80): Ceres Seq. ID no. 15180489
MHFTMGTYALQILTSHDVHVQSDPAGRLVITGDPEQPDNPWGITPFKKVVNLPSRINPHQTSAVVTLHGQLFVRAPFGSS

SEQ ID NO: 2010 - DNA, 1151 bp, Zea mays subsp. mays
  misc_feature (1)..(1151): Ceres Seq. ID no. 15180505
tgatagcgagttcgaggcatcaggtgaagaatgggactctattgatgacaggggtaatgctccgggctttgacagtgatcggatacaggattttgttcctacgcgagacgtgggcgaggggaaggttttcaatagaagctatgctaattctgatgttcacgatagaggccagggaagacataggatagataacaacagcagcaaaagggcatcagatgcaaggaggtgggatgatagtgagatcgaggcatcaggcgaagaatgggacactggtgatgacagtgataatgatctcgaagaggcaactgatggtcatcctcggcaattcaaaagtatgaggaatgagaagagcagatcccgtggcaggcagaattccattcctggcggattcagaggatccaatcggattacagggaattcagctgatgcttccgatggcgctatgttcagaggcagtaatggtgatgagttaggcactgaagacgatgacttgtgggtgtcggattataggggggaagcgacgaactcaagagcccccaaggtgaatttcccaaatttccacagcgggagtgaggatagcgatgagaacaggaaaaatgatggcaaggttggtaaaacgaataaaaatactgatgaaagttgggatagtgactgagataaagtaatgatgatatgtgatgcatgaaggtcaccatcaatggttgtcaagtccaagttctttcattggtggtgttgctcatgtactgtccaatggaaatctcgaggagctagaagaataagcatggtttccataggaacaactgtttgaacttttactgcaagttttcggacgtcttctattccagttgtgtcatggtaacctgaaaagctgttggagggcaagttgtcaagggtgtactagcctcatcaaagccagaatgctgcatgacttgcacaagccgaggacaaagtaacagattacagatgtggtcagagttactatcgaggtttctgaaggtctcagaaatgtgaaatcgtcactctgcgatcacatttatttctcatcttattcttttagttttgatgtgaagagaacatgcacatagatttatctcaaggccatgtgtaccttgtcttttggttaaattgtccgatacacgttctaaagagcc

SEQ ID NO: 2011 - protein, 217 aa, Zea mays subsp. mays
  misc_feature (1)..(217): Ceres Seq. ID no. 15180506
DSEFEASGEEWDSIDDRGNAPGFDSDRIQDFVPTRDVGEGKVFNRSYANSDVHDRGQGRHRIDNNSSKRASDARRWDDSEIEASGEEWDTGDDSDNDLEEATDGHPRQFKSMRNEKSRSRGRQNSIPGGFRGSNRITGNSADASDGAMFRGSNGDELGTEDDDLWVSDYRGEATNSRAPKVNFPNFHSGSEDSDENRKNDGKVGKTNKNTDESWDSD

SEQ ID NO: 2012 - DNA, 731 bp, Zea mays subsp. mays
  misc_feature (1)..(731): Ceres Seq. ID no. 15180529
aatgacgcctcgcgctcccacccactgacccaccccacgccgccgcctctcccagtgggtcctccgcatctcccatctcccatctcccgtctcccctcttcctcctcccctgcgatcttctccaccgcatcacctccctcgaaccctagacccacccacgcgcccattgccttcggtcgccatgtccgccgctcagcttctccgtcactcgcgcaagctgcggagtttgcaaaatgctgtaggttgtgagaattttagttttgttcggcatttctccagcggttctgggtcctttatcgccagggaaaatggtattggaaaaagaaccagaggtaccagattttcccagcataaccagcctgcaaaacagctcgagacattctcagcaggagtaaatggaagctgagcggcggacatggcggcctcggcatcggcattggcgttggcgtcggagtcgggttgggcgcgggggcaggcgcaggcgcaggtggcggcgctggtgcgggtgctgttgctggaaaccgcgggcgttgattcatccgtccatgtccagtttaaagaagaacgcatccatgcaagcatgtgtatgttcggcgctggagtagctatgaattactctatgacgtggttaaattatggttaatttcactcctcctgtttttggttgctgtgtagtctttgctcattattattggtgcaagtgtttgcaataaatcttatatactccttgg

SEQ ID NO: 2013 - protein, 82 aa, Zea mays subsp. mays
  misc_feature (1)..(82): Ceres Seq. ID no. 15180530
NDASRSHPLTHPTPPPLPVGPPHLPSPISRLPSSSSPAIFSTASPPSNPRPTHAPIAFGRHVRRSASPSLAQAAEFAKCCRL

SEQ ID NO: 2014 - protein, 75 aa, Zea mays subsp. mays
  misc_feature (1)..(75): Ceres Seq. ID no. 15180531
MAASASALALASESGWARGQAQAQVAALVRVLLLETAGVDSSVHVQFKEERIHASMCMFGAGVAMNYSMTWLNYG

SEQ ID NO: 2015 - protein, 74 aa, Zea mays subsp. mays
  misc_feature (1)..(74): Ceres Seq. ID no. 15180532
MSAAQLLRHSRKLRSLQNAVGCENFSFVRHFSSGSGSFIARENGIGKRTRGTRFSQHNQPAKQLETFSAGVNGS

SEQ ID NO: 2016 - DNA, 915 bp, Zea mays subsp. mays
  misc_feature (1)..(915): Ceres Seq. ID no. 15180533
aaaaacggaggcaaggcgcaggcgcgtgcaaaactccgaactcctccatcgcgtgcgcgcttctctctctcttgagcgtctccttgccatggccgcctcgcgagaccacctcggtggcgacccgccggagtcgacgcagctgcgcctcggagacgacatcgcgtggtcggagatcaacggcgtgtacgaccgcgacgactcgctcaaggagaacaccaaccccaagtgcgtcctcaagagccagcaccccggcgccgccgggtcctcgcagaggttctcgggcaacctgaagcccacggcggcgcccatcatcgggctttccgggaagctcggcgcgtgcgcgcgggggcaccgccaccgcccgcccgccatgtttcctgggaaggccaggcccggcggcgggcgcgcgtccaaggcggccgtcccggaccccgggtcgcccaaggtgtcctgcatcgggaaggtcctctcggaccacgagcgagcgcgcgcgcgcctcggcgtcggccgcggctccggggcgcctgggtgctgcggcttcttcatgcagcgcagccggagccggtccaggcacagcgccgtcgagtgcgtcgaccagtccccgccgccgcccgaggaggctgcagcggcgaggtccgcggaggaggcgacggcgccaccgccggggctgggaggtgtgcggcggtttgcgtcggggaggcgagcggcggagtgggcggccaaggtggaggacgacgggcgcgtggcgagatctgggccgttgtagcaccatgcaggcagaggcagcggtggttgaggtgtggctttcggtttggttgcgcccgtgctttagttgtagttgagcactcgagctgtgtacatacgtgcttctgttcaaatccgtagaaatttaatgcttgggttcacaaattttgc

SEQ ID NO: 2017 - protein, 254 aa, Zea mays subsp. mays
  misc_feature (1)..(254): Ceres Seq. ID no. 15180534
KTEARRRRVQNSELLHRVRASLSLERLLAMAASRDHLGGDPPESTQLRLGDDIAWSEINGVYDRDDSLKENTNPKCVLKSQHPGAAGSSQRFSGNLKPTAAPIIGLSGKLGACARGHRHRPPAMFPGKARPGGGRASKAAVPDPGSPKVSCIGKVLSDHERARARLGVGRGSGAPGCCGFFMQRSRSRSRHSAVECVDQSPPPPEEAAAARSAEEATAPPPGLGGVRRFASGRRAAEWAAKVEDDGRVARSGPL

SEQ ID NO: 2018 - protein, 225 aa, Zea mays subsp. mays
  misc_feature (1)..(225): Ceres Seq. ID no. 15180535
MAASRDHLGGDPPESTQLRLGDDIAWSEINGVYDRDDSLKENTNPKCVLKSQHPGAAGSSQRFSGNLKPTAAPIIGLSGKLGACARGHRHRPPAMFPGKARPGGGRASKAAVPDPGSPKVSCIGKVLSDHERARARLGVGRGSGAPGCCGFFMQRSRSRSRHSAVECVDQSPPPPEEAAAARSAEEATAPPPGLGGVRRFASGRRAAEWAAKVEDDGRVARSGPL

SEQ ID NO: 2019 - protein, 131 aa, Zea mays subsp. mays
  misc_feature (1)..(131): Ceres Seq. ID no. 15180536
MFPGKARPGGGRASKAAVPDPGSPKVSCIGKVLSDHERARARLGVGRGSGAPGCCGFFMQRSRSRSRHSAVECVDQSPPPPEEAAAARSAEEATAPPPGLGGVRRFASGRRAAEWAAKVEDDGRVARSGPL

SEQ ID NO: 2020 - DNA, 1006 bp, Zea mays subsp. mays
  misc_feature (1)..(1006): Ceres Seq. ID no. 15180555
acacgttccctcgtcttttgtcagttggacaatccgcagctcctccatctcattcttccccccatcccatccccaaggttgaccggcgaaatcagcagtccgagaaccgcgagcttctgcctgatccagcctcatcccgccatggacgaatctgaggagcacagcaacggcggcgggcacccccacccgcaccacgggtacgagtggaagttcccggcggcgctgagcgcgaacacgacgagcgtgcacgtgacggcgctggacggcgtggtgaacgtgaactcgctgttcacggtggccgtgttcgtggggctgtcgctggcgaccccggggcagctgcggagcctggcgggggacccgcggtgcgacgccggcccgggcgtggcgcggtcgctgctggtgctggaggtggtggccttctcgtccttcctcttctccagcctggtggcgcagggcctgaagctggcgctcaacctcatcaactccaaggacccgcacgacgcggcgcgcgcccacatcgacgcccgcgtgctccgcctcggcatgctcgcctccgccgtcggatccgtcgtcggctgcgtcttcctcatgacgtccatggtcatggtcgtgcaggtccgcctcggcacgctgagctgccccaccgaccgcgccgccgccaaggccgccgcgggcctcgtcggcctcgtcaccaccgcgctcgctttctacgtgggcaccgtcttctacaccttcacccactgatgccagttccatgcatccgtgcgctgcatcccaaatccatctagcgttgcgttgcgttgcgttgcaaagaacacatcgccatcagtggtgtcggtgtgcgaggaaattgaaaggaggacatgcaatctgcgttattactttgatctgatgcgctgttcgtttttgttcgtgactaaagtttagttagtgttggatattagttataaatattaaatataaacttaattaagtttaataaattcatctgatcttttattttgct

SEQ ID NO: 2021 - protein, 247 aa, Zea mays subsp. mays
  misc_feature (1)..(247): Ceres Seq. ID no. 15180556
TRSLVFCQLDNPQLLHLILPPIPSPRLTGEISSPRTASFCLIQPHPAMDESEEHSNGGGHPHPHHGYEWKFPAALSANTTSVHVTALDGVVNVNSLFTVAVFVGLSLATPGQLRSLAGDPRCDAGPGVARSLLVLEVVAFSSFLFSSLVAQGLKLALNLINSKDPHDAARAHIDARVLRLGMLASAVGSVVGCVFLMTSMVMVVQVRLGTLSCPTDRAAAKAAAGLVGLVTTALAFYVGTVFYTFTH

SEQ ID NO: 2022 - protein, 200 aa, Zea mays subsp. mays
  misc_feature (1)..(200): Ceres Seq. ID no. 15180557
MDESEEHSNGGGHPHPHHGYEWKFPAALSANTTSVHVTALDGVVNVNSLFTVAVFVGLSLATPGQLRSLAGDPRCDAGPGVARSLLVLEVVAFSSFLFSSLVAQGLKLALNLINSKDPHDAARAHIDARVLRLGMLASAVGSVVGCVFLMTSMVMVVQVRLGTLSCPTDRAAAKAAAGLVGLVTTALAFYVGTVFYTFTH

SEQ ID NO: 2023 - DNA, 2306 bp, Zea mays subsp. mays
  misc_feature (1)..(2306): Ceres Seq. ID no. 15180558
gttctcctacatcccttttccctctctgcccctgcgaacggggcgccaccacctaccagttatctccctccgctgcgcagcccctctgttagaccgtcgttgccgccctactccaggtgggtaggtcttcttcgggcccttcgccggcgacaagcaccaccaggggacctcgccggcgcaggggagggtgcaccgtcgccaggagccaagagccagcagccaggaaccagagccgccgccacttctagagctcaatcgatcagcgactcagattttcatctgaggatgggtaaggactatgaccctatggagattgacgaccagaagcagcaacagctagaagtcaccgctgcggtgccagaagggttcaacactgactatctccgtgtctactacggaaagctcttcccatatggtgatttcttcaaatggctttgctatggaaatgatggaaagcaccctggatgtgatcaatcatatgttggacgtcgagagttttcgtttacactggagaatgacatttacttgcgcttccaatcctttgatactgctactgaattagagagttctatcaaggagaagtgccctttcaagattgatattggacctgtctacagtgtagatccttcaaagcgtcacgcttacgcccaatctggcaataatgtctttgtaccagtcgagagagaactaatttttgacattgatatatctgattatgatgatgttcgctactgctgctctggagctgatgtctgcagagactgctggcccttgatgacaattgctatcaaaattttggatacttctcttagagatgattttggtttcagtcacatactatgggtatacagtggacgtcgtggtgtccattgctgggtctgtgatagcagagcaagaaagctcagcaatgaacaaagggctgcaattgctgactactttcgagtctacaagggtggtgaaaatgcactgaagaaagtatccttggctggacctgttctccatcccttccttgcccggtcatacatggatgttcttaaaaccttctttgaagataggttgctccttaaccaacaactctttgcatcagaggagagatgtcggaagatactcgatctcatccctgatgaaagtgttgctagtgaggtccatgacaagtggcagggaaatagacgatcttctatttcaaaagaagatgtcaatgcgaccagatgggagcaattgaagatgactttacagtctggaaaaaaggctcaggggcttcgtagatgtgtggaagagattgtcttctcatacacataccctagacttgacatggaggtatcaaagcacatgaatcatttactaaaagctcccttttgtatacatccaaagacaggccgtgtttgtgttccgattgaccccagtaattgtgatgattttgatcctgcggctgttccgactctatcacagcttttaggagagctgaatgctactggttttcagacagatcctgaaaataattgggaaagaacgtcccttgggaaatccatcagttttttcagaacttccttcctgcacccattgctgaaagcatgcaaggaggaactggaaagtgcatatagcgcgaagcttcagcagtccaagaattcattggtgaggtctttgtgaatgcaccattctttatatctgctgaggatgcaggtgccgtggatgcaaggaaaagtgatgagtacaaagaaactattattccagctggaaagacacatgaggtcattttgagtgttgaagctgtaaactcatacatcgcatgggacttttccttgcaacaaggggccctcaacatggtattggacattggctttcatgtggagtacattagcccttcaggggagaaaactttaattcttccataccgacgatatgaagctgaccaaggtaatttttgcactgtttcatcgggatcatacaaacttgtgtgggacaattcatattcttcattcttcaaaaaggtccttcggtacaaggtggatgctgtgccaccggttgttgagccggccttgtcagccacggaactctgaagaggtctgtcttaatataatgatgtaacgagggccgatgcatgcccgagtatagctgtacaaatgtttctgaaggccccacacggtgctgttactgattattccatcgaatgctttgcggtgttctgatcgcagcattccctgatagctcgctgtcagagcgcatggatatgtactttgtgtgcacatggctgcggccacttgtcaccgacgaatgcctgaatataacagaaatgtattatatcgacc

SEQ ID NO: 2024 - protein, 548 aa, Zea mays subsp. mays
  misc_feature (1)..(548): Ceres Seq. ID no. 15180559
VLLHPFSLSAPANGAPPPTSYLPPLRSPSVRPSLPPYSRWVGLLRALRRRQAPPGDLAGAGEGAPSPGAKSQQPGTRAAATSRAQSISDSDFHLRMGKDYDPMEIDDQKQQQLEVTAAVPEGFNTDYLRVYYGKLFPYGDFFKWLCYGNDGKHPGCDQSYVGRREFSFTLENDIYLRFQSFDTATELESSIKEKCPFKIDIGPVYSVDPSKRHAYAQSGNNVFVPVERELIFDIDISDYDDVRYCCSGADVCRDCWPLMTIAIKILDTSLRDDFGFSHILWVYSGRRGVHCWVCDSRARKLSNEQRAAIADYFRVYKGGENALKKVSLAGPVLHPFLARSYMDVLKTFFEDRLLLNQQLFASEERCRKILDLIPDESVASEVHDKWQGNRRSSISKEDVNATRWEQLKMTLQSGKKAQGLRRCVEEIVFSYTYPRLDMEVSKHMNHLLKAPFCIHPKTGRVCVPIDPSNCDDFDPAAVPTLSQLLGELNATGFQTDPENNWERTSLGKSISFFRTSFLHPLLKACKEELESAYSAKLQQSKNSLVRSL

SEQ ID NO: 2025 - protein, 453 aa, Zea mays subsp. mays
  misc_feature (1)..(453): Ceres Seq. ID no. 15180560
MGKDYDPMEIDDQKQQQLEVTAAVPEGFNTDYLRVYYGKLFPYGDFFKWLCYGNDGKHPGCDQSYVGRREFSFTLENDIYLRFQSFDTATELESSIKEKCPFKIDIGPVYSVDPSKRHAYAQSGNNVFVPVERELIFDIDISDYDDVRYCCSGADVCRDCWPLMTIAIKILDTSLRDDFGFSHILWVYSGRRGVHCWVCDSRARKLSNEQRAAIADYFRVYKGGENALKKVSLAGPVLHPFLARSYMDVLKTFFEDRLLLNQQLFASEERCRKILDLIPDESVASEVHDKWQGNRRSSISKEDVNATRWEQLKMTLQSGKKAQGLRRCVEEIVFSYTYPRLDMEVSKHMNHLLKAPFCIHPKTGRVCVPIDPSNCDDFDPAAVPTLSQLLGELNATGFQTDPENNWERTSLGKSISFFRTSFLHPLLKACKEELESAYSAKLQQSKNSLVRSL

SEQ ID NO: 2026 - protein, 446 aa, Zea mays subsp. mays
  misc_feature (1)..(446): Ceres Seq. ID no. 15180561
MEIDDQKQQQLEVTAAVPEGFNTDYLRVYYGKLFPYGDFFKWLCYGNDGKHPGCDQSYVGRREFSFTLENDIYLRFQSFDTATELESSIKEKCPFKIDIGPVYSVDPSKRHAYAQSGNNVFVPVERELIFDIDISDYDDVRYCCSGADVCRDCWPLMTIAIKILDTSLRDDFGFSHILWVYSGRRGVHCWVCDSRARKLSNEQRAAIADYFRVYKGGENALKKVSLAGPVLHPFLARSYMDVLKTFFEDRLLLNQQLFASEERCRKILDLIPDESVASEVHDKWQGNRRSSISKEDVNATRWEQLKMTLQSGKKAQGLRRCVEEIVFSYTYPRLDMEVSKHMNHLLKAPFCIHPKTGRVCVPIDPSNCDDFDPAAVPTLSQLLGELNATGFQTDPENNWERTSLGKSISFFRTSFLHPLLKACKEELESAYSAKLQQSKNSLVRSL

SEQ ID NO: 2027 - DNA, 902 bp, Zea mays subsp. mays
  misc_feature (1)..(902): Ceres Seq. ID no. 15180574
tcctcgggctgtccgctgtccccttcccgcgtcgaaaccctagctcgtcacctcgccgccgtgctgtccgctgtcctagtccgcggctccgcgccccatctctcttgccgtcgcatctgatgttcttctcccgcaacgcattccgcgacctggaccccatcgactcgccggcctccatggcgtcctcgaagaaggttgcggtcgagcaaatattgcgggtagtattcttggatgctgagcgcccaagcccacaaatggacaaactcaagcgccagctagctgaagcagaagcagcccttgaggcacgcaagaaacctccagaggacaatggtccccgtattgttggtgaaggccttgtgattgacgaatggaaggaacgaagagagaggtaccttgctcgccagcagatcgaaggtgttgattcggtgtagacacgaggcagccctgtaaactatgcagaatgaacataccgttttatgggcacgcactccagctgtcaaatggatttggagcttgattttgcgatggttcggatttggagcaatcaagcaacaatgaggcttttgtgtatttggggttcacgctgaacttctgtcctgggtttgggtgtgtgtagataagcagccactgcttggtaatagtaatagtacgtccttcagccatgtactcgtgttgtggaatgtgggtctctatgtgaatgtgatgcattctctagctgctgtcccgtcaacattaaaagtgtaattgtaatgtcaaaaggcacactccaaggtgattcagtggtagttctgccatcattttagttgttacagtaattcttccatcacttgtttgtacaactcatacatgtcatgccaccctgagatttatgtcattcagttgtcagtcagttgcttggtccc

SEQ ID NO: 2028 - protein, 142 aa, Zea mays subsp. mays
  misc_feature (1)..(142): Ceres Seq. ID no. 15180575
LGLSAVPFPRRNPSSSPRRRAVRCPSPRLRAPSLLPSHLMFFSRNAFRDLDPIDSPASMASSKKVAVEQILRVVFLDAERPSPQMDKLKRQLAEAEAALEARKKPPEDNGPRIVGEGLVIDEWKERRERYLARQQIEGVDSV

SEQ ID NO: 2029 - protein, 103 aa, Zea mays subsp. mays
  misc_feature (1)..(103): Ceres Seq. ID no. 15180576
MFFSRNAFRDLDPIDSPASMASSKKVAVEQILRVVFLDAERPSPQMDKLKRQLAEAEAALEARKKPPEDNGPRIVGEGLVIDEWKERRERYLARQQIEGVDSV

SEQ ID NO: 2030 - protein, 84 aa, Zea mays subsp. mays
  misc_feature (1)..(84): Ceres Seq. ID no. 15180577
MASSKKVAVEQILRVVFLDAERPSPQMDKLKRQLAEAEAALEARKKPPEDNGPRIVGEGLVIDEWKERRERYLARQQIEGVDSV

SEQ ID NO: 2031 - DNA, 1436 bp, Zea mays subsp. mays
  misc_feature (1)..(1436): Ceres Seq. ID no. 15180578
agtactagcagtagcactgcgccgcagcaatggtggtttccctcgccgaataaatctcaccggtcgcgcttcttggcgtgttcctccgctcgcctgggcttcgatctccagccctcgcgtgagcgcgggtgcggccgcggcgccgtggtcatggcgacggaggagtgggagctgcgggaggaggacgcctacgcctacgagttcgagttcgacctcgagaaccccttcaccagccccgccgacgagccgatcgccagtctcctcgacgccgagggccaccacgcgccctctatctccgccgcggcctcggccacccgccgcgccgccgccgccttcatctccaaggtgcgtttcggcggcgagctcgccgtgcacccgcgcgtcgcctacctcgcgctcaactacgtggatcgcttcctctccaagaggcaattggcgtgcgagcagcagccgtgggcgccgcgcctgctcgccatcagctgcctctccctcgccgccaagatgcagcgcgtcgcaacattctccaccgccgacattcagagggacgaagacttcatgttcgacgcggtgaccatccgtcgcatggagcgggtggtgcttggcgcgcttgagtggcgcgcgcgctccgtcacgccgctcgccttcctcggcttcttcctctccgcatgctatccgccgccgcagcaccccccacaggtagccgctgtcaaggcgcgcgccgtcgacctccttctccacgctcagcctgaggtgaagatggcggagttctcaccctccgtggtggcggcggcagcgctgctggccgccgccggagaggtcgccgccgcgaacctccacgcgttccaagccagcttggccgcctgtccctttgtaaatagcgagaagctgcgggagtgcggtgaggtgctggcagcggcgggcggcgtcgggcgggggcgagccgctccgagcgcggacacgcctgtgacggtgctcggtcaccagcgcagcgccagctccgcctcggagaccgactggattaacggcggcgacgcgaagaaacgctgcatgggcccaccatcgcaatgggggtaggcggcaggccgcaggccgagtcaagcgggtattgtcgcagctggatcgaagagtcggagattttactgcagccctgctcctttttttccaaattgtttttaccctttttcttttcccaattctttccttctactttaatgctctcgaggtaaagtgacgaggagtggtggtggtggctgtcatttactagtattcctttttcctagcatgtctttattttagcctagttatggtaatttttgcggcggtgctttggaaggtgaggacggtggatgaacatactgggatggaagagggggatgatgtgaaatggtaaaaaaaataaaaccaaaaggctggcatgttgctttgtcacctcaaat

SEQ ID NO: 2032 - protein, 357 aa, Zea mays subsp. mays
  misc_feature (1)..(357): Ceres Seq. ID no. 15180579
STSSSTAPQQWWFPSPNKSHRSRFLACSSARLGFDLQPSRERGCGRGAVVMATEEWELREEDAYAYEFEFDLENPFTSPADEPIASLLDAEGHHAPSISAAASATRRAAAAFISKVRFGGELAVHPRVAYLALNYVDRFLSKRQLACEQQPWAPRLLAISCLSLAAKMQRVATFSTADIQRDEDFMFDAVTIRRMERVVLGALEWRARSVTPLAFLGFFLSACYPPPQHPPQVAAVKARAVDLLLHAQPEVKMAEFSPSVVAAAALLAAAGEVAAANLHAFQASLAACPFVNSEKLRECGEVLAAAGGVGRGRAAPSADTPVTVLGHQRSASSASETDWINGGDAKKRCMGPPSQWG

SEQ ID NO: 2033 - protein, 307 aa, Zea mays subsp. mays
  misc_feature (1)..(307): Ceres Seq. ID no. 15180580
MATEEWELREEDAYAYEFEFDLENPFTSPADEPIASLLDAEGHHAPSISAAASATRRAAAAFISKVRFGGELAVHPRVAYLALNYVDRFLSKRQLACEQQPWAPRLLAISCLSLAAKMQRVATFSTADIQRDEDFMFDAVTIRRMERVVLGALEWRARSVTPLAFLGFFLSACYPPPQHPPQVAAVKARAVDLLLHAQPEVKMAEFSPSVVAAAALLAAAGEVAAANLHAFQASLAACPFVNSEKLRECGEVLAAAGGVGRGRAAPSADTPVTVLGHQRSASSASETDWINGGDAKKRCMGPPSQWG

SEQ ID NO: 2034 - protein, 190 aa, Zea mays subsp. mays
  misc_feature (1)..(190): Ceres Seq. ID no. 15180581
MQRVATFSTADIQRDEDFMFDAVTIRRMERVVLGALEWRARSVTPLAFLGFFLSACYPPPQHPPQVAAVKARAVDLLLHAQPEVKMAEFSPSVVAAAALLAAAGEVAAANLHAFQASLAACPFVNSEKLRECGEVLAAAGGVGRGRAAPSADTPVTVLGHQRSASSASETDWINGGDAKKRCMGPPSQWG

SEQ ID NO: 2035 - DNA, 1476 bp, Zea mays subsp. mays
  misc_feature (1)..(1476): Ceres Seq. ID no. 15180582
tgtggagcctgggagaaatgagagattctctagttttaatttgaagtatgtagaagttgaataaagacctattggatcagaatattgggaaccgagatttgccggccaccaaagtctgcaagaaagagaggagtcatacaaagcccatgaccaacagttgacatgtgcttttgttaagggtccaaatggtacaagcactggttttgatatatctgatgatgatcgaaagtacatgagtaaatgccacattgctgtatcatcctgcatctttggaaattctgatcgactgaggactccatttagcaaaacgattacaagcctctcaaagaagacagtttgctttgctatgtttttggatgaagtcacattgcaaactttagaatctgaaggccagaaaatggacggcatgggtttcattggtatatggaagatcatattgattaagaatatgccgtataatgacatgcgtagagtggggaaaataccaaaatttttggcacacaggctatttccatcatcgaggttctcaatctggttagacagcaaactgagactacaaactgatcctatccttatcctagagtattttctctggcggcatggttatgaatatgctatttccaatcactatgatcgccattgtgtttgggaggaagtagcacaaaataaaaagctgaacaagttcaaccacacaataattgaccagcaatttgagttttatcaagcggatggactgacaaggttcaacccatcggatcccagcaggcttctaccaagctatgtccctgaaggctcttttatcgcaagagagcacacaccgatgtccaacttattttcctgcctgtggtacaatgaagttgatcgattcacacctcgtgaccagctcagctttgcatatacatacttaaaactgagaaggacaaatcctgacagaccattccgtctcaatatgtttaaggattgtgagagacgatcaatagcgaagctattccatcaccggacagaagagagacacaacagtgcacaattaacaagatgacacatccttcctagtgatggagggcagaagagagaggtcagggattgtattctttgatatagttcagctatccacaagactctccattgaaactttatgcccctgtctaggagtttgtactttatataatgcaagccttctttcctttgtcactccagtcctgcaggccagttcccgcctaacatttttttgcagttgacaaggcggattaggagtttctaactgtttggtttttctttgttctccgtaaatctctgtttattcttttgataatatggcccatggatgatctggggaagctatgagtgatcatggacttttcccagattgcccatgcacaatgtattattaccacaccactgtaggactgtgtagtgaggccattgttctcctgcaattctgactgaaatgtaccatacacaactagtaaattactc

SEQ ID NO: 2036 - protein, 268 aa, Zea mays subsp. mays
  misc_feature (1)..(268): Ceres Seq. ID no. 15180583
MSKCHIAVSSCIFGNSDRLRTPFSKTITSLSKKTVCFAMFLDEVTLQTLESEGQKMDGMGFIGIWKIILIKNMPYNDMRRVGKIPKFLAHRLFPSSRFSIWLDSKLRLQTDPILILEYFLWRHGYEYAISNHYDRHCVWEEVAQNKKLNKFNHTIIDQQFEFYQADGLTRFNPSDPSRLLPSYVPEGSFIAREHTPMSNLFSCLWYNEVDRFTPRDQLSFAYTYLKLRRTNPDRPFRLNMFKDCERRSIAKLFHHRTEERHNSAQLTR

SEQ ID NO: 2037 - protein, 230 aa, Zea mays subsp. mays
  misc_feature (1)..(230): Ceres Seq. ID no. 15180584
MFLDEVTLQTLESEGQKMDGMGFIGIWKIILIKNMPYNDMRRVGKIPKFLAHRLFPSSRFSIWLDSKLRLQTDPILILEYFLWRHGYEYAISNHYDRHCVWEEVAQNKKLNKFNHTIIDQQFEFYQADGLTRFNPSDPSRLLPSYVPEGSFIAREHTPMSNLFSCLWYNEVDRFTPRDQLSFAYTYLKLRRTNPDRPFRLNMFKDCERRSIAKLFHHRTEERHNSAQLTR

SEQ ID NO: 2038 - protein, 213 aa, Zea mays subsp. mays
  misc_feature (1)..(213): Ceres Seq. ID no. 15180585
MDGMGFIGIWKIILIKNMPYNDMRRVGKIPKFLAHRLFPSSRFSIWLDSKLRLQTDPILILEYFLWRHGYEYAISNHYDRHCVWEEVAQNKKLNKFNHTIIDQQFEFYQADGLTRFNPSDPSRLLPSYVPEGSFIAREHTPMSNLFSCLWYNEVDRFTPRDQLSFAYTYLKLRRTNPDRPFRLNMFKDCERRSIAKLFHHRTEERHNSAQLTR

SEQ ID NO: 2039 - DNA, 1575 bp, Zea mays subsp. mays
  misc_feature (1)..(1575): Ceres Seq. ID no. 15180586
ctcacaggctcacacgatactttccccctccactagggttccccgtccgttccccctcggccgcatcagctgtttgaggcggcaaccaagggccgcggaagcatctgcgtcgagccatggataaggggatcttcaccaacgatggctccttcatggagaggttcaagcagatgcagcaggaggcgcaggagaagaaggccgctgctgcctccgcctcatcggctcccaagcatgcgaaccccaagcaggggtttgctgttgcggcaaacaagaggccattcgagctgaagaacgctgctccggtagcctcagctggtaagctggcctttagtctcaagaaggccaaggtcgccgttgcacctgtgtttgcagccgacgaggaggatgaggatgccgtggatgttgagagggaggagcccgccaaacgccagaagtctgtgcaagctgatgctcctgcggcagctgccccgtccggggctgttgccccacccccaccaaatgatatgacagtgagacaagtcgctgacaaactggcaagctttgttgccaaaaacgggagacagtttgagaatatcacacggcagaggaatcctggagatacaccattcaagtttctatttgacaaacactgtccagactacaaatattatgagtttcagcttgctgaagaggaaagggctcttgctcagtcaaaggaggctgaagcatcgaaagctaactctggcactgcaagcttcaaggcaccaggtggtacttatagaagctcatttgaacagaagtctaactatcagacacctgcatcagctttgtacggggcatatgagggtagttcttcccaaggaagctcttctagttacggtgatcatacagctccaccatcagatcctgtagcattgatggaattctatgcaaagaaggctgcactggaagaacggaagaggccaccaaggcagtcgaaagatgaaatgccgccacctccttctcttcaaggtcctcctaagaagggacaccacatgggtgatttcattcctcaagaagaacttgaaaagtttatggcacggtgtaatgatgctgcagcacaaaaggctaccaaagaagccgctgagaaggctaagattcaggcggacaatattgggcacaaacttttatctaagatgggttggagggaaggcgagggtcttgggagcgagagaagaggccgtgcagatcccgttatggctggagatgtgaagaaggatcatcttggtgttggggctgtccagcctggtgaggtcacatctgaagatgacatctatgagcaatacaagaaacggatgatgcttggataccgctataggccaaaccctctgaacaatccaaggaaatcatactactgatgcgggggagttcgtctgaggggagataaatgtcaagaagttcgttattcagcatatttcttggaatgccacagatgcaaggcttccgggggttctacaaagctttgttctttgtgtagtgtgtttatctttgtggatttaaatgtctgttcaaacgtgtatcatgtttcagacaatgatgtattgctttcttggatct

SEQ ID NO: 2040 - protein, 419 aa, Zea mays subsp. mays
  misc_feature (1)..(419): Ceres Seq. ID no. 15180587
MDKGIFTNDGSFMERFKQMQQEAQEKKAAAASASSAPKHANPKQGFAVAANKRPFELKNAAPVASAGKLAFSLKKAKVAVAPVFAADEEDEDAVDVEREEPAKRQKSVQADAPAAAAPSGAVAPPPPNDMTVRQVADKLASFVAKNGRQFENITRQRNPGDTPFKFLFDKHCPDYKYYEFQLAEEERALAQSKEAEASKANSGTASFKAPGGTYRSSFEQKSNYQTPASALYGAYEGSSSQGSSSSYGDHTAPPSDPVALMEFYAKKAALEERKRPPRQSKDEMPPPPSLQGPPKKGHHMGDFIPQEELEKFMARCNDAAAQKATKEAAEKAKIQADNIGHKLLSKMGWREGEGLGSERRGRADPVMAGDVKKDHLGVGAVQPGEVTSEDDIYEQYKKRMMLGYRYRPNPLNNPRKSYY

SEQ ID NO: 2041 - protein, 407 aa, Zea mays subsp. mays
  misc_feature (1)..(407): Ceres Seq. ID no. 15180588
MERFKQMQQEAQEKKAAAASASSAPKHANPKQGFAVAANKRPFELKNAAPVASAGKLAFSLKKAKVAVAPVFAADEEDEDAVDVEREEPAKRQKSVQADAPAAAAPSGAVAPPPPNDMTVRQVADKLASFVAKNGRQFENITRQRNPGDTPFKFLFDKHCPDYKYYEFQLAEEERALAQSKEAEASKANSGTASFKAPGGTYRSSFEQKSNYQTPASALYGAYEGSSSQGSSSSYGDHTAPPSDPVALMEFYAKKAALEERKRPPRQSKDEMPPPPSLQGPPKKGHHMGDFIPQEELEKFMARCNDAAAQKATKEAAEKAKIQADNIGHKLLSKMGWREGEGLGSERRGRADPVMAGDVKKDHLGVGAVQPGEVTSEDDIYEQYKKRMMLGYRYRPNPLNNPRKSYY

SEQ ID NO: 2042 - protein, 401 aa, Zea mays subsp. mays
  misc_feature (1)..(401): Ceres Seq. ID no. 15180589
MQQEAQEKKAAAASASSAPKHANPKQGFAVAANKRPFELKNAAPVASAGKLAFSLKKAKVAVAPVFAADEEDEDAVDVEREEPAKRQKSVQADAPAAAAPSGAVAPPPPNDMTVRQVADKLASFVAKNGRQFENITRQRNPGDTPFKFLFDKHCPDYKYYEFQLAEEERALAQSKEAEASKANSGTASFKAPGGTYRSSFEQKSNYQTPASALYGAYEGSSSQGSSSSYGDHTAPPSDPVALMEFYAKKAALEERKRPPRQSKDEMPPPPSLQGPPKKGHHMGDFIPQEELEKFMARCNDAAAQKATKEAAEKAKIQADNIGHKLLSKMGWREGEGLGSERRGRADPVMAGDVKKDHLGVGAVQPGEVTSEDDIYEQYKKRMMLGYRYRPNPLNNPRKSYY

SEQ ID NO: 2043 - DNA, 506 bp, Zea mays subsp. mays
  misc_feature (1)..(506): Ceres Seq. ID no. 15180590
gatcctcgttcctctccgccccgcttgcgccgcgcctccgcccccgtctcctgtgagatcagctccggcggcacgcggatatgactacttcaaggcgtcttgctgacaggaagagtgcaaagttccagaagaacatcacaaagaggggttctgtgcctgagaccacggtgaaaaagagcaatgactaccctgttggacctatagttcttggattcttcatttttgtggtcattggatcatgtaagcaccgcaccaagcctttactagcctcccttctgttttgaaactatatctcttgcattttcgagatgtttgtactttttattagtcttttaagcttatgctaatttaagtgtcaacacgtcgtaatgcatagctcttcagcttttaagaaccatgtgaccaaccatttatggataatgttttcttcatgaacaggttgtataaatgtagcaagtttgattcattcgggagagttaatttaagtgattctctgtttagttgtc

SEQ ID NO: 2044 - protein, 67 aa, Zea mays subsp. mays
  misc_feature (1)..(67): Ceres Seq. ID no. 15180591
MTTSRRLADRKSAKFQKNITKRGSVPETTVKKSNDYPVGPIVLGFFIFVVIGSCKHRTKPLLASLLF

SEQ ID NO: 2045 - protein, 34 aa, Zea mays subsp. mays
  misc_feature (1)..(34): Ceres Seq. ID no. 15180592
ILVPLRPACAAPPPPSPVRSAPAARGYDYFKASC

SEQ ID NO: 2046 - DNA, 483 bp, Zea mays subsp. mays
  misc_feature (1)..(483): Ceres Seq. ID no. 15180599
gattgaacaagaggacctcagtttgggctatgatgcagcaaaaggggagtacgtagacatgatcaaggccggcatcatcgatcccgtgaaggtgatccgcaccgcacttcaagacgctgcaagtgtttccctgctgatggcaaccacggaggccgctgtctccgagctcccggcaaccaagtccagaatagccagccgtatgccgcagatgagcgggatggacttctgagggcccgtttgggagggctccggcttctggaaatatggctctcgctcctactcctttacaagagcagcttatccataggagccggtgctttttctaaatcgtttggcaaaaatagctccttgtgtattcttctcatggcgccatggtcctggcaaccatgtccaactcgatgtgctaacacagcatctcaagaacttcagcatcttgagcttgtactgatgcgccgctgcgagcagatcctagatcattgcgac

SEQ ID NO: 2047 - protein, 75 aa, Zea mays subsp. mays
  misc_feature (1)..(75): Ceres Seq. ID no. 15180600
IEQEDLSLGYDAAKGEYVDMIKAGIIDPVKVIRTALQDAASVSLLMATTEAAVSELPATKSRIASRMPQMSGMDF

SEQ ID NO: 2048 - protein, 56 aa, Zea mays subsp. mays
  misc_feature (1)..(56): Ceres Seq. ID no. 15180601
MIKAGIIDPVKVIRTALQDAASVSLLMATTEAAVSELPATKSRIASRMPQMSGMDF

SEQ ID NO: 2049 - protein, 40 aa, Zea mays subsp. mays
  misc_feature (1)..(40): Ceres Seq. ID no. 15180602
MAPWSWQPCPTRCANTASQELQHLELVLMRRCEQILDHCD

SEQ ID NO: 2050 - DNA, 730 bp, Zea mays subsp. mays
  misc_feature (1)..(730): Ceres Seq. ID no. 15180608
ttgcttgtggaggttaccatacttgtgttgtaacagatagcggtgatctgtattcttggggttcaaatgaaaatggctgccttggtctgggaggtacggatatggtccgctctccggaaattttgaaaagttctctatttaaacttcctgtatctaaggtatcttgtggttggaagcacacagctgtagtttcaggtgatgacatctacacatggggttggggaggcgccaatgggacttttttcgaagagggccattcttccggtggacagctgggacatggaaacgacgtagactattttgagcctatgatggttccctttggcacgaatgccagagccgtccatgtatcgtgtggcttcaatcatactggtgcaatttacgagtgctccgaggactttgactgacgtgagacttgcagacagcagatccgcatgtcttggagacttaggttagttatcaaattatactcgctagaagtgcatataaacagcagaaataagctctgatgttggacctgcgtttatgtgaagagaaatatagaacaagtgataacgcccctgagagggggatgtaaattaaacagaataagggatgaactggatgcattttgtgatgcatcagagttacttgccagtgtatagcattccttcatttattggctggttctgtattattttgccaggtactaagaaatccattgcctgatgtctcagcaggctgtttgtgt

SEQ ID NO: 2051 - protein, 134 aa, Zea mays subsp. mays
  misc_feature (1)..(134): Ceres Seq. ID no. 15180609
ACGGYHTCVVTDSGDLYSWGSNENGCLGLGGTDMVRSPEILKSSLFKLPVSKVSCGWKHTAVVSGDDIYTWGWGGANGTFFEEGHSSGGQLGHGNDVDYFEPMMVPFGTNARAVHVSCGFNHTGAIYECSEDFD

SEQ ID NO: 2052 - protein, 101 aa, Zea mays subsp. mays
  misc_feature (1)..(101): Ceres Seq. ID no. 15180610
MVRSPEILKSSLFKLPVSKVSCGWKHTAVVSGDDIYTWGWGGANGTFFEEGHSSGGQLGHGNDVDYFEPMMVPFGTNARAVHVSCGFNHTGAIYECSEDFD

SEQ ID NO: 2053 - DNA, 1205 bp, Zea mays subsp. mays
  misc_feature (1)..(1205): Ceres Seq. ID no. 15180619
agccacgcacgcgcacaggcacagtcagagcgagatcagggaagaggggggaggaggaggaggaggaagaagaagaagcaggcatggagcctcatcacgcaaacaagccaaagccaaggccaaagctcagcgcgaagcactccaagttcatctcctgcaagctctacatctccgaatcccgcaacgctacggccgtggacgcagtggagcgtgcgagcaagagcgacccccaggtggtcgtcgtcagccagttcggggaccatcactacaaccgtttccgctacacgcttgtctcctacatcgtcgtcgacgacgacggcgtcgacggcggcggcggatcgtcggcggctggagaggcgatagtagtacatagcccgatcaggaaggtgttgctggcaatgatggaggccgcgttctcaagcatagacctggaatcgcagtcgggagcgcatccgaggatgggcgtcgtggacgacctgtccttccaccccgtgggccaagcgacagtcgaggacgccgcttctctggctaggcaggtagcgtctgacattgcctgcatcgcagcagtcccagtgttcctgtacgcagcagcccacccggcggggaagtcggtgggcgcggtccggcgtgagctcggctactaccgcccaaactacaggggcaaccagtggtcaggcagcgtgctccccgacgtcctgccggtgaagcctgacgtcggtccggcccacgtcgtctcgcacaagagaggcgctacgacggtgggcgtcacgccttggatcgagggctacaatgtccccgtgctgtgcaaggacgtcgccaccgtcaggaggatcacccgtggtgtcactggacgcagcggagggcttcccacggtgcaggctctcgcgctcttccatggagatgactgcaccgagattgcgtgcttgctggatccagaccatgccagcgcctatcaagttcagaccgtcgtggaacagattgcaggagaccagggacttgaggttgagcagggatactacactgacataaccaaggacgaagcgctcgataagtatctcaagattgcttgcgctgacgactgatgagcttgtagaaataaatacatggggtaaatgtaaactcatgtttgtagcactgatgctgctgctggagcattattttttgcccgtgtaaattcgattttgcatctgaaaacttgagtttgg

SEQ ID NO: 2054 - protein, 359 aa, Zea mays subsp. mays
  misc_feature (1)..(359): Ceres Seq. ID no. 15180620
PRTRTGTVRARSGKRGEEEEEEEEEAGMEPHHANKPKPRPKLSAKHSKFISCKLYISESRNATAVDAVERASKSDPQVVVVSQFGDHHYNRFRYTLVSYIVVDDDGVDGGGGSSAAGEAIVVHSPIRKVLLAMMEAAFSSIDLESQSGAHPRMGVVDDLSFHPVGQATVEDAASLARQVASDIACIAAVPVFLYAAAHPAGKSVGAVRRELGYYRPNYRGNQWSGSVLPDVLPVKPDVGPAHVVSHKRGATTVGVTPWIEGYNVPVLCKDVATVRRITRGVTGRSGGLPTVQALALFHGDDCTEIACLLDPDHASAYQVQTVVEQIAGDQGLEVEQGYYTDITKDEALDKYLKIACADD

SEQ ID NO: 2055 - protein, 332 aa, Zea mays subsp. mays
  misc_feature (1)..(332): Ceres Seq. ID no. 15180621
MEPHHANKPKPRPKLSAKHSKFISCKLYISESRNATAVDAVERASKSDPQVVVVSQFGDHHYNRFRYTLVSYIVVDDDGVDGGGGSSAAGEAIVVHSPIRKVLLAMMEAAFSSIDLESQSGAHPRMGVVDDLSFHPVGQATVEDAASLARQVASDIACIAAVPVFLYAAAHPAGKSVGAVRRELGYYRPNYRGNQWSGSVLPDVLPVKPDVGPAHVVSHKRGATTVGVTPWIEGYNVPVLCKDVATVRRITRGVTGRSGGLPTVQALALFHGDDCTEIACLLDPDHASAYQVQTVVEQIAGDQGLEVEQGYYTDITKDEALDKYLKIACADD

SEQ ID NO: 2056 - protein, 227 aa, Zea mays subsp. mays
  misc_feature (1)..(227): Ceres Seq. ID no. 15180622
MMEAAFSSIDLESQSGAHPRMGVVDDLSFHPVGQATVEDAASLARQVASDIACIAAVPVFLYAAAHPAGKSVGAVRRELGYYRPNYRGNQWSGSVLPDVLPVKPDVGPAHVVSHKRGATTVGVTPWIEGYNVPVLCKDVATVRRITRGVTGRSGGLPTVQALALFHGDDCTEIACLLDPDHASAYQVQTVVEQIAGDQGLEVEQGYYTDITKDEALDKYLKIACADD

SEQ ID NO: 2057 - DNA, 860 bp, Zea mays subsp. mays
  misc_feature (1)..(860): Ceres Seq. ID no. 15180631
ggggccaacggcggcagagggcatacaacagcaccgcgggatcgtcggacagggcatggagctgcagcaggaaggtgacacgggtgacaacaacacagcagccgttccgtctcaggaccgagcaaagaggaaaagccaaggaagggagtttcgtcgagaggttgaggaagatgcagcaagaggaggagaggctgcgcaacccactcgcgcaaggtttaccctacagcactgatgaaccagagatccccatgaaacctccaacgaaggaacccaccgaaccgatcgaccatgtgctgcacagcgaagtgcgtgtggccagacgcgccaagttcgacagccaagtcgctgagcgcaacagcttcatggagcaagtgagactggagagggaaagacagcagaaggcggatgaggagattgagatcaagtacatgaggaagcagcaggttccaagagcacatccgatgccggacttctccaagccatttgtgccgaaaaggtcagtgaagcttcctacaatcggcagggagccaagatttcaccccaggttgatgaggcgcatctcgacggccgaatgctctttgaaaatgctggccagtagaaagtagaaactatatacttttttttctcctgaaataataataataaaccaaaaaagagagaaaggccgtgcattaaaacatctatctagatcagtagagccctttttactgcttataataaatatatcaatatacttggctatttgggggggccattttgtacaatatacgtgcttcttgtaatctaagtagaaaagggagaataaaactgactaaggcctcgttcgtttattccgaattcatccaggaatcatttcagtt

SEQ ID NO: 2058 - protein, 200 aa, Zea mays subsp. mays
  misc_feature (1)..(200): Ceres Seq. ID no. 15180632
GQRRQRAYNSTAGSSDRAWSCSRKVTRVTTTQQPFRLRTEQRGKAKEGSFVERLRKMQQEEERLRNPLAQGLPYSTDEPEIPMKPPTKEPTEPIDHVLHSEVRVARRAKFDSQVAERNSFMEQVRLERERQQKADEEIEIKYMRKQQVPRAHPMPDFSKPFVPKRSVKLPTIGREPRFHPRLMRRISTAECSLKMLASRK

SEQ ID NO: 2059 - protein, 144 aa, Zea mays subsp. mays
  misc_feature (1)..(144): Ceres Seq. ID no. 15180633
MQQEEERLRNPLAQGLPYSTDEPEIPMKPPTKEPTEPIDHVLHSEVRVARRAKFDSQVAERNSFMEQVRLERERQQKADEEIEIKYMRKQQVPRAHPMPDFSKPFVPKRSVKLPTIGREPRFHPRLMRRISTAECSLKMLASRK

SEQ ID NO: 2060 - protein, 118 aa, Zea mays subsp. mays
  misc_feature (1)..(118): Ceres Seq. ID no. 15180634
MKPPTKEPTEPIDHVLHSEVRVARRAKFDSQVAERNSFMEQVRLERERQQKADEEIEIKYMRKQQVPRAHPMPDFSKPFVPKRSVKLPTIGREPRFHPRLMRRISTAECSLKMLASRK

SEQ ID NO: 2061 - DNA, 825 bp, Zea mays subsp. mays
  misc_feature (1)..(825): Ceres Seq. ID no. 15180639
aagtaaacctagcgatctctgcctccctggaccttctcttgcttcctttcccgaggagcccagctcgctcggctagctaggcaccgggttcttgttcctgccgcgaggcgcgtctcacacgcggcgtgccgtgcgtcggtgcgcgcatgcagcagcggggacacgacgcggcgggcgccaacgcctggatgacggtgccggcgttcggggactgggacacgaagaacggcgcgctgccggactactccatggacttctccaagatccgcgagatgcgcaagcagaacaagaaggagctctcccgcgccagcctcggcggcgacgacgacctcctcgcccacgcccaggcccaggccctgaagccgcaggccagtaacgccccgcccaagctcggccgcccccgccccggccccgccgacgaccactccccaacgggagggaagaagttcctgagctacttccggtgttgtatcaaggcctgaagaggtgctgctctagtgcctgcagtccctgtgtttttttttcgcagcagaacacttgtgagcaatcaggcatcggttttgttaagtactccctccgtttctttttatttgtcgctagatagtgtaaaattgcactattcagcgacaaataaaaagaaacggagggagtactccgtgtccaaaaacgtgtaatatatttgtccttatggatcagtcgttgggcctgtatgaagaacagaccagcttatggggtaagcaacgttctttttgtacacacaaatcaccatcgatttgtccttgatacgatcaaggggcatggttcgaatgaattggttttgtaatc

SEQ ID NO: 2062 - protein, 111 aa, Zea mays subsp. mays
  misc_feature (1)..(111): Ceres Seq. ID no. 15180640
MQQRGHDAAGANAWMTVPAFGDWDTKNGALPDYSMDFSKIREMRKQNKKELSRASLGGDDDLLAHAQAQALKPQASNAPPKLGRPRPGPADDHSPTGGKKFLSYFRCCIKA

SEQ ID NO: 2063 - protein, 97 aa, Zea mays subsp. mays
  misc_feature (1)..(97): Ceres Seq. ID no. 15180641
MTVPAFGDWDTKNGALPDYSMDFSKIREMRKQNKKELSRASLGGDDDLLAHAQAQALKPQASNAPPKLGRPRPGPADDHSPTGGKKFLSYFRCCIKA

SEQ ID NO: 2064 - protein, 77 aa, Zea mays subsp. mays
  misc_feature (1)..(77): Ceres Seq. ID no. 15180642
MDFSKIREMRKQNKKELSRASLGGDDDLLAHAQAQALKPQASNAPPKLGRPRPGPADDHSPTGGKKFLSYFRCCIKA

SEQ ID NO: 2065 - DNA, 1374 bp, Zea mays subsp. mays
  misc_feature (1)..(1374): Ceres Seq. ID no. 15180643
aacccacctcgccgaatcactccaccaaccacgaacctgaaaccctagccacgcccatgagcgacgacgcgaccgccgccgcgccctcttcgccgtcgacctccccttccccatcctctgcttcctcatcaggcgcctccccgtcgccttcctccccgcgcgccaagcgccgccgcaccgaccggtacgctctcggtttcgagttcgccccgcgactcgcgccctacgaactccctgaggaaccgctcctcgacaagcacaagcgcgcctggcccaactggacggagcgctccaccttggctctcctcgacgcctggggcgacagcttcgtccgcgcggggcgcagcatcatccgcgccgacgagtggctcgaggtcgcccgcctcgtgtgcgccgccgtgggccgtcccgcggggtatttctctgatgcgcagtgccgcaaccgagtggacacgcttaggaagaagtttaagaaggagagggagagagagcgccgtgccgcgcgccgctccggtccctccccttccaaatgggtttattacgacaagatggtggcaattctgtgcccgaccccgcctccgcctccgctgccgaccctgcctccgcctgcccgtccccctccgctgcctctccagttgctgcctctggtcgcaaagcgccgccgcgacaggcagccagcgcggcgctttcagtgggggatgaaagctcctgagcgtcttcttggtggtgccggagacgtcgtaggtcccagggtttcagggtcaggtgcgaagttgggtgaacttggaccgcagaaaaatagtgctgttcaagggaagcagaatggtttcatggccctcacagagtcaattcagaagtttgaggaggcttttgcgaggatggagagtagcaagaggcagcacatggtggaggtggagcaaatgaggagggatttgcaaagggacctagatgcaaagtggagggagatattggagaaggcgcaagcggagattggtcgccttagtaatgaggatggggatgaacatgatgtggacgaagatggggatgttggcgatggtaagagattggagggtggtgatgagcaaaacaatggtgctatggatgcttctccttagcatatagcctagatgcttacaaaatgaggaacaaaattggggttatcatgtcgatagatgaatccacatgatagacatgtggttatgattaactccgtagctgctgatattagtattattgtataattctcatatgtgtttcttttttttactccgcaatgctaagcaaaagattactgctattttggttactgtacatagctatttgcttaccgacgtgtgttttcaagataataatatcatttggtagctcttagtc

SEQ ID NO: 2066 - protein, 370 aa, Zea mays subsp. mays
  misc_feature (1)..(370): Ceres Seq. ID no. 15180644
PTSPNHSTNHEPETLATPMSDDATAAAPSSPSTSPSPSSASSSGASPSPSSPRAKRRRTDRYALGFEFAPRLAPYELPEEPLLDKHKRAWPNWTERSTLALLDAWGDSFVRAGRSIIRADEWLEVARLVCAAVGRPAGYFSDAQCRNRVDTLRKKFKKERERERRAARRSGPSPSKWVYYDKMVAILCPTPPPPPLPTLPPPARPPPLPLQLLPLVAKRRRDRQPARRFQWGMKAPERLLGGAGDVVGPRVSGSGAKLGELGPQKNSAVQGKQNGFMALTESIQKFEEAFARMESSKRQHMVEVEQMRRDLQRDLDAKWREILEKAQAEIGRLSNEDGDEHDVDEDGDVGDGKRLEGGDEQNNGAMDASP

SEQ ID NO: 2067 - protein, 352 aa, Zea mays subsp. mays
  misc_feature (1)..(352): Ceres Seq. ID no. 15180645
MSDDATAAAPSSPSTSPSPSSASSSGASPSPSSPRAKRRRTDRYALGFEFAPRLAPYELPEEPLLDKHKRAWPNWTERSTLALLDAWGDSFVRAGRSIIRADEWLEVARLVCAAVGRPAGYFSDAQCRNRVDTLRKKFKKERERERRAARRSGPSPSKWVYYDKMVAILCPTPPPPPLPTLPPPARPPPLPLQLLPLVAKRRRDRQPARRFQWGMKAPERLLGGAGDVVGPRVSGSGAKLGELGPQKNSAVQGKQNGFMALTESIQKFEEAFARMESSKRQHMVEVEQMRRDLQRDLDAKWREILEKAQAEIGRLSNEDGDEHDVDEDGDVGDGKRLEGGDEQNNGAMDASP

SEQ ID NO: 2068 - protein, 188 aa, Zea mays subsp. mays
  misc_feature (1)..(188): Ceres Seq. ID no. 15180646
MVAILCPTPPPPPLPTLPPPARPPPLPLQLLPLVAKRRRDRQPARRFQWGMKAPERLLGGAGDVVGPRVSGSGAKLGELGPQKNSAVQGKQNGFMALTESIQKFEEAFARMESSKRQHMVEVEQMRRDLQRDLDAKWREILEKAQAEIGRLSNEDGDEHDVDEDGDVGDGKRLEGGDEQNNGAMDASP

SEQ ID NO: 2069 - DNA, 1686 bp, Zea mays subsp. mays
  misc_feature (1)..(1686): Ceres Seq. ID no. 15180657
aaagtggtccttttccatccccaaacctcggctgccatggatttcggcttcggcgccggcgaccggaggccgctctgctcttccccggaccgacacttcgcaccaccgcgagccgagcttttccatggcggtccgccgccctcgctgttcgagtgtgaggccgcggcgtggcgcgagaggatcatccgcgaggaggtggagcggcggctcatcgagaaggaggtccgccgcgatctctcccttgcgcgcgcccgcggcggtttcggccccgtcccgttcgtcggacccaatggccacatcgtgcggtcaccacgccaaggcacgttcttcaggccggacggcccattcacgtcgccaatgccgctgaccccgatgccggtcggcatgcatccgaactggccaccgctgccttcgttcgggtcgtgggaggggtttggttctcggcggctcgcgggatttgggcagccgatgctcctcaacgagacgagaacgaggtccctgccgccgccaaagccgatgcatcagctccagctgcgcatggtcacgcccagcgagagctccgaggttttttcatcagaaacaaaggattctggtgtgaaaaggaaggcacatgcgatttctgcaactactgaatcaacaaaaatacaaaatgctgcaagggactggagctgtgcactctgtcaagtgagcgcaaccagtgagtctggtctgaatcagcatcttcaagggaaaaagcataaggcgaagctggttcaatgtggagcgatcaaggtgatggatactaataaaagtggtttacatgtaactactggaaataacaatggcgcaggcccaagtgacgcgcctaagaaaatccacatcctggtcgatggagaaatgcaccaggtcgtccaaaaaagcaagcgtgtatggtgtgagcgttgcagggtcagctgtaccaatgccggtgccatggctgaccatctgcggggcaagaagcacagtttattgaataaagtctgggcgtcaataaaagccgtgagaaggaacaatggaattaaggaagattcagctactgctacatgtgagagaaaggtaaatgaaagcggccctgctggaattccagaggaagaggaacatgaggaggagggagacacatacatggctagcgaattcagcggagatgcttcttccgaaattcctagatggtggatctggtactactggatttgcccattggcatggacagtgtatgggctcatcgtgacacaatacggagacctgcaagaccccatcacagtccctggcgaaagcaaccagacgattagctactatataacacatcattttggataccatagggattttatgccagtcgttgcgccagttctcgtgctctttgcagtattcttcgctttcatgtacgcagtctgcatcaagaagttgaactttcagcaacgataggaacaagatatggcagaaaagctcttgagagtattttttctttttttggaaaatacttccttttctcctttcatttttgagtccctttaatatattgcaatgtatatagggtgtagcttcggtattccacacatcgtcaaatgtggcgaggtcttatacagatttctagccgtttaactgtggaacattgtaatttgtaagagcacatctatgagaaagttttgttcatgcccaattcatttc

SEQ ID NO: 2070 - protein, 480 aa, Zea mays subsp. mays
  misc_feature (1)..(480): Ceres Seq. ID no. 15180658
KVVLFHPQTSAAMDFGFGAGDRRPLCSSPDRHFAPPRAELFHGGPPPSLFECEAAAWRERIIREEVERRLIEKEVRRDLSLARARGGFGPVPFVGPNGHIVRSPRQGTFFRPDGPFTSPMPLTPMPVGMHPNWPPLPSFGSWEGFGSRRLAGFGQPMLLNETRTRSLPPPKPMHQLQLRMVTPSESSEVFSSETKDSGVKRKAHAISATTESTKIQNAARDWSCALCQVSATSESGLNQHLQGKKHKAKLVQCGAIKVMDTNKSGLHVTTGNNNGAGPSDAPKKIHILVDGEMHQVVQKSKRVWCERCRVSCTNAGAMADHLRGKKHSLLNKVWASIKAVRRNNGIKEDSATATCERKVNESGPAGIPEEEEHEEEGDTYMASEFSGDASSEIPRWWIWYYWICPLAWTVYGLIVTQYGDLQDPITVPGESNQTISYYITHHFGYHRDFMPVVAPVLVLFAVFFAFMYAVCIKKLNFQQR

SEQ ID NO: 2071 - protein, 468 aa, Zea mays subsp. mays
  misc_feature (1)..(468): Ceres Seq. ID no. 15180659
MDFGFGAGDRRPLCSSPDRHFAPPRAELFHGGPPPSLFECEAAAWRERIIREEVERRLIEKEVRRDLSLARARGGFGPVPFVGPNGHIVRSPRQGTFFRPDGPFTSPMPLTPMPVGMHPNWPPLPSFGSWEGFGSRRLAGFGQPMLLNETRTRSLPPPKPMHQLQLRMVTPSESSEVFSSETKDSGVKRKAHAISATTESTKIQNAARDWSCALCQVSATSESGLNQHLQGKKHKAKLVQCGAIKVMDTNKSGLHVTTGNNNGAGPSDAPKKIHILVDGEMHQVVQKSKRVWCERCRVSCTNAGAMADHLRGKKHSLLNKVWASIKAVRRNNGIKEDSATATCERKVNESGPAGIPEEEEHEEEGDTYMASEFSGDASSEIPRWWIWYYWICPLAWTVYGLIVTQYGDLQDPITVPGESNQTISYYITHHFGYHRDFMPVVAPVLVLFAVFFAFMYAVCIKKLNFQQR

SEQ ID NO: 2072 - protein, 361 aa, Zea mays subsp. mays
  misc_feature (1)..(361): Ceres Seq. ID no. 15180660
MPLTPMPVGMHPNWPPLPSFGSWEGFGSRRLAGFGQPMLLNETRTRSLPPPKPMHQLQLRMVTPSESSEVFSSETKDSGVKRKAHAISATTESTKIQNAARDWSCALCQVSATSESGLNQHLQGKKHKAKLVQCGAIKVMDTNKSGLHVTTGNNNGAGPSDAPKKIHILVDGEMHQVVQKSKRVWCERCRVSCTNAGAMADHLRGKKHSLLNKVWASIKAVRRNNGIKEDSATATCERKVNESGPAGIPEEEEHEEEGDTYMASEFSGDASSEIPRWWIWYYWICPLAWTVYGLIVTQYGDLQDPITVPGESNQTISYYITHHFGYHRDFMPVVAPVLVLFAVFFAFMYAVCIKKLNFQQR

SEQ ID NO: 2073 - DNA, 1692 bp, Zea mays subsp. mays
  misc_feature (1)..(1692): Ceres Seq. ID no. 15180663
gaaaaaccatcctcctcgctcgcactgacaggcaggcagagagagagagacagagagccgaattgattgccgagggcagagcagcaacagcaacagtccacgaccgatcgcccggcccgcgcgcaggcaggcagcagccatgaaccacctgacgccggcgctccacggggcgatgcggccgccctcggcgcaggggcaggggctggcccggtacggctccgcgccgggctcgctcctagccgccatcgccgactccgtcacccgcggcgaccccgcgccgccgccgccgccgcccgtgagccggttctactccgccgagtcctcggggctcacctcctgcgagtccagctgccgcaccgactgcggacgcccgcccctcgagcgggcgtacggcggctccggcgagatccgcgtgccgccgccgctgcagcagcagcagcaccacctgctggctccccccgcggcctccccgctgttccgccacagcagctcccccgccgggctgctctcccgtctcatgaccgacccgcacggaatggcggcgaccggaggagcgatggggagctacacgcaggcgggcagcgacgccgcgctgggccacggccacgcgcagctcagctcgcagtggagcttctccaggcaggacctgccgcagatctcggagatggggatgataccggccgacatcggggagagcatcgtgggcgccggcgggtgcaacagctccagcgacgccgcgcagtcctcctcctacctctccaggaccttctccgtcggctcctgggacgacaccaactccatcatgttctcgtctgccccctgcaagaagcccaaggtggaccccgccgccggcgccgacgacatggtcaccaacttcagcaccattgacccgcagttcggcctgtccaactcatccctggagctgcccggcatggacgactacctgcagctgcagcaggactccgtcgcctgcagagtgcgtgcgaggcgtggctgcgcgactcacccgcggagcattgccgagagggaaagaaggacgaggatcagcaagaggctgaagaagctgcaagaccttgtgcccaacatggacaagcaaacgaatacgtcggacatgttggaccttgctgtggattacatcaaagagctcaaggaccaagtcgagaagctaaaacacgaccaagcaaactgctgttgcctaggcaacaagagctgctgctgatgctggagaagcagacggaggagggtttttatgccgtaacaatgtgactgttaaaccagagctgttgcttcaggagaccaggccgcgggcagaagtgcgtgacatgtggagcggcttccatgactcagcttcctcttttcttggttgttccacggactagcgacccggccggtgccaacggcttgaagactaggagataacaagtaggacgatgttgtaatttagttaccgcgacgcggtggctctggcttgcgtgtaaagaagtcctccctttcaacgcgactgggattgctgttgctggtaaaattgttgtaggaatatcatctgcgctccatttttcatcgagctcatcttttttttttttttttttttgtgtgtgtcactggattttggcaagaccgtaactcagaaaccgagcactgatcgagcgttcatgccaccccatacgaagtccaagagaattttagtatgcc

SEQ ID NO: 2074 - protein, 359 aa, Zea mays subsp. mays
  misc_feature (1)..(359): Ceres Seq. ID no. 15180664
MNHLTPALHGAMRPPSAQGQGLARYGSAPGSLLAAIADSVTRGDPAPPPPPPVSRFYSAESSGLTSCESSCRTDCGRPPLERAYGGSGEIRVPPPLQQQQHHLLAPPAASPLFRHSSSPAGLLSRLMTDPHGMAATGGAMGSYTQAGSDAALGHGHAQLSSQWSFSRQDLPQISEMGMIPADIGESIVGAGGCNSSSDAAQSSSYLSRTFSVGSWDDTNSIMFSSAPCKKPKVDPAAGADDMVTNFSTIDPQFGLSNSSLELPGMDDYLQLQQDSVACRVRARRGCATHPRSIAERERRTRISKRLKKLQDLVPNMDKQTNTSDMLDLAVDYIKELKDQVEKLKHDQANCCCLGNKSCC

SEQ ID NO: 2075 - protein, 348 aa, Zea mays subsp. mays
  misc_feature (1)..(348): Ceres Seq. ID no. 15180665
MRPPSAQGQGLARYGSAPGSLLAAIADSVTRGDPAPPPPPPVSRFYSAESSGLTSCESSCRTDCGRPPLERAYGGSGEIRVPPPLQQQQHHLLAPPAASPLFRHSSSPAGLLSRLMTDPHGMAATGGAMGSYTQAGSDAALGHGHAQLSSQWSFSRQDLPQISEMGMIPADIGESIVGAGGCNSSSDAAQSSSYLSRTFSVGSWDDTNSIMFSSAPCKKPKVDPAAGADDMVTNFSTIDPQFGLSNSSLELPGMDDYLQLQQDSVACRVRARRGCATHPRSIAERERRTRISKRLKKLQDLVPNMDKQTNTSDMLDLAVDYIKELKDQVEKLKHDQANCCCLGNKSCC

SEQ ID NO: 2076 - protein, 233 aa, Zea mays subsp. mays
  misc_feature (1)..(233): Ceres Seq. ID no. 15180666
MTDPHGMAATGGAMGSYTQAGSDAALGHGHAQLSSQWSFSRQDLPQISEMGMIPADIGESIVGAGGCNSSSDAAQSSSYLSRTFSVGSWDDTNSIMFSSAPCKKPKVDPAAGADDMVTNFSTIDPQFGLSNSSLELPGMDDYLQLQQDSVACRVRARRGCATHPRSIAERERRTRISKRLKKLQDLVPNMDKQTNTSDMLDLAVDYIKELKDQVEKLKHDQANCCCLGNKSCC

SEQ ID NO: 2077 - DNA, 1300 bp, Zea mays subsp. mays
  misc_feature (1)..(1300): Ceres Seq. ID no. 15180671
cacagcacgccagcttcctcctttctcttcagccattcttgttcttggctatctatcttctcccctcttcccttctccttatctctcttactcttaatttggtgcttcttaatttctcagaagagactttgcaagcttgtgacttgttctcccaattctattgcaaacttgatcaacatcttgttcttggaaggaaggtattagcttctaagaaagcgcaattgttgtggtttatgcacaccattggcagcgagtctctgctgtttgggttgtccaaaaccaagccatgtccacgcgcgggagcggtagtcttagccctgctgccggtgcgtctgcggcggcgccggaggtggaaggccactgggccccgcacggcgcggtgctgacggcctgcgtcgtgggctccaacgtgctcgtgatcctgctcgtcttcggtttcttctggcggttcttctctgggaaaggggggccgtccacgtcacacggcgccgacgacgacgacgacgaggactcactgcccgtggcgtccccatgggcgtcccgctaccggttcgagggccacggcgcacggtcgacgccgatggaagacgtggtgtcgtccctgcccgtgtccgtgtactccagcgccggcgccgaggaaggaaggaaggcccggcccgagtgcgccgtgtgcatcgtggagctgcgcgacggcgactcggtgcgcgtcctcccgcggtgcgggcaccggttccacgccgactgcgtgggcgcgtggctgcggcgccgcaccacgtgcccgctctgccgcggcagagtcgtgccacccgccgccgcggccctcactgacaagtccagggacgccaaggacgacgtcgccgtcgccgtcgccgcggattgtcccgtgtgatgcggcggcgctccggccgactccgaggacagtatcgctcgctccaactgtaagtctgtaactggcagtgatgctgcatggtgagcaagcaagcggtggaccacgacacgacaccacgcacacatggcggatggtgacagccatcttcttccagggtcggcgtccgtactccgtagccatgtcgcatagctatagctccagcctccagatgaccagctagaaaaggttggtgagacgattgattccttcgtcctgttatttatatttcttgcttcttttctggttttgggattagatatattgcgagtcgtggtatatatatgtgtgtcttgaattgatcgagtcttccgtcatgtgtagtatgcatgtgagatctgcatgattaattactcgtgctacttttagtcgtag

SEQ ID NO: 2078 - protein, 200 aa, Zea mays subsp. mays
  misc_feature (1)..(200): Ceres Seq. ID no. 15180672
MSTRGSGSLSPAAGASAAAPEVEGHWAPHGAVLTACVVGSNVLVILLVFGFFWRFFSGKGGPSTSHGADDDDDEDSLPVASPWASRYRFEGHGARSTPMEDVVSSLPVSVYSSAGAEEGRKARPECAVCIVELRDGDSVRVLPRCGHRFHADCVGAWLRRRTTCPLCRGRVVPPAAAALTDKSRDAKDDVAVAVAADCPV

SEQ ID NO: 2079 - protein, 127 aa, Zea mays subsp. mays
  misc_feature (1)..(127): Ceres Seq. ID no. 15180673
QHASFLLSLQPFLFLAIYLLPSSLLLISLTLNLVLLNFSEETLQACDLFSQFYCKLDQHLVLGRKVLASKKAQLLWFMHTIGSESLLFGLSKTKPCPRAGAVVLALLPVRLRRRRRWKATGPRTARC

SEQ ID NO: 2080 - protein, 102 aa, Zea mays subsp. mays
  misc_feature (1)..(102): Ceres Seq. ID no. 15180674
MEDVVSSLPVSVYSSAGAEEGRKARPECAVCIVELRDGDSVRVLPRCGHRFHADCVGAWLRRRTTCPLCRGRVVPPAAAALTDKSRDAKDDVAVAVAADCPV

SEQ ID NO: 2081 - DNA, 2180 bp, Zea mays subsp. mays
  misc_feature (1)..(2180): Ceres Seq. ID no. 15180702
aaaaaaaaaaacagccctaacagcaggggcagcggtttccgaaaagagaggcgtggagtgggggagagggccgagccaagccacctccaccgcagcaggcggcggagccgtacgcgaagcgaaagcgaggaaagccttctgaatcaggcttcctcgcgccgccgccgcttcctgctctcagcggcgtggataggtttcccgcccgcccgggcctggttgctcgtcttccttccttggtacaattcaattgattacctcaccagggagggagggtgctgcatccacggaccacggcttcacatgagtgaaagggatagaaagtgcagcgaccgtggacgaaaggactcgtgcttttgagcaattcaggaggagtacaagcatcacgaagccttcattctggaatgctgtccagtcgaaggaacagcgggattatcctacgggaagggtcagttagggactggtccgagttcaacgatccctctccgtccccaaaaccgttgtactcgcagtcctatgtcgcagtgagaggattcctgctgtcgagcaagctaaagtcagtgtatgcggctatgacttcacagaggcatagccgatcgcaggagagatcaaaatcaaaggggttgagctgcaggagagttgcagtccgtctactgttctttttcatgttaggcattttcattgggttcatgcctttattctctgtcgacgtctacaagaaaatagtatctgaaaacaagatgcttccgttccacgagggtgtgattgagacggaaatggtgggtaccaaagttaaggagtcggagacgattgtagtagagaaagagatcgaactgatcgacgagcctcatattcaagagagccctccagtccctgcattgttggatgatgatgtggatttttctgaatcatcacatgtgttacctgctattagagaatctgacattcccgtgaagaagttgctgataatcgtgacaatcacttctgtccggccacaacaggcatattacttgaatcggctagcccataccttgaaagctgtacaggcacctcttctatggttactggtggaatggcctgaacagtcctatgaaacagcagaaattctgaggtcttccggggttatgtacaggcatcttatgtgcagaaagaataccacgagtgttcggaagattgctgtttgtcaaaggaataatgcaatctatcatgtcaaaaggcatcaccttgatggtataatgcattttgctgatgaagaacggtcatactcagctgatgtatttgaagaaatgcagaagatcaggcgctttggctcatggcctgtaacaatccatattggaacaaagtatagggcagttctggaaggccctatttgcaaagctaaccgagtcatgagatggcacacagtccagacggctcaaaagaagagttcaactcgtcgattcccaattggtttctctgcatttgctttcaatagtacactgttatgggaccctcaaagatggaaccgcccgcctatggattctgttatagtccacacaggtggaagaggtggtttgcaggagtcacggtttatagaaaagcttgttaaaagtgagcgccaaatagagggtcttccagacaattgcaacagggtcatggtctggaatttcaacctggaacctcctcagctgaactaccccgcaggctgggcactttataagaacctagaagctgacatacctgtaatatagcttcctgcgagctacgttatgccttgctcctagaggtggtttctcccggcaaggcagaaggttgaagcacgtctccagcggcatgttagttctaaatttcaactccctgtcctttaaggtgcccaggtaaagctgctggttgatgccatcctgaacaagttgcgccaaagatttcgtgccgagatctgtcttcagtaatgcaatgtcatcctgaacaagttgcagcggcaatcaaaataggatcccccccccctgccttttagtctcgtgtattccttttgtgctcttcatttttttttcctcatcagctagatacgacatgtagactttcttttaggttttttttgtttttgtttttcatactgtgtgttaccttacagatgtaaaagcgcccccgtacattgcaactgttaaagaggaaaagcaaaataccgtcatttagcttcttcaaat

SEQ ID NO: 2082 - protein, 441 aa, Zea mays subsp. mays
  misc_feature (1)..(441): Ceres Seq. ID no. 15180703
MLSSRRNSGIILREGSVRDWSEFNDPSPSPKPLYSQSYVAVRGFLLSSKLKSVYAAMTSQRHSRSQERSKSKGLSCRRVAVRLLFFFMLGIFIGFMPLFSVDVYKKIVSENKMLPFHEGVIETEMVGTKVKESETIVVEKEIELIDEPHIQESPPVPALLDDDVDFSESSHVLPAIRESDIPVKKLLIIVTITSVRPQQAYYLNRLAHTLKAVQAPLLWLLVEWPEQSYETAEILRSSGVMYRHLMCRKNTTSVRKIAVCQRNNAIYHVKRHHLDGIMHFADEERSYSADVFEEMQKIRRFGSWPVTIHIGTKYRAVLEGPICKANRVMRWHTVQTAQKKSSTRRFPIGFSAFAFNSTLLWDPQRWNRPPMDSVIVHTGGRGGLQESRFIEKLVKSERQIEGLPDNCNRVMVWNFNLEPPQLNYPAGWALYKNLEADIPVI

SEQ ID NO: 2083 - protein, 385 aa, Zea mays subsp. mays
  misc_feature (1)..(385): Ceres Seq. ID no. 15180704
MTSQRHSRSQERSKSKGLSCRRVAVRLLFFFMLGIFIGFMPLFSVDVYKKIVSENKMLPFHEGVIETEMVGTKVKESETIVVEKEIELIDEPHIQESPPVPALLDDDVDFSESSHVLPAIRESDIPVKKLLIIVTITSVRPQQAYYLNRLAHTLKAVQAPLLWLLVEWPEQSYETAEILRSSGVMYRHLMCRKNTTSVRKIAVCQRNNAIYHVKRHHLDGIMHFADEERSYSADVFEEMQKIRRFGSWPVTIHIGTKYRAVLEGPICKANRVMRWHTVQTAQKKSSTRRFPIGFSAFAFNSTLLWDPQRWNRPPMDSVIVHTGGRGGLQESRFIEKLVKSERQIEGLPDNCNRVMVWNFNLEPPQLNYPAGWALYKNLEADIPVI

SEQ ID NO: 2084 - protein, 354 aa, Zea mays subsp. mays
  misc_feature (1)..(354): Ceres Seq. ID no. 15180705
MLGIFIGFMPLFSVDVYKKIVSENKMLPFHEGVIETEMVGTKVKESETIVVEKEIELIDEPHIQESPPVPALLDDDVDFSESSHVLPAIRESDIPVKKLLIIVTITSVRPQQAYYLNRLAHTLKAVQAPLLWLLVEWPEQSYETAEILRSSGVMYRHLMCRKNTTSVRKIAVCQRNNAIYHVKRHHLDGIMHFADEERSYSADVFEEMQKIRRFGSWPVTIHIGTKYRAVLEGPICKANRVMRWHTVQTAQKKSSTRRFPIGFSAFAFNSTLLWDPQRWNRPPMDSVIVHTGGRGGLQESRFIEKLVKSERQIEGLPDNCNRVMVWNFNLEPPQLNYPAGWALYKNLEADIPVI

SEQ ID NO: 2085 - DNA, 1537 bp, Zea mays subsp. mays
  misc_feature (1)..(1537): Ceres Seq. ID no. 15180725
ctatgtggttcacctgctgatgattattggaagaaatcaaagttgcctcatgcaacaatatttaaaccacatcatccatatactagtaccctacgagatgtttttaaagagttaccagaaaatgcattgagtttactagaaactcttctgtcggtggagccctacaagcgtggtactgcatcaggtgctctttcctctgagtttttcaggacaaaaccttatgcgtgcgaaccttcgagcttgcctaattatgcacctaacaaggagatggatgcaaagttacgagagaatgcactcagaagaaaagcaagtagcagagggcacgggacagaagcatccaagaagtcttcaaggctcagtagagcagcaagagaacctagtgcagtccctaagcagataataagtagaacagaggaatccaaaactaatgtgaatgcaaccaaagatggtacaacacaggaccgtgcgaaactgaatggcgatgctaggctatttgtggacatacaaccagtgtcagcggctcaagttaaagagagtgctcgccacgttaagaatgaatcacgagagcaaatacctttctccgggccattgagtgtttcttcatctagtggctttgcatgggccagaagaccacatgaggaccgttcctttgctagatcacggaccagatctagctcaaggggccagtttcctgctgatgctgttcagggatgtaatacccaagctaaagagaatgctggccttagggagctgcatagcagagacatacctgtatcagtatcacacgtcggttccagagtccgagaccgggggcctcacgatgcggcgaagcgtgcagtcctgaagaagtggtcacagctagagcgtccagattcgttcgattcttgcgacacttaccactcccataacttctcgaacgccatgttccttgggggtactctctcatcgaagaatggcttcaagggcggtcataatcaagaagagaaggtcgagtactcgggccctttgttgtcccagtcgcacaaggtcgatgaactgttgcagaagaacgagcgccacatccggcaagctgttcgaacatcatggttcaggagaggaagaaaggtggacaagtgaggaaaagcttgaccatttctttccatgggagggcttgtgacgcttagagaaaggggagagcatgtcattagcttctgatgggcctctgctgccaatctgggaagcgggcaattgctgctgacgagtccattgttaactgaaaacatcatcaactttggtgatcctatctcacagcaaaacaaaattagctactgtgccttgctgcttctggggtttgttgtagattccccgaagtgccgtatccttttttttttgttgtacagagaaatattagcggctgactgacggggcggtgtggttgaacagaagattgtgtagttggaataaccagtaactaagctgcacaacatgcatggtcggttgtagtaaaggcagcctctgaagaaaatgagaagtgaaatccaataactgttcgttgtct

SEQ ID NO: 2086 - protein, 371 aa, Zea mays subsp. mays
  misc_feature (1)..(371): Ceres Seq. ID no. 15180726
LCGSPADDYWKKSKLPHATIFKPHHPYTSTLRDVFKELPENALSLLETLLSVEPYKRGTASGALSSEFFRTKPYACEPSSLPNYAPNKEMDAKLRENALRRKASSRGHGTEASKKSSRLSRAAREPSAVPKQIISRTEESKTNVNATKDGTTQDRAKLNGDARLFVDIQPVSAAQVKESARHVKNESREQIPFSGPLSVSSSSGFAWARRPHEDRSFARSRTRSSSRGQFPADAVQGCNTQAKENAGLRELHSRDIPVSVSHVGSRVRDRGPHDAAKRAVLKKWSQLERPDSFDSCDTYHSHNFSNAMFLGGTLSSKNGFKGGHNQEEKVEYSGPLLSQSHKVDELLQKNERHIRQAVRTSWFRRGRKVDK

SEQ ID NO: 2087 - protein, 282 aa, Zea mays subsp. mays
  misc_feature (1)..(282): Ceres Seq. ID no. 15180727
MDAKLRENALRRKASSRGHGTEASKKSSRLSRAAREPSAVPKQIISRTEESKTNVNATKDGTTQDRAKLNGDARLFVDIQPVSAAQVKESARHVKNESREQIPFSGPLSVSSSSGFAWARRPHEDRSFARSRTRSSSRGQFPADAVQGCNTQAKENAGLRELHSRDIPVSVSHVGSRVRDRGPHDAAKRAVLKKWSQLERPDSFDSCDTYHSHNFSNAMFLGGTLSSKNGFKGGHNQEEKVEYSGPLLSQSHKVDELLQKNERHIRQAVRTSWFRRGRKVDK

SEQ ID NO: 2088 - DNA, 1168 bp, Zea mays subsp. mays
  misc_feature (1)..(1168): Ceres Seq. ID no. 15180738
acaccatctctaggccgcgtctcgcctcgtctcgtcgtccgatcattatctccctgactcgcctcgtcctccagatatcggccgccaccttcacctccaccgccccggcgcacctgtgcgtctccatcgtcgccgcctctcctccttcggacacgactgaccttccactggcgccaacgaagaaaacacataggaagaagctcaccgccaaacctcatccagatccagtcgctgccctccgaaggccgcatacggaacgtctcgtctcttcctttggatccggcggtcaactccatcacccccagcttcacctcccttagtccccctccgtccgctctcacccaccgcttctatatcgccacctctctcgttgtagaagaagacactgaggatctggctttctggaatcacatttcttgagaactatctgttggagaactaaactaggctcttgttcatattatggatcagcaagctaagattgatgctgattttcttgaaccaactgtactcttagatgagacacattaccaggaggggtacaaaaatggctataatgatggtttggcatctggaaaggaagaggggaggcaggttggtttaaagatgggtttccaggtcggtgaagaactgggtttctttcagggctgtctggatgtgtggacgtctgcaattctcattgatcagaatgccttcacagctcgggtcaggaagaatatcgagcaactggctgcactggtgggcagctatccgctgtctgatccggagaatgaacaaattcaagacgtgatggagaagataaggctgaaatttagggtcatcactgcaagcttaggggtgaagttagagtatgaagggcaccccaaatcatctaaacaggatgctgaggatctatgagcagtgattgaaattacattttagtttctccgcccttgctgtttaaagctcttcaactcattggcatcacgaggaactgccgtgagacatcaatggccagagtccgaccaaaaccacatatatagttttaacaatgtctcaagttttgtgttattacctgctatctgccatatgtaatagtttcctttcagaaggcaaaagcacttccttcccattttcttgaagtacttgttgacttgtattctacatgttgggagcatatagatcttcc

SEQ ID NO: 2089 - protein, 144 aa, Zea mays subsp. mays
  misc_feature (1)..(144): Ceres Seq. ID no. 15180739
MDQQAKIDADFLEPTVLLDETHYQEGYKNGYNDGLASGKEEGRQVGLKMGFQVGEELGFFQGCLDVWTSAILIDQNAFTARVRKNIEQLAALVGSYPLSDPENEQIQDVMEKIRLKFRVITASLGVKLEYEGHPKSSKQDAEDL

SEQ ID NO: 2090 - protein, 105 aa, Zea mays subsp. mays
  misc_feature (1)..(105): Ceres Seq. ID no. 15180740
TISRPRLASSRRPIIISLTRLVLQISAATFTSTAPAHLCVSIVAASPPSDTTDLPLAPTKKTHRKKLTAKPHPDPVAALRRPHTERLVSSFGSGGQLHHPQLHLP

SEQ ID NO: 2091 - protein, 96 aa, Zea mays subsp. mays
  misc_feature (1)..(96): Ceres Seq. ID no. 15180741
MGFQVGEELGFFQGCLDVWTSAILIDQNAFTARVRKNIEQLAALVGSYPLSDPENEQIQDVMEKIRLKFRVITASLGVKLEYEGHPKSSKQDAEDL

SEQ ID NO: 2092 - DNA, 1264 bp, Zea mays subsp. mays
  misc_feature (1)..(1264): Ceres Seq. ID no. 15180793
aagtcgttcggctcggcgcactgggtatagcagcactgccgcggttgattttcgagctgtggtgctggagaagtgaagagctcatgctgttctcccgttccccggctgccacaaatcagccactcgccccttcccgccggacgctgctcctatcgccatgcccgcgagccggcgcgaccccggcaccggtggccgacgctgcgctcctaccgggcgggctgcgtgcggagtcgctgccgcggcacgtggctgtggtcatggacgggaactcgcggtgggcgcgcgcgcgcgggctgccgtcagcggccgggcacgaggccgggcgccgcgcgctggaggaggtggtgcggctctcccgcgcctggggcgtccgcacgctcaccgccttcgccttctcccacgagaactggagccggcccaaggtggaggtggaattcttgatggggcagtttgagcgagcgatccgcgaaagcgtagctgaatttttgagagaaggaattcggctacgcgtaatcggcgactcctcaaggctgccggtttctcttcagaggaccgcgagagaagccgaggaggccacgcggaacaactcgcagcttgacctgacactggcaatcagctacagcgggcggagggacatagtgcaggcgtgccggaccctagcccagaaggtgcgcgacaagctgctcgagccggaggacatcgacgagtcgctgttcgccggtgagctcgagacgagccacgccaacggcaacgagctcccttatcccgacctggtcatcagaaccagcggcgaactgcggctgagcaacttcctgctgtggcagtcggcgtacgcggagctcttcttcacggacacgctgtggcccgacttcggagaggccgattacctccaagcgctggtctcgttccagagcagagacaggcggttcggcgtaaggaaattgtagcggcgcagaggcagcgccatgtggaaggcgtgcttcaatagcaactgtcaatagcaggaaagcgtcggtcaataaatcgtaacgcgagaccaagatgggtagatggagtattaaagtggtggtttgcatgcagcggtgagagtgagagtaatgtagcatatcaactcaagatggtaggtactacagctagagttcaagctcacagacagcagtcgtcgttgatgatggtggctagcagctatctgccgatggccacagatttattgttaaaaaccctttgctattgcaagagtacgtcaaatgccctttattaagtc

SEQ ID NO: 2093 - protein, 314 aa, Zea mays subsp. mays
  misc_feature (1)..(314): Ceres Seq. ID no. 15180794
VVRLGALGIAALPRLIFELWCWRSEELMLFSRSPAATNQPLAPSRRTLLLSPCPRAGATPAPVADAALLPGGLRAESLPRHVAVVMDGNSRWARARGLPSAAGHEAGRRALEEVVRLSRAWGVRTLTAFAFSHENWSRPKVEVEFLMGQFERAIRESVAEFLREGIRLRVIGDSSRLPVSLQRTAREAEEATRNNSQLDLTLAISYSGRRDIVQACRTLAQKVRDKLLEPEDIDESLFAGELETSHANGNELPYPDLVIRTSGELRLSNFLLWQSAYAELFFTDTLWPDFGEADYLQALVSFQSRDRRFGVRKL

SEQ ID NO: 2094 - protein, 287 aa, Zea mays subsp. mays
  misc_feature (1)..(287): Ceres Seq. ID no. 15180795
MLFSRSPAATNQPLAPSRRTLLLSPCPRAGATPAPVADAALLPGGLRAESLPRHVAVVMDGNSRWARARGLPSAAGHEAGRRALEEVVRLSRAWGVRTLTAFAFSHENWSRPKVEVEFLMGQFERAIRESVAEFLREGIRLRVIGDSSRLPVSLQRTAREAEEATRNNSQLDLTLAISYSGRRDIVQACRTLAQKVRDKLLEPEDIDESLFAGELETSHANGNELPYPDLVIRTSGELRLSNFLLWQSAYAELFFTDTLWPDFGEADYLQALVSFQSRDRRFGVRKL

SEQ ID NO: 2095 - protein, 229 aa, Zea mays subsp. mays
  misc_feature (1)..(229): Ceres Seq. ID no. 15180796
MDGNSRWARARGLPSAAGHEAGRRALEEVVRLSRAWGVRTLTAFAFSHENWSRPKVEVEFLMGQFERAIRESVAEFLREGIRLRVIGDSSRLPVSLQRTAREAEEATRNNSQLDLTLAISYSGRRDIVQACRTLAQKVRDKLLEPEDIDESLFAGELETSHANGNELPYPDLVIRTSGELRLSNFLLWQSAYAELFFTDTLWPDFGEADYLQALVSFQSRDRRFGVRKL

SEQ ID NO: 2096 - DNA, 1378 bp, Zea mays subsp. mays
  misc_feature (1)..(1378): Ceres Seq. ID no. 15180805
cggcctcccaaggcataagatggctccgtcccgtgcgctccaccgcccatctctcctcgctacggcggcggcgctgctgctgctcattctccctccatcagcagcagcagcagtgccggcgcctgctctcttcatcttcggagactccctcgtggatgcgggcaacaacgactacctcgtgaccctttccaaggccaacggaccaccgtacggcatcgacttcgaatcctccggcggcaagccgacgggaaggttcacgaacgggatgaccatcgcagatatcatgggtgagtccctggggcagaaatctctcgctccacccttcctggctccgaactcgagtgctgcgatcaccagcagcgggatcaactatggctctggttcttctggcatatttgacgataccggttccttctatatcggaaggattccgctagggcagcaagtcagctacttcgcaaacaccaggtcacagatgctggagaccatggacgaggaagccgtagccgatttcttcagcaaggctctctttgttatagtagcagggtccaacgacatcttggagtttctttcgccgtcagtaccgttcctcggacgagagaagcctgatgacccatcgcacttccaggacgcactggtttccaacctgacattctatctcaaggagctgagtgagctgggggctaggaagttcgtcgtgtccgacgtcgggccgctcggctgtataccctacgtccgtgctctggagttcatgcccgcggggcagtgctcggcgccggcgaatcgagtcaccgaaggctacaacaggaagctgaggaggatggtggagaagatgaaccgggagataggtccggagagcaaattcgtgtacacggacacgtacaggatcgttatggcgatcattcagaaccaccgccagtatggtttcgacgacgcgatggacccgtgctgcggcggcagcttccctttgcctccgttcctctgcattggagctgtcgccaaccgctccagctcgacgctgtgcagcgaccgctccaagtacgtgttctgggatgcgttccacccgaccgaagccgccaacctcatcgtcgccggcaaactcctcgacggcgacgcggctgccgcctggcctatcaatgtccgcgaactgtcccagtacgagtacaaatgatcgatatcgacgacgcgcgcgatgtgcaggccggctcaacgattcattggttttgtgtcattgatgtagtttcgtcttccttgttggggttttctaggctaggcttttatttgcttcaatttcgtatggttgactaggactgcgtgcaaattggtcaatttattccatgttgacgggaagaacgcgagtgcaatttcttctttctct

SEQ ID NO: 2097 - protein, 389 aa, Zea mays subsp. mays
  misc_feature (1)..(389): Ceres Seq. ID no. 15180806
GLPRHKMAPSRALHRPSLLATAAALLLLILPPSAAAAVPAPALFIFGDSLVDAGNNDYLVTLSKANGPPYGIDFESSGGKPTGRFTNGMTIADIMGESLGQKSLAPPFLAPNSSAAITSSGINYGSGSSGIFDDTGSFYIGRIPLGQQVSYFANTRSQMLETMDEEAVADFFSKALFVIVAGSNDILEFLSPSVPFLGREKPDDPSHFQDALVSNLTFYLKELSELGARKFVVSDVGPLGCIPYVRALEFMPAGQCSAPANRVTEGYNRKLRRMVEKMNREIGPESKFVYTDTYRIVMAIIQNHRQYGFDDAMDPCCGGSFPLPPFLCIGAVANRSSSTLCSDRSKYVFWDAFHPTEAANLIVAGKLLDGDAAAAWPINVRELSQYEYK

SEQ ID NO: 2098 - protein, 383 aa, Zea mays subsp. mays
  misc_feature (1)..(383): Ceres Seq. ID no. 15180807
MAPSRALHRPSLLATAAALLLLILPPSAAAAVPAPALFIFGDSLVDAGNNDYLVTLSKANGPPYGIDFESSGGKPTGRFTNGMTIADIMGESLGQKSLAPPFLAPNSSAAITSSGINYGSGSSGIFDDTGSFYIGRIPLGQQVSYFANTRSQMLETMDEEAVADFFSKALFVIVAGSNDILEFLSPSVPFLGREKPDDPSHFQDALVSNLTFYLKELSELGARKFVVSDVGPLGCIPYVRALEFMPAGQCSAPANRVTEGYNRKLRRMVEKMNREIGPESKFVYTDTYRIVMAIIQNHRQYGFDDAMDPCCGGSFPLPPFLCIGAVANRSSSTLCSDRSKYVFWDAFHPTEAANLIVAGKLLDGDAAAAWPINVRELSQYEYK

SEQ ID NO: 2099 - protein, 301 aa, Zea mays subsp. mays
  misc_feature (1)..(301): Ceres Seq. ID no. 15180808
MTIADIMGESLGQKSLAPPFLAPNSSAAITSSGINYGSGSSGIFDDTGSFYIGRIPLGQQVSYFANTRSQMLETMDEEAVADFFSKALFVIVAGSNDILEFLSPSVPFLGREKPDDPSHFQDALVSNLTFYLKELSELGARKFVVSDVGPLGCIPYVRALEFMPAGQCSAPANRVTEGYNRKLRRMVEKMNREIGPESKFVYTDTYRIVMAIIQNHRQYGFDDAMDPCCGGSFPLPPFLCIGAVANRSSSTLCSDRSKYVFWDAFHPTEAANLIVAGKLLDGDAAAAWPINVRELSQYEYK

SEQ ID NO: 2100 - DNA, 1015 bp, Zea mays subsp. mays
  misc_feature (1)..(1015): Ceres Seq. ID no. 15180832
gtcctggaggcatccacaacctggagctccagctcatgccgccgcgcggcagcgccgccagctactacgagggggctgcaggtgcagctcctgcagctgccgtcaggtgctgcgcctcgccgcattattcgcctgctgtacatgttccgcagccgggcgccgacccgatgcggctgcagctgtcgatcgggttcggcggcggcgacggcgagacgtcggcgccggcagcggcggcgaggctgaaggaggaggcccgggagcagctgcggctggcgatggcggagaaggcggcggccgacgacgcccgggcgcaggcgcggcggcaggcggagctggccgagcaggagctggcggccgcccggcgcatgcggcagcaggcgcaggcggagctgggccgcgcgcacgcgctccgggaccacgccgtgcggcaggtggacgccacgctgctgcaggtcacctgctacagctgccgctgcaagttccgggcgcgtgtgactggcggcggcgccatgagctccgaggtggccagctacgtctcctccgttgtcacggccgagggcggcgacgccgaggtggacgacgacgacccgtaccgccaccaccggcagctcaccgccgacgacgacgcgccgagccacgctaggatgatggacatcaactagcggccggccggcgcccggccatctcgtactcgcatggacgagaggccgtgatggatggatcgtggatgtgcgatgtggtagcagctgcttggtggtggtctctgactagatgtggtgatagtgcagagtgctagtctagactctcacggccggcggccggcggggagtcatgcttgagcgcaaaagtgaagctagtagctaattacgacgtgcatggaatctttcgcttgtttgcttgctgttggactttcttacaataacatttgttcgatcgatccggactcagcaggagcattccggctgcagctggtgctgtcgaaaccgagaaagaatgcatgcatggcagctcttgt

SEQ ID NO: 2101 - protein, 219 aa, Zea mays subsp. mays
  misc_feature (1)..(219): Ceres Seq. ID no. 15180833
PGGIHNLELQLMPPRGSAASYYEGAAGAAPAAAVRCCASPHYSPAVHVPQPGADPMRLQLSIGFGGGDGETSAPAAAARLKEEAREQLRLAMAEKAAADDARAQARRQAELAEQELAAARRMRQQAQAELGRAHALRDHAVRQVDATLLQVTCYSCRCKFRARVTGGGAMSSEVASYVSSVVTAEGGDAEVDDDDPYRHHRQLTADDDAPSHARMMDIN

SEQ ID NO: 2102 - protein, 213 aa, Zea mays subsp. mays
  misc_feature (1)..(213): Ceres Seq. ID no. 15180834
SWRHPQPGAPAHAAARQRRQLLRGGCRCSSCSCRQVLRLAALFACCTCSAAGRRPDAAAAVDRVRRRRRRDVGAGSGGEAEGGGPGAAAAGDGGEGGGRRRPGAGAAAGGAGRAGAGGRPAHAAAGAGGAGPRARAPGPRRAAGGRHAAAGHLLQLPLQVPGACDWRRRHELRGGQLRLLRCHGRGRRRRGGRRRPVPPPPAAHRRRRRAEPR

SEQ ID NO: 2103 - protein, 208 aa, Zea mays subsp. mays
  misc_feature (1)..(208): Ceres Seq. ID no. 15180835
MPPRGSAASYYEGAAGAAPAAAVRCCASPHYSPAVHVPQPGADPMRLQLSIGFGGGDGETSAPAAAARLKEEAREQLRLAMAEKAAADDARAQARRQAELAEQELAAARRMRQQAQAELGRAHALRDHAVRQVDATLLQVTCYSCRCKFRARVTGGGAMSSEVASYVSSVVTAEGGDAEVDDDDPYRHHRQLTADDDAPSHARMMDIN

SEQ ID NO: 2104 - DNA, 666 bp, Zea mays subsp. mays
  misc_feature (1)..(666): Ceres Seq. ID no. 15180840
aatatggaaagtcagagaaatgcaatgcatcagatccggatgctggttctgatgcactaaatgatacggagctctcaacaagtcaagatcgagaggaagaagacgatggagtaaacaaagcacaacagcagtacacagagaaaccaatcgttcctgtcaaggagagtagaagtgtccggagaaaattcctcgtcctaaatgagcttgtgcctatagctggttttgatgatgcttcagtcttagtgaaagataagcacgtgaataacaacggaggaaaatgttctgcagcacattagggcgttggggaagctctttttttttgtcacatgggtagcaaatactgggtagaactgctcgcttaagcatggaccaacgagaatccaatgagatggtgatgcaacattggtcttgtttgggcagactgctgcttactacttccagtgtcatgccagcgaggagatgagatggtccatgggtgctgtgtggctgaattcccagcccataaagccaagtccctctctgatacttggaggtcttgctgagatgtgcactaggcacaccgcgtcgattggcgctgtacaattgtcacagctgtacgtgtatctcctccatgtatatacagtgattgggagcaaaaaaaaaaaaaaaaaaaaaaaaaaaaaaaag

SEQ ID NO: 2105 - protein, 97 aa, Zea mays subsp. mays
  misc_feature (1)..(97): Ceres Seq. ID no. 15180841
YGKSEKCNASDPDAGSDALNDTELSTSQDREEEDDGVNKAQQQYTEKPIVPVKESRSVRRKFLVLNELVPIAGFDDASVLVKDKHVNNNGGKCSAAH

SEQ ID NO: 2106 - protein, 69 aa, Zea mays subsp. mays
  misc_feature (1)..(69): Ceres Seq. ID no. 15180842
MRWSMGAVWLNSQPIKPSPSLILGGLAEMCTRHTASIGAVQLSQLYVYLLHVYTVIGSKKKKKKKKKKK

SEQ ID NO: 2107 - protein, 65 aa, Zea mays subsp. mays
  misc_feature (1)..(65): Ceres Seq. ID no. 15180843
MGAVWLNSQPIKPSPSLILGGLAEMCTRHTASIGAVQLSQLYVYLLHVYTVIGSKKKKKKKKKKK

SEQ ID NO: 2108 - DNA, 1157 bp, Zea mays subsp. mays
  misc_feature (1)..(1157): Ceres Seq. ID no. 15180844
cctctccgctcgtctccgctagctagctgcaccatcgtgcatgcgttcccggccgccgcgccgcccgcctgcaggacccgcgctgccgatcgacgtcggtgcacaatgtggaactgctcgtcgctcctgctgcagtacggcgacgactacgcagccaggtgcgagagctctagttcaccggcaggagctgtgggcctggacaggatactagcggcggagtatggccggttcgattctctggacctgtcgccgccgccgccgcttcacggtcttcaggcgcagacgctttttgctattcacggttcttcagagaactgcctaggaataggcgcgaatccaatctacagcaccgaggcccggcccgcgttctcgcagctcagcttcacccagccagctgctgataccgctgcccactactcgatgaaatggacggcagcgggggagacggcgaccggtggcgggggaagccgtctcaggggatcgaagaggctcaagacaaagacgccagccacagcacaaggtccacagcaccacggccagcggtgcagtccgaaaccaacaacaagtcagtctatcaaggcaccaccatgtaagaggagccagaagctgggggacaagatcacgacgcttcagcagctagtctccccttatggcaagacggatacggcatcagtgctccacgaggcagccacctgcatcaagcacctccacgagcagatccagattctgacgccctcctaccctgaactcagttctccagcgtcacagcaggacacgggcgacgaagagggcggcgcgacgggtctgcgccggcgaggcctgtgcgtggcgtcgctgtccccggccgtcgtgcagctcgtgtcggccgaggccgcgctcggcaaccgcgacacggaagaccactggcgctggctcggcactctgtaagtctgtagccggggcggagaacgatgctgtgctgccatgcttcagttcgtagacggtaggagcacgagacatggccgcaggggttggtgtcatcaggccttcagatacagcgttagacctcaatttcactggggaaaaaataaatattactcacctgcttcgagaggttattagttagtacaatggatatattatatactacattaatacgtcaccttctgttttatccg

SEQ ID NO: 2109 - protein, 308 aa, Zea mays subsp. mays
  misc_feature (1)..(308): Ceres Seq. ID no. 15180845
PLRSSPLASCTIVHAFPAAAPPACRTRAADRRRCTMWNCSSLLLQYGDDYAARCESSSSPAGAVGLDRILAAEYGRFDSLDLSPPPPLHGLQAQTLFAIHGSSENCLGIGANPIYSTEARPAFSQLSFTQPAADTAAHYSMKWTAAGETATGGGGSRLRGSKRLKTKTPATAQGPQHHGQRCSPKPTTSQSIKAPPCKRSQKLGDKITTLQQLVSPYGKTDTASVLHEAATCIKHLHEQIQILTPSYPELSSPASQQDTGDEEGGATGLRRRGLCVASLSPAVVQLVSAEAALGNRDTEDHWRWLGTL

SEQ ID NO: 2110 - protein, 273 aa, Zea mays subsp. mays
  misc_feature (1)..(273): Ceres Seq. ID no. 15180846
MWNCSSLLLQYGDDYAARCESSSSPAGAVGLDRILAAEYGRFDSLDLSPPPPLHGLQAQTLFAIHGSSENCLGIGANPIYSTEARPAFSQLSFTQPAADTAAHYSMKWTAAGETATGGGGSRLRGSKRLKTKTPATAQGPQHHGQRCSPKPTTSQSIKAPPCKRSQKLGDKITTLQQLVSPYGKTDTASVLHEAATCIKHLHEQIQILTPSYPELSSPASQQDTGDEEGGATGLRRRGLCVASLSPAVVQLVSAEAALGNRDTEDHWRWLGTL

SEQ ID NO: 2111 - protein, 168 aa, Zea mays subsp. mays
  misc_feature (1)..(168): Ceres Seq. ID no. 15180847
MKWTAAGETATGGGGSRLRGSKRLKTKTPATAQGPQHHGQRCSPKPTTSQSIKAPPCKRSQKLGDKITTLQQLVSPYGKTDTASVLHEAATCIKHLHEQIQILTPSYPELSSPASQQDTGDEEGGATGLRRRGLCVASLSPAVVQLVSAEAALGNRDTEDHWRWLGTL

SEQ ID NO: 2112 - DNA, 864 bp, Zea mays subsp. mays
  misc_feature (1)..(864): Ceres Seq. ID no. 15224350
taccgggscccccctcgagtcagctacgtaggccccccccccccccagggccaagaaatttcaaaagaagtctttccctctctttgatgctcttggggaactatatgatgggcacattgctcaagggacctggaacataacatctacacagctaccacaagaatggaacacaatttcaaatgaagaagaacaagtgaacaccacaagaatggatgaggaaggcattattcaacaacaaccacaagaagaggattcaagattggaacaagatgaagatcctataattgaaaggactgaacagaggtctactgcaacgagaaggtctactgcatcaacaatcaatcaagataaggaagcaaagaggatgaagaaggattctttggaaggacttgttgggagatatctagatctaaaatcaaaacaagttgaggatgaggttacacaaatggcgaaaggaaaagaatccgctcaaggtaatgacttctccatcatgagatgcatttctgttcttagatccatgaatgtgacagcagatgagaagataaaagcagctgaggtgttcgacataccaaacaacagagagacatttatcagttttagtgttgatgaaccagaaactgccctcctatggttaagacagaagattgataagctctaagacaagaaatattggtcatatggagacagttctgcacagcgttctaagtgccagtatgagctatatatatgttgcatttctccatgtttgggctcagcatgtaatagaactgaaggaaggttgttgcaagacttgtatggcatgcttaaatttctggataaaatctagcttatactaagtctattacatgcttaaatttttcgctc

SEQ ID NO: 2113 - protein, 149 aa, Zea mays subsp. mays
  misc_feature (1)..(149): Ceres Seq. ID no. 15224351
MDEEGIIQQQPQEEDSRLEQDEDPIIERTEQRSTATRRSTASTINQDKEAKRMKKDSLEGLVGRYLDLKSKQVEDEVTQMAKGKESAQGNDFSIMRCISVLRSMNVTADEKIKAAEVFDIPNNRETFISFSVDEPETALLWLRQKIDKL

SEQ ID NO: 2114 - protein, 97 aa, Zea mays subsp. mays
  misc_feature (1)..(97): Ceres Seq. ID no. 15224352
MKKDSLEGLVGRYLDLKSKQVEDEVTQMAKGKESAQGNDFSIMRCISVLRSMNVTADEKIKAAEVFDIPNNRETFISFSVDEPETALLWLRQKIDKL

SEQ ID NO: 2115 - DNA, 1096 bp, Zea mays subsp. mays
  misc_feature (1)..(1096): Ceres Seq. ID no. 15224353
cmccccctcgagtcagctacgtagccccccccccatcgctcctgcaggcatacagggagccaggcatgctcagttcggtctaccactaacagaccgccagcttaacaagctgcacctcggtctgttccaaggcggcggttttaagcggcggcttgacgctatcactccaccatgccctatatccaggggctttgtgatcggcagtgcaccggtcgacgagagcgtctcttgcgtgctgacgatcggcacgccacgggccgcagagagatctgacgacaggaagaaaccacatctaatgctgttcggaaagcctatccttaccgagcagcagatgagctctagagggtcaagggaaacactctcccctgaggccactgggaacagttccgatggcagtgttcagaaaacgggaaacgtatccgatggctccggctcgtcgatctgcatcggttcctcgtcccgaggccgcgaggcttctaggctcgggttcgaatttgaagccgggcactgcaaggtatttgtggagtcggaggatgtcggtcgcaccatcgacctgtccgtctttggctcgtacgaagagctgtacggtcagttggccgacatgtttggaatcgagaaggcagaggtaatgagccacctttgttaccgtgatgctgctggcgctgtcaagcgtactggcgacgagccgttctgtgacttcatgaaagtggcacggaggctcaccatagtagagagcaccgaggggaggctgcagaaacctctcgtcgagtacatggcttgattgcatgactgttcgataaggcactctgaagcttgaggaagactgaagcttggagcgaatatgttttcgtttgcgtttgtctgccgtgaagcggaatcgcgatgtctgtctcgtcgtgtgaaagaaactcgtgtatcggattttcgtctgtcgtgacttggtcgttagaactctgtcgtggtcagttgtgttgcgcttgcgcttgggtcgaagttgatagatggcctctttgatgaactagcttggaataaagttcgagttgtggttagggaatgccagtgccatggcaattcagttgtcgttgtcgatttagtt

SEQ ID NO: 2116 - protein, 259 aa, Zea mays subsp. mays
  misc_feature (1)..(259): Ceres Seq. ID no. 15224354
  misc_feature (1)..(1): Xaa is any aa, unknown or other
XPSSQLRSPPPIAPAGIQGARHAQFGLPLTDRQLNKLHLGLFQGGGFKRRLDAITPPCPISRGFVIGSAPVDESVSCVLTIGTPRAAERSDDRKKPHLMLFGKPILTEQQMSSRGSRETLSPEATGNSSDGSVQKTGNVSDGSGSSICIGSSSRGREASRLGFEFEAGHCKVFVESEDVGRTIDLSVFGSYEELYGQLADMFGIEKAEVMSHLCYRDAAGAVKRTGDEPFCDFMKVARRLTIVESTEGRLQKPLVEYMA

SEQ ID NO: 2117 - protein, 161 aa, Zea mays subsp. mays
  misc_feature (1)..(161): Ceres Seq. ID no. 15224355
MLFGKPILTEQQMSSRGSRETLSPEATGNSSDGSVQKTGNVSDGSGSSICIGSSSRGREASRLGFEFEAGHCKVFVESEDVGRTIDLSVFGSYEELYGQLADMFGIEKAEVMSHLCYRDAAGAVKRTGDEPFCDFMKVARRLTIVESTEGRLQKPLVEYMA

SEQ ID NO: 2118 - protein, 149 aa, Zea mays subsp. mays
  misc_feature (1)..(149): Ceres Seq. ID no. 15224356
MSSRGSRETLSPEATGNSSDGSVQKTGNVSDGSGSSICIGSSSRGREASRLGFEFEAGHCKVFVESEDVGRTIDLSVFGSYEELYGQLADMFGIEKAEVMSHLCYRDAAGAVKRTGDEPFCDFMKVARRLTIVESTEGRLQKPLVEYMA

SEQ ID NO: 2119 - DNA, 571 bp, Zea mays subsp. mays
  misc_feature (1)..(571): Ceres Seq. ID no. 15224392
accaagcaagagcataaccaatcaaccacaagtcgatttgcgaagcactctccgatcacaacccaagaccaccatggctgacaagtgcggcaactgcgactgcgccgacaagacccagtgcgtgaagaagggcaacacctacggcatcgtcatggttgacaccgagaagagccacttcgaggtgcaggagaccgcggagaacgacggcaagtgcagctgcggcaccagctgcacctgcaccaactgcacctgcggccactgaagaagccctccccgctgggcctctcgtcacgtacgcgtctacccgtactagtaacccgtgccaataaaagtctgtacgtgtgtgtgtgtgtctacgtctcttctgttgtcgtgcgaaaacctgaaggttaagctgatgatgtgcgcataggataccggatcggcctcgatcccgtgttcccgtgtaaccggtggctgagcttcaggttgtactgctatgtggttgtgagctcgcacgctttgtgccatgtgacttccatttcgtgtatctttgttgcatggaatgaaatttatggtgtggttttctaag

SEQ ID NO: 2120 - protein, 86 aa, Zea mays subsp. mays
  misc_feature (1)..(86): Ceres Seq. ID no. 15224393
PSKSITNQPQVDLRSTLRSQPKTTMADKCGNCDCADKTQCVKKGNTYGIVMVDTEKSHFEVQETAENDGKCSCGTSCTCTNCTCGH

SEQ ID NO: 2121 - protein, 62 aa, Zea mays subsp. mays
  misc_feature (1)..(62): Ceres Seq. ID no. 15224394
MADKCGNCDCADKTQCVKKGNTYGIVMVDTEKSHFEVQETAENDGKCSCGTSCTCTNCTCGH

SEQ ID NO: 2122 - DNA, 1988 bp, Zea mays subsp. mays
  misc_feature (1)..(1988): Ceres Seq. ID no. 15224424
taattacggttgggagtgaatatatatagtggagtgttgtgggccaaggcccattacaatggaggtatacacagagacgtaaacaacactctaacactaacatcaacgactatccttaaggcttttgtcgatcaagatacctacaccattcctacccaaacttgctcccgtgttccaacgcttgaaaccagtatcctccacctccttcgccttatagccctttcatttagtcttctggacgcatagaatatttacacgcctcttaatcgctacatccactagctcccctaacttacctgttagggaccctatgttccaactgcctacacgaaatctagttggttcgactagcttccttacccttcacacccgtcgagagagatgtgaagacccttgttcatttttcactacatcctggcgttgatgtagcacatcactaaggaaatgacgacctggtccttgctcacttaagcaagcatctattttgtattcatctgagaaaagtagaacaaaaatttcctcttgggtaaccaatggccactgagcatgtaaatcctgtgtaatcagcccatgaaatgatgatggtgaggtctacttgtgtgctcacgtaggccatagtcttgaggcacattgtgtgaaaccttgtgctcactgtgctcaaatctatctgatccaacgaggcagcaaggtcttcagacactgaagctgcaggtgcagccaagccattttccagggtttcctgtttcatttgttatgcttgggtgttgaggagggttttttttatccctggccacatttcccccctgattgcttgatgtgtattccctccttgcccagaaggaatcaagttgtacactaatccctagtttctacctaaggttagttagaaatattaaggaaagatggaagttctcaaggcattgtgttcagattgataagcatgaatgattactcctttggcatttcaaaagggatagtaacataaaactggggtagatggattatattgttttgtaaaacatgagtactacctatatgcagagtttaaatttaaatccatattatgtaaacaggtagctcaaacatggtcgtttcactgcagcctgtccactgcagtttcaaaatggttcacaatgtgggcgatgttgtgtggttacattttatctttctatgtttgacttactacgacacatctttttcacatgtaggtggtagattgccgtatctgtggtgatcctaactcagtgcttcgttttgcttttatcgagtttgctgatgacgttgctgcacaatcagcactagcacttggtggaaccgtgcttggcttttatcctgtcaaggttctgccatcaaagacagcaattttacctgtgaaccctaaatttcttcctcacactgatgatgagaaagaaatggtatccaggactgtgtattgtactaacattgacaagaagatcgcagaagatgaagtgaagcaattctttgagggaacatgtggtgaagtttctcgtctgaggctacttggtgattatgtgcactccacatgcatcgcttttgttgagtttgtccaagcagatagtgctattctcgctctgaactgcagtggcattgttcttggaacgcttcctgttagggtgagcccatcaaagacaccagtccgctcgcgatcgccccgtgtgacgtcatactgaattcggctcatctgaagccgtcgtccagggcagcaaatttctgggcaacaaagccctagtcgtgtggccttagagactgccgcatcgcggataagtaattgtcgttgagcagagttctcgttggttaaagtccagtctagtaggaggcgcagagacccgtctgtatggtcgctgggagatctatcttgacctcctttttctgttctttttggtcttagttatcgtggttggattctatagcagccttgacaggcattcgaacaacaatgtttatggttatcctatccgctttggact

SEQ ID NO: 2123 - protein, 92 aa, Zea mays subsp. mays
  misc_feature (1)..(92): Ceres Seq. ID no. 15224425
MVSRTVYCTNIDKKIAEDEVKQFFEGTCGEVSRLRLLGDYVHSTCIAFVEFVQADSAILALNCSGIVLGTLPVRVSPSKTPVRSRSPRVTSY

SEQ ID NO: 2124 - protein, 49 aa, Zea mays subsp. mays
  misc_feature (1)..(49): Ceres Seq. ID no. 15224426
MVVSLQPVHCSFKMVHNVGDVVWLHFIFLCLTYYDTSFSHVGGRLPYLW

SEQ ID NO: 2125 - DNA, 615 bp, Zea mays subsp. mays
  misc_feature (1)..(615): Ceres Seq. ID no. 15224528
ccgggccccccctcgagtcagctacgtaggccccccccccccccaaagagcctgatcaaagggatcagccaagaagagtggacacgcatgtggaacaagctaaaggaagtagaaaagcacttcgagtaccaatacccatctcagactgatgatgccgtgcagatgatatggaaggctattgctcggaaggtgccctctatccgtctgaagattaacagactacggagattttctcggtttgatactaataggacagatgaaactctacccagtccttcttggctacagaatcaggcttcttgatttttggactagcaaactccagctttcaccatgttttcaatcctgccgaaacaagagttgatactgaagaccaaaccttaatcgcatgactgggggcagatgttacagctgcagacattaacggagagtaaagttgaaacactctagcataacagaattacatatccaatggcacatcatttttcttcatttttcttacttaagattcatccaaaatgtccttggctgcagactaaggacaatgaattttgtatgaaaagctgtacattctaggcggcaatataattactgaccagttacagttgctgagcs

SEQ ID NO: 2126 - protein, 100 aa, Zea mays subsp. mays
  misc_feature (1)..(100): Ceres Seq. ID no. 15224529
PGPPSSQLRRPPPPPKSLIKGISQEEWTRMWNKLKEVEKHFEYQYPSQTDDAVQMIWKAIARKVPSIRLKINRLRRFSRFDTNRTDETLPSPSWLQNQAS

SEQ ID NO: 2127 - protein, 71 aa, Zea mays subsp. mays
  misc_feature (1)..(71): Ceres Seq. ID no. 15224530
MWNKLKEVEKHFEYQYPSQTDDAVQMIWKAIARKVPSIRLKINRLRRFSRFDTNRTDETLPSPSWLQNQAS

SEQ ID NO: 2128 - DNA, 2196 bp, Zea mays subsp. mays
  misc_feature (1)..(2196): Ceres Seq. ID no. 15224550
sgaahagkatttatagcgagcgtcctggcctctcttctccctgctcgctcctagctggggtggggagggaagaagaggacaagcatgcagcacgccaacgcgcggcgcgagcataccgacagctccagcctccagggaacgactgaaggagtaggagaaagacaaagaacaagtgtgggaaacagacaacgagaagaccgacgagccgcgacaccgccaccgccaccccgctcctaagtcctagctcctcgtgctacaaaggaataaaccaaggccggcccatgtcttcatctagcggttgtaaccgcggccgagcagtcctcccagtcactgcctctctcgttcccttcctgctcctgctcctcctcctcctcgtcgtctcgtgcccggccgccctggtggtctccgcgacgcacacgcacgtgcacgggcacggcggcgccaccgccggcgccgcgcgggcgtccttccgtgccggggacgagcgggaggcgtacgcgaggatcatggcgcgcatggccaggatggacaaggactccaacatgacgatccaggttccttcccttccctgcagctgctcctgctcctctgccccagctgtgcgcgcgcgctgccggttccggcttccggccaagcaagcgtgcaaatccaccacctcgctgtcgtttacgtactctagctctttcgtcgtgtcgtgtcgtgcgtgtgtgtgcgcgcgcgtgtgcagagcgccgacggcgacgtcatccactgcgtgccggcgcacctgcagccggcgttcgaccaccccaggctgagagggcaggagcccgaggacgagcccgtggagaggcccatgtccaagggcgccgccggtgaggaggaggccggcgtgttcccgcaggcgtggagcgacggcggcagcaagcggtgcccggcggggacggtgccgatacggcggacgacggcgcgcgacgtgctgcgggccagctccgcgcgccggttcgggatgaaggcccgcggcagcagcagcagcaacgcccgccgcgactccaccagcagcggccacgagcacgcggtggggtacgtgacgggggagcagttctacggcgccaaggccagcctgaacgtgtggccggccaaggtggcgtcggcggcggagttcagcctgtcccagatctgggtcatctccggctccttcggcaacgacctcaacaccatcgaggccggatggcaggtgagccctgagctgtatggcgacagcagcccgaggttcttcacgtattggacgaccgatgcgtaccaggagactgggtgctacaacctgcactgctccggcttcgtccagacgaacagccggatcgccattggagccgccatctcgcctacctcggtctacaacggccggcagttcgacatcagcctgctcatatggaaggacccgcaccgggggaactggtggctgcagctggggtcgggcccgctggtggggtactggccgtcgctcctgttcacgcacctgggcggccacgccgacatggtgcagttcggcggcgaggtggtgaactcgcgcccgtcgggggcgcacaccccacgcagatgggcagcggcncacttcccccgsgagggctccaaccgcgccgcctacttccgcaacctgcaggtcgtcgacgccgacaacagcctcgtcgccgccgccgcgctccgcctcgtcgccgaccgcccgggctgctacgacatccagggcggctacaacaccgcctgggggaactacttctactacggagggcccggcaggaacgtgcactgcccgtgatctgtctctgtctctgttggtagccgacgcccgacgacgatcgaccatgaatatacgtgcacagatagacatacagagagtgaagaagaacgtacggatcaccgaccctgccggagttgcatcgtcgctcatcaaccggccggacatggatcgtataatagcaccactgctagtcatatataagctacatctagtccctcgtttagttactgcatgcatgctaattagtttttaagcagcccagctgcgtacaccgcggggacggtaacagagaggcaaaaggtttccaactttcgatacttgatgtatgtgggcttctttcgtttgcattggtttgattttttttttgtcttgagttatgtatatacatcaagaaatccacatatagtattttcttcgtc

SEQ ID NO: 2129 - protein, 319 aa, Zea mays subsp. mays
  misc_feature (1)..(319): Ceres Seq. ID no. 15224551
  misc_feature (252)..(252): Xaa is any aa, unknown or other
  misc_feature (256)..(256): Xaa is any aa, unknown or other
MSKGAAGEEEAGVFPQAWSDGGSKRCPAGTVPIRRTTARDVLRASSARRFGMKARGSSSSNARRDSTSSGHEHAVGYVTGEQFYGAKASLNVWPAKVASAAEFSLSQIWVISGSFGNDLNTIEAGWQVSPELYGDSSPRFFTYWTTDAYQETGCYNLHCSGFVQTNSRIAIGAAISPTSVYNGRQFDISLLIWKDPHRGNWWLQLGSGPLVGYWPSLLFTHLGGHADMVQFGGEVVNSRPSGAHTPRRWAAXHFPXEGSNRAAYFRNLQVVDADNSLVAAAALRLVADRPGCYDIQGGYNTAWGNYFYYGGPGRNVHCP

SEQ ID NO: 2130 - protein, 268 aa, Zea mays subsp. mays
  misc_feature (1)..(268): Ceres Seq. ID no. 15224552
  misc_feature (201)..(201): Xaa is any aa, unknown or other
  misc_feature (205)..(205): Xaa is any aa, unknown or other
MKARGSSSSNARRDSTSSGHEHAVGYVTGEQFYGAKASLNVWPAKVASAAEFSLSQIWVISGSFGNDLNTIEAGWQVSPELYGDSSPRFFTYWTTDAYQETGCYNLHCSGFVQTNSRIAIGAAISPTSVYNGRQFDISLLIWKDPHRGNWWLQLGSGPLVGYWPSLLFTHLGGHADMVQFGGEVVNSRPSGAHTPRRWAAXHFPXEGSNRAAYFRNLQVVDADNSLVAAAALRLVADRPGCYDIQGGYNTAWGNYFYYGGPGRNVHCP

SEQ ID NO: 2131 - protein, 171 aa, Zea mays subsp. mays
  misc_feature (1)..(171): Ceres Seq. ID no. 15224553
MSSSSGCNRGRAVLPVTASLVPFLLLLLLLLVVSCPAALVVSATHTHVHGHGGATAGAARASFRAGDEREAYARIMARMARMDKDSNMTIQVPSLPCSCSCSSAPAVRARCRFRLPAKQACKSTTSLSFTYSSSFVVSCRACVCARVCRAPTATSSTACRRTCSRRSTTPG

SEQ ID NO: 2132 - DNA, 1040 bp, Zea mays subsp. mays
  misc_feature (1)..(1040): Ceres Seq. ID no. 15224625
aagttccatcccatcccgccacgaaattctccacgctccgatccaatcgcaacaatgaagttcggcaagagcctcaacaaccagatcgtggagacgctcccggactggcgcgacaagttcctgtcctacaaggacctcaagaagcggctgaagcagatcggcgccggctctggcgagcggcggagcaagcgccagcgggtgagggacgggcgcggcggatcctcgccgcctgcgatgaccccggaggaggccggattcgtcgcgctcctcgacgccgagctcgacaagttcaacgccttcttcctcgagaaggaggaggactacgtcatccggctgaaggagttgcaggacagggtggtgagcgccgcggaggtggggtcggcggaggagctgctgcgggtgcgcaaggagatcgtcgacttccacggcgagatggtcttgctggagaactacagcgcgctcaactacaccgggctggtcaagatcctcaagaagtacgacaagaggaccggcgcgctgatccgcctgcccttcatccggaacgtgatgcaggagccgttctgcgccaccgacgtgctgtacaagctcgtcaaggggtgcgaggagatgctggaccagctcctcctgccccggaaccagcagcggcccgtgccgagcgacaacggcggggaaggagacagcgacggcgacgacgacaagcaacgaccggcggagccaggcgcctcatcgctgcccagcggcggcggcggtggcgctggcgacatggagctggaggagatcgaggacatggagagcatgtacatgaagagtacggtggccgcgctcagggcgctcagggagatcaggagcgggagctccacggtgagcgcgttctccctgccgccactacggtgattgacacgttgtgttcggttcagtagcgaagcgagacagaacggggccgactgcgctgttgctgtaggtagtgtttggttcaaagaagacacgaacaaaatgaaagaaaatctgtaaaatgatagtaatattcatctagtattccc

SEQ ID NO: 2133 - protein, 305 aa, Zea mays subsp. mays
  misc_feature (1)..(305): Ceres Seq. ID no. 15224626
VPSHPATKFSTLRSNRNNEVRQEPQQPDRGDAPGLARQVPVLQGPQEAAEADRRRLWRAAEQAPAGEGRARRILAACDDPGGGRIRRAPRRRARQVQRLLPREGGGLRHPAEGVAGQGGERRGGGVGGGAAAGAQGDRRLPRRDGLAGELQRAQLHRAGQDPQEVRQEDRRADPPALHPERDAGAVLRHRRAVQARQGVRGDAGPAPPAPEPAAARAERQRRGRRQRRRRRQATTGGARRLIAAQRRRRWRWRHGAGGDRGHGEHVHEEYGGRAQGAQGDQERELHGERVLPAATTVIDTLCSVQ

SEQ ID NO: 2134 - protein, 297 aa, Zea mays subsp. mays
  misc_feature (1)..(297): Ceres Seq. ID no. 15224627
KFHPIPPRNSPRSDPIATMKFGKSLNNQIVETLPDWRDKFLSYKDLKKRLKQIGAGSGERRSKRQRVRDGRGGSSPPAMTPEEAGFVALLDAELDKFNAFFLEKEEDYVIRLKELQDRVVSAAEVGSAEELLRVRKEIVDFHGEMVLLENYSALNYTGLVKILKKYDKRTGALIRLPFIRNVMQEPFCATDVLYKLVKGCEEMLDQLLLPRNQQRPVPSDNGGEGDSDGDDDKQRPAEPGASSLPSGGGGGAGDMELEEIEDMESMYMKSTVAALRALREIRSGSSTVSAFSLPPLR

SEQ ID NO: 2135 - protein, 279 aa, Zea mays subsp. mays
  misc_feature (1)..(279): Ceres Seq. ID no. 15224628
MKFGKSLNNQIVETLPDWRDKFLSYKDLKKRLKQIGAGSGERRSKRQRVRDGRGGSSPPAMTPEEAGFVALLDAELDKFNAFFLEKEEDYVIRLKELQDRVVSAAEVGSAEELLRVRKEIVDFHGEMVLLENYSALNYTGLVKILKKYDKRTGALIRLPFIRNVMQEPFCATDVLYKLVKGCEEMLDQLLLPRNQQRPVPSDNGGEGDSDGDDDKQRPAEPGASSLPSGGGGGAGDMELEEIEDMESMYMKSTVAALRALREIRSGSSTVSAFSLPPLR

SEQ ID NO: 2136 - DNA, 1985 bp, Zea mays subsp. mays
  misc_feature (1)..(1985): Ceres Seq. ID no. 15224673
ctagtccccccccccccccattaaaccctaaccctaaaataacggtttgttttgctctctcggtttccatgggtgtggctgagaccaagtctctcagtggccgaaaccctagatttagtgttagttaaaccctaacccgagagatctaaaattcttaaatctggtttgtttatttttctgcatctgaaccactgcagggagttcaggagttttgtgtctagattcttaaatctgaataaacaagttgaatatattaactgcaatgaaaacatatagatgtcatctgccacctatctccacgcacagtctggctcgacatcacctgcccttctcgtgatatctgattactgttttgctagtgctagctatcgatgctgttcggggattagtagtgttctatttcatcctcttaatgtgttcgcatcagatagatatatgttcatatgatttaaggatatcctgtcagcagcttacacatttgtctatctccatgcttcctttctttagttggagactggattattttttgttgggataaacttagtacattatcagagcatcttaactctggatatgggtgcctttaagggatatccaataaacaaaatttgaacacatttggtttgtcgtataggtacaaagccagcacatgcttgggcaggtttgatcagtttcactaggaactgttcactaattgactgtctcagtaatacaattgaatagcctgcaactcagttagccatgactttcttcgtcatagtttctttagctgaattattttgcacatattacatggatgtgcactacccatgttgttcaatatcccacatcaatatcgaattgagtatgatgactgatgacaactaccagttattgtttcttgaattggcaacaacttggtctgtgagtcattcccactttgcccctacccttgctgagtagtgtcattcttttaggcataccttatagatgaatgattttttacattactgccttccccagtccccatcccaccccatttttttgtatcttagaaaatgtgacttggacaataagatgttgcttgagttacttacatttcttaaaagtattgattagtcttgcatctggatgcaggagctctgcagtaaaggaagtgtgtagtcaccatggtccatttcaagaataggtacatggtggtggagatctttatagatgcaggtagaggtgaacaggaccctgtaatcctcacccaatttaatataacaaaagttataaaagacagcattcagctcaactttggagagtgtggcctagctggatctcttggatcattgcaagttaagtatgttaatcctgtaacgaagctctgcatcgtccgcttgtctcgcgaagaccaccaaaaagtttgggctgctatgacgatggtgcggtgcattgggaagatccccgtttcgttcaacttgctcgacatgagtggaagcatcagggcttgcaagaaagctgcactggagtgcgatgaagcgaaatttgagcaatacaagctggctgcaggtgattgtatcacggcagagatcatccagtctgtagagaagtgctttgagaagatcagaggactagagagctaagcagaagaattgacatcacgtccacccaccctcggatcctaaaacctgctgaccctgcaccgcatccgtgatcacgtcacaccacaagctgtgtgtcctggctccagcgcccaccacggcaacggcctctcgccacttgctgccagcagcctccgtgcctccatcagctctcctttccaaggaaaagtctgaagtctgcaaccaaacaagtgttctgcagctgctctttgccgttggttgaagtctgcaaccaaacaaatgttatgcagctgctctttgccgttggttggagttctcggctccacactttcagaaagaattcatgtatacataaaatttattatatagagagtttgcttcgtatattagtaatttttt

SEQ ID NO: 2137 - protein, 152 aa, Zea mays subsp. mays
  misc_feature (1)..(152): Ceres Seq. ID no. 15224674
MVHFKNRYMVVEIFIDAGRGEQDPVILTQFNITKVIKDSIQLNFGECGLAGSLGSLQVKYVNPVTKLCIVRLSREDHQKVWAAMTMVRCIGKIPVSFNLLDMSGSIRACKKAALECDEAKFEQYKLAAGDCITAEIIQSVEKCFEKIRGLES

SEQ ID NO: 2138 - protein, 144 aa, Zea mays subsp. mays
  misc_feature (1)..(144): Ceres Seq. ID no. 15224675
MVVEIFIDAGRGEQDPVILTQFNITKVIKDSIQLNFGECGLAGSLGSLQVKYVNPVTKLCIVRLSREDHQKVWAAMTMVRCIGKIPVSFNLLDMSGSIRACKKAALECDEAKFEQYKLAAGDCITAEIIQSVEKCFEKIRGLES

SEQ ID NO: 2139 - DNA, 1419 bp, Zea mays subsp. mays
  misc_feature (1)..(1419): Ceres Seq. ID no. 15224720
ccgggccccccctcgagtcagctacgtaggccccccccccccccccgaagacaaaggatccaatcatagtttcaattggttggaggcgatttcaaacaacccctgtgtatgcaatagaggatcggaatggtcgacaccgcatgctgaagtatacacctgagcatatgcattgctttgctatgttttggggaccacttgctccaccgaagagtggtgtattagcagtccagaatctttccaacaatcaggtgccatttaggataactgcaacaggatgggttcaagaattcaacaatactgccagaattgtgaagaagataaagctcacaggcacaccatgcaagatatttaagaagactgcactaatcaagggaatgttcacatccgatttagaggttgctaggtttgaaggtgctgccattcggactgtaagtggaatccgaggacaggttaaaaaggcagcaaagattgagccaggagatatgttgaagagaaaaggggaaaatacagaaggaatcgcaagatgtacatttgaggacagaattcttatgagtgacattgttttcctgcgtgcctgggtcaacgttgaagttcctacgtactctaaccctgtgaccactgctctgcaacctagagagcagacctggcaaggcatgagaacaactgctgagttgcggaaggcacacaatatccctaccccacacaacaaggattcagtttacaagcctatcgagcggaaaccacgcaagttcaatcccgtcgagatccccgcaaagctgcaacagttacttccctttaaatctaagcctaaggacacagcgaagcagaagaaagcaccagttgaaaacagggtgcctgtaatcatgcagcctagtgagaagaagacacacgcagctatachacagctaaggctgataaaacacgagaaggcaaagaagaagaaaattaaggaacaacagaagaaaaaagcatacgaggcagagaaagccaagaccgagctactgacgaagaagcgccagagggaagagaggcgtgtgagataccgggaagaagataagcagaagaaacgtgcacgcagatgaggcgaggaacggggtatgtgcaccaggaactcagcagcaaccgggcatgctctcttgtgcagaacatatgccaaaatcttagttcatatacggagagctataaaaggtgcagtaccacccatctgggcgaagaagcatgtcaagtcataaccagggcgcggagatgagcaagttaggttgcttgtttaagttatgtatcggttgccctaacgcggaatattgtctgagtgtttggcaaacgcatgtggactcccaagtaaatytggagtcataattttggagtgtatactacctcaggtaccgaatgttaggcaaacgcatgtggtctttagctccc

SEQ ID NO: 2140 - protein, 313 aa, Zea mays subsp. mays
  misc_feature (1)..(313): Ceres Seq. ID no. 15224721
  misc_feature (254)..(254): Xaa is any aa, unknown or other
MLKYTPEHMHCFAMFWGPLAPPKSGVLAVQNLSNNQVPFRITATGWVQEFNNTARIVKKIKLTGTPCKIFKKTALIKGMFTSDLEVARFEGAAIRTVSGIRGQVKKAAKIEPGDMLKRKGENTEGIARCTFEDRILMSDIVFLRAWVNVEVPTYSNPVTTALQPREQTWQGMRTTAELRKAHNIPTPHNKDSVYKPIERKPRKFNPVEIPAKLQQLLPFKSKPKDTAKQKKAPVENRVPVIMQPSEKKTHAAIXQLRLIKHEKAKKKKIKEQQKKKAYEAEKAKTELLTKKRQREERRVRYREEDKQKKRARR

SEQ ID NO: 2141 - protein, 305 aa, Zea mays subsp. mays
  misc_feature (1)..(305): Ceres Seq. ID no. 15224722
  misc_feature (246)..(246): Xaa is any aa, unknown or other
MHCFAMFWGPLAPPKSGVLAVQNLSNNQVPFRITATGWVQEFNNTARIVKKIKLTGTPCKIFKKTALIKGMFTSDLEVARFEGAAIRTVSGIRGQVKKAAKIEPGDMLKRKGENTEGIARCTFEDRILMSDIVFLRAWVNVEVPTYSNPVTTALQPREQTWQGMRTTAELRKAHNIPTPHNKDSVYKPIERKPRKFNPVEIPAKLQQLLPFKSKPKDTAKQKKAPVENRVPVIMQPSEKKTHAAIXQLRLIKHEKAKKKKIKEQQKKKAYEAEKAKTELLTKKRQREERRVRYREEDKQKKRARR

SEQ ID NO: 2142 - protein, 300 aa, Zea mays subsp. mays
  misc_feature (1)..(300): Ceres Seq. ID no. 15224723
  misc_feature (241)..(241): Xaa is any aa, unknown or other
MFWGPLAPPKSGVLAVQNLSNNQVPFRITATGWVQEFNNTARIVKKIKLTGTPCKIFKKTALIKGMFTSDLEVARFEGAAIRTVSGIRGQVKKAAKIEPGDMLKRKGENTEGIARCTFEDRILMSDIVFLRAWVNVEVPTYSNPVTTALQPREQTWQGMRTTAELRKAHNIPTPHNKDSVYKPIERKPRKFNPVEIPAKLQQLLPFKSKPKDTAKQKKAPVENRVPVIMQPSEKKTHAAIXQLRLIKHEKAKKKKIKEQQKKKAYEAEKAKTELLTKKRQREERRVRYREEDKQKKRARR

SEQ ID NO: 2143 - DNA, 648 bp, Zea mays subsp. mays
  misc_feature (1)..(648): Ceres Seq. ID no. 15224780
caaaccagaaggtcggcaagcaaaagcagtagcaacaatggagaggcgtagcggcgtgagcgtgagccttgttcttggcctcctgctcgccaccaccgttgcttgccatggtgcgagggacatcccagcaactgagcccgagtcctaccgtccccataacgtctttgggttcggtggtttctaccctggcccgtccgtcaactgggtgtttccggggccaaacggcgtcacaccacaggtaggcttcggcgggatgccgggctctagctccttccctggcactagtggctcgtccggcagcagtggcgtggtcggcattcatggtgctgccaatccctgatcgtgttgttgtctgtcttggtgtcttgatgtttaagattgctctttagagccatgcaggtgcagcattctaccgtggtggtagagagtaagcttcttgcttgctctagtttagcagtattgtgttatggcttatgtgtgtgttgttttcaagtgatctgtgtcccgtgtctttgtaaaagacttgttcttggctgttatttaaccttgtgtacttcttagatgttgtattgctgtcgtgggttcgaagtccctttgctgtatctttgatttggagagtgagggtttgaacccatgagctggatcatc

SEQ ID NO: 2144 - protein, 112 aa, Zea mays subsp. mays
  misc_feature (1)..(112): Ceres Seq. ID no. 15224781
KPEGRQAKAVATMERRSGVSVSLVLGLLLATTVACHGARDIPATEPESYRPHNVFGFGGFYPGPSVNWVFPGPNGVTPQVGFGGMPGSSSFPGTSGSSGSSGVVGIHGAANP

SEQ ID NO: 2145 - protein, 100 aa, Zea mays subsp. mays
  misc_feature (1)..(100): Ceres Seq. ID no. 15224782
MERRSGVSVSLVLGLLLATTVACHGARDIPATEPESYRPHNVFGFGGFYPGPSVNWVFPGPNGVTPQVGFGGMPGSSSFPGTSGSSGSSGVVGIHGAANP

SEQ ID NO: 2146 - DNA, 1331 bp, Zea mays subsp. mays
  misc_feature (1)..(1331): Ceres Seq. ID no. 15224799
atctatacaaaccaaactcgcgctccagaccacagctcaccctcacctgcgacctgcgcgcattcacagccgccggcgccacacgtgcccgcgcgccgggcgccacctctctcccatccaccagccttcctctcccgggccaggcggcgcccctcaatggccgccaccttcaccgtcgccgcccgcctcccgctgcggggccccgcgcgcgctccgtcccggccggccgtcgctgctgtaacccggcttcgaagccggcaggagcggcgcggcctagcagcgacaggcgggaggggacctgcccgggttcgggccgagactttctccggtggtggaggcgtggggcggagggaccccatggcgccgccttacaatgtcctcatcaccggctctacgaaaggtataggatatgcattggcaaggaaatttctggaggctggtgataacgttataatctgctcgagatcagctcaaaaggtagaatctgtggtcggtgacttgaaggaggagtacggagagcaacatgtgtggggaactgtctgtgatgttagaaatggaaaggatgtaaaggcacttgtggagtttgcacgtgacaaacttaagcatattgatatatggatcaacaatgctggatcaaatgcatatacatacaaaccactagtggagacctctgatgaggctctcatggaaatcatcaccactaacacccttggattgatgatatgttgtcgtgaggcgataaatatgatgaggaaccaacctcgaggtggtcacatattcaaccttgatggtgctggttctgatggaaggccaactccaagatttgctgcatatggtgcaacaaagagaagtgttgtgcatcttacgaagtcacttcaggctgaattgcagatgaatgaagtgaataatgtgatggtgcacaatctatcgcctggcatggtcacaacagatcttcttatgtctggtgcaactacaaaacaagcaaaatttttcatcaatatattagctgaacctcctgatgtggttgcagactaccttgttccaaacgtcagagaaatccctaccaagcaatccatgaagccaacctacattcgtttcctcacaggcttgaaggcctactcaagaattttttctagacttgcttttggtgctaggagaaacaagtatgttactgaagattagttatgctgccagcttccaactgaagagattaggaacaattcttttcattaagcgtcacttacttttctcataagatgggatgtattacagatgtcatctcatgagaacagtgatatactcttctgtacagtagtagcaatttttttagt

SEQ ID NO: 2147 - protein, 393 aa, Zea mays subsp. mays
  misc_feature (1)..(393): Ceres Seq. ID no. 15224800
IYTNQTRAPDHSSPSPATCAHSQPPAPHVPARRAPPLSHPPAFLSRARRRPSMAATFTVAARLPLRGPARAPSRPAVAAVTRLRSRQERRGLAATGGRGPARVRAETFSGGGGVGRRDPMAPPYNVLITGSTKGIGYALARKFLEAGDNVIICSRSAQKVESVVGDLKEEYGEQHVWGTVCDVRNGKDVKALVEFARDKLKHIDIWINNAGSNAYTYKPLVETSDEALMEIITTNTLGLMICCREAINMMRNQPRGGHIFNLDGAGSDGRPTPRFAAYGATKRSVVHLTKSLQAELQMNEVNNVMVHNLSPGMVTTDLLMSGATTKQAKFFINILAEPPDVVADYLVPNVREIPTKQSMKPTYIRFLTGLKAYSRIFSRLAFGARRNKYVTED

SEQ ID NO: 2148 - protein, 341 aa, Zea mays subsp. mays
  misc_feature (1)..(341): Ceres Seq. ID no. 15224801
MAATFTVAARLPLRGPARAPSRPAVAAVTRLRSRQERRGLAATGGRGPARVRAETFSGGGGVGRRDPMAPPYNVLITGSTKGIGYALARKFLEAGDNVIICSRSAQKVESVVGDLKEEYGEQHVWGTVCDVRNGKDVKALVEFARDKLKHIDIWINNAGSNAYTYKPLVETSDEALMEIITTNTLGLMICCREAINMMRNQPRGGHIFNLDGAGSDGRPTPRFAAYGATKRSVVHLTKSLQAELQMNEVNNVMVHNLSPGMVTTDLLMSGATTKQAKFFINILAEPPDVVADYLVPNVREIPTKQSMKPTYIRFLTGLKAYSRIFSRLAFGARRNKYVTED

SEQ ID NO: 2149 - protein, 274 aa, Zea mays subsp. mays
  misc_feature (1)..(274): Ceres Seq. ID no. 15224802
MAPPYNVLITGSTKGIGYALARKFLEAGDNVIICSRSAQKVESVVGDLKEEYGEQHVWGTVCDVRNGKDVKALVEFARDKLKHIDIWINNAGSNAYTYKPLVETSDEALMEIITTNTLGLMICCREAINMMRNQPRGGHIFNLDGAGSDGRPTPRFAAYGATKRSVVHLTKSLQAELQMNEVNNVMVHNLSPGMVTTDLLMSGATTKQAKFFINILAEPPDVVADYLVPNVREIPTKQSMKPTYIRFLTGLKAYSRIFSRLAFGARRNKYVTED

SEQ ID NO: 2150 - DNA, 2008 bp, Zea mays subsp. mays
  misc_feature (1)..(2008): Ceres Seq. ID no. 15224811
ttccagtaccggcgccgctggccgactcccgtggcgacaacctgagaccggagcgccataatcctccggattcgagacaccgagcgcaccgcgagctttatctgctgtgtttggagctgaaaatgagtgaggcgaatactactcagcttgaccttgagaaaggattttctcaagtgtctaatgataatgattcgagtagccctgcgaccatgcacaagatgaaagttgagacagaagatggtggaagtgagattgaatcacccactccagaaaaacgtgaatctagaagcaaaagggtcgttgtgagttcactggcaaggaatttgcttgcagagaggtacagagacagattttcaaatcagctggtggaagatgagggtcagacagatgatgaagactataatggaagtgtttcgcctagtggtagccaatcacttttttcagaaagcattgaactgcttgataaacacaaggatttgctgagtcttttcaatagaatggagagttctattagattgcttcacctgcgtaagaagatggctacatttaataatattgccacccaggtggagattctcacaaaaaggaagttattatacagtcatttggcccagatgaagcatttattgccagaggcaatccagataaagaggatactagtacatgatgagaagagcctatgcatgtatgctgatatggaaatcacacttttaatggatgttgtggaatgcacaagtcctgatcagtctccatccatgacaatttgtgaggctttttactcaaagctattgagttttttggatgctcatcataagggtgcagacattcctgaggcaatcctaccggaactctttaattcaaagccaagggagaagttatatcttgaggcagtacacaatggatatgctgctgagtcacctctgcagggtgccactgaggagagattcataaatgcttcccactttccacaatcttttcgaaaactcatgtcgcagaaaatcattgctgatggaattcaaaagactcaattgctgtctgatccagcagatttgagttctgtgattgcttatggtacaaaagggtcaaacggaaaccctaaaaaggaagatgaacatgctccagttccagggaagtatgaaatttctgctactccaagccgccatttgatctcttgttgtcaagagggtacgccaaaacaagggacctcagagtcaccattgttctctggaacacctgtaatgcagacaccaaaaaggcaattgccgacttcacttgacaaacccaaggccacatgtggacacattagtgaaccatgttcagccagttctgcccgcagatcactaaatacattgttaaagtttgaagtaggaagcccttattatgatggagtggaacatacggatacaactaaaaagggcatgatctcagaagactcatcgtattttaacaagtcatttgaggaagatagtcctgtcttatttattgataaagacaaaatcgacgaagtagactcagtggatagccaggaaaagatagcttcgctacataccacatttgacatagtctgcgacatttctcatcctaccaagaattcacttatcacgaaacaggaacttttccataatattcttgccaacaacttggagatagaagaaattggggagatagaagagcagctgaatattttagaggatctggctcctgatttgatatcaaagaagatgataaatggaggagaaatactttatagcatccaacctatatcagatcaaaattcagttcgggctaggcttgtagaacctgtatgagatagctacagttggttcaaagctgaagaaattctttatatgtatgtaccactgatgaaacccacattagctaattaacatcatggaagcatctgcatcagcagcatcgctcttgtctgattggacttgaaatctatattttttgttgaccctgctcaatgctgaaattttaatgaaacttaaatttgcactagctgctc

SEQ ID NO: 2151 - protein, 601 aa, Zea mays subsp. mays
  misc_feature (1)..(601): Ceres Seq. ID no. 15224812
PVPAPLADSRGDNLRPERHNPPDSRHRAHRELYLLCLELKMSEANTTQLDLEKGFSQVSNDNDSSSPATMHKMKVETEDGGSEIESPTPEKRESRSKRVVVSSLARNLLAERYRDRFSNQLVEDEGQTDDEDYNGSVSPSGSQSLFSESIELLDKHKDLLSLFNRMESSIRLLHLRKKMATFNNIATQVEILTKRKLLYSHLAQMKHLLPEAIQIKRILVHDEKSLCMYADMEITLLMDVVECTSPDQSPSMTICEAFYSKLLSFLDAHHKGADIPEAILPELFNSKPREKLYLEAVHNGYAAESPLQGATEERFINASHFPQSFRKLMSQKIIADGIQKTQLLSDPADLSSVIAYGTKGSNGNPKKEDEHAPVPGKYEISATPSRHLISCCQEGTPKQGTSESPLFSGTPVMQTPKRQLPTSLDKPKATCGHISEPCSASSARRSLNTLLKFEVGSPYYDGVEHTDTTKKGMISEDSSYFNKSFEEDSPVLFIDKDKIDEVDSVDSQEKIASLHTTFDIVCDISHPTKNSLITKQELFHNILANNLEIEEIGEIEEQLNILEDLAPDLISKKMINGGEILYSIQPISDQNSVRARLVEPV

SEQ ID NO: 2152 - protein, 561 aa, Zea mays subsp. mays
  misc_feature (1)..(561): Ceres Seq. ID no. 15224813
MSEANTTQLDLEKGFSQVSNDNDSSSPATMHKMKVETEDGGSEIESPTPEKRESRSKRVVVSSLARNLLAERYRDRFSNQLVEDEGQTDDEDYNGSVSPSGSQSLFSESIELLDKHKDLLSLFNRMESSIRLLHLRKKMATFNNIATQVEILTKRKLLYSHLAQMKHLLPEAIQIKRILVHDEKSLCMYADMEITLLMDVVECTSPDQSPSMTICEAFYSKLLSFLDAHHKGADIPEAILPELFNSKPREKLYLEAVHNGYAAESPLQGATEERFINASHFPQSFRKLMSQKIIADGIQKTQLLSDPADLSSVIAYGTKGSNGNPKKEDEHAPVPGKYEISATPSRHLISCCQEGTPKQGTSESPLFSGTPVMQTPKRQLPTSLDKPKATCGHISEPCSASSARRSLNTLLKFEVGSPYYDGVEHTDTTKKGMISEDSSYFNKSFEEDSPVLFIDKDKIDEVDSVDSQEKIASLHTTFDIVCDISHPTKNSLITKQELFHNILANNLEIEEIGEIEEQLNILEDLAPDLISKKMINGGEILYSIQPISDQNSVRARLVEPV

SEQ ID NO: 2153 - protein, 532 aa, Zea mays subsp. mays
  misc_feature (1)..(532): Ceres Seq. ID no. 15224814
MHKMKVETEDGGSEIESPTPEKRESRSKRVVVSSLARNLLAERYRDRFSNQLVEDEGQTDDEDYNGSVSPSGSQSLFSESIELLDKHKDLLSLFNRMESSIRLLHLRKKMATFNNIATQVEILTKRKLLYSHLAQMKHLLPEAIQIKRILVHDEKSLCMYADMEITLLMDVVECTSPDQSPSMTICEAFYSKLLSFLDAHHKGADIPEAILPELFNSKPREKLYLEAVHNGYAAESPLQGATEERFINASHFPQSFRKLMSQKIIADGIQKTQLLSDPADLSSVIAYGTKGSNGNPKKEDEHAPVPGKYEISATPSRHLISCCQEGTPKQGTSESPLFSGTPVMQTPKRQLPTSLDKPKATCGHISEPCSASSARRSLNTLLKFEVGSPYYDGVEHTDTTKKGMISEDSSYFNKSFEEDSPVLFIDKDKIDEVDSVDSQEKIASLHTTFDIVCDISHPTKNSLITKQELFHNILANNLEIEEIGEIEEQLNILEDLAPDLISKKMINGGEILYSIQPISDQNSVRARLVEPV

SEQ ID NO: 2154 - DNA, 1414 bp, Zea mays subsp. mays
  misc_feature (1)..(1414): Ceres Seq. ID no. 15224940
aattgggttccgggccccccctcgagtcagctacgtaggccccccccccccccaaaccttgtaaaagcattaacaaacttatggaatactctggatactcatatggaagagcgtcaaccttatgggcaaattaaggtactcgcaatgacttcagtaaacggtatgctaggtcctggaagcctcacacttgagacaattcaacaggtaaaagaccagagattaaacttcaaagcagaatgaattatgtcagacaagtaactgtcttgaagctgataggttattagtttcaccatgttgaataaaataggttgaaactgaagttcagcggctgaatcagttgaaggcaagcaaaatggaagagctattcgtaaagaagagagcagaagtcgacgaaatttgcaagaaatcacacatgggcatgccttatcaaacagaaatggacaagataatgaatctgataatgtcaggagatgtggtccatgatgatttattaaagacaatggatgaatatatatacagagcaaaagaggaggccacaagccggaaagacataatggataaggttgacaaatggatggcttcatgggatgaagaacgatggctagaagaatacagcagggtgcactagctgcctgatgaccatagccatggacattgccttctctagaactttaatttttactatgttgattataattttccacaggatgaccgaaggtactcagtaagcagaggagcgcacaagcacttgaaaagggcagagcgtgctcgaattatagttaacaaaattccaggcttggtagaacagttaatggtcaagacacaattctgggaacaggagagaaacaagatcttctactatgatgagctcccgcttctggcaatgctgaaagactacatgttcacgctcaaagaaaaagaagaagagaaatacaggcaacgggagaataaaaagatacagactctacttgtaaagaggcatgagaattcaataatgttaaggcccaacacaagcttcagccgtccatcaagcagaggcttcaatacgagtcctggctccacatccatctggagcagccaagtttctgcaaaagttcagctgcctgactcagagaactccccagctgaaaaagatatgcgtgcaaaaataattaggaacagaggtatgcagggcattttgggaaataacagaagctgttcaatctctcatgaagataaagcagaagtctccacagtgaagcaagacatttcaccaatttaattttttctcactttaaatttctacagaaatttgtctgcctgacgtgaagttgcaacagcccccttaatctattagataagtgaagaaaaatatgtttgtatgcagcttacaccatattcatatatttatttatgtatgattcattaaaatgtc

SEQ ID NO: 2155 - protein, 149 aa, Zea mays subsp. mays
  misc_feature (1)..(149): Ceres Seq. ID no. 15224941
MVKTQFWEQERNKIFYYDELPLLAMLKDYMFTLKEKEEEKYRQRENKKIQTLLVKRHENSIMLRPNTSFSRPSSRGFNTSPGSTSIWSSQVSAKVQLPDSENSPAEKDMRAKIIRNRGMQGILGNNRSCSISHEDKAEVSTVKQDISPI

SEQ ID NO: 2156 - protein, 125 aa, Zea mays subsp. mays
  misc_feature (1)..(125): Ceres Seq. ID no. 15224942
MLKDYMFTLKEKEEEKYRQRENKKIQTLLVKRHENSIMLRPNTSFSRPSSRGFNTSPGSTSIWSSQVSAKVQLPDSENSPAEKDMRAKIIRNRGMQGILGNNRSCSISHEDKAEVSTVKQDISPI

SEQ ID NO: 2157 - protein, 120 aa, Zea mays subsp. mays
  misc_feature (1)..(120): Ceres Seq. ID no. 15224943
MFTLKEKEEEKYRQRENKKIQTLLVKRHENSIMLRPNTSFSRPSSRGFNTSPGSTSIWSSQVSAKVQLPDSENSPAEKDMRAKIIRNRGMQGILGNNRSCSISHEDKAEVSTVKQDISPI

SEQ ID NO: 2158 - DNA, 715 bp, Zea mays subsp. mays
  misc_feature (1)..(715): Ceres Seq. ID no. 15224949
tcagctacgtaggccccccccccctttgttggtagatttccaattcttgttggtctatcctccctcagcgaagatcagcttgttgaggttctcacagagccaaagaatgcccttggcaggcagtataccaagttgttcgaaatgaatgacgtcaaattgcattttacggaggaggctttacggcttattgccaaaagagcaatatcgaagaatactggggctcgtggtttaaggtccatattagaaagtatattgacagaagctatgtatgagattccagagacacgaactggaaaagataaaatagatgctgtggttgttgacgaggagtctgttggatctgtaaatcagcatggaattggagctaagattctttgcggagaaaaagctttggatgtctatctggccaatcacaacaataaagaatcaacgggccaactccaggagagaccaaacggggaatcagagatcgatacggaagccccctctagagtggccagcatgtagaggttcctggcaacaataattatgtatataaataacttattgtctgccttgtaactgtaaccaattcaaatgtaaagtcgggccatataaattcatcatgtggccggcgctgggttgtaatttgtcatgttgaatttcgggggactgaagcttgatcttgcagtatttacataaggaaagtaaagaggatcgctttgcgtctttgggc

SEQ ID NO: 2159 - protein, 121 aa, Zea mays subsp. mays
  misc_feature (1)..(121): Ceres Seq. ID no. 15224950
MNDVKLHFTEEALRLIAKRAISKNTGARGLRSILESILTEAMYEIPETRTGKDKIDAVVVDEESVGSVNQHGIGAKILCGEKALDVYLANHNNKESTGQLQERPNGESEIDTEAPSRVASM

SEQ ID NO: 2160 - protein, 80 aa, Zea mays subsp. mays
  misc_feature (1)..(80): Ceres Seq. ID no. 15224951
MYEIPETRTGKDKIDAVVVDEESVGSVNQHGIGAKILCGEKALDVYLANHNNKESTGQLQERPNGESEIDTEAPSRVASM

SEQ ID NO: 2161 - DNA, 2209 bp, Zea mays subsp. mays
  misc_feature (1)..(2209): Ceres Seq. ID no. 15225042
gagctcactagtccccccccccccgtgacatcccttccttgcgactcatggtttgctggagctgtaggattctcccggcacaatggaggtgctattgtctgatttggagcaacaaggaaatataaagtagtaaaacaatttctttacgaaagataaacttttcagggtcattgaaaattatgagtcaaaacctagagcataatcttcagaatgccttgcttttaataagtgattacctattttgttacagagccgaagagcatttaccaaacacattgcgacaagctctaatttgcaaagtaatactctctaccttcttttatcttgttttttataatccatatccctgacacttcataaatattcttgttgtaatgttatgtacttctacacctggatttgcaatgtgtttttttgctcatgtttcacttattctagctcctgatagaagtaaactctctaaacgacatggagctacttctatggggcacgttacttatcgattgtttcctatcttaaaactctaccaacatatcttgttttattcaaggcataagaatgaaccatgatgtattttttcctgcacaatataaagaaatgggctatcagcctcacgcaatggtgaattatttagcactactgggctgggtgatggtactgaaaatgagttcttcactatcgatgacctaggtttgttcttaatagtattttcttttcgttttcactttagtttttgtatattaaatttaaaataaaactatcatattctcagctcagtgttatttctcactgcagtccagaaattcactacaaaccaagtcaataaaagtggagcagcctttgatccagtctgccaccagaagttgcttttatgctgaatttcggtacatcatgttgaccaggactactaatgactccagttttaatccacttagtttccacatttaataatctctacctggttctcttgtcattgcacttattgcttctaaaatttttctgcttcaaggagttcaacacggggcgcttcacttgtttgtaattgaggcaaattagtctgctttgatacctctactacttattaaggacgcaagagtaccctgtctctgactttgttctgccaccggccgttccgacatccgtgaatctgatagcccattttagggtcgctatgcacactttcttctgtgtaatgcaacttcattagtgttgctatgaacactttcttctgcaccaaccacaatattctcttgggatgctgtcaatgggatgaatgaattgcatattttagggtctttgctacactatagagtagatgggttataaatatacaaatctcagcttcctatccattctttctatctagagttgtagacaccacatagtatacagcagcaggagcagtgctttgctcagtccacctttgttgaagctgggctgagagtgtaggagtgaagccccaaggctctctggtaggcgatccaccacactacccgacccccaccctttttcctcaacttgtaaattgtcgccccgactactcactctaccaccgcaatcgcgtcatcattaacatttcttcttcgttcttttcagggccatcgaggatcgatcgggcggcggcgccgtcgggcagaagcggtcgtcaccggacaagatgcacaggtccaccatggacgtcgtctaccaccaccaccaccaccaagagtcgctgttgacgggcaacgtcgccgccaccgccagcgccggtaagaagctgggcgtggagcggttcgagttgccgctgatctacatctcgctgtcgcggaaggagaaggacgacaatttccttgcgatgaagggcaccaagctaccccagtggcccaagaaaagggccaagaacgtggagaccctccaagtattaaacacctggcctgagatcgatttgatcctctatttctaacccgatccaaatcgatctctgctctcaaaacttaaacatgtgccccttgctttttatcatgcagtttatcttcctggggatgtggtggggtaggggccataggatggatttgaattcatgatagtatctacacatgtacactgcttaaagatactatgtacgtatctatatctattacaattttgtataaatactttttgatagtttttaaatttgtatggcaaagcagggacacatacatatatatatatatcctttaatttatgc

SEQ ID NO: 2162 - protein, 94 aa, Zea mays subsp. mays
  misc_feature (1)..(94): Ceres Seq. ID no. 15225043
MHRSTMDVVYHHHHHQESLLTGNVAATASAGKKLGVERFELPLIYISLSRKEKDDNFLAMKGTKLPQWPKKRAKNVETLQVLNTWPEIDLILYF

SEQ ID NO: 2163 - protein, 89 aa, Zea mays subsp. mays
  misc_feature (1)..(89): Ceres Seq. ID no. 15225044
MDVVYHHHHHQESLLTGNVAATASAGKKLGVERFELPLIYISLSRKEKDDNFLAMKGTKLPQWPKKRAKNVETLQVLNTWPEIDLILYF

SEQ ID NO: 2164 - protein, 64 aa, Zea mays subsp. mays
  misc_feature (1)..(64): Ceres Seq. ID no. 15225045
MLCTSTPGFAMCFFAHVSLILAPDRSKLSKRHGATSMGHVTYRLFPILKLYQHILFYSRHKNEP

SEQ ID NO: 2165 - DNA, 1532 bp, Zea mays subsp. mays
  misc_feature (1)..(1532): Ceres Seq. ID no. 15225184
ctcactagtccccccccccccccccgcttcccaatcggatggttatccgaagcagcaattcctacaccttcaacaacctatgcagtccccacaggagcagtgcaatctcaatccgctgttgcagcagcaaatactacagcaagggagccaacagcagatggttagtcctgatgctcaaaatatccagtccgtgctcaacccaaatgctattcagcagcagctccaacaactccagcagatgcagcatgctcataatgaccagaagcagaagattcaaccagatcagccgtatcaagttcctagcagtgcggttctctcgagtccaacatcattaccaagccatttgcgggaaaaatttggcttttctgatcctaatgtcaactcttccagcttcatcagctctagcagcaacgagaatatgctggaatcaaacttccttcagggaagctcaaaatctgtggatttgtctagattcaaccaacctgtagttagcgagcatcagcagcaacaggcatggaagcaaaagtttatgggctcacagtcgatgtcttttgggggctcggtttcacttaactcacccactaccaaagatggtcctgttgacaacaaaattggtcgtgatgtgcagaaccagaccctttttagccctcaagttgactcttcctccctactgtacaatatggtacctaatttgacctcaaatgttgcggataataatatatcaacgattccctctggatcaacatatctgcaaagtccaatgtatggttgtctggatgactcttctggtttattgcaaaatacaggagagaatgatccgacaactagaacattcgttaaggtttacaagtcaggatcggtggggagatccttggacatcacccggttctctaattatgctgaacttcgagaggaactgggtcagatgttcggcattaagggtcagttggatgaccctgatagatcaggctggcagcttgtatttgtcgacagggagaacgatgtgcttctccttggagacgacccatgggagtcatttgtgaatagtgtatggtacatcaaaatactttcacctgaggatgtgcataagatgggaaagccaggaaacgatccacgctacctatcttaaattgatacccagagctctttcgggctcccgtgacgattctgtggcacactgtagcactgtccatggcggtccggtgtgctgtgctcgcatgttcgccggtgtcacctctagcatgtgcaccgtgcgcgtcttcagaactcccccgttacttgtatccggtgcaggccaccgctctggactgatgtcttgtaggttccacttaggaatcagtatcagcgactctatcctagttggtttgtagctcgcacggcactcgttcttgtgtcgcatcgaaatcttcaggctaaatgcttagttgaaactgttcccgtgattcttaagctatctatgtatttgaggattcccctgcatgctttcgacgatgaactgcaataattcgaatgcaggaggattgtttgaatgc

SEQ ID NO: 2166 - protein, 375 aa, Zea mays subsp. mays
  misc_feature (1)..(375): Ceres Seq. ID no. 15225185
SLVPPPPPASQSDGYPKQQFLHLQQPMQSPQEQCNLNPLLQQQILQQGSQQQMVSPDAQNIQSVLNPNAIQQQLQQLQQMQHAHNDQKQKIQPDQPYQVPSSAVLSSPTSLPSHLREKFGFSDPNVNSSSFISSSSNENMLESNFLQGSSKSVDLSRFNQPVVSEHQQQQAWKQKFMGSQSMSFGGSVSLNSPTTKDGPVDNKIGRDVQNQTLFSPQVDSSSLLYNMVPNLTSNVADNNISTIPSGSTYLQSPMYGCLDDSSGLLQNTGENDPTTRTFVKVYKSGSVGRSLDITRFSNYAELREELGQMFGIKGQLDDPDRSGWQLVFVDRENDVLLLGDDPWESFVNSVWYIKILSPEDVHKMGKPGNDPRYLS

SEQ ID NO: 2167 - protein, 349 aa, Zea mays subsp. mays
  misc_feature (1)..(349): Ceres Seq. ID no. 15225186
MQSPQEQCNLNPLLQQQILQQGSQQQMVSPDAQNIQSVLNPNAIQQQLQQLQQMQHAHNDQKQKIQPDQPYQVPSSAVLSSPTSLPSHLREKFGFSDPNVNSSSFISSSSNENMLESNFLQGSSKSVDLSRFNQPVVSEHQQQQAWKQKFMGSQSMSFGGSVSLNSPTTKDGPVDNKIGRDVQNQTLFSPQVDSSSLLYNMVPNLTSNVADNNISTIPSGSTYLQSPMYGCLDDSSGLLQNTGENDPTTRTFVKVYKSGSVGRSLDITRFSNYAELREELGQMFGIKGQLDDPDRSGWQLVFVDRENDVLLLGDDPWESFVNSVWYIKILSPEDVHKMGKPGNDPRYLS

SEQ ID NO: 2168 - protein, 323 aa, Zea mays subsp. mays
  misc_feature (1)..(323): Ceres Seq. ID no. 15225187
MVSPDAQNIQSVLNPNAIQQQLQQLQQMQHAHNDQKQKIQPDQPYQVPSSAVLSSPTSLPSHLREKFGFSDPNVNSSSFISSSSNENMLESNFLQGSSKSVDLSRFNQPVVSEHQQQQAWKQKFMGSQSMSFGGSVSLNSPTTKDGPVDNKIGRDVQNQTLFSPQVDSSSLLYNMVPNLTSNVADNNISTIPSGSTYLQSPMYGCLDDSSGLLQNTGENDPTTRTFVKVYKSGSVGRSLDITRFSNYAELREELGQMFGIKGQLDDPDRSGWQLVFVDRENDVLLLGDDPWESFVNSVWYIKILSPEDVHKMGKPGNDPRYLS

SEQ ID NO: 2169 - DNA, 743 bp, Zea mays subsp. mays
  misc_feature (1)..(743): Ceres Seq. ID no. 15225268
gacggcccgctggccttagatgtattgggcccactggcctcacaggtcatatccggcccatgtggtaagactcgaaagctcgaagcgaagcctccctgactacagagaaccggaggactgaggaggaggaggagacgtcacgcctgcgcggctgcgcccaccatggacgaggaggagttccggcgcatgctcgacctcttcccggtcgtccgctcccgagactactgctgctccgatcttggaacatccagcagaggaaccagacagcgatcacgagttcaggaggcaactaagggcgataataaggactcgtccggtggacgagatatgtttatgcagaaattgaagatggctgcggagaataagattggagcgacaaaggcagagttcttctgcaagacattcgaagaagttcatgagaaacttgttcacagagagctgaatttggatgctgctaagaagttcctgagcgcatatgagagctgatgatgaacaataggtagatgctgcttaagggtcggtagttgccaatgatctggaaagttgttgatgctgttgagattttgatcacaggcaaacttttaacaacaggtagatgctgttgagcgcatactgataccgcctgattggttcaccgatcgcccgtagccagctcgtatgcagccaggctgtccagagactgttatttgggccgtagaagtggatgcactcaaaataaatgttgcgtttaaaaaaaaaaaaaa

SEQ ID NO: 2170 - protein, 107 aa, Zea mays subsp. mays
  misc_feature (1)..(107): Ceres Seq. ID no. 15225269
MDEEEFRRMLDLFPVVRSRDYCCSDLGTSSRGTRQRSRVQEATKGDNKDSSGGRDMFMQKLKMAAENKIGATKAEFFCKTFEEVHEKLVHRELNLDAAKKFLSAYES

SEQ ID NO: 2171 - protein, 99 aa, Zea mays subsp. mays
  misc_feature (1)..(99): Ceres Seq. ID no. 15225270
MLDLFPVVRSRDYCCSDLGTSSRGTRQRSRVQEATKGDNKDSSGGRDMFMQKLKMAAENKIGATKAEFFCKTFEEVHEKLVHRELNLDAAKKFLSAYES

SEQ ID NO: 2172 - DNA, 927 bp, Zea mays subsp. mays
  misc_feature (1)..(927): Ceres Seq. ID no. 15225282
ggaggattgatgcttcttctgtctcagctsctgctgacaaaggagagttttgagagctgtaagatccaagtattctgcatatctgaagaggatacagatgcagaggagttgaaggctgatgtcaaraagttcttgtatgatcttaggatgcaagctgaggtcattgttgtcactatgaaatcatgggaatcacacatggagagcagcagtaacggcgctcagcaggataactcccatgaggcttacacaagcgcacagcaaaggatcaggacataccttgatgagatgaaggaaactgctcaaacagaaaggcagttactaatggagaatgggaggcaagttgtgaacgaacagaaggttgataaattcctttacacaatgtttaagttgaactccacgatactcaggtactccagaatggcagctgtagttcttgtgagccttcctccaccgccattataccatccttcatatttctmcatggagtacatggatttgcttgtagagaatgtcccacscatgttaatagttaggggatatacgagagatgttgtcacatttttcacatggattatacatacgaacttctcacctggagactctagtgccgtcaggctgttgtactatctcagcagagactggatacacaagagcgtggaatctaccactgaaatgacaagccctcaccttgaaggcaactaggatgagatgtcagatgtgcagagctgttgttcgcatattggattcgtgatctattgaactgcagtgtcttcattctttttctggatttaaaagatccacatagcgagctttgattcttacagattttgtagctatcatatgtaaacacttaccatcttgtaattgtaagcatacttacatgctggcccaaagacaaatgcaatccttaccttctcactgaaacat

SEQ ID NO: 2173 - protein, 233 aa, Zea mays subsp. mays
  misc_feature (1)..(233): Ceres Seq. ID no. 15225283
  misc_feature (10)..(10): Xaa is any aa, unknown or other
  misc_feature (42)..(42): Xaa is any aa, unknown or other
  misc_feature (160)..(160): Xaa is any aa, unknown or other
  misc_feature (173)..(173): Xaa is any aa, unknown or other
GGLMLLLSQXLLTKESFESCKIQVFCISEEDTDAEELKADVXKFLYDLRMQAEVIVVTMKSWESHMESSSNGAQQDNSHEAYTSAQQRIRTYLDEMKETAQTERQLLMENGRQVVNEQKVDKFLYTMFKLNSTILRYSRMAAVVLVSLPPPPLYHPSYFXMEYMDLLVENVPXMLIVRGYTRDVVTFFTWIIHTNFSPGDSSAVRLLYYLSRDWIHKSVESTTEMTSPHLEGN

SEQ ID NO: 2174 - protein, 230 aa, Zea mays subsp. mays
  misc_feature (1)..(230): Ceres Seq. ID no. 15225284
  misc_feature (7)..(7): Xaa is any aa, unknown or other
  misc_feature (39)..(39): Xaa is any aa, unknown or other
  misc_feature (157)..(157): Xaa is any aa, unknown or other
  misc_feature (170)..(170): Xaa is any aa, unknown or other
MLLLSQXLLTKESFESCKIQVFCISEEDTDAEELKADVXKFLYDLRMQAEVIVVTMKSWESHMESSSNGAQQDNSHEAYTSAQQRIRTYLDEMKETAQTERQLLMENGRQVVNEQKVDKFLYTMFKLNSTILRYSRMAAVVLVSLPPPPLYHPSYFXMEYMDLLVENVPXMLIVRGYTRDVVTFFTWIIHTNFSPGDSSAVRLLYYLSRDWIHKSVESTTEMTSPHLEGN

SEQ ID NO: 2175 - protein, 184 aa, Zea mays subsp. mays
  misc_feature (1)..(184): Ceres Seq. ID no. 15225285
  misc_feature (111)..(111): Xaa is any aa, unknown or other
  misc_feature (124)..(124): Xaa is any aa, unknown or other
MQAEVIVVTMKSWESHMESSSNGAQQDNSHEAYTSAQQRIRTYLDEMKETAQTERQLLMENGRQVVNEQKVDKFLYTMFKLNSTILRYSRMAAVVLVSLPPPPLYHPSYFXMEYMDLLVENVPXMLIVRGYTRDVVTFFTWIIHTNFSPGDSSAVRLLYYLSRDWIHKSVESTTEMTSPHLEGN

SEQ ID NO: 2176 - DNA, 2142 bp, Zea mays subsp. mays
  misc_feature (1)..(2142): Ceres Seq. ID no. 15225380
aatcggtctgtggcattgccgatcagaaggaacatctattcctgcttcacattcgtggatcctcgattgctcatttcatttcaagtacggaactgagatctgtttatggacatcggctttatcccagacggcatagacatctccaggatgacctcacagcgccgctcctacctcattgtaggagctggagtctttggtgtttctacagcctatcatctgattcagaaataccctgatgcagatgtcacgctggttgatcgcgatgcttatgacagcgataacagagtggctgcctcatgggactggaacaaggttgttcgtgcggattacgatgatctgatctattgcaaattagcgattgaagcgcaagatgtcttcaaggcagacccgctgtggcagccgtattttcatgaaaccggagtctactggatgtgccgtggcagctatgctcaggatgtaatccggaattacaagacactgggacgcaaggctgagatttcagcactgccagtcgcagaagcaaaactactttatgatggcctattcaaagatgccgattataatggagtcactgaggttctcatcaacaagacgagtggatgggcagctgcgggagactgcttgcaggcggtgaccaaaagagccatggagctcggggtcaagtatgttacccaggaggtttcgacgctcatcatggacaagggccgatgcaaagggattcgcacaagaagcggacaatctctcctcgccgaccatgttttgttgtgcacaggagcttacacgtccaaactgctggagctcagtgctatcgaggctggcaatgacgatcttcgagctggctcccggattgtcgctggtggaatcacaactggcatggcaatcctggatgaggagctatatgggcagtttgagacgatgcctgtgggtttccagggctatcctgctgatatcggtatgtttcttcaacagccacaatcgtccacagagaaactcaccattcataggacctttcatgggcagcctccctccgacaaaggatcgagagctcaagtggtggggaccgaccatattccgcaacacggttgagatgtcgcctggttatcagatttctgcacctccagaaggccgagactttggtcagtggaaggtgtcgaagaggctgcaggaggacattcaagcagcgaagaaactgttctatggtgagaagagtgagaagtggccaatggcgaaacatcgcatttgctggtaaggcggaacgtcctcacttggaaattagacaacctgtgactgacaagcaattagggacgctttcacgacaagcggtgatttcattatttcgcctcattcatccgccaagggcttgtacattgccacctgtggttcattccacggcttcaagttcttcccggtactgggcaagtacatcacacagatgttagagggctcactggcacctgaattggtggagaaatgggcgtgggatcgtgaacgacccgaccctgccttgaacccggagtggccgcgcgctgagatgaatgacctgcaagacacggtggccaaactttaatgatacagatccttcactcagcatttcgcacccgagcagagctagatagccttccatagaaccactccaggaattaatattgtcagggagccgttgagcgaatgtggctttgtcactcattgttggccaattcctcatggactctcaagagaaccgtggctcaaaggagcatcctggaaacgactgaatccccatcccccgcgaataaccctttctggaattccccttatcatgattggctcacgcggcgtctccgagaatgctgccgatatcgtcatggatctcgctgcaaggtgccagacaccaccgtgcgatgtcttgaaagtctatctaagtgtaccccatgtcgacagatatgactgatcgaagcccaggtcacaagatcaggtttcttcaccgactctagcatcctcacccatgtttatcgggtgcaaggggtccattcgcttactaggctcgccctttgttctcttccagccatccatcgctgcaacgccccgactcaagagataacgagggggcgatatcggtagaacgagtagcgcacaacacatgcatggctccgtactaagaag

SEQ ID NO: 2177 - protein, 326 aa, Zea mays subsp. mays
  misc_feature (1)..(326): Ceres Seq. ID no. 15225381
MDIGFIPDGIDISRMTSQRRSYLIVGAGVFGVSTAYHLIQKYPDADVTLVDRDAYDSDNRVAASWDWNKVVRADYDDLIYCKLAIEAQDVFKADPLWQPYFHETGVYWMCRGSYAQDVIRNYKTLGRKAEISALPVAEAKLLYDGLFKDADYNGVTEVLINKTSGWAAAGDCLQAVTKRAMELGVKYVTQEVSTLIMDKGRCKGIRTRSGQSLLADHVLLCTGAYTSKLLELSAIEAGNDDLRAGSRIVAGGITTGMAILDEELYGQFETMPVGFQGYPADIGMFLQQPQSSTEKLTIHRTFHGQPPSDKGSRAQVVGTDHIPQHG

SEQ ID NO: 2178 - protein, 312 aa, Zea mays subsp. mays
  misc_feature (1)..(312): Ceres Seq. ID no. 15225382
MTSQRRSYLIVGAGVFGVSTAYHLIQKYPDADVTLVDRDAYDSDNRVAASWDWNKVVRADYDDLIYCKLAIEAQDVFKADPLWQPYFHETGVYWMCRGSYAQDVIRNYKTLGRKAEISALPVAEAKLLYDGLFKDADYNGVTEVLINKTSGWAAAGDCLQAVTKRAMELGVKYVTQEVSTLIMDKGRCKGIRTRSGQSLLADHVLLCTGAYTSKLLELSAIEAGNDDLRAGSRIVAGGITTGMAILDEELYGQFETMPVGFQGYPADIGMFLQQPQSSTEKLTIHRTFHGQPPSDKGSRAQVVGTDHIPQHG

SEQ ID NO: 2179 - protein, 218 aa, Zea mays subsp. mays
  misc_feature (1)..(218): Ceres Seq. ID no. 15225383
MCRGSYAQDVIRNYKTLGRKAEISALPVAEAKLLYDGLFKDADYNGVTEVLINKTSGWAAAGDCLQAVTKRAMELGVKYVTQEVSTLIMDKGRCKGIRTRSGQSLLADHVLLCTGAYTSKLLELSAIEAGNDDLRAGSRIVAGGITTGMAILDEELYGQFETMPVGFQGYPADIGMFLQQPQSSTEKLTIHRTFHGQPPSDKGSRAQVVGTDHIPQHG

SEQ ID NO: 2180 - DNA, 898 bp, Zea mays subsp. mays
  misc_feature (1)..(898): Ceres Seq. ID no. 15225415
gcacccacaaggttgagagctgagactgatctgtgccatccgtccgttcccgcgagcgagagaggccggccgcagcatggcgtccgccgcccaccggtccatggggtctgccctcctgtccctcaacctcatcatgtacgtcgtcgtcgcggtcatcgctggctgggccatcaactacagcatcgacgagagcaggaactcgctgaagggcgcgacgccgccggtgcgcctgttcccgatctacttccccatcggcaacctggcgacggggttcttcgtcatcttcgcgctcgtcacgggcgtcgtcggcatctccacctcgctcgccggcctgcacgaggtcagccaggggtacccggccagcatgatgtccgccgccgcgtccgcccttgtcacctggaccctcaccgtcctcgccatggggctagcgtgcaaggagatcagcctcagcgtgaggcccgggagcctgcgcaccttggaggcgttcaccatcatcctgaccgccacgcagctgctctgcgccgtgtcgctccacgccggcgcgcacgcggtcatcctggagacgcctatcggcggcagagtctagctgaggtgcgcgatgacagctagcatgcgccatcttggcagagtgatcggtgttgtgtcgctttacaggtgccgtgtgtgtgctttctgggtacctaaaattcgtgtgagcctcattcatttgtaaaaaaatatgtcgtggactcataagtggtggtaaactatcggcgattcttcccatactactgcaagtcaaaattattgcgctttgcacagttccattatatgtactaagtgtctgtttgttttagcttatagattatataatcttgattatttactctagctagaataaaaaaaaaaaaaaaaaaaa

SEQ ID NO: 2181 - protein, 202 aa, Zea mays subsp. mays
  misc_feature (1)..(202): Ceres Seq. ID no. 15225416
APTRLRAETDLCHPSVPASERGRPQHGVRRPPVHGVCPPVPQPHHVRRRRGHRWLGHQLQHRREQELAEGRDAAGAPVPDLLPHRQPGDGVLRHLRARHGRRRHLHLARRPARGQPGVPGQHDVRRRVRPCHLDPHRPRHGASVQGDQPQREAREPAHLGGVHHHPDRHAAALRRVAPRRRARGHPGDAYRRQSLAEVRDDS

SEQ ID NO: 2182 - protein, 169 aa, Zea mays subsp. mays
  misc_feature (1)..(169): Ceres Seq. ID no. 15225417
MASAAHRSMGSALLSLNLIMYVVVAVIAGWAINYSIDESRNSLKGATPPVRLFPIYFPIGNLATGFFVIFALVTGVVGISTSLAGLHEVSQGYPASMMSAAASALVTWTLTVLAMGLACKEISLSVRPGSLRTLEAFTIILTATQLLCAVSLHAGAHAVILETPIGGRV

SEQ ID NO: 2183 - protein, 161 aa, Zea mays subsp. mays
  misc_feature (1)..(161): Ceres Seq. ID no. 15225418
MGSALLSLNLIMYVVVAVIAGWAINYSIDESRNSLKGATPPVRLFPIYFPIGNLATGFFVIFALVTGVVGISTSLAGLHEVSQGYPASMMSAAASALVTWTLTVLAMGLACKEISLSVRPGSLRTLEAFTIILTATQLLCAVSLHAGAHAVILETPIGGRV

SEQ ID NO: 2184 - DNA, 2169 bp, Zea mays subsp. mays
  misc_feature (1)..(2169): Ceres Seq. ID no. 15225419
gttagtgtatcaaaaccaattcgcgacatcacttaggaaggggaaagcaggggccggaaaaagaagaagagacgggaatggcaagctccgactcaaatcccaccgatgcattcgagtacatgctgcttgagaaggatcctgatctctaccggacggttttctctggtccgagccagacaagcccatggattgacccgagtgtgttaaagctgaagcaccggatagggagaggtccatttggggatgtatggatagcaactcaccaccaaaggacagaggatttcgatcagtaccatgaggttgcggtgaagatgctgcatccaattaaagaggaccagctgcagatcttctcagcgaggttccatgagatcttcagcaaatgtcagggtctgggcaacgtttgtttcttgcatggcatctctacacagaatgggaggatttgtatagctatgaagttctatgaaggatccatcgggaacaagatggctcggcttaaaggtggaaagctccctttgtcagaagttctaagatatggggctgatttggcacgcggtgtactaggcctacacaccagggggatattgatcctaaatatgaaaccttgcaattttctcatagacgaaaatgattgtgctgtgctgggggattttgggattccatccctgctgtttggcctttcattacctaatccggaccttatccagaggcttggaactccaaattacatggctcctgaacaatggcaaccaaacatcagaggtccgattagttatgaaactgattcgtggggttttgcgtgcagcgtccttgagatgttgactggcattcagccatggcgtggaaagtcagcagatgagatatatcagttggttgtcttgaagaaagaaaagccaatattcccgtgcagtctacctccagacattgaaaatgtgctttctggatgttttgaatatgactttagaaaccgtcccttgatgaaagacattttgcatgcatttgagagtgctaaaggtgcagatcatgacaacattggttggggcaattctgaaaatgctatggtagacaggataaccatgccaaatcgcatcaattggttacactttaaggacaagcttcaagtgggcgacaaggtccgttcaagaaagcttaaaaactcttgcggtcctgaaactatggaaatccctgatggaaccatagttggcattgaggacgatggcgagcgtgacgcttacgttcttgtacgagtccacgcgctacacaaccctttaaaggttcgcttttcaacggtggagagggtaacatatggttttgctgctggagactgggtgcggctgagggaggaggacaagaagcgctctcaggttggcattcttcacagcatcgaccgtgacggtgcagtggcagttggtctgataggagtggataccccttggaagggcaattattcagacctccagatggctgaagcctactgtgtcggacagtttgtgcgcctgaaggccagcatttcaagcccaaggttcgaatggcagcgaaagcggggtggattagcttctactggccgaatttcacagatacatccgaacgggttgctcgtcgtgaaatttcctggcaagtttaaccttggcgaagtgtgcagttgcctggcagacccctccgaggtggaggtggtgagctttgacaaatgcgaggggattgtgaagaagtacgagcatctcgaggacttccattgggcagtgaggcccctgttcgttgctattggtttcctcacggcgatcaagctgggtgtttttgttggcaagagcatttcgaggccgaggagccggaaggttgccagcatctctgatcagagtggagattaccagcagcagcaccagcagcaggtagtccaacaaagtgctaatgcggcgtggcttcctccaccagttgcaaacatgttcttcggagatagtgttgggacttctggataagaaatcataactggcccggagttttgcttaaaatagcaatttggaattgtggttcctagttgtgtgcatatttaggcctgaaatggtttatcccttatctaagcatctgtacatatctgccttatgcaccacaagttctgtaaataaactctagaattatcgtcttaaacatacaagtatgcgaagctatttcttgctt

SEQ ID NO: 2185 - protein, 630 aa, Zea mays subsp. mays
  misc_feature (1)..(630): Ceres Seq. ID no. 15225420
MASSDSNPTDAFEYMLLEKDPDLYRTVFSGPSQTSPWIDPSVLKLKHRIGRGPFGDVWIATHHQRTEDFDQYHEVAVKMLHPIKEDQLQIFSARFHEIFSKCQGLGNVCFLHGISTQNGRICIAMKFYEGSIGNKMARLKGGKLPLSEVLRYGADLARGVLGLHTRGILILNMKPCNFLIDENDCAVLGDFGIPSLLFGLSLPNPDLIQRLGTPNYMAPEQWQPNIRGPISYETDSWGFACSVLEMLTGIQPWRGKSADEIYQLVVLKKEKPIFPCSLPPDIENVLSGCFEYDFRNRPLMKDILHAFESAKGADHDNIGWGNSENAMVDRITMPNRINWLHFKDKLQVGDKVRSRKLKNSCGPETMEIPDGTIVGIEDDGERDAYVLVRVHALHNPLKVRFSTVERVTYGFAAGDWVRLREEDKKRSQVGILHSIDRDGAVAVGLIGVDTPWKGNYSDLQMAEAYCVGQFVRLKASISSPRFEWQRKRGGLASTGRISQIHPNGLLVVKFPGKFNLGEVCSCLADPSEVEVVSFDKCEGIVKKYEHLEDFHWAVRPLFVAIGFLTAIKLGVFVGKSISRPRSRKVASISDQSGDYQQQHQQQVVQQSANAAWLPPPVANMFFGDSVGTSG

SEQ ID NO: 2186 - protein, 616 aa, Zea mays subsp. mays
  misc_feature (1)..(616): Ceres Seq. ID no. 15225421
MLLEKDPDLYRTVFSGPSQTSPWIDPSVLKLKHRIGRGPFGDVWIATHHQRTEDFDQYHEVAVKMLHPIKEDQLQIFSARFHEIFSKCQGLGNVCFLHGISTQNGRICIAMKFYEGSIGNKMARLKGGKLPLSEVLRYGADLARGVLGLHTRGILILNMKPCNFLIDENDCAVLGDFGIPSLLFGLSLPNPDLIQRLGTPNYMAPEQWQPNIRGPISYETDSWGFACSVLEMLTGIQPWRGKSADEIYQLVVLKKEKPIFPCSLPPDIENVLSGCFEYDFRNRPLMKDILHAFESAKGADHDNIGWGNSENAMVDRITMPNRINWLHFKDKLQVGDKVRSRKLKNSCGPETMEIPDGTIVGIEDDGERDAYVLVRVHALHNPLKVRFSTVERVTYGFAAGDWVRLREEDKKRSQVGILHSIDRDGAVAVGLIGVDTPWKGNYSDLQMAEAYCVGQFVRLKASISSPRFEWQRKRGGLASTGRISQIHPNGLLVVKFPGKFNLGEVCSCLADPSEVEVVSFDKCEGIVKKYEHLEDFHWAVRPLFVAIGFLTAIKLGVFVGKSISRPRSRKVASISDQSGDYQQQHQQQVVQQSANAAWLPPPVANMFFGDSVGTSG

SEQ ID NO: 2187 - protein, 552 aa, Zea mays subsp. mays
  misc_feature (1)..(552): Ceres Seq. ID no. 15225422
MLHPIKEDQLQIFSARFHEIFSKCQGLGNVCFLHGISTQNGRICIAMKFYEGSIGNKMARLKGGKLPLSEVLRYGADLARGVLGLHTRGILILNMKPCNFLIDENDCAVLGDFGIPSLLFGLSLPNPDLIQRLGTPNYMAPEQWQPNIRGPISYETDSWGFACSVLEMLTGIQPWRGKSADEIYQLVVLKKEKPIFPCSLPPDIENVLSGCFEYDFRNRPLMKDILHAFESAKGADHDNIGWGNSENAMVDRITMPNRINWLHFKDKLQVGDKVRSRKLKNSCGPETMEIPDGTIVGIEDDGERDAYVLVRVHALHNPLKVRFSTVERVTYGFAAGDWVRLREEDKKRSQVGILHSIDRDGAVAVGLIGVDTPWKGNYSDLQMAEAYCVGQFVRLKASISSPRFEWQRKRGGLASTGRISQIHPNGLLVVKFPGKFNLGEVCSCLADPSEVEVVSFDKCEGIVKKYEHLEDFHWAVRPLFVAIGFLTAIKLGVFVGKSISRPRSRKVASISDQSGDYQQQHQQQVVQQSANAAWLPPPVANMFFGDSVGTSG

SEQ ID NO: 2188 - DNA, 718 bp, Zea mays subsp. mays
  misc_feature (1)..(718): Ceres Seq. ID no. 15225557
gattcttcattcttccttccccttctctctcactacctactcctagcaacaacaatgagcttcttcatcgaagattctggtctcatcgtcacacaacttctctaccaaatggctgtcttaatcaccctcttgagatggatctttacttggatcttacgctaccgatccagatctacctcctcctcttcttcatctactcctccgatctcgtcacaaaccatcaaagagagcctcgccgtgacgacgttccgcgacgccgcggatcggtctccggaactgatcagcgacacttgcgcggtgtgtcttggagatttggaagacggagatgaggtcagagagctcagaaactgcagccacgtgttccaccgagagtgtatcgacaggtggctggactacgagtgctgtggcggagatgataacgacggcgaggaagataaccaccgcacgtgtcctctttgtagaactccgcttcttgctgctaatacgtcgtcgtgtgcggattggccggttaagaacgaacctagctgggccgttgagcggcttctctacctcttcggagatgatcttcttgtctgactttttattttatttttctttcgatatttatttgattttagtggagattgaaatttgttggtcgagttttgtaaattgggaatttaaagggtagaatagcatttatatataatatttcaattttaaacatattttctttgtg

SEQ ID NO: 2189 - protein, 191 aa, Zea mays subsp. mays
  misc_feature (1)..(191): Ceres Seq. ID no. 15225558
DSSFFLPLLSHYLLLATTMSFFIEDSGLIVTQLLYQMAVLITLLRWIFTWILRYRSRSTSSSSSSTPPISSQTIKESLAVTTFRDAADRSPELISDTCAVCLGDLEDGDEVRELRNCSHVFHRECIDRWLDYECCGGDDNDGEEDNHRTCPLCRTPLLAANTSSCADWPVKNEPSWAVERLLYLFGDDLLV

SEQ ID NO: 2190 - protein, 173 aa, Zea mays subsp. mays
  misc_feature (1)..(173): Ceres Seq. ID no. 15225559
MSFFIEDSGLIVTQLLYQMAVLITLLRWIFTWILRYRSRSTSSSSSSTPPISSQTIKESLAVTTFRDAADRSPELISDTCAVCLGDLEDGDEVRELRNCSHVFHRECIDRWLDYECCGGDDNDGEEDNHRTCPLCRTPLLAANTSSCADWPVKNEPSWAVERLLYLFGDDLLV

SEQ ID NO: 2191 - protein, 155 aa, Zea mays subsp. mays
  misc_feature (1)..(155): Ceres Seq. ID no. 15225560
MAVLITLLRWIFTWILRYRSRSTSSSSSSTPPISSQTIKESLAVTTFRDAADRSPELISDTCAVCLGDLEDGDEVRELRNCSHVFHRECIDRWLDYECCGGDDNDGEEDNHRTCPLCRTPLLAANTSSCADWPVKNEPSWAVERLLYLFGDDLLV

SEQ ID NO: 2192 - DNA, 602 bp, Zea mays subsp. mays
  misc_feature (1)..(602): Ceres Seq. ID no. 15225631
gtaccgkgtccccccctcgagtcagctacgtaggccccccccccattttgaaggaagttgacttcaacacagcaactttggctgatattctcaggcaattagggacccattttgaaatggacctcatggacagaaaagcagaagtgaagcgcattatagaagatgtaattaatagtatgtctgatgatgaaggtgaggaaggctcagaagatgaagctgaagacgatggtaaggcggataatttaaagagtgaacccgatggaggtgaagagaagtgattctgtggactggatgtggattgaacatcgaagggtcatttttcatggcagtctcctgtttggaggtttggctctgtacaattcgggcaccgcaagaacgagccggtgacctgggtactgcttacatgattgttaaccatttcaacagccatacgcatctagctgagcttgacttggtagtgaatgtagtctagtcgcttgtcatgtaatatctttgcgattgatagtttgctagcttaggtagctagcctgactgtaatatgcagaataattcttgtcttgtttccgtccattttatccatgtaaaactatgagttctgaatc

SEQ ID NO: 2193 - protein, 91 aa, Zea mays subsp. mays
  misc_feature (1)..(91): Ceres Seq. ID no. 15225632
  misc_feature (2)..(2): Xaa is any aa, unknown or other
TXSPPRVSYVGPPPILKEVDFNTATLADILRQLGTHFEMDLMDRKAEVKRIIEDVINSMSDDEGEEGSEDEAEDDGKADNLKSEPDGGEEK

SEQ ID NO: 2194 - protein, 53 aa, Zea mays subsp. mays
  misc_feature (1)..(53): Ceres Seq. ID no. 15225633
MDLMDRKAEVKRIIEDVINSMSDDEGEEGSEDEAEDDGKADNLKSEPDGGEEK

SEQ ID NO: 2195 - protein, 50 aa, Zea mays subsp. mays
  misc_feature (1)..(50): Ceres Seq. ID no. 15225634
MDRKAEVKRIIEDVINSMSDDEGEEGSEDEAEDDGKADNLKSEPDGGEEK

SEQ ID NO: 2196 - DNA, 1204 bp, Zea mays subsp. mays
  misc_feature (1)..(1204): Ceres Seq. ID no. 15225677
tcttctcccctgtctgcttctgtggactgtggatgtgctcactgcttagtttggtgggttctgctcaccaatctcgctcgcagtatacgaagcctccatagtccatcatcctactgcactcggagaccacggacttggaataccaccctcgcccacagtcccacaccaggaaccatgaggaccatcatggcgaagagcccccacgactcctccttctcccggaggaacttcaagtggccggttcttgtcaagagcagcagccatggcgccgcagccggcggcggggaggacagctccggcaagggcgcggaggacgccgacgaggacgaggcgaccatggcgttctcctccagctgcccgtcgttccactcggaggacttcgtatccccgccgcccaatcccaaggcgccacctccaccgaagcagcggggcaagaggtgccgcgcggcggtctcccggctgcgcgcggcgcttgccgcggccatcgccggacggcaccgacaggtcgggctcggagcgcggatcacgggcacgctctacggccgccgccgcggccacgtgcacctcgcgttccaggtggacccgcgcgcgtgccccgcgctgctgctcgagctcgccgcgcccacggcgtcgctggtgcgcgagatggcctcgggcctcgtccgcatcgcgctagagtgcgaccgcgccaagggcgcctgcgccttcccgagcgccgcggccgcaaccaatggcggcgccggtgggtgcaggaagctggtcgaggagaaggcgtggcgcgcgtactgcaacggcaagggctgcgggtacgcggtgcggcgcgagtgcggtgccgcagacctgcgcgtgctgcgcgcgctggagcccgtctctatgggcgcgggcgtcataccggcggcgtgcggtggcggcgagggggacgtcatgtacatgcgcgctcgctttgagcgcgtcgtgggctcccgcgactcggaggcattctacatgatgaaccctgacagcagcaccggcggcaatggcggcccggagcttagcatctacctccttagagtttgattgcacatttaacttcgcggcgcatgcgtcagacaccgtgatcttgcatgctaacctgctgtctttctagtacatttgatttcttcgtgcttattattgctctggtggttgtgaaaaatgcttgtcagtttagactgcagaacgaaac

SEQ ID NO: 2197 - protein, 351 aa, Zea mays subsp. mays
  misc_feature (1)..(351): Ceres Seq. ID no. 15225678
SSPLSASVDCGCAHCLVWWVLLTNLARSIRSLHSPSSYCTRRPRTWNTTLAHSPTPGTMRTIMAKSPHDSSFSRRNFKWPVLVKSSSHGAAAGGGEDSSGKGAEDADEDEATMAFSSSCPSFHSEDFVSPPPNPKAPPPPKQRGKRCRAAVSRLRAALAAAIAGRHRQVGLGARITGTLYGRRRGHVHLAFQVDPRACPALLLELAAPTASLVREMASGLVRIALECDRAKGACAFPSAAAATNGGAGGCRKLVEEKAWRAYCNGKGCGYAVRRECGAADLRVLRALEPVSMGAGVIPAACGGGEGDVMYMRARFERVVGSRDSEAFYMMNPDSSTGGNGGPELSIYLLRV

SEQ ID NO: 2198 - protein, 293 aa, Zea mays subsp. mays
  misc_feature (1)..(293): Ceres Seq. ID no. 15225679
MRTIMAKSPHDSSFSRRNFKWPVLVKSSSHGAAAGGGEDSSGKGAEDADEDEATMAFSSSCPSFHSEDFVSPPPNPKAPPPPKQRGKRCRAAVSRLRAALAAAIAGRHRQVGLGARITGTLYGRRRGHVHLAFQVDPRACPALLLELAAPTASLVREMASGLVRIALECDRAKGACAFPSAAAATNGGAGGCRKLVEEKAWRAYCNGKGCGYAVRRECGAADLRVLRALEPVSMGAGVIPAACGGGEGDVMYMRARFERVVGSRDSEAFYMMNPDSSTGGNGGPELSIYLLRV

SEQ ID NO: 2199 - protein, 289 aa, Zea mays subsp. mays
  misc_feature (1)..(289): Ceres Seq. ID no. 15225680
MAKSPHDSSFSRRNFKWPVLVKSSSHGAAAGGGEDSSGKGAEDADEDEATMAFSSSCPSFHSEDFVSPPPNPKAPPPPKQRGKRCRAAVSRLRAALAAAIAGRHRQVGLGARITGTLYGRRRGHVHLAFQVDPRACPALLLELAAPTASLVREMASGLVRIALECDRAKGACAFPSAAAATNGGAGGCRKLVEEKAWRAYCNGKGCGYAVRRECGAADLRVLRALEPVSMGAGVIPAACGGGEGDVMYMRARFERVVGSRDSEAFYMMNPDSSTGGNGGPELSIYLLRV

SEQ ID NO: 2200 - DNA, 1000 bp, Zea mays subsp. mays
  misc_feature (1)..(1000): Ceres Seq. ID no. 15225689
aaggggattaatgttgggtattgccggggtttttccatgcaggacttgttaaaaggcgggccaggaaattttatttggcccccttttggggggaattgggttcgggggcccccctcgrgttmagctwygtwggggcccccccccccccccctccctgcgacgtcmrgaactgaaggaagtcatagcaaagcaacaagagctgggttttgacccacctgagctaccgcctggctatctatcagaaattggggatcaatgcattgaaaataaaaataataggaaaactcaattcagggattctcattttggaaatcgtttcaataataacaaaagatcaaggtatgagcgtggaggttttcagtctaaaagatctaaggtatggaaccgtactcctcacgctgatcacgggatggtcaagagcagagaaccaaccctcctgcagaagcttcttagctctgatatcaagagggataaacgtagacttattcacgtgttcagattcatgaccttgaacaatttctttaaggactggcctgacaggcctttacagtttcctagtgttaagatgaatcagattgaaataggaagcaatattagcacagatgatttggagaatgctgggatgtccaaagacagcatccttggtgtaaacgaaaatggtgattggaaagagttgagctcgattgatgaagaggataccgatagcgccaaccacaatgatgaagacgtcgatgatgacagtgttgacagcagcattgaggatggggccgaggaggacgggtacgaagagcagtttaatgagcctgaagatgatacggcagtctgaaaatttgactgagccgggtatccacatcaaaaagacaaagcgcttctccttgagtagagtttttgcacaacacattctgtagctcttcgcatattccagttataggagagggtctggtgtttaaagaaactttgtactttgttgtagttgaattgttatgttatcgccgggaat

SEQ ID NO: 2201 - protein, 138 aa, Zea mays subsp. mays
  misc_feature (1)..(138): Ceres Seq. ID no. 15225690
MVKSREPTLLQKLLSSDIKRDKRRLIHVFRFMTLNNFFKDWPDRPLQFPSVKMNQIEIGSNISTDDLENAGMSKDSILGVNENGDWKELSSIDEEDTDSANHNDEDVDDDSVDSSIEDGAEEDGYEEQFNEPEDDTAV

SEQ ID NO: 2202 - protein, 107 aa, Zea mays subsp. mays
  misc_feature (1)..(107): Ceres Seq. ID no. 15225691
MTLNNFFKDWPDRPLQFPSVKMNQIEIGSNISTDDLENAGMSKDSILGVNENGDWKELSSIDEEDTDSANHNDEDVDDDSVDSSIEDGAEEDGYEEQFNEPEDDTAV

SEQ ID NO: 2203 - protein, 86 aa, Zea mays subsp. mays
  misc_feature (1)..(86): Ceres Seq. ID no. 15225692
MNQIEIGSNISTDDLENAGMSKDSILGVNENGDWKELSSIDEEDTDSANHNDEDVDDDSVDSSIEDGAEEDGYEEQFNEPEDDTAV

SEQ ID NO: 2204 - DNA, 847 bp, Zea mays subsp. mays
  misc_feature (1)..(847): Ceres Seq. ID no. 15225841
tctctcttgtcacgcgaaaatcatccagctgttcacctccgatgcgagaaaggcaaacacataacagatatcgaattcgcaagctatggaaatcctgtccaagactgcagagggtctggacagagctgccaaggaagttgccacgcagaaatatctgaattcgttgtgaagaatgcttgcctaggaagaaggaagtgcgtccttccagtatgggcaaacaagtttggaggtgacccatgccctagaattgaaaaatccctttctgttgcggcgatctgtggatgaagaggagatgaaccacttcaatcaagttgtgaataatcaacaatgcaggagattccataatcatatcacagattgaaaatgaatataagctggttgaggctgcattttccattcaatcgggccaccttattatgttaactgggcagcggcaatggcagtaagtctatgggatagtagcttatattgggcccactacataaccctggttgtcaagcttagacttcatcaccttctacacgtctcagggctcaggctgtacactagagtagcaaagctggacagttattaccatgtttccgtgtacatgtccaagaagtacacgcttcaggcttccagtcaatgaaagtaagagaaacccagacgaaccacttagggcttgttcggttattcccaaaacacatggattggatgagattggaaaaaaatgagaagaggtttgacttgtttgggtttcaaacccatccaatcccactcaatccacatggattgagagctaaccgaataagcccttatgtggcgtcgcagatcaaatcttcagtggttctcattctgtatctgatgg

SEQ ID NO: 2205 - protein, 94 aa, Zea mays subsp. mays
  misc_feature (1)..(94): Ceres Seq. ID no. 15225842
SLLSRENHPAVHLRCEKGKHITDIEFASYGNPVQDCRGSGQSCQGSCHAEISEFVVKNACLGRRKCVLPVWANKFGGDPCPRIEKSLSVAAICG

SEQ ID NO: 2206 - protein, 74 aa, Zea mays subsp. mays
  misc_feature (1)..(74): Ceres Seq. ID no. 15225843
MKVRETQTNHLGLVRLFPKHMDWMRLEKNEKRFDLFGFQTHPIPLNPHGLRANRISPYVASQIKSSVVLILYLM

SEQ ID NO: 2207 - protein, 63 aa, Zea mays subsp. mays
  misc_feature (1)..(63): Ceres Seq. ID no. 15225844
MAVSLWDSSLYWAHYITLVVKLRLHHLLHVSGLRLYTRVAKLDSYYHVSVYMSKKYTLQASSQ

SEQ ID NO: 2208 - DNA, 864 bp, Zea mays subsp. mays
  misc_feature (1)..(864): Ceres Seq. ID no. 15225884
acccgatcaggccctcacacacagtcacagcagctgagcagccccgctctccagtctccacacctcctgcggccggcccgacggccccccgacaccgaacatgaagagggagagacgtcacggcatgagcgcgcggctaccgaccatgctgctggcaatgcttctgctgctggcgaccgagctcgcctccttcggctgctgcggccacgggattcccagagcggacgtggcggcgtggaggcacgggcgggtggccgtgccggcggcggcgacgacgacgacagcaggcgcgcgcgctactacgtcgccctcccccacggcagcccgggacgacgccgaggcggcgctcggcgagtccaagaggctggtgccgcagggctccaacccgctgcacaactaggagcgtgagagagcgaggaagcaaagcaggcgcgggcaggttcttcgttcggctagctttcatgtttttttttatttactctctcgctaggtcacacacaggcacacagccattgatgtgcgcctgtaactgtaattagctagcgacgcaacacacggcagcagtagggctagctatggagtctggatccaatccagcaaaacacggcaagcagagtgtacagtacatgcatgcatgcatgcttcttttgccatgcatggtctttccgatcaaggatttgatgattcagtagatagccagcaacgaattgagagttccggccagcactcccagcagtcagtctagggtgtttagcgtcatttccgctcgccgcgcgcgcggcgacgtcggagcgagcaagcggacatgggaggccggtcaagctggcgctttgtcgcgcctcgctgaagctatgatttcgagtc

SEQ ID NO: 2209 - protein, 135 aa, Zea mays subsp. mays
  misc_feature (1)..(135): Ceres Seq. ID no. 15225885
TRSGPHTQSQQLSSPALQSPHLLRPARRPPDTEHEEGETSRHERAATDHAAGNASAAGDRARLLRLLRPRDSQSGRGGVEARAGGRAGGGDDDDSRRARYYVALPHGSPGRRRGGARRVQEAGAAGLQPAAQLGA

SEQ ID NO: 2210 - protein, 99 aa, Zea mays subsp. mays
  misc_feature (1)..(99): Ceres Seq. ID no. 15225886
MKRERRHGMSARLPTMLLAMLLLLATELASFGCCGHGIPRADVAAWRHGRVAVPAAATTTTAGARATTSPSPTAARDDAEAALGESKRLVPQGSNPLHN

SEQ ID NO: 2211 - protein, 91 aa, Zea mays subsp. mays
  misc_feature (1)..(91): Ceres Seq. ID no. 15225887
MSARLPTMLLAMLLLLATELASFGCCGHGIPRADVAAWRHGRVAVPAAATTTTAGARATTSPSPTAARDDAEAALGESKRLVPQGSNPLHN

SEQ ID NO: 2212 - DNA, 1164 bp, Zea mays subsp. mays
  misc_feature (1)..(1164): Ceres Seq. ID no. 15225903
gcatctccccatccgccattgcccttgactcgtgctccccgcctctcttctcccccgagaccccccccccccccctctctctgtgctcgtgctccctcttcctgctcttccttctgctcggcagccatggccagcgcgctatgcggcggcggcagcggcagcgtggcggcgccgtgcggggacttgggcgccgcggcggcgctcgcggagtctttgccgatgggcgccgggtaccgcgccaagagctccttccccgccgggagggtggcgctggcggacaggcccctgcgccggggcctccaagtggcggcggctgctggacagatgaacgggaacctgacgattggcaaggccatgaggtggtgggagaaggtgacgcaccccaatatgagggaggtcgagtccgcgcaagacctcgccgactccctgctcaacgccggcgacaagctcgtcgtcgtcgacttcttctcccccggctgcggtggctgccgcgctctccaccccaagattgcgcagttcgctgagcggaatccggacgtgctgttcctgcaagtcaactacgagaagcacaagtccatgtgctacagcctccatgtccatgtcctccctttcttcaggttctacaggggagcccagggcagggtcagcagcttcagctgcacaaatgcaaccatcaagaagttcaaggacgccctcgcaaagcactcgccggacaggtgcagcctcggcccggcgcgggggctcgaggaggcggagctcttggctctggcggcaaacagggacctggaattcacctacaacgagaagccgacgctggtgccgatcgccgaggctatccagatggaagctgcctccattggcggcccatggatgccattgcccgcggccgcgacgcagccgctcactctgggatctgagaatggctcgctgatcccctccggaagatagtaactcgagaccaggccgaacccggccatttctgtacagattttcctcttttgttgtgtgttgtattgagttcgagaggcagaatcgcaggctaaggttttagtttttgtaaacctgccgaagctctattgtgatcgtgttgctgcaaccagtcgttgctcatcatggtaatccttgctttaatgaacaatgggatgatgcctccccagatcctcc

SEQ ID NO: 2213 - protein, 315 aa, Zea mays subsp. mays
  misc_feature (1)..(315): Ceres Seq. ID no. 15225904
ASPHPPLPLTRAPRLSSPPRPPPPPSLCARAPSSCSSFCSAAMASALCGGGSGSVAAPCGDLGAAAALAESLPMGAGYRAKSSFPAGRVALADRPLRRGLQVAAAAGQMNGNLTIGKAMRWWEKVTHPNMREVESAQDLADSLLNAGDKLVVVDFFSPGCGGCRALHPKIAQFAERNPDVLFLQVNYEKHKSMCYSLHVHVLPFFRFYRGAQGRVSSFSCTNATIKKFKDALAKHSPDRCSLGPARGLEEAELLALAANRDLEFTYNEKPTLVPIAEAIQMEAASIGGPWMPLPAAATQPLTLGSENGSLIPSGR

SEQ ID NO: 2214 - protein, 273 aa, Zea mays subsp. mays
  misc_feature (1)..(273): Ceres Seq. ID no. 15225905
MASALCGGGSGSVAAPCGDLGAAAALAESLPMGAGYRAKSSFPAGRVALADRPLRRGLQVAAAAGQMNGNLTIGKAMRWWEKVTHPNMREVESAQDLADSLLNAGDKLVVVDFFSPGCGGCRALHPKIAQFAERNPDVLFLQVNYEKHKSMCYSLHVHVLPFFRFYRGAQGRVSSFSCTNATIKKFKDALAKHSPDRCSLGPARGLEEAELLALAANRDLEFTYNEKPTLVPIAEAIQMEAASIGGPWMPLPAAATQPLTLGSENGSLIPSGR

SEQ ID NO: 2215 - protein, 242 aa, Zea mays subsp. mays
  misc_feature (1)..(242): Ceres Seq. ID no. 15225906
MGAGYRAKSSFPAGRVALADRPLRRGLQVAAAAGQMNGNLTIGKAMRWWEKVTHPNMREVESAQDLADSLLNAGDKLVVVDFFSPGCGGCRALHPKIAQFAERNPDVLFLQVNYEKHKSMCYSLHVHVLPFFRFYRGAQGRVSSFSCTNATIKKFKDALAKHSPDRCSLGPARGLEEAELLALAANRDLEFTYNEKPTLVPIAEAIQMEAASIGGPWMPLPAAATQPLTLGSENGSLIPSGR

SEQ ID NO: 2216 - DNA, 869 bp, Zea mays subsp. mays
  misc_feature (1)..(869): Ceres Seq. ID no. 15225911
aaaacatccggcatccgaacgtggttggcttgcgcgggtactactgggggccgaccccgcatgagaagctcatcttgtcagactacgtcgcgccggggagtcttgcaagcttcttatacgatcgaccaggaagaagaggtcctccactgacctgggcgcagcggctgaagatcgcggtggacgtggcgcgcggcctcaactacctccacttcgaccgcgccatgccccacgggaacctcaaggccaccaacgtcctgctggacgggctggacctgaacgcccgcgtggccgactactgcctgcaccgcctgatgacgcagtcgggcgtggcggagcagatcctggacctgggcgtgctgggctaccgcgccccggagctggccgcgtccaagaagccggcgccctcgttcaaggccgacgtgtacgccttcggcgtcgcgctgctggagctcctgacgggccggtgcgccggggacgtcgtctcggggcccgagggcgccgccggcgtcgacctcaccgactgggtccggctgcgcgtggcggaagggcgggggtccgactgcttcgacgccgccatggcctcggactctgagagcaacccgcaggctgtgaagggcatgaaggaggccctgggcattgcgctgcggtgcatcaggccggtctccgagaggccggggatcaaatctgtgtacgaggatctttcgtcgatctagtcggtagctagcctcgtcgcgtagcttttagattaacactgcgtgttaaaattgtgtgcgtgttcgtcttgaactcgtagaactgcgtagcgaatccaagtgttattatggcctcaccttgatgccagcaatttgaaatgaagaatgtgttgtatt

SEQ ID NO: 2217 - protein, 236 aa, Zea mays subsp. mays
  misc_feature (1)..(236): Ceres Seq. ID no. 15225912
NIRHPNVVGLRGYYWGPTPHEKLILSDYVAPGSLASFLYDRPGRRGPPLTWAQRLKIAVDVARGLNYLHFDRAMPHGNLKATNVLLDGLDLNARVADYCLHRLMTQSGVAEQILDLGVLGYRAPELAASKKPAPSFKADVYAFGVALLELLTGRCAGDVVSGPEGAAGVDLTDWVRLRVAEGRGSDCFDAAMASDSESNPQAVKGMKEALGIALRCIRPVSERPGIKSVYEDLSSI

SEQ ID NO: 2218 - protein, 163 aa, Zea mays subsp. mays
  misc_feature (1)..(163): Ceres Seq. ID no. 15225913
MPHGNLKATNVLLDGLDLNARVADYCLHRLMTQSGVAEQILDLGVLGYRAPELAASKKPAPSFKADVYAFGVALLELLTGRCAGDVVSGPEGAAGVDLTDWVRLRVAEGRGSDCFDAAMASDSESNPQAVKGMKEALGIALRCIRPVSERPGIKSVYEDLSSI

SEQ ID NO: 2219 - protein, 133 aa, Zea mays subsp. mays
  misc_feature (1)..(133): Ceres Seq. ID no. 15225914
MTQSGVAEQILDLGVLGYRAPELAASKKPAPSFKADVYAFGVALLELLTGRCAGDVVSGPEGAAGVDLTDWVRLRVAEGRGSDCFDAAMASDSESNPQAVKGMKEALGIALRCIRPVSERPGIKSVYEDLSSI

SEQ ID NO: 2220 - DNA, 2230 bp, Zea mays subsp. mays
  misc_feature (1)..(2230): Ceres Seq. ID no. 15225944
tgttttagggatttagtggattcataccatacttgatgtatgtgttttgtatatatatctagattaatcatcatccacttgaatatagacattaaaaccaagagctgaaacgactactattttaggacggatgtagtgttttttttttcttctttacttttttaataagcttatgtcccaatggaatgttttgccttcttttaagtttcttgacaaggctactattttgtcacattggtgcatgtaccttttaagtgattactaaaactctacgagactttagtttatttctattaaattttcccatccatacatagtcctcgtagcaactaatgatagttgtgctctgatttgatttcttgtctgagcagaaaaagaggcaccaccaactagaaattgttctatgtggaagcagcaagttgttgtctcatggccacatgcccacatggtcactgctgttggtggccacaacggttatccagggggcaaggtgttcgtttctgcggaacaggtcagggagaatctgtcataagcgctgatagtcaaattgtcaaagattggtccattctcctttccctgctcactcattatagcttcagtctgttccaaatttggcagttaggtcatggagattactctgcctcacgcacaaaagtatttcgcatggtgaatactcttggagtcaacaatgaagccaagcaaacaatacaagtactgcaagctgaactaaatgaaacaaaagagaggctgcacacagttgaagaactgaaaggacaaactgcacattatttgtattgttcatgaccctatggatttctgttttaatttatttccatatgtagaaagttgtttactacttctgtttactgtaatctacaatgtatttgcgtcgctatggtaattccttgtagttataatcgtgctttgatcatgatacattaggttcagaagatatgttgtttcgagtttggtcatatttatctgattttttgtatttatatgttatataaaatatgtagcgaacaacaatccctgaaatctggaaccatagttggctcctgaagaatcttcctgctgatctgatggacgatgatagcatgagcaaccaatatgaggagcttgctcagcaattgcaaaccatggatcagatcatgcagcttttaacacaggccaccataccacctacctatacgagatgaattctatgtgtttgtactttccaattcaacctgccttcaaaatttagatgtggtgttctatgaaattttggcattatgatcattattattgctcgattgatgcatgtgttaatttgattgcagcacaccataatatatagggatcgacggacccaccaaggcctaggccgagacccctcgattcagagaatcaaacccaggaacgagtttcgtctcttcaaattccacgcgcacgcgcgccgcaacggatagcccgcggtccgtcgtgtcccgtcgcattaactcccgcctgcggcccgcttatcctgtccaactgacacaagccaacgggcgccgctccacctcctcagggtaagcgcatcaaatggtgtgtctctctccctctcctcttttgttcatccacaggtagcagggaagaggtatcccctcggactcccttccgtgcaaaggaagtaaggcccgagcctcctactgatcaagggttcgaaggttaaaccctcggcatggttcgataactgccccagagcacacgggttccgagccctttactgatcaggggttcgtaggttggcccctcgaaaaggtccaacaactgccccagagcacagagtcagggatgactatgggtacgtccgtacatggccgaggctcgagctacaatcccgaggtaccctaagacatatccgagacccctgagagcgattcgtgactgtatcccgtcggagggaggcatcgagccctcggaccccatcgaacggatccgggatcaggcgaatcacccgcaggtacttttggggcgtgtcttcggaccactagccgacccctatgaaacgaggctcgggcctccgctcggatcacccattaacagctcaccagagaagtcatgctcgttgcccaccgagggtagaatgacgctttttcccctcttcctccttgcaggaaggcgatgaagaggcatatcattaaaaagtcaaggtgtttctcaatcgtcctctcgccctgtgcggaggctcgagggggggcccggtact

SEQ ID NO: 2221 - protein, 124 aa, Zea mays subsp. mays
  misc_feature (1)..(124): Ceres Seq. ID no. 15225945
MATCPHGHCCWWPQRLSRGQGVRFCGTGQGESVISADSQIVKDWSILLSLLTHYSFSLFQIWQLGHGDYSASRTKVFRMVNTLGVNNEAKQTIQVLQAELNETKERLHTVEELKGQTAHYLYCS

SEQ ID NO: 2222 - protein, 103 aa, Zea mays subsp. mays
  misc_feature (1)..(103): Ceres Seq. ID no. 15225946
MAEARATIPRYPKTYPRPLRAIRDCIPSEGGIEPSDPIERIRDQANHPQVLLGRVFGPLADPYETRLGPPLGSPINSSPEKSCSLPTEGRMTLFPLFLLAGRR

SEQ ID NO: 2223 - DNA, 964 bp, Zea mays subsp. mays
  misc_feature (1)..(964): Ceres Seq. ID no. 15226148
ctttcccccctcccgttcccmcyytcttgwgtykarwcagctacgtaggccccccccccccgtcgaagcgtcgtctctctcggcacggagcctagtgcccggcctcgtgagatccgaaattcagaatcgaggatggcgacgaccgcgactaggcggtggtggaggcggcacgacggcggcgacgatgacccagacgacctcgtccccatggacacccaagagcaagaagagctggtccggtctctggaggctaagcaggcgcagcaaggccgccgttggaggcgcgtcttcgcggggttcctcctaggttacgcggccttccttgtctactccagtttccatcatgcttggtctccctgggagctgcggtaccatgcttacttcatggaagatttgcctgcaccaatggtcataattgcagattggatagctgctctagcatgcctatttgctgtgaaaggattactacagaattcaggcccatcaaagaagtggatgtggtattcttgctatgttggcattttggtagccatcttttggacatactacatcttgaggttgccaagaattcgatgggatgttgcatggctcccactcggtcctttgatggctggtgcattgagcctgtatgtggaccatgtgctgctggagtcaatgcaagatatcagcacattgagaagttacatgtataacttcaaggccttgtagttttgagcatagtttcccttgcacctatatgcagctatatgtggaacaggttcaggtcatttctccttttttttagtggcagagttgcggtggtaccttgttaaatggtgtgttagcatgaatttttaacctcagagaatacttgtgcatcacttccgctctgtggcgggtgtatgtacaagctgtggtgccaataggcaccgcggctgtttgaawtaaaaaaaaaaaaaaaaaagaattcctgtgttmarcccgg

SEQ ID NO: 2224 - protein, 191 aa, Zea mays subsp. mays
  misc_feature (1)..(191): Ceres Seq. ID no. 15226149
MATTATRRWWRRHDGGDDDPDDLVPMDTQEQEELVRSLEAKQAQQGRRWRRVFAGFLLGYAAFLVYSSFHHAWSPWELRYHAYFMEDLPAPMVIIADWIAALACLFAVKGLLQNSGPSKKWMWYSCYVGILVAIFWTYYILRLPRIRWDVAWLPLGPLMAGALSLYVDHVLLESMQDISTLRSYMYNFKAL

SEQ ID NO: 2225 - protein, 166 aa, Zea mays subsp. mays
  misc_feature (1)..(166): Ceres Seq. ID no. 15226150
MDTQEQEELVRSLEAKQAQQGRRWRRVFAGFLLGYAAFLVYSSFHHAWSPWELRYHAYFMEDLPAPMVIIADWIAALACLFAVKGLLQNSGPSKKWMWYSCYVGILVAIFWTYYILRLPRIRWDVAWLPLGPLMAGALSLYVDHVLLESMQDISTLRSYMYNFKAL

SEQ ID NO: 2226 - protein, 107 aa, Zea mays subsp. mays
  misc_feature (1)..(107): Ceres Seq. ID no. 15226151
MEDLPAPMVIIADWIAALACLFAVKGLLQNSGPSKKWMWYSCYVGILVAIFWTYYILRLPRIRWDVAWLPLGPLMAGALSLYVDHVLLESMQDISTLRSYMYNFKAL

SEQ ID NO: 2227 - DNA, 1949 bp, Zea mays subsp. mays
  misc_feature (1)..(1949): Ceres Seq. ID no. 15226156
gccgaccgccgactcccgccgcgaaatcctgcgtcagaagcgccgattctcggacgtcctccggatctgagacaccgagcgcactacgagctgtagctgtagtgacctgaaaatgagtgagggggatgctactcagcttgcccttgagaaaggattaccacaagtgtctaatgatgatggttcgagtagtcctgcaactatgcacaagttgaaagttgacacagaagatgctggaagcaaaattgaatcacccactccagagaagcttgaatctagaagcaaaggggttgttgtgagttcgttggcaaggaatttacttgcagagaggtacaaagatagatttgcaaatcagttcctggaagatgagggtgacatagatgatgaagactataatgacagtatttcgccaggcatgagccgatctcagagatcaagaagcattgaacttctggagaagcacaaggatttactgaatctttttaatagaatggagagttctataaggttgctgcgcctacggaagaggatggctacatttaataatattgccacccaggtggaaatactcgcaaaaaggaagttatcgtactgtcatttggcccaaatgaagtatttgtttccagaagcaatccagattaagagggtacttctacatgacgagaaaagcctatgcatgtatgctgatatggaaatcatacttgtaatggatgttgtggaatacacaagtcctgatcactctccatccatggcaatttgcgatgctttttactcgaagcttttgacatttttggatgctcatcataagggtacagacattccagaggcaatcttaccagaaccctttaacttgaggtcaaggggccagttaaatcttgaggcatcaaataatggacatgctgctgagccacatctgcaaggcaccactaaggatggattctcaaatgcttcccacttcccacaatcttttcgaaagctaatgtcccagaaagtcattactgatggagctgaaagaactcaattgctacttgatccaacaaaactgagctctgtgagtgcttatgatacagaaggaacaaacagaagccctaaaaagcaagacaaacatgcttcagttacagtgaactctgaaatttctgctactccaagccgtcatttgatctctcgttgtcaagagggtacgccaaaacaagagacctcagaatcaccattgttggctcaaacaccagcaactcagacacccaaaaggcaattgcccactccacttgagaaacttgaggccacatgtggacacatttctgaaccacgttcagctagttctgcccgcagatcactaaatacatctttaaaatttgaagggggaagcccttcttatcatgatagaatggaacatgtggctacatctaaaattggaattttctcagaagattcatctagtttcaacaagtcattagaggagaatggtcctgtcttctttactgatagagagaaaatcaatctggcagacccagtgggtgtccaggaaaagatggcttcgttacgttccacatttggcatcgtctgcgatatttctcattctatcaagaattcgctaattacaaaacaggagcttttccataatattcttgccaacaacttggagatagaacagatgggagagatagaagagcagctacatattttagaggatctggctcccgattggatatctaaggtgataaatggaggagaaatattttacagctttgaaactatagcagatcagaattcagtgtgggaaaggcttgtagaagctgtgtgaggtgtggaatagctgggattggtttaaagctaaagaatcagccacatagtactatgtatgtaacgctaacggaacccatcaaacagccacattttctcataatggaatcctcaggattgctcttgtcttattcaatttcaattttttcttc

SEQ ID NO: 2228 - protein, 561 aa, Zea mays subsp. mays
  misc_feature (1)..(561): Ceres Seq. ID no. 15226157
MSEGDATQLALEKGLPQVSNDDGSSSPATMHKLKVDTEDAGSKIESPTPEKLESRSKGVVVSSLARNLLAERYKDRFANQFLEDEGDIDDEDYNDSISPGMSRSQRSRSIELLEKHKDLLNLFNRMESSIRLLRLRKRMATFNNIATQVEILAKRKLSYCHLAQMKYLFPEAIQIKRVLLHDEKSLCMYADMEIILVMDVVEYTSPDHSPSMAICDAFYSKLLTFLDAHHKGTDIPEAILPEPFNLRSRGQLNLEASNNGHAAEPHLQGTTKDGFSNASHFPQSFRKLMSQKVITDGAERTQLLLDPTKLSSVSAYDTEGTNRSPKKQDKHASVTVNSEISATPSRHLISRCQEGTPKQETSESPLLAQTPATQTPKRQLPTPLEKLEATCGHISEPRSASSARRSLNTSLKFEGGSPSYHDRMEHVATSKIGIFSEDSSSFNKSLEENGPVFFTDREKINLADPVGVQEKMASLRSTFGIVCDISHSIKNSLITKQELFHNILANNLEIEQMGEIEEQLHILEDLAPDWISKVINGGEIFYSFETIADQNSVWERLVEAV

SEQ ID NO: 2229 - protein, 532 aa, Zea mays subsp. mays
  misc_feature (1)..(532): Ceres Seq. ID no. 15226158
MHKLKVDTEDAGSKIESPTPEKLESRSKGVVVSSLARNLLAERYKDRFANQFLEDEGDIDDEDYNDSISPGMSRSQRSRSIELLEKHKDLLNLFNRMESSIRLLRLRKRMATFNNIATQVEILAKRKLSYCHLAQMKYLFPEAIQIKRVLLHDEKSLCMYADMEIILVMDVVEYTSPDHSPSMAICDAFYSKLLTFLDAHHKGTDIPEAILPEPFNLRSRGQLNLEASNNGHAAEPHLQGTTKDGFSNASHFPQSFRKLMSQKVITDGAERTQLLLDPTKLSSVSAYDTEGTNRSPKKQDKHASVTVNSEISATPSRHLISRCQEGTPKQETSESPLLAQTPATQTPKRQLPTPLEKLEATCGHISEPRSASSARRSLNTSLKFEGGSPSYHDRMEHVATSKIGIFSEDSSSFNKSLEENGPVFFTDREKINLADPVGVQEKMASLRSTFGIVCDISHSIKNSLITKQELFHNILANNLEIEQMGEIEEQLHILEDLAPDWISKVINGGEIFYSFETIADQNSVWERLVEAV

SEQ ID NO: 2230 - protein, 461 aa, Zea mays subsp. mays
  misc_feature (1)..(461): Ceres Seq. ID no. 15226159
MSRSQRSRSIELLEKHKDLLNLFNRMESSIRLLRLRKRMATFNNIATQVEILAKRKLSYCHLAQMKYLFPEAIQIKRVLLHDEKSLCMYADMEIILVMDVVEYTSPDHSPSMAICDAFYSKLLTFLDAHHKGTDIPEAILPEPFNLRSRGQLNLEASNNGHAAEPHLQGTTKDGFSNASHFPQSFRKLMSQKVITDGAERTQLLLDPTKLSSVSAYDTEGTNRSPKKQDKHASVTVNSEISATPSRHLISRCQEGTPKQETSESPLLAQTPATQTPKRQLPTPLEKLEATCGHISEPRSASSARRSLNTSLKFEGGSPSYHDRMEHVATSKIGIFSEDSSSFNKSLEENGPVFFTDREKINLADPVGVQEKMASLRSTFGIVCDISHSIKNSLITKQELFHNILANNLEIEQMGEIEEQLHILEDLAPDWISKVINGGEIFYSFETIADQNSVWERLVEAV

SEQ ID NO: 2231 - DNA, 2398 bp, Zea mays subsp. mays
  misc_feature (1)..(2398): Ceres Seq. ID no. 15226167
atggtatagatcgagccacagaggttagataaaagatcaacactaaaggcagtaattacatgatgccatgatcatataagcaaagattaatttaatctactatgaagcagcaaaaacgagtgtttattccaagaatttgtagggaggtattaaaaaatacataaaatatatatgcttagtcgataaagaagctttttatacttataaaatatttatacctagattggttttgtctaggtttgtcctcagccaaacctttttagcttttactgtcgacatctaaaattttacatagattgacaatacaagcaaggttgttgacattcctaaattcattgtgaaaactacttttatgatatataactcttccattgaatataatatatttttatggatgctgccagacaaaattagagtagctagtttgagtttggacaaacttagatggacctacatctgtgatcggatgaagtaatttattcaatctttacattgaatttcacttattatttcaactatagctgagttggactccttttcttttttttaaaaaaaaacattgactaaatttggatttcacctttttattctattaacttatatgtaccaaatattacagctcctggatgacagagcagataagaagcgtgcaggcttcatcgttctcatttcggatggtctagacggccagttcaaatggggagatgagagtatcacccccacggatcccatccgaggcctcctccgaaagtacccagtccacacctttggtttgggcaaggctcacgacccaagggcactgcactatatcgctaacatatcctacggaatctattcctccatcaccgacaacctcgagaacaagatcatagaggcatttgccgtctgcttagctgggttcaagaccgtagtagccgtcgacgtctgtgttgacatcaggtcaagcagtttgctgataacaaagatcgactctgggggttacatactccgggggagtaccggaggcatcttggttggcacactctatgctggggaggtgaaggacttcattgtctacttttcatatcataccgggagttggtcgagtggttaccatacaactttgaatgggattgctgctagtgtcacgtacaaggaagcgccgggcaggcagtcaactgccactgactcttgctcagtgtcactcccgattcacgtgaccgacaccgtgtatcctcctgaaaacccctgcccaccctaccccatggtcctgcagcagatggtgcggttcaaggtgctagacttgcttataagcgtcctgaaagaattcctggtcctgaagggggaggctgctagtgccgtccacgggaaggaaggaggagatgacccggtcttgcaggccatcgcagcgagcttgctgcagaggaagtggaaagagttcaagcagtccgatgaatcctggaaagaagccccgaggaacttccttgacctgggaggcatcgacaaggacatcaacaccatggtggatatcctggagcagggcttgggtgttggatgcatccactcatggctgtcgagctatcagatgcagcgcgcgacaattacaggcttgccaggatctcacatggttgcaaccggccaattccgcacgccagcgatgaacgcaatggtccaggaggcccataggcatttggccaaggaagcatctgcccaagatgcggggacgtcaattgtctgcaagcgcgccgttgagcttctagatggggtcaacaagcgattcgacctctggtgcaagctggaccatgacttgccgcgcactaaccaaccgtcatcgcaccaagaagaaggccatgagtcccgcgacatcaccgacgtcctgcatgggaacatcaaccgagcgaggcagcatgacatatacatggtacgtatatacatatctatggatctgaattcattaaggtcccattctgtgtttgtcttggatgcaggctgccgatcacgcgatcaagcaatggcggagcttcctcacatccgtggagaagacacatggccatgggccggacaagtaggcgcatgatgaggccaccggcagctaccacaaaccccagaacacagcgtgagtggtgttgtgtcgatgcagactcagacatactacaccatataaataaataaatttaatgagcgagaggccctgacaccagtgcctccgccgactccctccgatcctgagaataatatttgtgcgtactgtccctccgtcctcatggccattatattggtcatttgatttcccgtgtgttcactactgttgttctctaattactagtcctgatcagttccggacgactaagctgtaataatgtatcttttattttcttttttatattaatataaaagaccatatgtgtatgcgtcggtc

SEQ ID NO: 2232 - protein, 484 aa, Zea mays subsp. mays
  misc_feature (1)..(484): Ceres Seq. ID no. 15226168
MYQILQLLDDRADKKRAGFIVLISDGLDGQFKWGDESITPTDPIRGLLRKYPVHTFGLGKAHDPRALHYIANISYGIYSSITDNLENKIIEAFAVCLAGFKTVVAVDVCVDIRSSSLLITKIDSGGYILRGSTGGILVGTLYAGEVKDFIVYFSYHTGSWSSGYHTTLNGIAASVTYKEAPGRQSTATDSCSVSLPIHVTDTVYPPENPCPPYPMVLQQMVRFKVLDLLISVLKEFLVLKGEAASAVHGKEGGDDPVLQAIAASLLQRKWKEFKQSDESWKEAPRNFLDLGGIDKDINTMVDILEQGLGVGCIHSWLSSYQMQRATITGLPGSHMVATGQFRTPAMNAMVQEAHRHLAKEASAQDAGTSIVCKRAVELLDGVNKRFDLWCKLDHDLPRTNQPSSHQEEGHESRDITDVLHGNINRARQHDIYMVRIYISMDLNSLRSHSVFVLDAGCRSRDQAMAELPHIRGEDTWPWAGQVGA

SEQ ID NO: 2233 - protein, 270 aa, Zea mays subsp. mays
  misc_feature (1)..(270): Ceres Seq. ID no. 15226169
MVLQQMVRFKVLDLLISVLKEFLVLKGEAASAVHGKEGGDDPVLQAIAASLLQRKWKEFKQSDESWKEAPRNFLDLGGIDKDINTMVDILEQGLGVGCIHSWLSSYQMQRATITGLPGSHMVATGQFRTPAMNAMVQEAHRHLAKEASAQDAGTSIVCKRAVELLDGVNKRFDLWCKLDHDLPRTNQPSSHQEEGHESRDITDVLHGNINRARQHDIYMVRIYISMDLNSLRSHSVFVLDAGCRSRDQAMAELPHIRGEDTWPWAGQVGA

SEQ ID NO: 2234 - protein, 265 aa, Zea mays subsp. mays
  misc_feature (1)..(265): Ceres Seq. ID no. 15226170
MVRFKVLDLLISVLKEFLVLKGEAASAVHGKEGGDDPVLQAIAASLLQRKWKEFKQSDESWKEAPRNFLDLGGIDKDINTMVDILEQGLGVGCIHSWLSSYQMQRATITGLPGSHMVATGQFRTPAMNAMVQEAHRHLAKEASAQDAGTSIVCKRAVELLDGVNKRFDLWCKLDHDLPRTNQPSSHQEEGHESRDITDVLHGNINRARQHDIYMVRIYISMDLNSLRSHSVFVLDAGCRSRDQAMAELPHIRGEDTWPWAGQVGA

SEQ ID NO: 2235 - DNA, 2453 bp, Zea mays subsp. mays
  misc_feature (1)..(2453): Ceres Seq. ID no. 15226171
tgatcttatcctcacctcccaagagctcgcaaatggctgcccaggctctcggtgcgaaatcctcggcgctgaaagtgctctgacagggcatgttggtgcgaaggcgattccaagttgacttgtcgttgggatccataccgagtcgagtccagaggttgcctgtgactttctcggcctgttcccgagtgaaacatcccttgaggcggacgaagccattctgaaggaaatgctccttctcggcttctgtgaggactgatggtacggaactcatggtgtattaaaaggaggtaccttgcaggtagctggatattggtatgaggttgcagcacagagccaagctggctgaggcacgggagcgaatccctcctcgtcttatacccgagcgacgggtcatagcagtagaagcccaacgtccatggcgctgagcgtctattaccagctgcgggcgtaccgcgatctgatttgcggggataggcggtaccatgccgagaaacgctggtccattaactgaaccatagcggcggctcacttggggtaagtctgaccacttggacgtggggtttatggtctttgtcgggggtcattatgtggtatgaggtccggtgactggctggcattcggtgacagaactccagatgggggcattgctcgaactagagccggctaaattcaattgaaccccatttggcatcacccagcgagtaacggttatcctggggagggtcttgaagatggatggtatggacgcattagccttagccgtggctaggagcttggccgaaggacattgcaaggaatagcgattgcaagcagttgagtttgatctgtggctgatcaatttggcttgagccagctgagtagcaggagaatgattacggtcctcgaccacacgcaaaaccacgtactgcctggaacgaggtagcgagctgataatcctcggttggcctccccatgttctcaacttggggaaaggtgggtgaggaggaccagggcgtctttccagctgccccaccaccaccaccatcacccaaagattgctgcagcgcactaccgcgttccgggacgcgcaaaagctccggcttccaacatccaacttcacttttgccgccagcacaaacaacccggtcctgtctgcatcgtatcggcctgctatcggctgctatactgcacgccatgtccgccgatcggatgtcagtcgacgacgacgaccaatacgcttcctcagaggactccgacttcgcacctgatgctgccaacgctgccggttcagatgcatccgactcggaaggcgaaccagagcagccggcagcagtagaatccaagaagccacgcactggcacgcgcaaaggaacggatgccgaggatgatacaggctatgacaattctggagatgaggctatcatccagagggggcgcaagcgacggaagagggcccaggacaagggcgtagacgaagacgatgagggaggagagggagggcttgtcaagaccagacgtcagagagcagcagagtgcgtgacctttttcttgctggcccataacatcgctaactcggcgcaggaaagaggagcgcaaacacatcattgcctcaggaccagtgacgatcgatgtcgatgcagtatgggctgagatgctggctggcacggcggcagcgcagcctcaaaaaaccgacacagctgaagaaagtatcgcgcaagatgtagtaaaggatgctgtcgaggcacccacggtcgaggcggcgtcggtcgacccttctgcccttatccgcataaaacaaacctacaacttcgctggccgtgtccataccgaagagaagcttgttgctcgcgactcagccgaagccaagctgtacttcgcctcaaaaggtctccccgttcctaccgccgcagacgaagaaaccgacctgcccaccaaacgcgtcgctcgcaaggccttccgttccgctttcgaacccgccatgacggaccctacaccccagcgttcagaccttaatcttggcgtttcagcgaggacacaagctggtaaagaggcacagcaggcgaggaagctcaatactgtggagaagagccgaatggattgggcgggcttcgtggacaaagaagggatcaaggacgagctggagctggccggcaaatcgaaagactcgtatgccgccaggcaggacttcctggcgagaagcgagttcaggagggaagacgaggcaagacgcgcaagacttggcgtgcgctgaagcttggtgggttgacattaagtcatacataccccctacgatatgcgggctggcggctaccagatgccgaaaggcctgtcacgccaagcctctgtcgaactcttctcgacaataaccgcttctgcgcaatagaactttagcctcccgtctttcaaccattggcatcaatggcaaaggggctcagagaccatgagcagagggggggggggggactagtgagctc

SEQ ID NO: 2236 - protein, 225 aa, Zea mays subsp. mays
  misc_feature (1)..(225): Ceres Seq. ID no. 15226172
MFSTWGKVGEEDQGVFPAAPPPPPSPKDCCSALPRSGTRKSSGFQHPTSLLPPAQTTRSCLHRIGLLSAAILHAMSADRMSVDDDDQYASSEDSDFAPDAANAAGSDASDSEGEPEQPAAVESKKPRTGTRKGTDAEDDTGYDNSGDEAIIQRGRKRRKRAQDKGVDEDDEGGEGGLVKTRRQRAAECVTFFLLAHNIANSAQERGAQTHHCLRTSDDRCRCSMG

SEQ ID NO: 2237 - protein, 199 aa, Zea mays subsp. mays
  misc_feature (1)..(199): Ceres Seq. ID no. 15226173
MLAGTAAAQPQKTDTAEESIAQDVVKDAVEAPTVEAASVDPSALIRIKQTYNFAGRVHTEEKLVARDSAEAKLYFASKGLPVPTAADEETDLPTKRVARKAFRSAFEPAMTDPTPQRSDLNLGVSARTQAGKEAQQARKLNTVEKSRMDWAGFVDKEGIKDELELAGKSKDSYAARQDFLARSEFRREDEARRARLGVR

SEQ ID NO: 2238 - protein, 151 aa, Zea mays subsp. mays
  misc_feature (1)..(151): Ceres Seq. ID no. 15226174
MSADRMSVDDDDQYASSEDSDFAPDAANAAGSDASDSEGEPEQPAAVESKKPRTGTRKGTDAEDDTGYDNSGDEAIIQRGRKRRKRAQDKGVDEDDEGGEGGLVKTRRQRAAECVTFFLLAHNIANSAQERGAQTHHCLRTSDDRCRCSMG

SEQ ID NO: 2239 - DNA, 1293 bp, Zea mays subsp. mays
  misc_feature (1)..(1293): Ceres Seq. ID no. 15226354
atcaagattccgaccccaaaatccctctccgagctcgaccaaaaaccaccctctctgattcattccacccacgtccacgtacgtacgtacattcccaccacctcccagtgcagcgccagtctgtaacccataaccataaccataccatggtggtcctcaccaagggcgagctggagcagatcgcgctgccggccgtgcagcgcgcatcgccgccgccgccggccgccgtgccggaggtcgacctggcagccggggacgccgccgccgcgcgcgcggtggccaaggcgtgcgaggaccacggcttcttcaaggtgacgggccacggcgtgccgcagcacctcctggcgcgcctcgaggccgccgcggccgcgttcttcgcgctcccgcagcgggagaaggacagggccgccggctgcccgttcggatacgccagcaagcggattggcgccaacggcgatctcggctgggtcgagtacctcctgcttgccgtcaccgccgccggcgcagcggccgcgccggtgtctgcgtgcgagggcgcggagccgccctgtttccgtgctgtgctggacgagtacgtggcggcggtgaggcgcatgacctgcacggtgctgcagctgatggcgcaggggctgggcctcgacgacagggacgtgttcagccggctggtgctggaccgggacagcgactccatgctgagggtgaaccactacccgccgcggccccagccagcggcggcggcggagacgaggcggctgacggggttcggcgagcacaccgacccgcagatcatctccgtcctccgctccaacgacgcgtccggcctcgagatcacgctgcgggacggcacctgggtgtccgtgccctccgacacggaatccttcttcgtcaatgtcggcgacgcgttgcaggtgctgaccaacgggcggttccggagcgtgcggcaccgggtgatggtgagcagcgcgcggccgcgggtgtcggtgatcttcttcggcggcccgccgccgcgggagcgcctggcgccgctgccgggtctggtggaccgggagggcggccgacgccgctacagggagttcacgtggagggagtacaagaactcggcgtaccggaccaagctggcagacaacaggctctgctccttcgagaccatggcgacgagctagctaagccgccgcgctgacgccggacacggctcatcgccctcccttctcgatgtgtagtgtagcaagagacgtttttttgtgccatatagttttctgtttatacacgataaggctggtctcaacttcgttt

SEQ ID NO: 2240 - protein, 386 aa, Zea mays subsp. mays
  misc_feature (1)..(386): Ceres Seq. ID no. 15226355
QDSDPKIPLRARPKTTLSDSFHPRPRTYVHSHHLPVQRQSVTHNHNHTMVVLTKGELEQIALPAVQRASPPPPAAVPEVDLAAGDAAAARAVAKACEDHGFFKVTGHGVPQHLLARLEAAAAAFFALPQREKDRAAGCPFGYASKRIGANGDLGWVEYLLLAVTAAGAAAAPVSACEGAEPPCFRAVLDEYVAAVRRMTCTVLQLMAQGLGLDDRDVFSRLVLDRDSDSMLRVNHYPPRPQPAAAAETRRLTGFGEHTDPQIISVLRSNDASGLEITLRDGTWVSVPSDTESFFVNVGDALQVLTNGRFRSVRHRVMVSSARPRVSVIFFGGPPPRERLAPLPGLVDREGGRRRYREFTWREYKNSAYRTKLADNRLCSFETMATS

SEQ ID NO: 2241 - protein, 338 aa, Zea mays subsp. mays
  misc_feature (1)..(338): Ceres Seq. ID no. 15226356
MVVLTKGELEQIALPAVQRASPPPPAAVPEVDLAAGDAAAARAVAKACEDHGFFKVTGHGVPQHLLARLEAAAAAFFALPQREKDRAAGCPFGYASKRIGANGDLGWVEYLLLAVTAAGAAAAPVSACEGAEPPCFRAVLDEYVAAVRRMTCTVLQLMAQGLGLDDRDVFSRLVLDRDSDSMLRVNHYPPRPQPAAAAETRRLTGFGEHTDPQIISVLRSNDASGLEITLRDGTWVSVPSDTESFFVNVGDALQVLTNGRFRSVRHRVMVSSARPRVSVIFFGGPPPRERLAPLPGLVDREGGRRRYREFTWREYKNSAYRTKLADNRLCSFETMATS

SEQ ID NO: 2242 - DNA, 894 bp, Zea mays subsp. mays
  misc_feature (1)..(894): Ceres Seq. ID no. 15226375
accgggccccccctcgagtcagctacgtaggccccccccccccccacttatctcaatcttacttctacatttatatttccctcttgtgttttaccttttgcttatatcctttgcgtgacataggagccatttccactatttcatctattaaaacaagtaagaaaatagaaaggcttggaagcaatggtgttccacccagaacaagccgactcaaggtatggcatggtcttgtcggcccctgtggcagcacatggccttcattgctagctgcactgatgtgagtagcgactttttgtctactctttgcaaaacagtgaggcaacgagtcaggaagcgcaccatggtcggatgaacgaagaagaaaaatctgttgcatggaatggatgtatgttattagattaaaataacaaaatttatgtatggatagaatcacaaatgaattctgaaacattttctcataacagtatnnnaaaaaaaaaaaaaaaaaaaaaaaaaaaaaaaaaaaaaaaaaaaaaaaaaaaaaaaaaaaaaaaaaagaaaaaaaaaaaaaaaaaagaattcctgsavcccgggggaaccmayaatttctaaaaggggccccccccggggggaactcccawyttttkgtccctttaaggaggggttaatttccaagttggggaaaacaagggcaaaagtkgttcctgggggaaaatggtawcccctcaaaattcccmmaaaaaaaamaaccggaaacaaaaaaggggaaaacccgggggggcyaaaggaggractaacyccaattaattggggtgggstyaatggcccktttycaakcggaaaaactggcggggcaactggattaaagaaaccgccaaaccccggggaaaaggggtttgggaaatggggggtttt

SEQ ID NO: 2243 - protein, 92 aa, Zea mays subsp. mays
  misc_feature (1)..(92): Ceres Seq. ID no. 15226376
RAPPRVSYVGPPPPHLSQSYFYIYISLLCFTFCLYPLRDIGAISTISSIKTSKKIERLGSNGVPPRTSRLKVWHGLVGPCGSTWPSLLAALM

SEQ ID NO: 2244 - protein, 51 aa, Zea mays subsp. mays
  misc_feature (1)..(51): Ceres Seq. ID no. 15226377
  misc_feature (11)..(11): Xaa is any aa, unknown or other
  misc_feature (12)..(12): Xaa is any aa, unknown or other
  misc_feature (44)..(44): Xaa is any aa, unknown or other
  misc_feature (49)..(49): Xaa is any aa, unknown or other
MNSETFSHNSXXKKKKKKKKKKKKKKKKKKKKKKKKKKKKEFLXPGGTXNF

SEQ ID NO: 2245 - DNA, 733 bp, Zea mays subsp. mays
  misc_feature (1)..(733): Ceres Seq. ID no. 15226433
accgggccccccctcgagtcagctacgtaggcccccccccccccctttttactccgtatggagaaatttcctatgtgaagattcctgtaggcaaacattgtggatttgttcaatttaccagcaggtcatgtgcagaggaagccatccgaatgctgaatgggagtcaggttggtgggcagaaagttcggctttcatggggccgtagtcctcaaaacagacaggcttctcagcatgatgccaacaaccagtataatgggaacagctattatggataccaacagccgggttatgaaggttatggctatggtgcttccagtgcacaagacccaagcatgcaaaactactacggatactctggttgtggtaactatgagcagcagcagccaacacaggaacagcagctgcagcagcctccaccaccacagcactgacgattgcttgcacacctctggagtgctatcggattagagtgatggtggagtcacggggcgctgcaatgagacatcctatatagatatgaaggtcatatagtcgcataggagtggttagactttcttggggaccagtgttaatcgatgatggcactccggatgtttcttctgtttgtcgttgagatcttgattgttgaagtgtgctctgttgatattaatgtcttcgtcagattgttaatttgcttgtttcagatgtccctnnnaaaactnnnnncnnnnnncaatacaatacaaaacataat

SEQ ID NO: 2246 - protein, 142 aa, Zea mays subsp. mays
  misc_feature (1)..(142): Ceres Seq. ID no. 15226434
RAPPRVSYVGPPPPLFTPYGEISYVKIPVGKHCGFVQFTSRSCAEEAIRMLNGSQVGGQKVRLSWGRSPQNRQASQHDANNQYNGNSYYGYQQPGYEGYGYGASSAQDPSMQNYYGYSGCGNYEQQQPTQEQQLQQPPPPQH

SEQ ID NO: 2247 - protein, 103 aa, Zea mays subsp. mays
  misc_feature (1)..(103): Ceres Seq. ID no. 15226435
MGVRLVGRKFGFHGAVVLKTDRLLSMMPTTSIMGTAIMDTNSRVMKVMAMVLPVHKTQACKTTTDTLVVVTMSSSSQHRNSSCSSLHHHSTDDCLHTSGVLSD

SEQ ID NO: 2248 - protein, 93 aa, Zea mays subsp. mays
  misc_feature (1)..(93): Ceres Seq. ID no. 15226436
MLNGSQVGGQKVRLSWGRSPQNRQASQHDANNQYNGNSYYGYQQPGYEGYGYGASSAQDPSMQNYYGYSGCGNYEQQQPTQEQQLQQPPPPQH

SEQ ID NO: 2249 - DNA, 598 bp, Zea mays subsp. mays
  misc_feature (1)..(598): Ceres Seq. ID no. 15226580
aattttgagtgaacctcctgctggacgcaccaagaaagcacaagggagctctatggctacacatagaaaaccagttgctaccgagatggcttctgcagcattccatgacgccacgccagctaaccaaaacatcgaagaggatcaggacgcgtgctccatatccatactactactcccattcgttctgcatctggccttcatggcattcacagccttgttcgtgatgcacgtccaggtgtccacacggttcctatccgctagccccccggtttactgggctgccgcgcacgttctggcttctccgagccgcgccaacagacgatggggctacctgatctgtgtctatttcatcgcgtacattcttctaggtagcctgctcttctccaacttctaccctttcacgtaacgtaagaacggcggtggattttctcgaccagctttgcctgaaggtttccctaggttggtagtggtaggtgtttcctttggttcagtaattgagcgttggctactcgaatcgcttggaatctgctcggctgatgtatcttggggggtcgatcttctccaattattcaatggcactatctatctccatttgacg

SEQ ID NO: 2250 - protein, 134 aa, Zea mays subsp. mays
  misc_feature (1)..(134): Ceres Seq. ID no. 15226581
ILSEPPAGRTKKAQGSSMATHRKPVATEMASAAFHDATPANQNIEEDQDACSISILLLPFVLHLAFMAFTALFVMHVQVSTRFLSASPPVYWAAAHVLASPSRANRRWGYLICVYFIAYILLGSLLFSNFYPFT

SEQ ID NO: 2251 - protein, 117 aa, Zea mays subsp. mays
  misc_feature (1)..(117): Ceres Seq. ID no. 15226582
MATHRKPVATEMASAAFHDATPANQNIEEDQDACSISILLLPFVLHLAFMAFTALFVMHVQVSTRFLSASPPVYWAAAHVLASPSRANRRWGYLICVYFIAYILLGSLLFSNFYPFT

SEQ ID NO: 2252 - protein, 106 aa, Zea mays subsp. mays
  misc_feature (1)..(106): Ceres Seq. ID no. 15226583
MASAAFHDATPANQNIEEDQDACSISILLLPFVLHLAFMAFTALFVMHVQVSTRFLSASPPVYWAAAHVLASPSRANRRWGYLICVYFIAYILLGSLLFSNFYPFT

SEQ ID NO: 2253 - DNA, 1409 bp, Zea mays subsp. mays
  misc_feature (1)..(1409): Ceres Seq. ID no. 15226685
ataggtatagccaaccgtccaacccattgctactccacaccgatgcgatgctcccatcgccgccggcgacctcgccggcgcggctgcacaagctggtgacctcgcagcaggacccgctcctcgcgctggagctcgtcaacgtcacctccccgactaccacgccgcaccctgccacgctccactctctcctgctccgcctcgcccgccgccgcgaccacctaccccacgcgctcgcgctcctccgccgcctcccgtccccgccgtccccgcgcctccttctcccgcttctcctcgcggcgctccgtctccgccggccgcctcagctctttctctccaccttcaactccctcttcgtctcggggccaagccccctgccgctccacccccatctcctcctccgcctcctcggcgttctatcctccaccccatcccacttcccgtccgcgcttcacctccttcgcctcgtctcttcgcggctacctctccccgctccgctcgtcctcgcctcccacaacctgctaatcgacgccgcggcacgatccggccacgtcgccgtgtcactctcgctcttccaccgcctccgctcactccatgtatcccccgacgccgacacctaccgcattcttacccaatcactctgccgcaaggcccaggtccgcaccgcggctacactgctcgacgaaatgctgcacaggggcatccctgccgatccgctggcgtacaccaccgtgctgaacgctctctgccgcaagaagcagctccgagaggcataccgcctgctctgtctcatgcgaggccgtggagtctcccctgacattgtgcattacaacacggtcatcgttggcatgtgccgcgagggccggccactggatgcctgcaaggttgttgttgatatgatggacaatggatgtacaccgaatgcagtgacatatggcacagtggtgaatgggctgtgcgtaagcggattatacgataaggcggaggcctacctggtggacatggttggtaaagggcttgtgccacatttctcggtgtttcattcagttatcaggggttgctgtacagttgggaaagtagaagaggctgcacaaattatgagtcggatgcttgatcttggagtggttccgcatgttgagagctggagttcagtgatcaggtgcgtttgtaaggatgaggattgtattgaggcagaattgttgcagattgtgggaaggcagcgtggttcaaacatgatctctgacagagtaccttaagtgatttcacttgacatatgcaaaacaaactattgagctttaatctctgttggatgtaaaggaacaattctgcaagaagatagcagtagatgtggcaaaaactggacagcatgaacaattttcttgctgaagtgcctctagtggagtattaggagc

SEQ ID NO: 2254 - protein, 416 aa, Zea mays subsp. mays
  misc_feature (1)..(416): Ceres Seq. ID no. 15226686
RYSQPSNPLLLHTDAMLPSPPATSPARLHKLVTSQQDPLLALELVNVTSPTTTPHPATLHSLLLRLARRRDHLPHALALLRRLPSPPSPRLLLPLLLAALRLRRPPQLFLSTFNSLFVSGPSPLPLHPHLLLRLLGVLSSTPSHFPSALHLLRLVSSRLPLPAPLVLASHNLLIDAAARSGHVAVSLSLFHRLRSLHVSPDADTYRILTQSLCRKAQVRTAATLLDEMLHRGIPADPLAYTTVLNALCRKKQLREAYRLLCLMRGRGVSPDIVHYNTVIVGMCREGRPLDACKVVVDMMDNGCTPNAVTYGTVVNGLCVSGLYDKAEAYLVDMVGKGLVPHFSVFHSVIRGCCTVGKVEEAAQIMSRMLDLGVVPHVESWSSVIRCVCKDEDCIEAELLQIVGRQRGSNMISDRVP

SEQ ID NO: 2255 - protein, 401 aa, Zea mays subsp. mays
  misc_feature (1)..(401): Ceres Seq. ID no. 15226687
MLPSPPATSPARLHKLVTSQQDPLLALELVNVTSPTTTPHPATLHSLLLRLARRRDHLPHALALLRRLPSPPSPRLLLPLLLAALRLRRPPQLFLSTFNSLFVSGPSPLPLHPHLLLRLLGVLSSTPSHFPSALHLLRLVSSRLPLPAPLVLASHNLLIDAAARSGHVAVSLSLFHRLRSLHVSPDADTYRILTQSLCRKAQVRTAATLLDEMLHRGIPADPLAYTTVLNALCRKKQLREAYRLLCLMRGRGVSPDIVHYNTVIVGMCREGRPLDACKVVVDMMDNGCTPNAVTYGTVVNGLCVSGLYDKAEAYLVDMVGKGLVPHFSVFHSVIRGCCTVGKVEEAAQIMSRMLDLGVVPHVESWSSVIRCVCKDEDCIEAELLQIVGRQRGSNMISDRVP

SEQ ID NO: 2256 - DNA, 982 bp, Zea mays subsp. mays
  misc_feature (1)..(982): Ceres Seq. ID no. 15226776
cgagrscattacctakawcatcctaatygaaaatatcttattgatgcagtcactggacgcatactccatcgtgtgactcatcatggtgcacaaggccctgtacatgcagttttgagcgagaactgggttgtctatcattattttaatcttcgagctcacagatttgaaatggcggtgatcgagatatatgatcaatctagggcggacaataaagacgtcacgaagctcatactagggaagcataatcttttggcaccaattacatcttatgcccgccctgaggtggcagtaaaatcccagtcatactttttcacccattcagtaaaagcaatggcagttacacaaacggctaaggggatcacttccaagcagcttctgttgggtactattggtgaccaggttttggcacttgataagcgctatcttgatccacgccgttcagtgaacccgacacagcaagaaaaagaagagggcattataccattaacagattctttgcctataataccccagtcctttgtgacgcactctcatcaagtggaggccctgcgagccattgtttctattcctgcaaagttggagtccactactcttgttttcacatatggtgtcgatctattctacacccagcttgccccgtcaagaacctatgattccctaaccgacgaattcagctatgcgctgcttctaatcacgatcgcagtcctggttgccgccattattggtacatggatttggtctgagaaaaaggagttgagagacaagtggaggtgagcaaggtctcagtgttctgacgctgaggaaattttgggccctagtcagctaccttctcctcctctccccttttcattgtagtgctagagttcgtttcactttttgactaggactttatttatgtaaccgtttgacaacaaagctatctgccgtgaattgtcacactgcggaggccttatagaaagccacttacgcaattaaagattct

SEQ ID NO: 2257 - protein, 257 aa, Zea mays subsp. mays
  misc_feature (1)..(257): Ceres Seq. ID no. 15226777
  misc_feature (2)..(2): Xaa is any aa, unknown or other
  misc_feature (6)..(6): Xaa is any aa, unknown or other
  misc_feature (10)..(10): Xaa is any aa, unknown or other
RXHYLXHPNXKYLIDAVTGRILHRVTHHGAQGPVHAVLSENWVVYHYFNLRAHRFEMAVIEIYDQSRADNKDVTKLILGKHNLLAPITSYARPEVAVKSQSYFFTHSVKAMAVTQTAKGITSKQLLLGTIGDQVLALDKRYLDPRRSVNPTQQEKEEGIIPLTDSLPIIPQSFVTHSHQVEALRAIVSIPAKLESTTLVFTYGVDLFYTQLAPSRTYDSLTDEFSYALLLITIAVLVAAIIGTWIWSEKKELRDKWR

SEQ ID NO: 2258 - protein, 201 aa, Zea mays subsp. mays
  misc_feature (1)..(201): Ceres Seq. ID no. 15226778
MAVIEIYDQSRADNKDVTKLILGKHNLLAPITSYARPEVAVKSQSYFFTHSVKAMAVTQTAKGITSKQLLLGTIGDQVLALDKRYLDPRRSVNPTQQEKEEGIIPLTDSLPIIPQSFVTHSHQVEALRAIVSIPAKLESTTLVFTYGVDLFYTQLAPSRTYDSLTDEFSYALLLITIAVLVAAIIGTWIWSEKKELRDKWR

SEQ ID NO: 2259 - protein, 147 aa, Zea mays subsp. mays
  misc_feature (1)..(147): Ceres Seq. ID no. 15226779
MAVTQTAKGITSKQLLLGTIGDQVLALDKRYLDPRRSVNPTQQEKEEGIIPLTDSLPIIPQSFVTHSHQVEALRAIVSIPAKLESTTLVFTYGVDLFYTQLAPSRTYDSLTDEFSYALLLITIAVLVAAIIGTWIWSEKKELRDKWR

SEQ ID NO: 2260 - DNA, 2255 bp, Zea mays subsp. mays
  misc_feature (1)..(2255): Ceres Seq. ID no. 15226801
gacatgcagttgtagcttggctcgaggcgggcatcagcgacgacaaacatcctgctcaatttgttgtatgataaatactgcgaaacaatgctggtgtttcataagatgaccgtgcagctcatgaaaatccagagggtggagtcgagcgagacgacgtggccggcgcggcgccaggtcgtggcgtgcgccgctgtttgctggtcgtggcgtgaggtcaccaaggaggtggtgaagacgctcaaggagtgcggcaggatcaccttccccatgtcccttaagcaggttggcactctctgccttttctctactttgatgatcaatcacatgtcttcacctttgcagaggcttatgattttgaagatctagaatctatggttgaagaaatagccaaagcattcaagacaaagataatgtttatatatgttgacactgctgaagaaaaccttgcaaaaaccattcctcactctttatggcattgaatcagaaaaggcctactggtccagttcttgaaagggtgggaatgtgtccaagaagacaaaggcatcgacccgccaattcttcgctacaaattaaaacagcactagggtgagatcagtgggcttgagagtagcatcatccttcaaacatgatgatgggtttctagctgatggtgtctctatagctcactggtatccttcaaaaagaaagtatggtgttgttttataagctctcatgtttatgactaaggttgagatttgtgaagattcagaaataattagctacatgcccttgcgtagcttacaatgcacaattagctagcttcattgttttaacttctctgcaatatgaacatgcaaattttaaccacctcatttgtttttaataagctgaaacaaattgttggttattattcccccttgtttggtcgccctcatttaagttgtggcttagatattcctactcagagagttggtacatgttttttatgcttatctttttcatttatcaaccatatgtgtgtttgatgttttttctatgcttagacctaaacaaaacattcttggtagccacatctaaaacattcatttcaagttctacattaattcatttatattccatcaacttttaaaatacaacacttagtttgtttgaaaagaaatagtttttgtgaaatcttcaaacaaggcttgacaatgatttattcatcgacaatgcatctgagccctctttgcattgtaagctcctacaatgaagttatacaaaagtcttatctattcattttggtttaagctggttgagcactttttacaatatctggtcaacacatctaggatgactcttcacatctgtcaattcaaattctcttcaaaacagctaatattgctccatattgtcttttgaagcttcctggaaaaaatgtcttttgaagctaatcttgctccatacagctaatcttcacatctttcaaagcatttgctagggcccttcggtgagcaatagaatacgacttgcgctaccaaagcgtccatagctgaatgcaaaccattgagatggtccaggttgaggacctccatgacacctatgttggtgtgggttgtgccgccccatcgtgaccgtcatcgattgggcctccgagtccaggagaagacctccgatgaagaaagagacatgctgcacatgcacgagggtacttgcagatagatgtcggctctatggacgaacactcgaccaagtcagatgaggagtatgagggcctagccatgcgagacatgatggctaccggtccaacaatgagcagcaagctgtgagttaaagatgaactcacctgtcctggagagcaacatccataggagtgaggcaaaatggcgggtaccaccacaacatggacccgttcctgaagatgtccaaggaggtggtagccgacaccataatgtcttgcgcgtcattgtgtcaccggccggcaacacgctgcgctggtaccggcgggtgttatgtttcttaggcgtatgtttctgtgctttgagctgtgctatagactggttgtgccaactactgattttaaaagaaaaaggtgagctgaaaatcattgttgaaaacaaacatgtaacggttcgttctcatcagttgtgccaactaccaatcatttcattgatcagaatctgtcgttgctcatgagaaccaaaagtaagacacttcttaataaaaaaaaaaaaaaaaaaaaaaaaaaaaaaaaaaaaaaaaaaaaaaaaaaaaaaaaaaaaaaaaaaaaaaaaagg

SEQ ID NO: 2261 - protein, 119 aa, Zea mays subsp. mays
  misc_feature (1)..(119): Ceres Seq. ID no. 15226802
MNSPVLESNIHRSEAKWRVPPQHGPVPEDVQGGGSRHHNVLRVIVSPAGNTLRWYRRVLCFLGVCFCALSCAIDWLCQLLILKEKGELKIIVENKHVTVRSHQLCQLPIISLIRICRCS

SEQ ID NO: 2262 - protein, 92 aa, Zea mays subsp. mays
  misc_feature (1)..(92): Ceres Seq. ID no. 15226803
MLVFHKMTVQLMKIQRVESSETTWPARRQVVACAAVCWSWREVTKEVVKTLKECGRITFPMSLKQVGTLCLFSTLMINHMSSPLQRLMILKI

SEQ ID NO: 2263 - protein, 86 aa, Zea mays subsp. mays
  misc_feature (1)..(86): Ceres Seq. ID no. 15226804
MTVQLMKIQRVESSETTWPARRQVVACAAVCWSWREVTKEVVKTLKECGRITFPMSLKQVGTLCLFSTLMINHMSSPLQRLMILKI

SEQ ID NO: 2264 - DNA, 702 bp, Zea mays subsp. mays
  misc_feature (1)..(702): Ceres Seq. ID no. 15227016
gttctccacgacgcagttcggctgccagacaaaaaccctaaccaccgtcgccgccgccgccgccgccgctcttcctcgagatgggaggcaagtgcccgcaccgcaaggtaaagaagcgccgcctatcccacaagacggctcgccgcggcaagttcctcctgaaggccgacgatgccgtctatgacgagctcgtcaagctggccgaccagggcaaggacgctgaaaccaaggagctccccgtcgatgaggaccttccaggcctgggacagttctactgcctccactgcgatcgctactttgcaagtgaaagcgtgaaggatgatcactaccgctcaaagcgccacaagaaaagggttaaggtaatgtctggaccggccccgcacacgcagcttgatgcagaactcgctgcagggatgggaaagcctgacaacggcctgaagctcatgtccatgtgaaggaacctcttgctggtactggtacttgttccgtgcctttgttgctgccgtacaattgaagctgctttgcgcagtaagtaatagcaagagttatagcagacggttttttttttgttgtacgcaagactttcgaagtgggtgtaagttgttttagagtggtggcagagggggggggggggggtgtcaatgcatgtatcatgaaaccatttatcgacccataccagtgatgatgatgatgatgtctcgc

SEQ ID NO: 2265 - protein, 124 aa, Zea mays subsp. mays
  misc_feature (1)..(124): Ceres Seq. ID no. 15227017
MGGKCPHRKVKKRRLSHKTARRGKFLLKADDAVYDELVKLADQGKDAETKELPVDEDLPGLGQFYCLHCDRYFASESVKDDHYRSKRHKKRVKVMSGPAPHTQLDAELAAGMGKPDNGLKLMSM

SEQ ID NO: 2266 - DNA, 1625 bp, Zea mays subsp. mays
  misc_feature (1)..(1625): Ceres Seq. ID no. 15227139
gcagatggccaacgcaattcaccagtagtagtagttgtagcggcataactagctatggctaccaccatggcggctaacgacccgacgagcatccgcgtggttagccgccggctggtgaaggcctccgacgcttccatccagcctcatgtcatgtccctctccaacctcgacctctacgtctgcgactcacagctcggcacgctgtgcgtctaccccaacgccggcggcggcttcagcgcgcgcatccccagcctgttcgagtccctcttgccgtccttgctcaactacctctacccattcgccggccgcctcgtcaccaacccaagctccggcctccccgaactccactgccataaccaaggcgcagagctcgtggtcggcgaggtcggcgtcgccctggggagcctcaactacggcgcgaccaaggattccttcaagaagatggtgctcccgttccccagggacgtccttctgtcggtgcagctgctctccttcgcgtgcgggggcttctccgtcatgtggtggatcaaccacctcgtcggcgacggccacgtgggcgccacgatcgtcaggacgtggtcccagctcgcgcggaccggggacatcggcggtgcgcccccgctcaactacgaccgctccgtgttccgcccgcgcagcccgccgtcgtacagcgactccgtcgcggccaccttcacaacgttcgacgagaagcgcctgcccaacgccctcacggcggaggccagcttcgtggaccgcgtctactacgtggaggcgagcgacatcgccgcgctgcgcgacacggcggcggcggccaccacggcccagcgcccgacccgcgtcgaggcgctgtccgcctacctgtggaaggcgctcgccgacgtcgtggccgcgtgcccccggagcaacaaggagcgctgccgcatgggttggtgggtcagcgcgcggcgccgtgtcacggcgcctaagctcgtcgctttgatgcccggctacctggggaacgtgacgacctacgccctgggcgacgcgccggcggaggagatcgtgcggaagcctctggcggaggtggcggccatggtgcgggacgccatcacgtcggtggactacgacgagtacctccaggagatggtggactgggtggaggtgcacaagacggaaggcctgatggaggcggccgtcatcggagtcggcgcgcccacgctgaaccagtcggtgatgaccacgttcccgctcgacaccgacttcggcttcggccaggctactctggcaaccacggtctctgactatggcaggctttgctcggctttcctttcggtcggagcgcggccgggaggcgacggctcctggctcgtcaccgcctacatatggccgcagctggcggcggcgctggagtccgacggcatcttcaagcttctcacggcggagtacctcggtctagctatgtgagcaactgaacggaacacagttagctcgacggatcgatcatatatgtgttttctttcttttgattcgaatcgatgcatgatgtgcttcctttgtttttctgtcagcttttgtacctgtacgccagcagatgagactctggtctttgggatattatatatctgctaaataaagatgagctcgac

SEQ ID NO: 2267 - protein, 462 aa, Zea mays subsp. mays
  misc_feature (1)..(462): Ceres Seq. ID no. 15227140
MATTMAANDPTSIRVVSRRLVKASDASIQPHVMSLSNLDLYVCDSQLGTLCVYPNAGGGFSARIPSLFESLLPSLLNYLYPFAGRLVTNPSSGLPELHCHNQGAELVVGEVGVALGSLNYGATKDSFKKMVLPFPRDVLLSVQLLSFACGGFSVMWWINHLVGDGHVGATIVRTWSQLARTGDIGGAPPLNYDRSVFRPRSPPSYSDSVAATFTTFDEKRLPNALTAEASFVDRVYYVEASDIAALRDTAAAATTAQRPTRVEALSAYLWKALADVVAACPRSNKERCRMGWWVSARRRVTAPKLVALMPGYLGNVTTYALGDAPAEEIVRKPLAEVAAMVRDAITSVDYDEYLQEMVDWVEVHKTEGLMEAAVIGVGAPTLNQSVMTTFPLDTDFGFGQATLATTVSDYGRLCSAFLSVGARPGGDGSWLVTAYIWPQLAAALESDGIFKLLTAEYLGLAM

SEQ ID NO: 2268 - protein, 458 aa, Zea mays subsp. mays
  misc_feature (1)..(458): Ceres Seq. ID no. 15227141
MAANDPTSIRVVSRRLVKASDASIQPHVMSLSNLDLYVCDSQLGTLCVYPNAGGGFSARIPSLFESLLPSLLNYLYPFAGRLVTNPSSGLPELHCHNQGAELVVGEVGVALGSLNYGATKDSFKKMVLPFPRDVLLSVQLLSFACGGFSVMWWINHLVGDGHVGATIVRTWSQLARTGDIGGAPPLNYDRSVFRPRSPPSYSDSVAATFTTFDEKRLPNALTAEASFVDRVYYVEASDIAALRDTAAAATTAQRPTRVEALSAYLWKALADVVAACPRSNKERCRMGWWVSARRRVTAPKLVALMPGYLGNVTTYALGDAPAEEIVRKPLAEVAAMVRDAITSVDYDEYLQEMVDWVEVHKTEGLMEAAVIGVGAPTLNQSVMTTFPLDTDFGFGQATLATTVSDYGRLCSAFLSVGARPGGDGSWLVTAYIWPQLAAALESDGIFKLLTAEYLGLAM

SEQ ID NO: 2269 - protein, 430 aa, Zea mays subsp. mays
  misc_feature (1)..(430): Ceres Seq. ID no. 15227142
MSLSNLDLYVCDSQLGTLCVYPNAGGGFSARIPSLFESLLPSLLNYLYPFAGRLVTNPSSGLPELHCHNQGAELVVGEVGVALGSLNYGATKDSFKKMVLPFPRDVLLSVQLLSFACGGFSVMWWINHLVGDGHVGATIVRTWSQLARTGDIGGAPPLNYDRSVFRPRSPPSYSDSVAATFTTFDEKRLPNALTAEASFVDRVYYVEASDIAALRDTAAAATTAQRPTRVEALSAYLWKALADVVAACPRSNKERCRMGWWVSARRRVTAPKLVALMPGYLGNVTTYALGDAPAEEIVRKPLAEVAAMVRDAITSVDYDEYLQEMVDWVEVHKTEGLMEAAVIGVGAPTLNQSVMTTFPLDTDFGFGQATLATTVSDYGRLCSAFLSVGARPGGDGSWLVTAYIWPQLAAALESDGIFKLLTAEYLGLAM

SEQ ID NO: 2270 - DNA, 1461 bp, Zea mays subsp. mays
  misc_feature (1)..(1461): Ceres Seq. ID no. 15227162
ttttctttccttgaataggtcaccatgcccagggatgcaatgcattatggagatgttgaacaccgagaattgcataatgcatatgggtactactttcatatggctaccgcagatggacttctcaagcgaggcgaggggaaagatagaccctttgttttgtcaagggccttctttgctggaagtcaacggtatggtgcagtttggacaggcgacaactccgcagactgggatcacttgaaatcttctatcccaatggtcttaactcttggtcttactggcttgcttttctctggcgcggatattggtggattctttggaaacccagaaccagacctattggtgcgttggtaccaagtaggagcattttatcctttctttaggggtcatgctcatcatgacaccaagagacgtgagccatggttatttggagagcgaagaactgccatcataagggaggcgatacatatgcggtattcattgttgccctacttctacacgctgttcagagaggctagtgtaaatggcattcctgtcatgcgtcctttatggttagaatttcctgacgataaagaaacttataacaatggcgaggcatttatggtggggcccagccttttagctcaaggaatatacgaagagggccagaaatcagtgtcggtctaccttcctgggaaggagtcatggtatgacttgagaaatggatctccatacaagggaagcgcgacacacaagctacaggttttagaagatagcattcccagcttccaaagggctggtacaattgtgccaagaaaggacagattcagacgcagttctactcagatggtgaatgatccatacactctggtgatagcactcaatagctcaggtgctggagaaggcgaactttatgtggatgacgggaaaagttatgagtaccagcaaggggcattcatccatcgccgatttgtctttgcagacaataagctaacttcattcaatattgggcctgacgatttgggcaagaaatttagaagtgattgcgtgattgaaagaattataatcctcggtttacgatccggagtgaagaaggctattattgagcctggaaatcaagaactagaaattgaatcagggccaattagtttaaggagtggttccagcccagtcgcgccaacaatccggaggcccaatgtttgcattgcagacagttggactataaggatagcataaaaggtaggccattcacatctggatcctgatgtctgatgtcttcttttgtctgctgtcaggttgcaaaattaggccagcctttagaagtttagttgtggccttgaaatatttgcatgtaactggtacttaagctgttccaactgccaattttgacataaatacttatatacattgctgatgtatattgtagctttgatacatgagcattttatcttgcaaaaatgatatacagttagtcagttacaaatt

SEQ ID NO: 2271 - protein, 395 aa, Zea mays subsp. mays
  misc_feature (1)..(395): Ceres Seq. ID no. 15227163
MPRDAMHYGDVEHRELHNAYGYYFHMATADGLLKRGEGKDRPFVLSRAFFAGSQRYGAVWTGDNSADWDHLKSSIPMVLTLGLTGLLFSGADIGGFFGNPEPDLLVRWYQVGAFYPFFRGHAHHDTKRREPWLFGERRTAIIREAIHMRYSLLPYFYTLFREASVNGIPVMRPLWLEFPDDKETYNNGEAFMVGPSLLAQGIYEEGQKSVSVYLPGKESWYDLRNGSPYKGSATHKLQVLEDSIPSFQRAGTIVPRKDRFRRSSTQMVNDPYTLVIALNSSGAGEGELYVDDGKSYEYQQGAFIHRRFVFADNKLTSFNIGPDDLGKKFRSDCVIERIIILGLRSGVKKAIIEPGNQELEIESGPISLRSGSSPVAPTIRRPNVCIADSWTIRIA

SEQ ID NO: 2272 - protein, 390 aa, Zea mays subsp. mays
  misc_feature (1)..(390): Ceres Seq. ID no. 15227164
MHYGDVEHRELHNAYGYYFHMATADGLLKRGEGKDRPFVLSRAFFAGSQRYGAVWTGDNSADWDHLKSSIPMVLTLGLTGLLFSGADIGGFFGNPEPDLLVRWYQVGAFYPFFRGHAHHDTKRREPWLFGERRTAIIREAIHMRYSLLPYFYTLFREASVNGIPVMRPLWLEFPDDKETYNNGEAFMVGPSLLAQGIYEEGQKSVSVYLPGKESWYDLRNGSPYKGSATHKLQVLEDSIPSFQRAGTIVPRKDRFRRSSTQMVNDPYTLVIALNSSGAGEGELYVDDGKSYEYQQGAFIHRRFVFADNKLTSFNIGPDDLGKKFRSDCVIERIIILGLRSGVKKAIIEPGNQELEIESGPISLRSGSSPVAPTIRRPNVCIADSWTIRIA

SEQ ID NO: 2273 - protein, 370 aa, Zea mays subsp. mays
  misc_feature (1)..(370): Ceres Seq. ID no. 15227165
MATADGLLKRGEGKDRPFVLSRAFFAGSQRYGAVWTGDNSADWDHLKSSIPMVLTLGLTGLLFSGADIGGFFGNPEPDLLVRWYQVGAFYPFFRGHAHHDTKRREPWLFGERRTAIIREAIHMRYSLLPYFYTLFREASVNGIPVMRPLWLEFPDDKETYNNGEAFMVGPSLLAQGIYEEGQKSVSVYLPGKESWYDLRNGSPYKGSATHKLQVLEDSIPSFQRAGTIVPRKDRFRRSSTQMVNDPYTLVIALNSSGAGEGELYVDDGKSYEYQQGAFIHRRFVFADNKLTSFNIGPDDLGKKFRSDCVIERIIILGLRSGVKKAIIEPGNQELEIESGPISLRSGSSPVAPTIRRPNVCIADSWTIRIA

SEQ ID NO: 2274 - DNA, 440 bp, Zea mays subsp. mays
  misc_feature (1)..(440): Ceres Seq. ID no. 3008550
tctcctcttctacccatgccgatctgcgctccgcgctgacgcccatgcccacgaatcgactagtccgagggtctccgctgccggccctgcgagtctacgctaccggacaagtcgtcacgacgcactgctcggccttggcgttcgctgcgagtgcggccgcctggccgacgaccggaaggcatttgatagaatgctgcaccgagacgtggtcgccaggaccgccgtgatgtccgcgcgtcgccacgcggaatgggtctgcgattgcacggtgcccatggcctgtacggtgctcggtggtactggacctggtgttcatggggtaggtctaagttttcactttgcatgtggaacccaacgggatctcttctgtagggtttctgtcagcttctagtcgtgtggtgtgggctactcgatgaatgaactacttttactttatactg

SEQ ID NO: 2275 - protein, 129 aa, Zea mays subsp. mays
  misc_feature (1)..(129): Ceres Seq. ID no. 3008551
LLFYPCRSALRADAHAHESTSPRVSAAGPASLRYRTSRHDALLGLGVRCECGRLADDRKAFDRMLHRDVVARTAVMSARRHAEWVCDCTVPMACTVLGGTGPGVHGVGLSFHFACGTQRDLFCRVSVSF

SEQ ID NO: 2276 - protein, 74 aa, Zea mays subsp. mays
  misc_feature (1)..(74): Ceres Seq. ID no. 3008552
SSSTHADLRSALTPMPTNRLVRGSPLPALRVYATGQVVTTHCSALAFAASAAAWPTTGRHLIECCTETWSPGPP

SEQ ID NO: 2277 - protein, 66 aa, Zea mays subsp. mays
  misc_feature (1)..(66): Ceres Seq. ID no. 3008553
MLHRDVVARTAVMSARRHAEWVCDCTVPMACTVLGGTGPGVHGVGLSFHFACGTQRDLFCRVSVSF

SEQ ID NO: 2278 - DNA, 813 bp, Zea mays subsp. mays
  misc_feature (1)..(813): Ceres Seq. ID no. 12635711
accgtgccagaaccgcaatccgcgcctccccaatcgcgcgcttccatccatggcacacggtttggtcctttccttcccaaccgcgcccctccatccatggcagtcgccagcgcccttccatccatggaagcgcgcccacactcacacctccatctcccccccttctctctccctcaatcgccctgatccagatacccaagcacgcgcgtggcgaagagacgggtgtaacctccaggatgattcagggtcgatggcgtggatcgaaaatgaccgggcgccttggcgtcatccaaccagcgcggagctccatccgcaacaaattcgagtggcctcgcctccggtcccggtcagtagacccggtcgtgcagatcggcaggaacttcacccccgtcggtgagcagtcaccgacttcatctccaacgactccgacgaagacaggcggctccagagcgcgcgtcacggagatctccgtcatcaccgtgtccgacagcggggtcccatgcctcacgtttgggtccaggaatgcgtctttcctcttggaggtgccactcggcgtcgctgcctcgctccccgatgagggccacattgggggtcgtgcagttgatagcggtgtcatgatcgaggagcgcttgaatcttgtcatacacgcctgctagggcgaacctgaatcctgtcgtgtttgaagggtaccaggtgtgtggtgtccctggtgggcagctgatgaccaccatagagacggttgtccccttctcctctgtttgactgcctccacatccgcttctataaaattttagatgcatggacatctgctcc

SEQ ID NO: 2279 - protein, 217 aa, Zea mays subsp. mays
  misc_feature (1)..(217): Ceres Seq. ID no. 12635712
RARTAIRASPIARFHPWHTVWSFPSQPRPSIHGSRQRPSIHGSAPTLTPPSPPLLSPSIALIQIPKHARGEETGVTSRMIQGRWRGSKMTGRLGVIQPARSSIRNKFEWPRLRSRSVDPVVQIGRNFTPVGEQSPTSSPTTPTKTGGSRARVTEISVITVSDSGVPCLTFGSRNASFLLEVPLGVAASLPDEGHIGGRAVDSGVMIEERLNLVIHAC

SEQ ID NO: 2280 - protein, 139 aa, Zea mays subsp. mays
  misc_feature (1)..(139): Ceres Seq. ID no. 12635713
MIQGRWRGSKMTGRLGVIQPARSSIRNKFEWPRLRSRSVDPVVQIGRNFTPVGEQSPTSSPTTPTKTGGSRARVTEISVITVSDSGVPCLTFGSRNASFLLEVPLGVAASLPDEGHIGGRAVDSGVMIEERLNLVIHAC

SEQ ID NO: 2281 - protein, 131 aa, Zea mays subsp. mays
  misc_feature (1)..(131): Ceres Seq. ID no. 12635714
PCQNRNPRLPNRALPSMAHGLVLSFPTAPLHPWQSPAPFHPWKRAHTHTSISPPSLSLNRPDPDTQARAWRRDGCNLQDDSGSMAWIENDRAPWRHPTSAELHPQQIRVASPPVPVSRPGRADRQELHPRR

SEQ ID NO: 2282 - DNA, 654 bp, Zea mays subsp. mays
  misc_feature (1)..(654): Ceres Seq. ID no. 13586839
cccctctgcgcacttcgattgcctgagcatttggccccagagaccaactccattccttgtttttctcttccttttccctcgaggatctcgatgtcattagaagaagcatatgctttagtattaccgtctcacatcagtgacgaactcgacgtctacacgtatcattttcaagtccgtttttggattggtgttaaaacctcacatgcaagtatcttgacatccatggcagataaagaacactagtcccggcggtggcgccgccgcggaggcagcgagcaaggagaagcaggccgccgtccggtcgggcgagagtgaccgggactgcgagctcatggggctcatgtggctgctgcagcgcaacgccacgcgctacggagcgacggccacggccgtcatccaggcgctgatggccgtggacgaggcgtccgccgcgggtgtcgcggtggcggcagacgcggggccggccgcggcgtgctcgctgcccgtggacgacatgcccctcccggccgaatacgcgcaggtcggcggggccagcgacgcgcctcgcggcgtctgctgcttcttctgcctgctcgtgctgttctccgttctaagcttccgctccgtgtactcgctgtagcaattttgtggttcaattgaagttcgttatatgct

SEQ ID NO: 2283 - protein, 95 aa, Zea mays subsp. mays
  misc_feature (1)..(95): Ceres Seq. ID no. 13586840
MGLMWLLQRNATRYGATATAVIQALMAVDEASAAGVAVAADAGPAAACSLPVDDMPLPAEYAQVGGASDAPRGVCCFFCLLVLFSVLSFRSVYSL

SEQ ID NO: 2284 - protein, 92 aa, Zea mays subsp. mays
  misc_feature (1)..(92): Ceres Seq. ID no. 13586841
MWLLQRNATRYGATATAVIQALMAVDEASAAGVAVAADAGPAAACSLPVDDMPLPAEYAQVGGASDAPRGVCCFFCLLVLFSVLSFRSVYSL

SEQ ID NO: 2285 - protein, 80 aa, Zea mays subsp. mays
  misc_feature (1)..(80): Ceres Seq. ID no. 13586842
PLCALRLPEHLAPETNSIPCFSLPFPSRISMSLEEAYALVLPSHISDELDVYTYHFQVRFWIGVKTSHASILTSMADKEH

SEQ ID NO: 2286 - DNA, 679 bp, Zea mays subsp. mays
  misc_feature (1)..(679): Ceres Seq. ID no. 13600480
aaggcataacaaaccggcaatcccctcaccatgagggtaatgtaataatgtttatccaaagcacacatatacgtgatggttaaatcgaattgttgaactggtccagacaaatggcaagcaatggtacaggtgtcgatccctcactcgagggaaagaacaaataacagggcaccaaattaaactggtgcatcagcgataccaattcgttaaatgaaaatcaagtagaaagaggaaggaaaaaaaaacaaacaaaaggaagacgaaggtgtgccactgccaccgccgtgcccaatcagagcacgcccacgcatcgggaatgcgcgggagcagcagagcagcgcagcgcagccaagtctctccccccaccttggtctcttccctccggctccggctcctcgtccggcggctcagtgaatgtagtacgcgaagaaggaggccacggcggccccgacgatggcgggtgcgaccgcggaggagccgctggtgggagacggagccggcgcctccgcggccagcgccacggtggccgaggcggcgacgaggacggcgcaggcgatcttcttcatctccatccctggatgcggcggcttattagcgaccgtagagacggcggcggcgggatgggatggaggcgaggaagtctctctctgctccgacgatcgcttgcctgggtagtacg

SEQ ID NO: 2287 - protein, 92 aa, Zea mays subsp. mays
  misc_feature (1)..(92): Ceres Seq. ID no. 13600481
MRGSSRAAQRSQVSPPTLVSSLRLRLLVRRLSECSTRRRRPRRPRRWRVRPRRSRWWETEPAPPRPAPRWPRRRRGRRRRSSSSPSLDAAAY

SEQ ID NO: 2288 - protein, 73 aa, Zea mays subsp. mays
  misc_feature (1)..(73): Ceres Seq. ID no. 13600482
MAGATAEEPLVGDGAGASAASATVAEAATRTAQAIFFISIPGCGGLLATVETAAAGWDGGEEVSLCSDDRLPG

SEQ ID NO: 2289 - DNA, 2085 bp, Zea mays subsp. mays
  misc_feature (1)..(2085): Ceres Seq. ID no. 13623233
aggatcccccaggttatcggaacctcggaaagcagtttatcaggccccgttccccgttccccgtcctccatcctcagtcccaggtctcttctagttctgtcgttctctggccaaggcatttccgtgcaggacgtacgtcccgaggatgcagactcgcaaccctgaccagccttccccggacccacgcgagcgggacaccgagcagacgacgtctacaaggcggaagcgacgcaagtatactgctgtagcttggtacgttcagcattcatttggtttgtcctgttcagggagtttgcatcaagccgaatattgctgcaaaccgatgatggctgtgcctgcaactgcatgcggtggactgtagctagggcctaatggtcgagtgcttcccaagctaactccaggcgattgcgcagttctgaatgcagaagacggaaactcaaatgcatcccagactcaaaagaatcaagctgtgagagatgcatatccaaggggcatcatgcttgcgactacgatgcactctatcgtgagcatagagactcacagaaagtgaagagcaacaggtaaatgagcctactagagcattagttattgctgtcctgatgtttggctaatgactatggcaaaagctccgcaacagttgctgctctccgtcaagatgtcaagttcctacgcgataccctgagcggcttgataacaacggtccaagcaaatgccgaacccagtgatggaaatacccgacctcagagccagccgttagacacccatcaagcggttcccatctcaatgcaatcacggcggccgagctctccagctcctgaagctgtgacattcgtggcagggaccccccgttctgacgcctctgggattgatgtcgctcctgtgagtcaaaagttgcccacctgaagaagtcatgcagatagtacaagggaagcgagatttctgacagaactcaagccgcgacatgtcacctctccacactcgcttcggggtggcccagcagagcctcgcttcataggtccaacccgatcagcatacagtctggaggttggggaacgtgctctttctcgtctgggtatacctgtttttgatatgcctccacccagtggccaggaatcgccggcagaatccccgcgacagccttctggcaatactgaagaccagttctgggaaacctgcgatgcagccgagttcacgcggttgatcaccatctatcaggaagagatcgagtcggtctacccgtgcttgaacacaggctcgctgatcaaatatgcaccggccattccagaactgggacgcatgccggaggacgagattcgcaagacaatcgagacccgtcgcctgtcacttacagttaaagacgtgcatctcgccaaacttgccatggccacaacaattgtcatcgaaggccatggaaagagtgaaaagagttccaagcttgttgaacctgtggaacgcagcttgttaagcattctggagccgagccgagagctgaaagacttgcaactgttcatagccttggtaagttgctgctacgccgtcatcgatgtggaagtgtatcaggcctcactaacccatgttcaatctcacgagatagagcgtatactacttccattctgacgaagaccttttggcctggcgaaccatcggtctcgccgcccgagaggcattagtacttggccttcaccggagaggtaccttgatggaatcgttcagcgttcctgaagagcgcgacgcagcgataagggttttctggactatctatgtcttggatcgtcgatggagtttcgggaccagcttgtcctttgccctcgtcgatcgagacatagaccctgaacttccagaaccagtaggtcattccctctacccacaaagtgacaaagtggaatatcgagtataatcgctgactcagttgcgcagggagaggactgtgcctatttgcagtgtatggtcgggtacggtcgactttgctcaacattatgggatgccctggtgccctttggccagcgcaatcccggcggtgatgtggattcactcatgaaggagctcgacatcaagacacaggagtggctcgagggggggcccggt

SEQ ID NO: 2290 - protein, 175 aa, Zea mays subsp. mays
  misc_feature (1)..(175): Ceres Seq. ID no. 15219369
MPPPSGQESPAESPRQPSGNTEDQFWETCDAAEFTRLITIYQEEIESVYPCLNTGSLIKYAPAIPELGRMPEDEIRKTIETRRLSLTVKDVHLAKLAMATTIVIEGHGKSEKSSKLVEPVERSLLSILEPSRELKDLQLFIALVSCCYAVIDVEVYQASLTHVQSHEIERILLPF

SEQ ID NO: 2291 - protein, 106 aa, Zea mays subsp. mays
  misc_feature (1)..(106): Ceres Seq. ID no. 15219370
MPEDEIRKTIETRRLSLTVKDVHLAKLAMATTIVIEGHGKSEKSSKLVEPVERSLLSILEPSRELKDLQLFIALVSCCYAVIDVEVYQASLTHVQSHEIERILLPF

SEQ ID NO: 2292 - DNA, 1134 bp, Zea mays subsp. mays
  misc_feature (1)..(1134): Ceres Seq. ID no. 14305110
gaaaatcgaaaccctagaccgcgcgccccctcgccctccggccttccacgtccgatccgatccaaaatgcataagctaggcagaggaagccgggacaaggtgcaacagttcatggcaattaccggcgcaaggtacatatatttttttaaacttttcgatttgttcggagagaccggtgttcagtgctaaattgtggtttggttggttagtggccgtagtatgtcaattttgcgagctgttgggagaacttgtttgtagtgcagcaacagcattcgtgttctgcaatttggcaataatatcatgctagaaagtaagaagttcttttggttgcaggaacatggaattttgtactgtcttttatgtggaaacatgtgttactgcctaatcttgatttgtaattttgtaatggaattctccaacacactggtagcattatactccccctttgtttgggatggaccactttttcatcttttaccaaaagttaacttttttttttggtgctgcaagagtgatccattgtcattgtcctgaaaaatcactagggttgtacattacagtcagtcatcggaccaactgaacctccgaggactactgtacactttagacactgctatcccaattttctgttaattttgtcaagcattgcatatttcacacagtgagaaagctgcccttcaggctcttaaagctagtgattggcacttggaaggagcttttgatgttttctacagccagccacaaattgctgttgctaatactcgacatctggaagagctctacaacagatataaaggtggaatattttactctctgttgcgccaatcatctttttatgccttgtctctgatttttttttccaattttacctgcgccatcatgttgtgtcttgattgctcagaaccagatgctgatatgataatggtggaaggcatatcacagatctgcaatgatttacaggtcattttttgggattttttttctttgaatgtatgttgttacactaaagtatcagcctgcagtcacttgtaatggataggtatatcaggcatcaggctcgaaatttgtgaactgtgattgtttcctttgttttgtgttttcttcatagtattcttcaatggaattcgtggaacg

SEQ ID NO: 2293 - protein, 77 aa, Zea mays subsp. mays
  misc_feature (1)..(77): Ceres Seq. ID no. 14305111
MLESKKFFWLQEHGILYCLLCGNMCYCLILICNFVMEFSNTLVALYSPFVWDGPLFHLLPKVNFFFWCCKSDPLSLS

SEQ ID NO: 2294 - protein, 62 aa, Zea mays subsp. mays
  misc_feature (1)..(62): Ceres Seq. ID no. 14305112
ENRNPRPRAPSPSGLPRPIRSKMHKLGRGSRDKVQQFMAITGARYIYFFKLFDLFGETGVQC

SEQ ID NO: 2295 - protein, 54 aa, Zea mays subsp. mays
  misc_feature (1)..(54): Ceres Seq. ID no. 14305113
MCYCLILICNFVMEFSNTLVALYSPFVWDGPLFHLLPKVNFFFWCCKSDPLSLS

SEQ ID NO: 2296 - DNA, 686 bp, Zea mays subsp. mays
  misc_feature (1)..(686): Ceres Seq. ID no. 14305829
ggttcttctggctctgtaccaggtaacatgttgcaacacaggccatcactgaaatctgggaaagacttaagggaagaacatgaagttgaaaagagaggatactccacaatgcttggatctggtggtgttagaaggtcaccgctaacaaaagtggcgcggagtatttctatgaaggatgtggtagcggcactcgagcgagagcctcagatgtcaaaatcctcattacttttccgcctatatggaaggccattgacagaaccatctgcaaagtaatttggaggataatcattgcagttcatattacagaggggcaacttttggtcaatatatgaggaggcccaatcaccaagcgatggggctgattggtcgacgatcaattttgcggggatttagcgattacttggaagccagcgtttccctggagccatttttgttttttcaagggaacagtctgcagatgtttcttttttttcaatgtttttttctctatataatcatgtgttgatcacaatgcccagccagcttcagctggtatgaacatcgtgatcgtttttgtatagcagatggagtaggatgttccttgagatgcttatgacttgctaagtgtcctattctttaatcgtgcgattttgttgtacagaaaacatgaaatgtatgtattggaggctcaaatttattcatgaacg

SEQ ID NO: 2297 - protein, 90 aa, Zea mays subsp. mays
  misc_feature (1)..(90): Ceres Seq. ID no. 14305830
GSSGSVPGNMLQHRPSLKSGKDLREEHEVEKRGYSTMLGSGGVRRSPLTKVARSISMKDVVAALEREPQMSKSSLLFRLYGRPLTEPSAK

SEQ ID NO: 2298 - protein, 81 aa, Zea mays subsp. mays
  misc_feature (1)..(81): Ceres Seq. ID no. 14305831
MLQHRPSLKSGKDLREEHEVEKRGYSTMLGSGGVRRSPLTKVARSISMKDVVAALEREPQMSKSSLLFRLYGRPLTEPSAK

SEQ ID NO: 2299 - protein, 58 aa, Zea mays subsp. mays
  misc_feature (1)..(58): Ceres Seq. ID no. 14305832
MRRPNHQAMGLIGRRSILRGFSDYLEASVSLEPFLFFQGNSLQMFLFFQCFFLYIIMC

SEQ ID NO: 2300 - DNA, 748 bp, Zea mays subsp. mays
  misc_feature (1)..(748): Ceres Seq. ID no. 14309476
aaaactcactcctcaaacctctctctcatcttcaagctattcgatcaatggcagcgacaatggcgacatcagcaaaatgcatgtccctaaacacatctcttcctaaagccctaaaccaaaccaaacccatctgttcctcaaaacccttcatctccctcccatccccaccaaaacccaccgtctctctcgccgtcactagcaccgccctcgccggagccgtgttctcttccctcagctactcggaacccgctttcgccgctcaccagatcgctcagctggcagcggcggctcaaggtagcgacaaccgcggcctagctctcctcctcccgatcgtcccggccatcggatgggtactcttcaacatcctccagccagctcttaaccagatcaacaagatgcgcgctagcaaaggagtcgtcgtgggtcttggcatcggtggtggtctcgctgcgtcagggcttttgactatgaccccggaggcctccgctagtatggtcaacgagatggcggcggtggcggaagctgcggcgaaagttgaagacaacaggggacagttgttgttgttcgtggttgcgccggctctgctttgggttctttacaatatattgcagcctgctttgaaccaactcaacaaaatgaggaataagtaataatcttattgtttacatgtaatcattgttgggattcaaaatgtaaaattaatcatttgtttcatggacagattctctggttaaattttggacagact

SEQ ID NO: 2301 - protein, 215 aa, Zea mays subsp. mays
  misc_feature (1)..(215): Ceres Seq. ID no. 14309477
NSLLKPLSHLQAIRSMAATMATSAKCMSLNTSLPKALNQTKPICSSKPFISLPSPPKPTVSLAVTSTALAGAVFSSLSYSEPAFAAHQIAQLAAAAQGSDNRGLALLLPIVPAIGWVLFNILQPALNQINKMRASKGVVVGLGIGGGLAASGLLTMTPEASASMVNEMAAVAEAAAKVEDNRGQLLLFVVAPALLWVLYNILQPALNQLNKMRNK

SEQ ID NO: 2302 - protein, 200 aa, Zea mays subsp. mays
  misc_feature (1)..(200): Ceres Seq. ID no. 14309478
MAATMATSAKCMSLNTSLPKALNQTKPICSSKPFISLPSPPKPTVSLAVTSTALAGAVFSSLSYSEPAFAAHQIAQLAAAAQGSDNRGLALLLPIVPAIGWVLFNILQPALNQINKMRASKGVVVGLGIGGGLAASGLLTMTPEASASMVNEMAAVAEAAAKVEDNRGQLLLFVVAPALLWVLYNILQPALNQLNKMRNK

SEQ ID NO: 2303 - protein, 196 aa, Zea mays subsp. mays
  misc_feature (1)..(196): Ceres Seq. ID no. 14309479
MATSAKCMSLNTSLPKALNQTKPICSSKPFISLPSPPKPTVSLAVTSTALAGAVFSSLSYSEPAFAAHQIAQLAAAAQGSDNRGLALLLPIVPAIGWVLFNILQPALNQINKMRASKGVVVGLGIGGGLAASGLLTMTPEASASMVNEMAAVAEAAAKVEDNRGQLLLFVVAPALLWVLYNILQPALNQLNKMRNK

SEQ ID NO: 2304 - DNA, 436 bp, Zea mays subsp. mays
  misc_feature (1)..(436): Ceres Seq. ID no. 15175567
agacagcgagccccaagccccaaacggccaaacctccttggacacgactcgccgcacccatccccatccgccgccgctgccatggccgacgagattgacacgaggccggcctccgcgggctcccgcggccgtcctgcgcacgctacgatatgggtgtggagagatgcgtgaacttggatggcctgacggaagcacagattgataaaaagctggaggagcttgccaaggccggcgagtctcttaaaaccaaatagttttggaactctatcctgccatgtttaactttcccaaataaatgatgccatatgggtgagcaattgctactctatcgttatctgtagttgtgcctggaattaagtctttaattggctcaactttgtgaaataatcactactcttttacttgccatgcattttctagattacatgctatattg

SEQ ID NO: 2305 - protein, 66 aa, Zea mays subsp. mays
  misc_feature (1)..(66): Ceres Seq. ID no. 15175568
DSEPQAPNGQTSLDTTRRTHPHPPPLPWPTRLTRGRPPRAPAAVLRTLRYGCGEMRELGWPDGSTD

SEQ ID NO: 2306 - protein, 56 aa, Zea mays subsp. mays
  misc_feature (1)..(56): Ceres Seq. ID no. 15175569
RQRAPSPKRPNLLGHDSPHPSPSAAAAMADEIDTRPASAGSRGRPAHATIWVWRDA

SEQ ID NO: 2307 - protein, 34 aa, Zea mays subsp. mays
  misc_feature (1)..(34): Ceres Seq. ID no. 15175570
MGVERCVNLDGLTEAQIDKKLEELAKAGESLKTK

SEQ ID NO: 2308 - DNA, 1009 bp, Zea mays subsp. mays
  misc_feature (1)..(1009): Ceres Seq. ID no. 15180551
ctcttcctacgcttccttgtctccaccgcgagcgacctccatacaacggtgtcagcggcctccctacgccaccgtcctcatccgccgccgtcgtccactacaccgccacggtcgtcctcggtcgcgaccgcgcccttcgttctcatccagcgccacggtctagggtttgagcactcctccatcgtctccttgcctcttctccatcatctccttgcctcttctctcctctgtgttctccctctggtcacggtcttgtttgctcttttgtttttcattcaaatcgtcgtgcatccagatctggcgtctatttttgggccaaatgcttatttcttgcagaaaccaggcatccagatctagcgtgttctgagcacaaaagttgtacaggcatgacctattgatcaggaaagttgtagcagacacgttcgtcgtcgcgaacatcgtcgagccgtgtggctactgcgctggccggtgagcatcgtcaagtcgtgtggctgctgcccctgaccagcacgatgcgtctctggtctcccatgatgattagatggcacctgatcaccgcgtctctgaacacctgatcaccgggagctcttcatatttaagaaggcatggaacatcagtgcttgcacaagagtttatggtgtctacacatgattatgacattgaagaagaagaagaaatccatgggtttgcattgcctcaccagtctgcacctcgtgatatggaaagcaccgggagacatccattcagacatcaaatagttcggttatctgaaacagctgatataaagtttaaatggcgggtgcttcttcaaccaggaattaggcatgccttatgttatgacatgttaattcaagccattcagcaagtacgattatgtgttattgtagattatgtattcagttcagcatggagttcagtttacttgcatactggctaccatgtatatagaatgctagctatctgtaaatgatctagttgtgaatgatattataattgtgatgcttttgtg

SEQ ID NO: 2309 - protein, 142 aa, Zea mays subsp. mays
  misc_feature (1)..(142): Ceres Seq. ID no. 15180552
MAPDHRVSEHLITGSSSYLRRHGTSVLAQEFMVSTHDYDIEEEEEIHGFALPHQSAPRDMESTGRHPFRHQIVRLSETADIKFKWRVLLQPGIRHALCYDMLIQAIQQVRLCVIVDYVFSSAWSSVYLHTGYHVYRMLAICK

SEQ ID NO: 2310 - protein, 118 aa, Zea mays subsp. mays
  misc_feature (1)..(118): Ceres Seq. ID no. 15180553
LFLRFLVSTASDLHTTVSAASLRHRPHPPPSSTTPPRSSSVATAPFVLIQRHGLGFEHSSIVSLPLLHHLLASSLLCVLPLVTVLFALLFFIQIVVHPDLASIFGPNAYFLQKPGIQI

SEQ ID NO: 2311 - protein, 111 aa, Zea mays subsp. mays
  misc_feature (1)..(111): Ceres Seq. ID no. 15180554
MVSTHDYDIEEEEEIHGFALPHQSAPRDMESTGRHPFRHQIVRLSETADIKFKWRVLLQPGIRHALCYDMLIQAIQQVRLCVIVDYVFSSAWSSVYLHTGYHVYRMLAICK

SEQ ID NO: 2312 - DNA, 734 bp, Brassica napus
  misc_feature (1)..(734): Ceres Seq. ID no. 12557512
  misc_feature (484)..(484): n is a, c, t, g, unknown, or other
atacacaaaaaaatcatctcacagactcactcttcaagtctctccctctctccgatcatcaatggcggcgactatggcgacatcaaccagatgcatgtccctgaacccatctcctcctaaacccctaaaccaaaccaaacccatctcctcctcaaaacacttcatcaccctcccaactccaccaaaacccaccgtctctctcgccgtcacaagcaccgccctagccggagccgtcttctccgccctcagctactccgaacccgctctcgccgctcaccagatctcccagctcgccgccgccgccgtgtcggaaggcagcgacaaccgcggcctagctcttctcctcccgatcgtcccggccatcgggtgggtcctcttcaacatcctccagccagctctcaaccagatcaacaagatgcgcgcaagcaaaggagtcgtcgtgggtctcggcggcatcggtgatggtctcgccgcgtcagggctnttgacgccgccgccggaggcagtagctgcggcggaggcggcggagagagctggagataacaggggacagttgttgttgttcgtggttgcaccggcgctgctttgggttctttacaatatattgcagccggctttgaaccaactcaacaaaatgaggtctcagtgaaaactctttacaatatataaatattaatcatcgttcgtcctttgtttaagttttggacaattatccattgttatatatttcgctc

SEQ ID NO: 2313 - protein, 215 aa, Brassica napus
  misc_feature (1)..(215): Ceres Seq. ID no. 12557513
  misc_feature (161)..(161): Xaa is any aa, unknown or other
YTKKSSHRLTLQVSPSLRSSMAATMATSTRCMSLNPSPPKPLNQTKPISSSKHFITLPTPPKPTVSLAVTSTALAGAVFSALSYSEPALAAHQISQLAAAAVSEGSDNRGLALLLPIVPAIGWVLFNILQPALNQINKMRASKGVVVGLGGIGDGLAASGXLTPPPEAVAAAEAAERAGDNRGQLLLFVVAPALLWVLYNILQPALNQLNKMRSQ

SEQ ID NO: 2314 - protein, 195 aa, Brassica napus
  misc_feature (1)..(195): Ceres Seq. ID no. 12557514
  misc_feature (141)..(141): Xaa is any aa, unknown or other
MAATMATSTRCMSLNPSPPKPLNQTKPISSSKHFITLPTPPKPTVSLAVTSTALAGAVFSALSYSEPALAAHQISQLAAAAVSEGSDNRGLALLLPIVPAIGWVLFNILQPALNQINKMRASKGVVVGLGGIGDGLAASGXLTPPPEAVAAAEAAERAGDNRGQLLLFVVAPALLWVLYNILQPALNQLNKMRSQ

SEQ ID NO: 2315 - protein, 191 aa, Brassica napus
  misc_feature (1)..(191): Ceres Seq. ID no. 12557515
  misc_feature (137)..(137): Xaa is any aa, unknown or other
MATSTRCMSLNPSPPKPLNQTKPISSSKHFITLPTPPKPTVSLAVTSTALAGAVFSALSYSEPALAAHQISQLAAAAVSEGSDNRGLALLLPIVPAIGWVLFNILQPALNQINKMRASKGVVVGLGGIGDGLAASGXLTPPPEAVAAAEAAERAGDNRGQLLLFVVAPALLWVLYNILQPALNQLNKMRSQ

SEQ ID NO: 2316 - protein, 195 aa, Brassica napus; identical to SEQ ID NO: 2314
  misc_feature (1)..(195): Ceres Seq. ID no. 16611927
  misc_feature (141)..(141): Xaa is any aa, unknown or other

SEQ ID NO: 2317 - DNA, 621 bp, Brassica napus
  misc_feature (1)..(621): Ceres Seq. ID no. 12557400
atcacaagcaatcaaagcaaaacactcataaaaacataacagctgtctgaatctctctctctcttgtaatggcattctcaaaatctctagggttcattcttcttgcagcgtttttcatttccttcacggtggctcaatctccggctccagctccatctaacggcggaggaaggaggatctcaccggcgcattcacctaagaaggcgttatctcctgcacaagctgtctctccttctcctcaaaccgcgttgacccctgaatcatctgcctctcctccatcgccgccttcggttgattctcctttagctgattctccttctgattcgtcggctgtttctccctcttcgatctctaactcgccggctcaagctcccgctcctgtaagcggcgccgtttcgaacagctacgcggtgtttggatccatcgctgttatgttatctgctgccgttttggctatgtaggttcgaggaatgagatttattagatttttagtatttatttatttacgatatatatgagtttttggagagtgagagatgattctttattttatttttgttagtttttctttatcagattactatttgtttctccttttgttgatcttatgagcctttttcc

SEQ ID NO: 2318 - protein, 130 aa, Brassica napus
  misc_feature (1)..(130): Ceres Seq. ID no. 12557401
MAFSKSLGFILLAAFFISFTVAQSPAPAPSNGGGRRISPAHSPKKALSPAQAVSPSPQTALTPESSASPPSPPSVDSPLADSPSDSSAVSPSSISNSPAQAPAPVSGAVSNSYAVFGSIAVMLSAAVLAM

SEQ ID NO: 2319 - protein, 130 aa, Brassica napus; identical to SEQ ID NO: 2318
  misc_feature (1)..(130): Ceres Seq. ID no. 16625335

SEQ ID NO: 2320 - DNA, 663 bp, Arabidopsis thaliana
  misc_feature (1)..(663): Ceres Seq. ID no. 13648081
aaaaaaaaaaaaaaaaaatgaagaaacttcttttgatatttctgttttctcttgtcattctccaaactgcttgtgacgatagatgggcatgaagatgtacccgaaaacgacgaaaatgctcttcttaaggctgttgcaaaccaacctgtatctgttgcaattgatgctggaagttcagatttccagttttattcagagggagtgtttacgggatcttgtggaacagagctgaaccatggtgtggcagcggtcgggtatggatctgagagggggaaaaagtattggatagtgagaaactcatggggagctgaatggggagagggaggctatataaagattgaaagagagattgatgaaccggaagggcgttgcggtattgcgatggaggcatcgtatccgatcaagctatcgtcttctaatcctaccccgaaagacggtgatgtcaaagatgagctctagatatgtgtacacattgtgtaaaaccatatcaaaggtgatcccaattccttgttgattcatgttgttagtttcgtcttcatgatttgattttgttgttggttttgaatttgaataaaaatgtctcgtgttttctcaatcctttgtttattaattatgtacaagagaccaataagacacttttggcgaaaaaaaaaaaaaaaaaaa

SEQ ID NO: 2321 - protein, 53 aa, Arabidopsis thaliana
  misc_feature (1)..(53): Ceres Seq. ID no. 13648082
MNRKGVAVLRWRHRIRSSYRLLILPRKTVMSKMSSRYVYTLCKTISKVIPIPC

SEQ ID NO: 2322 - protein, 49 aa, Arabidopsis thaliana
  misc_feature (1)..(49): Ceres Seq. ID no. 13648083
MGMKMYPKTTKMLFLRLLQTNLYLLQLMLEVQISSFIQRECLRDLVEQS

SEQ ID NO: 2323 - protein, 47 aa, Arabidopsis thaliana
  misc_feature (1)..(47): Ceres Seq. ID no. 13648084
MKMYPKTTKMLFLRLLQTNLYLLQLMLEVQISSFIQRECLRDLVEQS

SEQ ID NO: 2324 - DNA, 867 bp, Arabidopsis thaliana
  misc_feature (1)..(867): Ceres Seq. ID no. 13648266
gttagtgtaagtcactcgcttctcatgcaaactataatatattgaatctcctctctcttctctttttcgcaactttcacagagaggtagtttttgatgtttgccgaccggaatattttccggtgaatagccgtcccgagtggctcggacttctgcccggtatctttcagctttgatagtggagatagccggtttacgtctggcaaacccagtttctatgaatggttttggccgggtttttatcttttctcgccgtcgatcggtttataccgattgcttttcacttttatttcaataatttctacagatctgagttaggaattgatttttaggtactagatcctaaaaattaataattctggcttgtgattttggaaacctcgatttgcaggaaatctatcaagcggttatttcttggttgaaagattgaagaatattccgatgcatataaccattcccttatgttgtgttctttaggagttccgttcagtgttatttaggtggtaaacaaaaaaatttcgtgcgatgtttcgacgatattttcttcaccggattctgggcttctcgacggcaaggttgatgtcgttaaatttctgatgatgacttatcggcatgtgttacagttgaattctaaagtcaacacgtgttttcggataagagtccaacgttaagaatctttttgctgtagatgttattctaatgggctattgttgggctccaattttcttgctgcacaatcgttgtaggctttaagtcttgtatcttttgtttaataaaattcacacgggaaaaaaaacaaaagtcactcgcttctacagcgcgtgatggcttgtttctccacccatctctccttcgttgagaagcatgc

SEQ ID NO: 2325 - protein, 36 aa, Arabidopsis thaliana
  misc_feature (1)..(36): Ceres Seq. ID no. 13648267
MVLAGFLSFLAVDRFIPIAFHFYFNNFYRSELGIDF

SEQ ID NO: 2326 - DNA, 536 bp, Arabidopsis thaliana
  misc_feature (1)..(536): Ceres Seq. ID no. 14307583
tgctatccgatgaacttctgaccatgattattgataaagtgagttcttgaaatcccatctctcttagtgtgatgtataatattttggtaaatttagttagcacatgcttcttttctttctctactttgtttttgctagacatttgctgatgcagattctgacaaagacggtaaaattagtaaggatgaatggaatgtctatgtgcataaacatcctagcttgttgaagaatatgactcttccttacctaaaggatgtgacgacagcattcccaagttttatattcaacactgaggttgaagactgaggcacaactgtccatgcaacaccggtcatcttttttctgcttggtcctgtaattcgagtgagattgtcatagcgcaagagcagaacgaggaaagaaggttttccttattttattttaagccaacgtagttgatgattattagctgtaagtaaaattgtcaagcactttgctttgttttgatgactttactgtaattgttccattgaaagtaatgaagcatttttcttttc

SEQ ID NO: 2327 - protein, 40 aa, Arabidopsis thaliana
  misc_feature (1)..(40): Ceres Seq. ID no. 14307584
MLLFFLYFVFARHLLMQILTKTVKLVRMNGMSMCINILAC

SEQ ID NO: 2328 - DNA, 560 bp, Arabidopsis thaliana
  misc_feature (1)..(560): Ceres Seq. ID no. 12322366
aacaaccaaaaacattcatttgtcattttgtctcctcttttgttttctctgatcactagtatggctgtattcagagtcttgcttgcttctcttctcatatctcttcttgtcctcgacttcgtccatgccgatatggtgacgtcgaatgacgcccctaaaatcgattgcaacagcaggtgccaagagcggtgcagtctttcgagtaggccaaatctttgtcacagagcgtgcgggacttgctgcgctaggtgcaactgcgtggcaccgggcacatccggaaactacgacaaatgtccgtgctatggtagcctaaccacccacggaggacgcagaaagtgtccttaaaaactctgtcgctgttttatttgatttcgtttataatactttacttttatgagagtaattgtggttattttcttgggaattattaaaaagcaaaagaaagagaatgttatacgtcatgtgcaactcttcgatctttgttttagtgtttatccaatttgtacttgttggtttggttcctggttaacattaggtctgaaaaggtattgtttttcatc

SEQ ID NO: 2329 - protein, 114 aa, Arabidopsis thaliana
  misc_feature (1)..(114): Ceres Seq. ID no. 12322367
NNQKHSFVILSPLLFSLITSMAVFRVLLASLLISLLVLDFVHADMVTSNDAPKIDCNSRCQERCSLSSRPNLCHRACGTCCARCNCVAPGTSGNYDKCPCYGSLTTHGGRRKCP

SEQ ID NO: 2330 - protein, 94 aa, Arabidopsis thaliana
  misc_feature (1)..(94): Ceres Seq. ID no. 12322368
MAVFRVLLASLLISLLVLDFVHADMVTSNDAPKIDCNSRCQERCSLSSRPNLCHRACGTCCARCNCVAPGTSGNYDKCPCYGSLTTHGGRRKCP

SEQ ID NO: 2331 - protein, 70 aa, Arabidopsis thaliana
  misc_feature (1)..(70): Ceres Seq. ID no. 12322369
MVTSNDAPKIDCNSRCQERCSLSSRPNLCHRACGTCCARCNCVAPGTSGNYDKCPCYGSLTTHGGRRKCP

SEQ ID NO: 2332 - protein, 94 aa, Arabidopsis thaliana; identical to SEQ ID NO: 2330
  misc_feature (1)..(94): Ceres Seq. ID no. 16625325

SEQ ID NO: 2333 - DNA, 1386 bp, Arabidopsis thaliana
  misc_feature (1)..(1386): Ceres Seq. ID no. 12337134
actggtggtaatatcgctggcgtttcgcaagtatcaccgggaattgcaaagaagcagaggaccatgtacggagacgctacaaactggaatgaagatgagtatagagaatcaattttgaaggagcgagagatagagacacgcaccgtcttcagaaccgcctgggctcctccggcgagaatctctaatccagacgcatttgttgtagcctccagcgatggaactttagctttccattcactgaactcgcttgtgtctcaatcggcgagttttggctactcgaaaggtcaagatgttatggtggctgaacctgagagagtggttagggcacacgaaggtcctgcttatgatgttaagttctatggtgaagacgaagatgctttgctacttagttgtggtgatgatggtagagttaggggatggaaatggagagaatttgctgaatcagatgtgtctcttcatttgaaagagaatcatctgaagccattgcttgaactgattaatccacaacacaaaggtccttggggtgcgctttcaccgatgcctgagatcaatgccatgtctgttgatcctcagtcaggaagtgtatttacagcagctggtgattcttgcgcatattgttgggacgtggagagtggtaagattaaaatgacctttaaaggtcattcagactatttgcatactgtagtttctcgtagttctgcaagtcagatattgacgggttcagaggatgggactgcgagaatctgggattgcaaaacgggaaaatgtgttaaagtaattggttcccaggataaaaagtcccgccttcgcgttagttctatggcccttgatgggagtgaaagctggttggtttgtggacagggcaaaaatttagctttatggaatcttcccgcctcagaatgcgtacaaacaatacccatccctgcacatgtacaggatgtgatgtttgatgaaaagcaaattttgactgtaggagcagaaccacttctaagacgtttcgacttaaatggagctttgctttctcaaattcactgtgctccttgttcagtattttccatttccttgcatccagcaggagtagttgctgtgggaggttatggaggtattgttgatgtcatctctcaatttggaagccatctctgcacatttcgtagcagttcattgtaaaactccttacagtttcttgatttggctcgataccctaaagaggtaccgaaatgtgtcagtcagattattgcagaggttaagaaaccttttctttgtttttcttaggatcttgctcctgactaaagaccaattagttgtttggttaagtgtaattggtttgtggttccgtagttgctatcaaatttgaaccattaaaatgacattggaccggtttagtct

SEQ ID NO: 2334 - protein, 388 aa, Arabidopsis thaliana
  misc_feature (1)..(388): Ceres Seq. ID no. 12337135
TGGNIAGVSQVSPGIAKKQRTMYGDATNWNEDEYRESILKEREIETRTVFRTAWAPPARISNPDAFVVASSDGTLAFHSLNSLVSQSASFGYSKGQDVMVAEPERVVRAHEGPAYDVKFYGEDEDALLLSCGDDGRVRGWKWREFAESDVSLHLKENHLKPLLELINPQHKGPWGALSPMPEINAMSVDPQSGSVFTAAGDSCAYCWDVESGKIKMTFKGHSDYLHTVVSRSSASQILTGSEDGTARIWDCKTGKCVKVIGSQDKKSRLRVSSMALDGSESWLVCGQGKNLALWNLPASECVQTIPIPAHVQDVMFDEKQILTVGAEPLLRRFDLNGALLSQIHCAPCSVFSISLHPAGVVAVGGYGGIVDVISQFGSHLCTFRSSSL

SEQ ID NO: 2335 - protein, 367 aa, Arabidopsis thaliana
  misc_feature (1)..(367): Ceres Seq. ID no. 12337136
MYGDATNWNEDEYRESILKEREIETRTVFRTAWAPPARISNPDAFVVASSDGTLAFHSLNSLVSQSASFGYSKGQDVMVAEPERVVRAHEGPAYDVKFYGEDEDALLLSCGDDGRVRGWKWREFAESDVSLHLKENHLKPLLELINPQHKGPWGALSPMPEINAMSVDPQSGSVFTAAGDSCAYCWDVESGKIKMTFKGHSDYLHTVVSRSSASQILTGSEDGTARIWDCKTGKCVKVIGSQDKKSRLRVSSMALDGSESWLVCGQGKNLALWNLPASECVQTIPIPAHVQDVMFDEKQILTVGAEPLLRRFDLNGALLSQIHCAPCSVFSISLHPAGVVAVGGYGGIVDVISQFGSHLCTFRSSSL

SEQ ID NO: 2336 - protein, 290 aa, Arabidopsis thaliana
  misc_feature (1)..(290): Ceres Seq. ID no. 12337137
MVAEPERVVRAHEGPAYDVKFYGEDEDALLLSCGDDGRVRGWKWREFAESDVSLHLKENHLKPLLELINPQHKGPWGALSPMPEINAMSVDPQSGSVFTAAGDSCAYCWDVESGKIKMTFKGHSDYLHTVVSRSSASQILTGSEDGTARIWDCKTGKCVKVIGSQDKKSRLRVSSMALDGSESWLVCGQGKNLALWNLPASECVQTIPIPAHVQDVMFDEKQILTVGAEPLLRRFDLNGALLSQIHCAPCSVFSISLHPAGVVAVGGYGGIVDVISQFGSHLCTFRSSSL

SEQ ID NO: 2337 - protein, 367 aa, Arabidopsis thaliana; identical to SEQ ID NO: 2335
  misc_feature (1)..(367): Ceres Seq. ID no. 16625327

SEQ ID NO: 2338 - DNA, 1012 bp, Arabidopsis thaliana
  misc_feature (1)..(1012): Ceres Seq. ID no. 12605220
attcttgtccattaagactcggcggattaaaaaaaggtttggcctttccgtggagtagtttcttgacattttctttctgctatctcttacacaattgggtatttagctgacacgacgaagaaggtctctcatcaattatctgagatttttacataagaaaggctccgacaaagcagatggaagacgatatgtggtgcgttagctcatctggttcttctagaagctatcgatcggaaactgctgctaagtatcaatcagggccttatcaagatttggaagagtttgaagaagttgacgacgatatagcagtggagtatccatgcccgttttgcgcaagtgattatgatttagttgaattgtgtcaccatatcgacgaagaacatcgtcatgaagctaacaatgggatatgtcctgtatgtagcaaaagggtgaagatgcatatggtggatcatataacatcacatcatagagatgtcttgaagagtgagcagaaggaaatgtcttacagggaagatccatatttatctgataaatatcttcaacctcatcttgatgagttgccaccatctatgaatcatcatcagcatccctctaaacatgtttccgatcaatttttatcgttcatcaacaattctgcattaccaaatcagaccaagcttgtgctgcctgattcaagtgtagaagacaagaatccgattaaggattcgtcagcagcaaaagagggtacatcgtcgtgtcctttatcggatagtgataaattggagaaggcaaagaagtgtgagtttgtacagggactgttgtcatcagccatgtttgatgatgaatgtgactcttctgagtaaaataaagatgtgaagtcgccaatgggaaaggcaggtgattgtcattgttgtaattttattcagctctatttatatatatgcatcttttttacagacataacactagctttagccttataatataagctgatgagttttcagtttgtttcttcacaagaatcttttgtcgc

SEQ ID NO: 2339 - protein, 221 aa, Arabidopsis thaliana
  misc_feature (1)..(221): Ceres Seq. ID no. 12605221
MEDDMWCVSSSGSSRSYRSETAAKYQSGPYQDLEEFEEVDDDIAVEYPCPFCASDYDLVELCHHIDEEHRHEANNGICPVCSKRVKMHMVDHITSHHRDVLKSEQKEMSYREDPYLSDKYLQPHLDELPPSMNHHQHPSKHVSDQFLSFINNSALPNQTKLVLPDSSVEDKNPIKDSSAAKEGTSSCPLSDSDKLEKAKKCEFVQGLLSSAMFDDECDSSE

SEQ ID NO: 2340 - protein, 217 aa, Arabidopsis thaliana
  misc_feature (1)..(217): Ceres Seq. ID no. 12605222
MWCVSSSGSSRSYRSETAAKYQSGPYQDLEEFEEVDDDIAVEYPCPFCASDYDLVELCHHIDEEHRHEANNGICPVCSKRVKMHMVDHITSHHRDVLKSEQKEMSYREDPYLSDKYLQPHLDELPPSMNHHQHPSKHVSDQFLSFINNSALPNQTKLVLPDSSVEDKNPIKDSSAAKEGTSSCPLSDSDKLEKAKKCEFVQGLLSSAMFDDECDSSE

SEQ ID NO: 2341 - protein, 135 aa, Arabidopsis thaliana
  misc_feature (1)..(135): Ceres Seq. ID no. 12605223
MHMVDHITSHHRDVLKSEQKEMSYREDPYLSDKYLQPHLDELPPSMNHHQHPSKHVSDQFLSFINNSALPNQTKLVLPDSSVEDKNPIKDSSAAKEGTSSCPLSDSDKLEKAKKCEFVQGLLSSAMFDDECDSSE

SEQ ID NO: 2342 - protein, 221 aa, Arabidopsis thaliana; identical to SEQ ID NO: 2339
  misc_feature (1)..(221): Ceres Seq. ID no. 16612507

SEQ ID NO: 2343 - DNA, 786 bp, Arabidopsis thaliana
  misc_feature (1)..(786): Ceres Seq. ID no. 13488280
atgggtctaatcgccggtaaagtgcgtgtgtttgttttggtgtttgctttggtcacagattttactatgggagaagcagagtttggtgatgagaagcccttgtttcctcaccctcaccctcatcctctcctccacaagaagggctttaaaaaagaattcggcgacttaggtggtggtggtggtatcagcggtggaggcggctttggagcaggtggcggttggattggaggcagtgttggaggctttggtggaggaataggcggtggatttggtggaggaggattcggaggtggagccggtaaaggagttgacggtggcttcggaaaaggagttgacggtggagccggtaaaggagttgacggtggagccgggaaaggatttgatggaggagttggcaaaggagttgacggtggagccggaaaaggatttgatggaggagtcggcaaaggatttgagggaggaatcggaaaaggaattgagggaggagtcggaaaaggatttgacggtggagcaggtaaaggagttgacggtggagccattggaggaatcggcggaggagccggtaaagaaattggtggaggaattggcggcggaggtcactgagaatttgtttaaccgtaatgtgcattgatgaggagctaaaatccaatgcatgtcatttaagaaaactaattcgttatatatgtaacaataactgaaatgtatgtcgtttctctttagtttgttttactctttgaatatgattgtatcttgcttcttcgtgcaagtcaagtgaataaaacgatt

SEQ ID NO: 2344 - protein, 200 aa, Arabidopsis thaliana
  misc_feature (1)..(200): Ceres Seq. ID no. 13488281
MGLIAGKVRVFVLVFALVTDFTMGEAEFGDEKPLFPHPHPHPLLHKKGFKKEFGDLGGGGGISGGGGFGAGGGWIGGSVGGFGGGIGGGFGGGGFGGGAGKGVDGGFGKGVDGGAGKGVDGGAGKGFDGGVGKGVDGGAGKGFDGGVGKGFEGGIGKGIEGGVGKGFDGGAGKGVDGGAIGGIGGGAGKEIGGGIGGGGH

SEQ ID NO: 2345 - protein, 178 aa, Arabidopsis thaliana
  misc_feature (1)..(178): Ceres Seq. ID no. 13488282
MGEAEFGDEKPLFPHPHPHPLLHKKGFKKEFGDLGGGGGISGGGGFGAGGGWIGGSVGGFGGGIGGGFGGGGFGGGAGKGVDGGFGKGVDGGAGKGVDGGAGKGFDGGVGKGVDGGAGKGFDGGVGKGFEGGIGKGIEGGVGKGFDGGAGKGVDGGAIGGIGGGAGKEIGGGIGGGGH

SEQ ID NO: 2346 - protein, 82 aa, Arabidopsis thaliana
  misc_feature (1)..(82): Ceres Seq. ID no. 16611569
MEELAKELTVEPEKDLMEESAKDLREESEKELREESEKDLTVEQVKELTVEPLEESAEEPVKKLVEELAAEVTENLFNRNVH

SEQ ID NO: 2347 - DNA, 2956 bp, Arabidopsis thaliana
  misc_feature (1)..(2956): Ceres Seq. ID no. 13504690
gagcttatccgcctgaaacttatttctcagtatccaaaacgatggcgaagaagacacttcgctgaagcttttttttccaaaaaaatttcttagtgtcgtcaatggctttggctccacttaattttacggaaatgccactgagaagctctcttcctctgacctctagctctcgctattgttcctctccttcgcttcacgcattgctcttctattcgttgggtgtgaaaccctcgcgtcaacaaattgttcggccattctcttcgctgcgtacaagcgagcgtagcaacaacaggagcaataacaatcgtcgattagatcaacgtaatcataaacctactcctccttggatagataagtggcctccgtcatcctccggagctggcggtgatcatgccgggaagaaaggtggtgaaaacaacggcggagatagaattcggtctgcggaggaggaagcggaagcgaaacttcggtatttggagaaggataaaggacaaaacgcgattgagaggattgttcttcggctacggaatttaggattaggttcggatgatgaggacgatgtggaagatgacgagggaggtggaattaacggcggagatgtgaagccggtgactggagaagagagattgggggatttgttgaagagagagtgggtgagacctgatatgatgcttgctgagggagaagagagtgaggaagaggatgaggtattattgccatgggagaaaaatgaggaagagcaggcggcggagagagtagtaggagaaggaggagtggcggtgatgcagaagaggagagctagagctccatcactggcggagctcaccgttgaggattctgagttacggcggttaaggagggatggaatgtatctgagggttaggatcaatataccaaaagctgggctaacgcaggcagtgatggagaagatttatgatacttggaggaaagaagagcttgtgaggctaaagttccacgaagtgcttgctcgtgacatgaagacggcccatgagattgttgagcgtcgaactggtggaatggtgatatggagggccggaagtgtaatggtggtttatcgtggacttgactataaaggacctcctgtgatctctaatcaaatggccggtcctaaagagactctttttgtcccagatgtatcttctgctggcgatgaagcaacaaatgccaaagataaccaaagtgcacctttggtaatcaaagatccgatcatcaagaaccctattcgcaaagagaatatgacagaagaagaagttgaatttaacagtctattagacagcttaggtccacgttttcaagagtggtggggtactggggtactacctgtggacgctgacttactacctcctacaattcctggttataaaacacctttcaggcttcttcctactgggatgagatcaaatttgaccaatgccgaaatgacaaatctcaggaagattggtaaaactctcccatgccattttgctcttggtaggaacagaaatcaccaaggattggcagctgcaatactccagatctgggagaaaagtctaattgcaaagatcgctgtgaagcgaggtatccagaatacaaataacaaactaatggcggatgaagtgaagacattgacagggggtgtcttgctgctcagaaataagtattacattgtaatatatcgtgggaaggacttccttccttcaagtgtggcagctactttagcagaaagacaagaattaacgaaagagattcaagatgtcgaagagagggtaagaaatcgtgagattgaggctgttcagcctgttggtgacaaagtaccagcagaagctggcactctggccgagttttatgaggctcaagcccgatgggggaaggaaataactccagaccatcgtgaaaagatgattgaagaagcttcaagggttgcaaatgctagagttgttaaacgaatacaacacaaactaaaccttgcccaatcgaagtttcaaagagcagagaaactgttgtccaaaatagaagcctctatgattccaaatggacctgattatgatcaagaggtcatctccgaggaagaaagagctatgttccggaaagtgggactgaaaatgaaggcatacttacccataggtatccgtggtgtatttgatggagtcattgagaacatgcatctgcattggaaacacagagaattggtgaagcttatatcaaaacagaagaaccaagcatttgttgaggagacagcccggttactagaatacgagagtggtggagttcttgtggcaatagaaaaggttcctaaaggatttgcgcttatttattaccgtgggaagaattacaggagacccattagcttgagaccaaggaatcttctgacaaaagcaaaagcattgaaacgttccattgcaatgcaacgccacgaggcacttagtcagcatatttctgaactggagagaacaatagagcaaatgcaaagccaactcacttcgaaaaacccgtcatacagtgaatcagaatgggagaacgatgaggatgatgatgatgatgaagaagaagagaaagatgatgtggaggataatgagagtgattgggatgaaactgatggcgaatctgcaatttctagtatcgaagaagctgatatgtcatcgcgctaagctgataaagtttttaacacagagattgtcctatctcaggaggttgaagctgacaatgatgtcagaggaatggttctggttctggttctgtctatccagtggtggtaaaagaaaagcaagtgatgattcatcatcaacgtgggtaaggtttaagtttcctgtcgcagagattacagaatctacgagctcagaaagcagaacctatctgtatttcaggggagaaaaaaataagcatctatagtttatatacattgtaagttttgccaatgtatcattattaaaaaatatatatatatcaattaacattc

SEQ ID NO: 2348 - protein, 848 aa, Arabidopsis thaliana
  misc_feature (1)..(848): Ceres Seq. ID no. 13504691
MALAPLNFTEMPLRSSLPLTSSSRYCSSPSLHALLFYSLGVKPSRQQIVRPFSSLRTSERSNNRSNNNRRLDQRNHKPTPPWIDKWPPSSSGAGGDHAGKKGGENNGGDRIRSAEEEAEAKLRYLEKDKGQNAIERIVLRLRNLGLGSDDEDDVEDDEGGGINGGDVKPVTGEERLGDLLKREWVRPDMMLAEGEESEEEDEVLLPWEKNEEEQAAERVVGEGGVAVMQKRRARAPSLAELTVEDSELRRLRRDGMYLRVRINIPKAGLTQAVMEKIYDTWRKEELVRLKFHEVLARDMKTAHEIVERRTGGMVIWRAGSVMVVYRGLDYKGPPVISNQMAGPKETLFVPDVSSAGDEATNAKDNQSAPLVIKDPIIKNPIRKENMTEEEVEFNSLLDSLGPRFQEWWGTGVLPVDADLLPPTIPGYKTPFRLLPTGMRSNLTNAEMTNLRKIGKTLPCHFALGRNRNHQGLAAAILQIWEKSLIAKIAVKRGIQNTNNKLMADEVKTLTGGVLLLRNKYYIVIYRGKDFLPSSVAATLAERQELTKEIQDVEERVRNREIEAVQPVGDKVPAEAGTLAEFYEAQARWGKEITPDHREKMIEEASRVANARVVKRIQHKLNLAQSKFQRAEKLLSKIEASMIPNGPDYDQEVISEEERAMFRKVGLKMKAYLPIGIRGVFDGVIENMHLHWKHRELVKLISKQKNQAFVEETARLLEYESGGVLVAIEKVPKGFALIYYRGKNYRRPISLRPRNLLTKAKALKRSIAMQRHEALSQHISELERTIEQMQSQLTSKNPSYSESEWENDEDDDDDEEEEKDDVEDNESDWDETDGESAISSIEEADMSSR

SEQ ID NO: 2349 - protein, 838 aa, Arabidopsis thaliana
  misc_feature (1)..(838): Ceres Seq. ID no. 13504692
MPLRSSLPLTSSSRYCSSPSLHALLFYSLGVKPSRQQIVRPFSSLRTSERSNNRSNNNRRLDQRNHKPTPPWIDKWPPSSSGAGGDHAGKKGGENNGGDRIRSAEEEAEAKLRYLEKDKGQNAIERIVLRLRNLGLGSDDEDDVEDDEGGGINGGDVKPVTGEERLGDLLKREWVRPDMMLAEGEESEEEDEVLLPWEKNEEEQAAERVVGEGGVAVMQKRRARAPSLAELTVEDSELRRLRRDGMYLRVRINIPKAGLTQAVMEKIYDTWRKEELVRLKFHEVLARDMKTAHEIVERRTGGMVIWRAGSVMVVYRGLDYKGPPVISNQMAGPKETLFVPDVSSAGDEATNAKDNQSAPLVIKDPIIKNPIRKENMTEEEVEFNSLLDSLGPRFQEWWGTGVLPVDADLLPPTIPGYKTPFRLLPTGMRSNLTNAEMTNLRKIGKTLPCHFALGRNRNHQGLAAAILQIWEKSLIAKIAVKRGIQNTNNKLMADEVKTLTGGVLLLRNKYYIVIYRGKDFLPSSVAATLAERQELTKEIQDVEERVRNREIEAVQPVGDKVPAEAGTLAEFYEAQARWGKEITPDHREKMIEEASRVANARVVKRIQHKLNLAQSKFQRAEKLLSKIEASMIPNGPDYDQEVISEEERAMFRKVGLKMKAYLPIGIRGVFDGVIENMHLHWKHRELVKLISKQKNQAFVEETARLLEYESGGVLVAIEKVPKGFALIYYRGKNYRRPISLRPRNLLTKAKALKRSIAMQRHEALSQHISELERTIEQMQSQLTSKNPSYSESEWENDEDDDDDEEEEKDDVEDNESDWDETDGESAISSIEEADMSSR

SEQ ID NO: 2350 - protein, 660 aa, Arabidopsis thaliana
  misc_feature (1)..(660): Ceres Seq. ID no. 13504693
MMLAEGEESEEEDEVLLPWEKNEEEQAAERVVGEGGVAVMQKRRARAPSLAELTVEDSELRRLRRDGMYLRVRINIPKAGLTQAVMEKIYDTWRKEELVRLKFHEVLARDMKTAHEIVERRTGGMVIWRAGSVMVVYRGLDYKGPPVISNQMAGPKETLFVPDVSSAGDEATNAKDNQSAPLVIKDPIIKNPIRKENMTEEEVEFNSLLDSLGPRFQEWWGTGVLPVDADLLPPTIPGYKTPFRLLPTGMRSNLTNAEMTNLRKIGKTLPCHFALGRNRNHQGLAAAILQIWEKSLIAKIAVKRGIQNTNNKLMADEVKTLTGGVLLLRNKYYIVIYRGKDFLPSSVAATLAERQELTKEIQDVEERVRNREIEAVQPVGDKVPAEAGTLAEFYEAQARWGKEITPDHREKMIEEASRVANARVVKRIQHKLNLAQSKFQRAEKLLSKIEASMIPNGPDYDQEVISEEERAMFRKVGLKMKAYLPIGIRGVFDGVIENMHLHWKHRELVKLISKQKNQAFVEETARLLEYESGGVLVAIEKVPKGFALIYYRGKNYRRPISLRPRNLLTKAKALKRSIAMQRHEALSQHISELERTIEQMQSQLTSKNPSYSESEWENDEDDDDDEEEEKDDVEDNESDWDETDGESAISSIEEADMSSR

SEQ ID NO: 2351 - protein, 105 aa, Arabidopsis thaliana
  misc_feature (1)..(105): Ceres Seq. ID no. 16611676
MRVIGMKLMANLQFLVSKKLICHRAKLIKFLTQRLSYLRRLKLTMMSEEWFWFWFCLSSGGKRKASDDSSSTWVRFKFPVAEITESTSSESRTYLYFRGEKNKHL

SEQ ID NO: 2352 - DNA, 1531 bp, Arabidopsis thaliana
  misc_feature (1)..(1531): Ceres Seq. ID no. 13504905
aattgtcaaaaactcacaaggcattatcatgtggacatgcaaccttttttttctatacgcattacagaaatgaaaacaatgattaggatcgcatgcacgtcaagaaaacaacctatagctgtactttgatatactaactcaaatcatgtcttggctcaagcacacaagcttctagctagatacaactgcaaacatatatgatggctttgtctaataagaagacgacgacttgggcaccgctttgaccagtcaatacaccaaatctgtatgtatcatttatataaatattatctttccacagttgttgaagaatcacatagacagcacacacggattccatggagactaaacagagtatccctctcctcatgccctataagatgggacccttcaatctttctcacagggttgttttggcgccattgactagatcgagatcgtatggtaacattcctcagcctaatgccaaattatattacactcagagaacaacacctggtggtcttcttatttccgaatcctgtgtagtctccgagacatcattgggctatccggatttacctggattatggaacagagaccaagtggaggcatggaagcccatcgtggatgcggttcattcgaaaggcggtatcttcttctgccagatttggcatggtggcagagtttttcatcaagaccagccaaatggggaagcacccgtctcctctacagacaagccattgatgtgcaagaacatgtatggaggtcagtttaagcctccacggcggttaaggagcgacgagcttcccgccattgtcaacgactttagaatcgctgcacgaaacgcgatcgaagctggcttcgatggagtggaggttcacggcgcacatggttacctgatcgatcagttcctgaaagacaaagtgaatgacagaagtgaccaatatggtgggtcattagagaaccgctgtagatttgctcttgaagtaatcgaagcagtggtgaacgagatcggttcagatcgtgttggaatcagactctcgccatttgcagattacatggagtcaggagactcgaatccagaagcattagggctctacctggtgcaagctatgaacaagcatggcatggagtcgtctacggtcacatggttgaacctagaatgaaaacccttgaaggaatcttcgaatgcacggaatcgcttacgcccatgcgaaaagccttcaaaggtacgttcatagtagcaggaggatattctagagaagacgggaacaaggcggtggaagagggaagaaccgatcttgtggcttatggacggccgttcttggcgaatccggatctgacgaggagattcgaactcaatgagccgttgaataggtacgatagatcaacgttctacacttcagatcctgtagtgggctatacagactaccctttcctcgagaccacagatacaacaactgcttaaggggtttattcagatgcattattagcaaaacatatttttcaatcacataaggctaaaagcttgcctcaaacaagcttcggc

SEQ ID NO: 2353 - protein, 269 aa, Arabidopsis thaliana
  misc_feature (1)..(269): Ceres Seq. ID no. 13504906
METKQSIPLLMPYKMGPFNLSHRVVLAPLTRSRSYGNIPQPNAKLYYTQRTTPGGLLISESCVVSETSLGYPDLPGLWNRDQVEAWKPIVDAVHSKGGIFFCQIWHGGRVFHQDQPNGEAPVSSTDKPLMCKNMYGGQFKPPRRLRSDELPAIVNDFRIAARNAIEAGFDGVEVHGAHGYLIDQFLKDKVNDRSDQYGGSLENRCRFALEVIEAVVNEIGSDRVGIRLSPFADYMESGDSNPEALGLYLVQAMNKHGMESSTVTWLNLE

SEQ ID NO: 2354 - protein, 259 aa, Arabidopsis thaliana
  misc_feature (1)..(259): Ceres Seq. ID no. 13504907
MPYKMGPFNLSHRVVLAPLTRSRSYGNIPQPNAKLYYTQRTTPGGLLISESCVVSETSLGYPDLPGLWNRDQVEAWKPIVDAVHSKGGIFFCQIWHGGRVFHQDQPNGEAPVSSTDKPLMCKNMYGGQFKPPRRLRSDELPAIVNDFRIAARNAIEAGFDGVEVHGAHGYLIDQFLKDKVNDRSDQYGGSLENRCRFALEVIEAVVNEIGSDRVGIRLSPFADYMESGDSNPEALGLYLVQAMNKHGMESSTVTWLNLE

SEQ ID NO: 2355 - protein, 255 aa, Arabidopsis thaliana
  misc_feature (1)..(255): Ceres Seq. ID no. 13504908
MGPFNLSHRVVLAPLTRSRSYGNIPQPNAKLYYTQRTTPGGLLISESCVVSETSLGYPDLPGLWNRDQVEAWKPIVDAVHSKGGIFFCQIWHGGRVFHQDQPNGEAPVSSTDKPLMCKNMYGGQFKPPRRLRSDELPAIVNDFRIAARNAIEAGFDGVEVHGAHGYLIDQFLKDKVNDRSDQYGGSLENRCRFALEVIEAVVNEIGSDRVGIRLSPFADYMESGDSNPEALGLYLVQAMNKHGMESSTVTWLNLE

SEQ ID NO: 2356 - protein, 269 aa, Arabidopsis thaliana; identical to SEQ ID NO: 2353
  misc_feature (1)..(269): Ceres Seq. ID no. 16611838

SEQ ID NO: 2357 - DNA, 763 bp, Arabidopsis thaliana
  misc_feature (1)..(763): Ceres Seq. ID no. 13646098
agagcacaacaccacgatgacgaccaaggccatggagagaggatttaagctgattctgggttctcaatccatggcgagaaagaggattctggctgaaatgggatatgattacactatcgtgactgcagacattgatgagaaagctattaggacagagaagcctgaagatttggttgtggctcttgctgaagccaaggcaaatgagattatatcgaaattgggaggtgagagccagtttgcaaaagatcctcaaccaactcttttgattactgcagacactgttgttgtgtacaaaggtgttattagagaaaaaccaaccactaaagaagaagctcgtgaatttatcaaaggctattccggttcacacggaggagttgtgggatctgttcttgttagaaacttgaaaactggagttaaaaaaggaggatgggacaaagctgaggtttatttccatgagataccagaacaagtcattgacgatcttattgatgatgcaataacttataaggttgctggaggtttaacactggagcatcccctcatttcaccctttatcgattctgtggtgggaggggttgatacagtcatgggacttcctaaagaactcacagaaaaattcataaacgatgtgttgttgtagctcaagtccctttttgattatgtaggaatacttttgaatctctctaatcaatcatttattttgtaatttggtaaaacacagatttatcgtatcatgtttttaagtagtgatgatgttttcagg

SEQ ID NO: 2358 - protein, 212 aa, Arabidopsis thaliana
  misc_feature (1)..(212): Ceres Seq. ID no. 13646099
EHNTTMTTKAMERGFKLILGSQSMARKRILAEMGYDYTIVTADIDEKAIRTEKPEDLVVALAEAKANEIISKLGGESQFAKDPQPTLLITADTVVVYKGVIREKPTTKEEAREFIKGYSGSHGGVVGSVLVRNLKTGVKKGGWDKAEVYFHEIPEQVIDDLIDDAITYKVAGGLTLEHPLISPFIDSVVGGVDTVMGLPKELTEKFINDVLL

SEQ ID NO: 2359 - protein, 207 aa, Arabidopsis thaliana
  misc_feature (1)..(207): Ceres Seq. ID no. 13646100
MTTKAMERGFKLILGSQSMARKRILAEMGYDYTIVTADIDEKAIRTEKPEDLVVALAEAKANEIISKLGGESQFAKDPQPTLLITADTVVVYKGVIREKPTTKEEAREFIKGYSGSHGGVVGSVLVRNLKTGVKKGGWDKAEVYFHEIPEQVIDDLIDDAITYKVAGGLTLEHPLISPFIDSVVGGVDTVMGLPKELTEKFINDVLL

SEQ ID NO: 2360 - protein, 202 aa, Arabidopsis thaliana
  misc_feature (1)..(202): Ceres Seq. ID no. 13646101
MERGFKLILGSQSMARKRILAEMGYDYTIVTADIDEKAIRTEKPEDLVVALAEAKANEIISKLGGESQFAKDPQPTLLITADTVVVYKGVIREKPTTKEEAREFIKGYSGSHGGVVGSVLVRNLKTGVKKGGWDKAEVYFHEIPEQVIDDLIDDAITYKVAGGLTLEHPLISPFIDSVVGGVDTVMGLPKELTEKFINDVLL

SEQ ID NO: 2361 - protein, 202 aa, Arabidopsis thaliana; identical to SEQ ID NO: 2360
  misc_feature (1)..(202): Ceres Seq. ID no. 16611817

SEQ ID NO: 2362 - DNA, 1179 bp, Arabidopsis thaliana
  misc_feature (1)..(1179): Ceres Seq. ID no. 13646557
gagaagaccgccggactaagattcaaccagcggtgacttcgacacttattagccggtatatttcttcgccggagcttcctcaacgattatggccaccgatggcgagagtatctcgatgtcgttggcggtggctacctgcgtcgcgatggcactattctacgttttgatcctttacgttcccaccgtgatactccgtctcccgtcggcttcttcttacaccgaattcatgattcggcgattcatctgcgcggccatttgtactgtagcatctctcgtcttcacagcttttatacttccgataaaaagctgggaggcctcttatatacttggagtttatggcataaggaaagatcatctgtggcaaggagtggtgtatcctcttctattgacctcgctcgtttatgctgggtctttggtgttgaagttgttatttctcctggaatcatggaaggaaaatggcggaggatgtagttcctttaattacatcagaagctttttccaaacaatccctgcttcggtattgacaagtgcttctaatgtttccgtttggcgcaattttatcgtggcaccagtaactgaggagctggttttccgatcatgtatgatacctttgcttctgtgtgctgggtttaggattaacactgccatctttctgtgcccagttctctttagcttggctcacttaaaccattttagagagatgtacatcaggcataaccgcagctatctccgggcttcacttattgttggtcttcagcttggctacacagtcatttttggtgcatatgcatcgtttctcttcatcagaaccggacatcttgctgctcctttgtttgctcatatattttgcaactacatgggattgcctgtgctatacgcaaatggaaaaggtttggtgagtgcagcgttcttaggcggtgtggttgggttcgtcttacttctctttcctttaacaaagcctctcatgtacaacgatagtaccaacgattgtccgtgttggcttggctattgtttgaggaattgacacttctccaagtttttttttatatatcatcatgtcttagaatctattttttgacacaatattggaattatggtcttttactgcaagctaatgtttcttgatagtttatgtagttttttccttgtaaatatataataataataataattggttcg

SEQ ID NO: 2363 - protein, 311 aa, Arabidopsis thaliana
  misc_feature (1)..(311): Ceres Seq. ID no. 13646558
MATDGESISMSLAVATCVAMALFYVLILYVPTVILRLPSASSYTEFMIRRFICAAICTVASLVFTAFILPIKSWEASYILGVYGIRKDHLWQGVVYPLLLTSLVYAGSLVLKLLFLLESWKENGGGCSSFNYIRSFFQTIPASVLTSASNVSVWRNFIVAPVTEELVFRSCMIPLLLCAGFRINTAIFLCPVLFSLAHLNHFREMYIRHNRSYLRASLIVGLQLGYTVIFGAYASFLFIRTGHLAAPLFAHIFCNYMGLPVLYANGKGLVSAAFLGGVVGFVLLLFPLTKPLMYNDSTNDCPCWLGYCLRN

SEQ ID NO: 2364 - protein, 302 aa, Arabidopsis thaliana
  misc_feature (1)..(302): Ceres Seq. ID no. 13646559
MSLAVATCVAMALFYVLILYVPTVILRLPSASSYTEFMIRRFICAAICTVASLVFTAFILPIKSWEASYILGVYGIRKDHLWQGVVYPLLLTSLVYAGSLVLKLLFLLESWKENGGGCSSFNYIRSFFQTIPASVLTSASNVSVWRNFIVAPVTEELVFRSCMIPLLLCAGFRINTAIFLCPVLFSLAHLNHFREMYIRHNRSYLRASLIVGLQLGYTVIFGAYASFLFIRTGHLAAPLFAHIFCNYMGLPVLYANGKGLVSAAFLGGVVGFVLLLFPLTKPLMYNDSTNDCPCWLGYCLRN

SEQ ID NO: 2365 - protein, 292 aa, Arabidopsis thaliana
  misc_feature (1)..(292): Ceres Seq. ID no. 13646560
MALFYVLILYVPTVILRLPSASSYTEFMIRRFICAAICTVASLVFTAFILPIKSWEASYILGVYGIRKDHLWQGVVYPLLLTSLVYAGSLVLKLLFLLESWKENGGGCSSFNYIRSFFQTIPASVLTSASNVSVWRNFIVAPVTEELVFRSCMIPLLLCAGFRINTAIFLCPVLFSLAHLNHFREMYIRHNRSYLRASLIVGLQLGYTVIFGAYASFLFIRTGHLAAPLFAHIFCNYMGLPVLYANGKGLVSAAFLGGVVGFVLLLFPLTKPLMYNDSTNDCPCWLGYCLRN

SEQ ID NO: 2366 - protein, 311 aa, Arabidopsis thaliana; identical to SEQ ID NO: 2363
  misc_feature (1)..(311): Ceres Seq. ID no. 16612493

SEQ ID NO: 2367 - DNA, 2071 bp, Arabidopsis thaliana
  misc_feature (1)..(2071): Ceres Seq. ID no. 14302791
gatcatttcctgaaaactagaaaacacagtttaaagggaacataaaaagcaactctttgagagatcagagaaaccctaatttgctaagaaccctaatctcaatttccatcttccaaagttcagattctgtatgtaaatgcatctgaagaattctactgtagcagaacggcggtacatcggaaaagaaaccgccggttatttaacttcttcctccgatttggatccgaaacctaagattaaacatcatcgtcctcttcaggtacctgagattctgactccagacattggtgctggtgctggattcagtgtgtataacaatcaagttcaagctcagagtcgtcatcatctgacggttgaaatcccagattcatcgtctcacaatcttacatctaagagacctgtggtggttcaatcttctaatccgttcaacgttgacgatttccgaagacagcaacgcacaagcttgggttcgatttcatcttattgtccgtcgtatctcttatcgtttttttcttcttctcttccatcgatcccatcggcgactaatcagaagcttcttcgtcatgttcttagagtccgtttgatatgtttccatcttcgtttcttacttcttctctctgttcctcctctctatatctttttcctggtgattagtttcagattcttccttctctttgtcttctcgattatcgctttctctttcgtcctttcgatctctctcaaattcgctcttcctcacttaccatcgattcgtttgattatcgctcggttactttctctcaagcttacccctaccagatcatcctcttcatctcaggagaacactaaacatgttatttggtcaattgggtctaagcctgtgactgagaagaagaccaactctggctcatgggttcagaagtacagctctggtgatgtatacgagggagagtttcatagggggaagtgttcaggaagtggagtttattactattctatgaagggtaaatacgaaggggattggattgatgggaagtatgatggatatggagttgaaacttgggctaaagggagtaggtaccgaggtcaatacaggcaagggatgagacatggaactggtatctacagattttatacaggggatgtatatgctggtgagtggtcgaatggacagagccatggctgtggtgtgtatacctctgaggatggtagtcgttttgttggagagtttaaatggggtgtcaaacatggccttggtcattatcatttcagaaatggtgatacatatgctggggagtattttgcagacaggatgcatggttttggagtgtatcaatttggaaacgggcatcggtatgaaggagcctggcatgaggggagaaggcaaggacttggtatgtacacgttcaggaatggtgagacacaggcaggccattgggaagacggagttcttaactgtcctaccgagcagaccactcgccctgattcatcgttttccatcagtcattccaaggttgtcgacactgtccagcaagcaaggaaagcagccaagaaagcacgcgaagttgtgaaagttgaagagagagtgaacagagcagtgatggtcgcaaaccgagcagcaaatgctgctagagttgctgctacaaaggctgtccaaacccaaacatttcattgtagtagtggtgacgatcccttgtgaattcctgcggcaaagattttgacataatcgcagtcatgaccttacctcaaacttctacgaagacagaagagtgaaagagagatgtttagagaacagagtcagaattcgcaatctccgttgagattttcttgaaggtgaaccacttggaaccaatatcgagatctcataagtaataagtaagagatctggctatggagcaagtattactggtttactttttcttttctcccacttgttttatgagcaggctggtttaaaactgtacataggttgttgaagagtaagcaatgtgtgttaacaaaagatctttgtaacaagcgtaatccatgtaagagaagtaacaaaacattgttttacttttacaacgtgttgaaaataacacctttttttacc

SEQ ID NO: 2368 - protein, 513 aa, Arabidopsis thaliana
  misc_feature (1)..(513): Ceres Seq. ID no. 14302792
MHLKNSTVAERRYIGKETAGYLTSSSDLDPKPKIKHHRPLQVPEILTPDIGAGAGFSVYNNQVQAQSRHHLTVEIPDSSSHNLTSKRPVVVQSSNPFNVDDFRRQQRTSLGSISSYCPSYLLSFFSSSLPSIPSATNQKLLRHVLRVRLICFHLRFLLLLSVPPLYIFFLVISFRFFLLFVFSIIAFSFVLSISLKFALPHLPSIRLIIARLLSLKLTPTRSSSSSQENTKHVIWSIGSKPVTEKKTNSGSWVQKYSSGDVYEGEFHRGKCSGSGVYYYSMKGKYEGDWIDGKYDGYGVETWAKGSRYRGQYRQGMRHGTGIYRFYTGDVYAGEWSNGQSHGCGVYTSEDGSRFVGEFKWGVKHGLGHYHFRNGDTYAGEYFADRMHGFGVYQFGNGHRYEGAWHEGRRQGLGMYTFRNGETQAGHWEDGVLNCPTEQTTRPDSSFSISHSKVVDTVQQARKAAKKAREVVKVEERVNRAVMVANRAANAARVAATKAVQTQTFHCSSGDDPL

SEQ ID NO: 2369 - protein, 513 aa, Arabidopsis thaliana; identical to SEQ ID NO: 2368
  misc_feature (1)..(513): Ceres Seq. ID no. 16625439

SEQ ID NO: 2370 - DNA, 2531 bp, Arabidopsis thaliana
  misc_feature (1)..(2531): Ceres Seq. ID no. 14302797
ggtcttaccttgatcctctctctctctttctctcgccaacacaagatagttaaatgaaaggcttcagagactgggttttcgctctatccaactcaatggcatcatctagaccacttttgggaagtgacccttttttccgtgaccctcatcaagaacaagataaccactctcaagcacctgccgcaccacaaccagtgacactctcggaaccaccatgttcaaccagtagtgatttagaaattctgcctcctctctctcagcaacaagttccacttgaaagcttgtaccagtcaagtattgatcttaacggaaagaaacataatccactagcaaagattggtggccttcaagtgcagttcttacgccttgttcaaaggtttgggcagtcacagaataatattctagtctccaaggttttgtatcgggtacatcttgcgatgctgatacgagctgaggaatcagaacttaagaatgtaaaacttaggcaagatagggccaaagctttagcaagggagcaagaatcatctggcataccggagcttgatttctcacttagaatccttgtcctggggaaaacaggtgtcggcaagagtgcaaccataaactctatttttggtcagcccaaaagtgagactgatgctttccgaccgggcacagatcgcatagaagaggttatgggaactgtcagtggagttaaagttacctttattgatacccctggttttcacccactgtcatcttctagcacaagaaaaaaccgaaagattctcctatctattaagagatatgttaagaagcgtccacctgatgtagttctttacttggaccgccttgatatgatcgacatgcgatacagtgatttctccctcctgcagcttataactgaaatctttggtgcagctatatggttaaacacgatacttgtaatgacgcattccgcagctactacagaaggacgtaatggacaatctgtgaactatgagtcatatgtgggccagcgcatggatgtggttcaacattatatacatcaggctgtgtctgatacaaaactagaaaaccctgttctgttagttgaaaatcatcccagctgtaaaaagaatcttgctggtgagtatgttcttccaaatggggtggtatggaagcctcagtttatgtttctgtgcgtttgtaccaaagttcttggcgatgtccagtctttactgagatttcgtgacagcattggcctgggtcagccaagtagtacccgaacagcttcccttcctcatcttctttcagtttttctgcgccgtcgcttatcatcaggtgcagatgaaacagagaaagagatagataagcttctgaatttggatttagaggaggaagatgagtatgaccagttgcctacaatccgtatccttgggaaatcccggtttgagaagctgtcaaagtctcagaagaaggagtatctcgatgagcttgattacagggaaaccctttatctgaagaaacaattgaaggaagaatgccgaagacgacgggatgaaaagctagttgaagaggaaaatctcgaggacactgaacagcgtgaagcagctgttccactgcctgacatggcaggtccagacagttttgattcggattttccggctcacagatatcgatgcgtatcggcaggtgaccagtggctcgtgagacctgtctatgacccacaaggttgggatcgcgatgtgggatttgatggaataaatattgagacggctgcaaaaataaataggaatctattcgcttcagctacaggacaggtgagcagagacaagcaacgcttcactatccaatctgagactaatgcagcttatactagaaactttagagaacagacattctctgtagctgttgaccttcaatcatcaggagaagatctggtgtactcgtttcagggcggcacaaagcttcaaacatttaagcacaacacaactgatgttggagttggtttgacatcttttggtgggaaatactatgtgggcggaaagcttgaggataccttattggttgggaagagggtgaagttaactgcgaatgcaggtcagatgaggggttcagggcaaacagcaaacggcgggagctttgaagcttgtatcagagggagagattacccggtcagaaatgagcaaatcggtttgacaatgacggctctgtctttcaagcgagaactggtcttgaactatggtttacagactcagtttagaccagcccggggcacgaacatagacgtcaacataaacatgaacaataggaaaatggggaagataaatgtgaaacttaacagctctgagcactgggagattgctttgatatcagcgttaacgatgttcaaggctttagtacggcggagtaagactgaaatgactgaggaaaatgaagaagaaaagattgtgaattttctcgtttcctaaaaaaattaggtaaagaaaagatattttggacacatatgaatagatgataactgatgtaagagatgtttggaagacagaacatatgcacatttccttcag

SEQ ID NO: 2371 - protein, 792 aa, Arabidopsis thaliana
  misc_feature (1)..(792): Ceres Seq. ID no. 14302798
MKGFRDWVFALSNSMASSRPLLGSDPFFRDPHQEQDNHSQAPAAPQPVTLSEPPCSTSSDLEILPPLSQQQVPLESLYQSSIDLNGKKHNPLAKIGGLQVQFLRLVQRFGQSQNNILVSKVLYRVHLAMLIRAEESELKNVKLRQDRAKALAREQESSGIPELDFSLRILVLGKTGVGKSATINSIFGQPKSETDAFRPGTDRIEEVMGTVSGVKVTFIDTPGFHPLSSSSTRKNRKILLSIKRYVKKRPPDVVLYLDRLDMIDMRYSDFSLLQLITEIFGAAIWLNTILVMTHSAATTEGRNGQSVNYESYVGQRMDVVQHYIHQAVSDTKLENPVLLVENHPSCKKNLAGEYVLPNGVVWKPQFMFLCVCTKVLGDVQSLLRFRDSIGLGQPSSTRTASLPHLLSVFLRRRLSSGADETEKEIDKLLNLDLEEEDEYDQLPTIRILGKSRFEKLSKSQKKEYLDELDYRETLYLKKQLKEECRRRRDEKLVEEENLEDTEQREAAVPLPDMAGPDSFDSDFPAHRYRCVSAGDQWLVRPVYDPQGWDRDVGFDGINIETAAKINRNLFASATGQVSRDKQRFTIQSETNAAYTRNFREQTFSVAVDLQSSGEDLVYSFQGGTKLQTFKHNTTDVGVGLTSFGGKYYVGGKLEDTLLVGKRVKLTANAGQMRGSGQTANGGSFEACIRGRDYPVRNEQIGLTMTALSFKRELVLNYGLQTQFRPARGTNIDVNINMNNRKMGKINVKLNSSEHWEIALISALTMFKALVRRSKTEMTEENEEEKIVNFLVS

SEQ ID NO: 2372 - protein, 778 aa, Arabidopsis thaliana
  misc_feature (1)..(778): Ceres Seq. ID no. 14302799
MASSRPLLGSDPFFRDPHQEQDNHSQAPAAPQPVTLSEPPCSTSSDLEILPPLSQQQVPLESLYQSSIDLNGKKHNPLAKIGGLQVQFLRLVQRFGQSQNNILVSKVLYRVHLAMLIRAEESELKNVKLRQDRAKALAREQESSGIPELDFSLRILVLGKTGVGKSATINSIFGQPKSETDAFRPGTDRIEEVMGTVSGVKVTFIDTPGFHPLSSSSTRKNRKILLSIKRYVKKRPPDVVLYLDRLDMIDMRYSDFSLLQLITEIFGAAIWLNTILVMTHSAATTEGRNGQSVNYESYVGQRMDVVQHYIHQAVSDTKLENPVLLVENHPSCKKNLAGEYVLPNGVVWKPQFMFLCVCTKVLGDVQSLLRFRDSIGLGQPSSTRTASLPHLLSVFLRRRLSSGADETEKEIDKLLNLDLEEEDEYDQLPTIRILGKSRFEKLSKSQKKEYLDELDYRETLYLKKQLKEECRRRRDEKLVEEENLEDTEQREAAVPLPDMAGPDSFDSDFPAHRYRCVSAGDQWLVRPVYDPQGWDRDVGFDGINIETAAKINRNLFASATGQVSRDKQRFTIQSETNAAYTRNFREQTFSVAVDLQSSGEDLVYSFQGGTKLQTFKHNTTDVGVGLTSFGGKYYVGGKLEDTLLVGKRVKLTANAGQMRGSGQTANGGSFEACIRGRDYPVRNEQIGLTMTALSFKRELVLNYGLQTQFRPARGTNIDVNINMNNRKMGKINVKLNSSEHWEIALISALTMFKALVRRSKTEMTEENEEEKIVNFLVS

SEQ ID NO: 2373 - protein, 664 aa, Arabidopsis thaliana
  misc_feature (1)..(664): Ceres Seq. ID no. 14302800
MLIRAEESELKNVKLRQDRAKALAREQESSGIPELDFSLRILVLGKTGVGKSATINSIFGQPKSETDAFRPGTDRIEEVMGTVSGVKVTFIDTPGFHPLSSSSTRKNRKILLSIKRYVKKRPPDVVLYLDRLDMIDMRYSDFSLLQLITEIFGAAIWLNTILVMTHSAATTEGRNGQSVNYESYVGQRMDVVQHYIHQAVSDTKLENPVLLVENHPSCKKNLAGEYVLPNGVVWKPQFMFLCVCTKVLGDVQSLLRFRDSIGLGQPSSTRTASLPHLLSVFLRRRLSSGADETEKEIDKLLNLDLEEEDEYDQLPTIRILGKSRFEKLSKSQKKEYLDELDYRETLYLKKQLKEECRRRRDEKLVEEENLEDTEQREAAVPLPDMAGPDSFDSDFPAHRYRCVSAGDQWLVRPVYDPQGWDRDVGFDGINIETAAKINRNLFASATGQVSRDKQRFTIQSETNAAYTRNFREQTFSVAVDLQSSGEDLVYSFQGGTKLQTFKHNTTDVGVGLTSFGGKYYVGGKLEDTLLVGKRVKLTANAGQMRGSGQTANGGSFEACIRGRDYPVRNEQIGLTMTALSFKRELVLNYGLQTQFRPARGTNIDVNINMNNRKMGKINVKLNSSEHWEIALISALTMFKALVRRSKTEMTEENEEEKIVNFLVS

SEQ ID NO: 2374 - protein, 476 aa, Arabidopsis thaliana
  misc_feature (1)..(476): Ceres Seq. ID no. 16625440
MDVVQHYIHQAVSDTKLENPVLLVENHPSCKKNLAGEYVLPNGVVWKPQFMFLCVCTKVLGDVQSLLRFRDSIGLGQPSSTRTASLPHLLSVFLRRRLSSGADETEKEIDKLLNLDLEEEDEYDQLPTIRILGKSRFEKLSKSQKKEYLDELDYRETLYLKKQLKEECRRRRDEKLVEEENLEDTEQREAAVPLPDMAGPDSFDSDFPAHRYRCVSAGDQWLVRPVYDPQGWDRDVGFDGINIETAAKINRNLFASATGQVSRDKQRFTIQSETNAAYTRNFREQTFSVAVDLQSSGEDLVYSFQGGTKLQTFKHNTTDVGVGLTSFGGKYYVGGKLEDTLLVGKRVKLTANAGQMRGSGQTANGGSFEACIRGRDYPVRNEQIGLTMTALSFKRELVLNYGLQTQFRPARGTNIDVNINMNNRKMGKINVKLNSSEHWEIALISALTMFKALVRRSKTEMTEENEEEKIVNFLVS

SEQ ID NO: 2375 - DNA, 1857 bp, Arabidopsis thaliana
  misc_feature (1)..(1857): Ceres Seq. ID no. 14309912
ggggtttggtttgtttctcaaggaaaaatttcaactttctttcttatttcagtaaacgagagatatgttttcaatctcaatctgattctttctcgcagcggctaattctagtgtcgctaatagggtctctgtttcttcaaatttagttctttaaattcactacgaagatttttgttatggcgagtagaaagctggttcgagatttactgatcacaaagcagcctcttctccagcaattggtgcaccaacggagagtgggcgcaagactaggtcttcttcagggaaatgggtttgcgagtcatcgacggtttagtgttttcagtgagttctcgaagaagattagaggagaagctgatagcaatcctgaatttcaaaagacagtgaaggagttcaaggaaagagcagaggagttgcaaggtgttaaagaggacttgaaagttagaacgaaacaaactactgagaagttgtataaacaaggtcaaggcgtctggacggaggctgaatctgtggccaaaaaggtctcttcaagtgtgaaagacaagttctcagcagctacagaagaggtcaaggagtcattcaagctcggtaaggaggagagtgcagagtcagcaagttcatcaggcacaggaaccactgaaggagaaaaacagcagcagcaatctggttctacggaggagcaagatacattttttggaaaattcaagtccagcatttcttcaccaaaactatctgaggcgtttcacaagcctcttgactttgcaaagaagggacttgacattgtaaaggatgaattgcgtggaaacccatctaaaaggaagcacctggagtatacacctccgccgccatttacaggtgagagaagtacgagaacggagatggtaattatgccaacaaaacagtctaagtggcaaaaaaagtgggaatcattaagagaaaagatgcaaggctatcctgtatttaaacgtctaagcgggatgagtgagccagttgtcaacaagagccaagagattgcagaagatgtgagggaaaagtgggaaaccagtgataatccgattgttcacaagattcaggacatgaatgagaggatctttgaggaaacaggttctgcatcgacttacaaggagatccgccgccgagatccatcattctccttgccggactttgttgcagaaattcaggaagccatcagaccggtcttgaatgcatatagtaagggagatgctaagaccttgaagaagtattgcagcaaggaattgattgaacggtgtacggcagagcacagagctttcacgagtcaaggttattttttcgatcacaagcttctgcatgtatctgaagttgatattcaagagacaaagatgatgggaactactccagtaatcatcgtcaggttccaaacgcaagaaatcttctgcgtccgtgatcagaatggaaaaatcaaagaaggaggccaggacacaatacacacagtgtactacgactgggctatgcaacaagtggatgcagctgagttaggggaagatgcgatttatcccatttggaggctcagagagatgttgagagcgggtgttcaagctctcatttaattcttcatcatcttttaacttataataagctaagccctctctctttgcaatgtaccattatttactcaaaatcttgttcactcgagattttttttttttcgttttcttctctctggaaggagtgggttcccatgtttcaggggaataagttttgacaaatatataaatacatctcaagtctttttcaagtttagcgaagtttgttgttttgtttgtatcccttaaagggtaatgactcctttcgttagaaaataagagaactagatttggt

SEQ ID NO: 2376 - protein, 469 aa, Arabidopsis thaliana
  misc_feature (1)..(469): Ceres Seq. ID no. 14309913
MASRKLVRDLLITKQPLLQQLVHQRRVGARLGLLQGNGFASHRRFSVFSEFSKKIRGEADSNPEFQKTVKEFKERAEELQGVKEDLKVRTKQTTEKLYKQGQGVWTEAESVAKKVSSSVKDKFSAATEEVKESFKLGKEESAESASSSGTGTTEGEKQQQQSGSTEEQDTFFGKFKSSISSPKLSEAFHKPLDFAKKGLDIVKDELRGNPSKRKHLEYTPPPPFTGERSTRTEMVIMPTKQSKWQKKWESLREKMQGYPVFKRLSGMSEPVVNKSQEIAEDVREKWETSDNPIVHKIQDMNERIFEETGSASTYKEIRRRDPSFSLPDFVAEIQEAIRPVLNAYSKGDAKTLKKYCSKELIERCTAEHRAFTSQGYFFDHKLLHVSEVDIQETKMMGTTPVIIVRFQTQEIFCVRDQNGKIKEGGQDTIHTVYYDWAMQQVDAAELGEDAIYPIWRLREMLRAGVQALI

SEQ ID NO: 2377 - protein, 236 aa, Arabidopsis thaliana
  misc_feature (1)..(236): Ceres Seq. ID no. 14309914
MVIMPTKQSKWQKKWESLREKMQGYPVFKRLSGMSEPVVNKSQEIAEDVREKWETSDNPIVHKIQDMNERIFEETGSASTYKEIRRRDPSFSLPDFVAEIQEAIRPVLNAYSKGDAKTLKKYCSKELIERCTAEHRAFTSQGYFFDHKLLHVSEVDIQETKMMGTTPVIIVRFQTQEIFCVRDQNGKIKEGGQDTIHTVYYDWAMQQVDAAELGEDAIYPIWRLREMLRAGVQALI

SEQ ID NO: 2378 - protein, 469 aa, Arabidopsis thaliana; identical to SEQ ID NO: 2376
  misc_feature (1)..(469): Ceres Seq. ID no. 16625488

SEQ ID NO: 2379 - DNA, 2074 bp, Arabidopsis thaliana
  misc_feature (1)..(2074): Ceres Seq. ID no. 15168810
acttctcttttatttttcattcggtttagctcgtggaactgaatctggtgtgtttgttgatcagagtaatacggacattgcaatttttctaaatccggcgattaaatatgggtttcatagtcggcgttgtaatcggactcctcgtcggaatcgcaatcatcatcggctttgtcaagttggagaattctcgatccaagcttcgctctgaacttgcgaatacggtggctgcttttgcgaggatgacggtggaggattccaggaagcttttgcctcctgagttttatccttcctgggttgtcttctccgagcatcagaagttgacttggctcaaccatcacttgacaaagatctggccttatgttgatgaggcagcctctgagcttataaaggcatccgtggagcctgttcttgagcaatatagacctgccattgtggcctccttaacattttctaagcttactctcggtacagtggcacctcaatttacaggtgtttccgttatcgacggtgataaaaatgggattaccttggaacttgatatgcaatgggatggaaacccaaatatagtacttggcgtcaagaccttagttggtgtatccctccccattcaggtgaaaaacatcggattcactggtgttttcaggctaatttttaggccactagttgaggactttccctgctttggagctgtcagcgtttctcttagagaaaagaaaaaattggacttcacccttaaggttgttggaggtgatatttcagcaattcctggactttctgaagctattgaggaaacaattcgggatgccgtggaagattctatcacatggcctgttcggaaggtcatcccaattatacctggtgattatagcgatctggagctaaagcctgttggaatgttagaggtgaagcttgtgcaagcaaagaacttgaccaacaaagatctagttggaaaatcggacccctttgctaaaatgtttatacgccctttgcgtgaaaagactaaaagaagcaagacaattaacaatgacctgaatcccatctggaatgagcattttgaatttgttgtggaagacgcgtcaactcaacatttagtggtcagaatatatgatgacgagggtgtacaagcatctgagcttattggttgtgcccaaatccggctttgtgaacttgaacctggtaaagtgaaagacgtctggttgaagctggtcaaagatttggagatccagagagatactaagaaccgtggagaggttcaccttgagctcctttacatcccttatggttcgggaaacggcattgtaaatccctttgtcacttcatcgatgacgtccttagagagggtgctcaagaatgatacaacagatgaagaaaatgcatcaagccgtaaaagaaaagatgtcattgtaagaggagttctctctgtgacagtgatatctgcagaagagataccaatacaagatctgatggggaaagctgatccatatgttgttctctcgatgaagaaatcaggtgccaagagcaaaactcgggtcgtcaatgacagcttgaacccggtatggaaccagacttttgattttgtagttgaagacgggttacatgatatgctagtccttgaagtctgggaccacgacacctttggaaaggactactttgggagatgtatcctcacgttgacaagggttataatggaagaggagtacaaagactggtacccattagacgaatccaaaacgggcaagcttcagctgcatctgaagtggatggctcaatcaatttatcgtgattcctaagcttaatcggaagaatcaatttatcgtgattcctaagcttaatcggaagattcacaacttcgaatgtacatgttgtctagtagcgtcaaacggatgtgttttgtcaaacaaagacgagtctgcatgcagcccagaagctgtggactcggaatatgagttttcctctttttttctgaaaaccctagacaatactcgtgtacgtttgcctcataagctcagatgtcataaggggtttgatctttgcgtgcatcacaatccttcaataattttttaccttttaccct

SEQ ID NO: 2380 - protein, 560 aa, Arabidopsis thaliana
  misc_feature (1)..(560): Ceres Seq. ID no. 15168811
MGFIVGVVIGLLVGIAIIIGFVKLENSRSKLRSELANTVAAFARMTVEDSRKLLPPEFYPSWVVFSEHQKLTWLNHHLTKIWPYVDEAASELIKASVEPVLEQYRPAIVASLTFSKLTLGTVAPQFTGVSVIDGDKNGITLELDMQWDGNPNIVLGVKTLVGVSLPIQVKNIGFTGVFRLIFRPLVEDFPCFGAVSVSLREKKKLDFTLKVVGGDISAIPGLSEAIEETIRDAVEDSITWPVRKVIPIIPGDYSDLELKPVGMLEVKLVQAKNLTNKDLVGKSDPFAKMFIRPLREKTKRSKTINNDLNPIWNEHFEFVVEDASTQHLVVRIYDDEGVQASELIGCAQIRLCELEPGKVKDVWLKLVKDLEIQRDTKNRGEVHLELLYIPYGSGNGIVNPFVTSSMTSLERVLKNDTTDEENASSRKRKDVIVRGVLSVTVISAEEIPIQDLMGKADPYVVLSMKKSGAKSKTRVVNDSLNPVWNQTFDFVVEDGLHDMLVLEVWDHDTFGKDYFGRCILTLTRVIMEEEYKDWYPLDESKTGKLQLHLKWMAQSIYRDS

SEQ ID NO: 2381 - protein, 516 aa, Arabidopsis thaliana
  misc_feature (1)..(516): Ceres Seq. ID no. 15168812
MTVEDSRKLLPPEFYPSWVVFSEHQKLTWLNHHLTKIWPYVDEAASELIKASVEPVLEQYRPAIVASLTFSKLTLGTVAPQFTGVSVIDGDKNGITLELDMQWDGNPNIVLGVKTLVGVSLPIQVKNIGFTGVFRLIFRPLVEDFPCFGAVSVSLREKKKLDFTLKVVGGDISAIPGLSEAIEETIRDAVEDSITWPVRKVIPIIPGDYSDLELKPVGMLEVKLVQAKNLTNKDLVGKSDPFAKMFIRPLREKTKRSKTINNDLNPIWNEHFEFVVEDASTQHLVVRIYDDEGVQASELIGCAQIRLCELEPGKVKDVWLKLVKDLEIQRDTKNRGEVHLELLYIPYGSGNGIVNPFVTSSMTSLERVLKNDTTDEENASSRKRKDVIVRGVLSVTVISAEEIPIQDLMGKADPYVVLSMKKSGAKSKTRVVNDSLNPVWNQTFDFVVEDGLHDMLVLEVWDHDTFGKDYFGRCILTLTRVIMEEEYKDWYPLDESKTGKLQLHLKWMAQSIYRDS

SEQ ID NO: 2382 - protein, 416 aa, Arabidopsis thaliana
  misc_feature (1)..(416): Ceres Seq. ID no. 15168813
MQWDGNPNIVLGVKTLVGVSLPIQVKNIGFTGVFRLIFRPLVEDFPCFGAVSVSLREKKKLDFTLKVVGGDISAIPGLSEAIEETIRDAVEDSITWPVRKVIPIIPGDYSDLELKPVGMLEVKLVQAKNLTNKDLVGKSDPFAKMFIRPLREKTKRSKTINNDLNPIWNEHFEFVVEDASTQHLVVRIYDDEGVQASELIGCAQIRLCELEPGKVKDVWLKLVKDLEIQRDTKNRGEVHLELLYIPYGSGNGIVNPFVTSSMTSLERVLKNDTTDEENASSRKRKDVIVRGVLSVTVISAEEIPIQDLMGKADPYVVLSMKKSGAKSKTRVVNDSLNPVWNQTFDFVVEDGLHDMLVLEVWDHDTFGKDYFGRCILTLTRVIMEEEYKDWYPLDESKTGKLQLHLKWMAQSIYRDS

SEQ ID NO: 2383 - protein, 560 aa, Arabidopsis thaliana; identical to SEQ ID NO: 2380
  misc_feature (1)..(560): Ceres Seq. ID no. 16625526

SEQ ID NO: 2384 - DNA, 1416 bp, Arabidopsis thaliana
  misc_feature (1)..(1416): Ceres Seq. ID no. 12322287
aatggataccgttctcatggctacaacaccaccaatcagatgtcttcatgcttcaattcctacggtgttccgttcgccggcgatttatcaggtcagctgccggagctcccaactgttttcctaccgttcgacgactatgatgagcatgtgttttctcagacggtccgatttgagatctcgctttcttagtactccgaaaaccacttctccgatgagacgacctcgcttttccgtcggtgcttctacggaggagtcttcaattccttctaatcggaaccttatcgtggctaactccgtcgtaatcgtagctttagctgtagctaatcgcgtgctctacaaactcgctttggttcccatgaaacagtacccttttttcatggctcagctcaccactttcggctacgtcttgatttatttcaccattctgtatacgaggcgccgtctaggcattgtgacgaatgaaatgatggatgtacccaaatggagattcgcaatcattggttttctcgaagctcttggtgttgccactggcatggctgcagcagcaatgcttcctggaccagttatacccattttgaatcagacatatttggtgtggcagctgctttttgctcttcttattttaggcaggaggtttttgcttaaccaaattgctggttgtctccttgtggctgtgggggttgtggtggctgtttcaagtggatctggtgcagatactacgctatctggaatcggtttcttatggcctgctgtattggtagcatccgctgcttttcaagctggtgcatctatcataaaggaatttgttttcaatgatgctgcaaagcgtcttgagggaaagtcactggatatatttgtggtaaattcatttggatctggatttcaggctctttttgtgttcctgttgttgccttttctctcaaacttgaaaggcattccattcgccagccttccttcatatctaaaagatggtgccggatgcttcttcaacactggagctaagatttctggctgtgatggtgcccctatactcccactgctctatatatccaccaatctcgctttcaacatctcattgctccatctggtgaaaatatcttcagcaatcgtttcctctcttaccatgatgctctcagtgccattagcggtgtacataatgtcaaaaccattgccgtatctaccgggaggatcaagcttgagctcaaattttacgatggggtgtatagttcttgtcctaggtcttcttctctacaacattcccactactccaactaaacaacacaccaagacctcctaacacactcactcaccattcatcctttttgtgcattactttttttttttgttgataaaccaaattcgtgtaatttcccaattttttttcctttgaccatcaaagatacatagaatattctc

SEQ ID NO: 2385 - protein, 431 aa, Arabidopsis thaliana
  misc_feature (1)..(431): Ceres Seq. ID no. 12322288
MDTVLMATTPPIRCLHASIPTVFRSPAIYQVSCRSSQLFSYRSTTMMSMCFLRRSDLRSRFLSTPKTTSPMRRPRFSVGASTEESSIPSNRNLIVANSVVIVALAVANRVLYKLALVPMKQYPFFMAQLTTFGYVLIYFTILYTRRRLGIVTNEMMDVPKWRFAIIGFLEALGVATGMAAAAMLPGPVIPILNQTYLVWQLLFALLILGRRFLLNQIAGCLLVAVGVVVAVSSGSGADTTLSGIGFLWPAVLVASAAFQAGASIIKEFVFNDAAKRLEGKSLDIFVVNSFGSGFQALFVFLLLPFLSNLKGIPFASLPSYLKDGAGCFFNTGAKISGCDGAPILPLLYISTNLAFNISLLHLVKISSAIVSSLTMMLSVPLAVYIMSKPLPYLPGGSSLSSNFTMGCIVLVLGLLLYNIPTTPTKQHTKTS

SEQ ID NO: 2386 - protein, 426 aa, Arabidopsis thaliana
  misc_feature (1)..(426): Ceres Seq. ID no. 12322289
MATTPPIRCLHASIPTVFRSPAIYQVSCRSSQLFSYRSTTMMSMCFLRRSDLRSRFLSTPKTTSPMRRPRFSVGASTEESSIPSNRNLIVANSVVIVALAVANRVLYKLALVPMKQYPFFMAQLTTFGYVLIYFTILYTRRRLGIVTNEMMDVPKWRFAIIGFLEALGVATGMAAAAMLPGPVIPILNQTYLVWQLLFALLILGRRFLLNQIAGCLLVAVGVVVAVSSGSGADTTLSGIGFLWPAVLVASAAFQAGASIIKEFVFNDAAKRLEGKSLDIFVVNSFGSGFQALFVFLLLPFLSNLKGIPFASLPSYLKDGAGCFFNTGAKISGCDGAPILPLLYISTNLAFNISLLHLVKISSAIVSSLTMMLSVPLAVYIMSKPLPYLPGGSSLSSNFTMGCIVLVLGLLLYNIPTTPTKQHTKTS

SEQ ID NO: 2387 - protein, 386 aa, Arabidopsis thaliana
  misc_feature (1)..(386): Ceres Seq. ID no. 12322290
MMSMCFLRRSDLRSRFLSTPKTTSPMRRPRFSVGASTEESSIPSNRNLIVANSVVIVALAVANRVLYKLALVPMKQYPFFMAQLTTFGYVLIYFTILYTRRRLGIVTNEMMDVPKWRFAIIGFLEALGVATGMAAAAMLPGPVIPILNQTYLVWQLLFALLILGRRFLLNQIAGCLLVAVGVVVAVSSGSGADTTLSGIGFLWPAVLVASAAFQAGASIIKEFVFNDAAKRLEGKSLDIFVVNSFGSGFQALFVFLLLPFLSNLKGIPFASLPSYLKDGAGCFFNTGAKISGCDGAPILPLLYISTNLAFNISLLHLVKISSAIVSSLTMMLSVPLAVYIMSKPLPYLPGGSSLSSNFTMGCIVLVLGLLLYNIPTTPTKQHTKTS

SEQ ID NO: 2388 - protein, 277 aa, Arabidopsis thaliana
  misc_feature (1)..(277): Ceres Seq. ID no. 16625324
MMDVPKWRFAIIGFLEALGVATGMAAAAMLPGPVIPILNQTYLVWQLLFALLILGRRFLLNQIAGCLLVAVGVVVAVSSGSGADTTLSGIGFLWPAVLVASAAFQAGASIIKEFVFNDAAKRLEGKSLDIFVVNSFGSGFQALFVFLLLPFLSNLKGIPFASLPSYLKDGAGCFFNTGAKISGCDGAPILPLLYISTNLAFNISLLHLVKISSAIVSSLTMMLSVPLAVYIMSKPLPYLPGGSSLSSNFTMGCIVLVLGLLLYNIPTTPTKQHTKTS

SEQ ID NO: 2389 - DNA, 1127 bp, Arabidopsis thaliana
  misc_feature (1)..(1127): Ceres Seq. ID no. 12371228
attccaacaattactaatttctctcctctttcgttgcttttgaaaccctagttattaccgagagatcaaacagagaacgatgcagaggcgagagttcttggagttgttcgaggcagcacttagagcggctaagtctgtgaaaggtgctgagagttctccagaggtattgaggtttgtcgatgctatgaatcgtttgaaggaagcacctaagtcacttgtttgtgacgtggtctgcaaaacctccatggggaagggtttgggattcttcattgatcacaaaaaccctaaaattcgatcggaaggaaggattcttcgggatctttggatgaagattcattatgcttcaggtagagaaaagagtcgtgatagagaaactccggtgaagattccgacgcattcaacgatgaagaagactggagattcaaaacgagataaagtgcatgagattcttcaatcatctttggctaaagtcgctactgaggttgttgacacggagatgaagagacgagtcatgactgtttgtgatccttgggttgtggctgtatctgtggaatctgcaatgtttgagaaattaggttgtttcatgggacctcaaaaagcaaagtacaggtcgattctgttcaacatgggagatagtaacaatccagatttgaggaggaaagtgttaattggtgagatcagtggggagagattagtgaaaatggagaaagacgagatggggagtgagaagattcagaaggaggttcaaaggattaaagagagagcaagatttaaggaagagagtcgcatgaagatgcttcttgcatcagcagatatgatcatgacttagttagctgcagagatttagtcacgagtttcattattgtatataatcagtattcgtgtcaattctatcacaaactcgagatattagttgattgtaatttcaatacgatgattgtttcaagttcttgaatgttatttctaaaagaatctagtcaaagtatttcgtttcataaaaggaagctctgcagtttctgcagtttaaggggtctttggtttttcttttgaatgtttgtcttctattattaccaagtcttatgaaatgttttgctaatgacttattttgttacaaagaatgaaatgtt

SEQ ID NO: 2390 - protein, 249 aa, Arabidopsis thaliana
  misc_feature (1)..(249): Ceres Seq. ID no. 12371229
MQRREFLELFEAALRAAKSVKGAESSPEVLRFVDAMNRLKEAPKSLVCDVVCKTSMGKGLGFFIDHKNPKIRSEGRILRDLWMKIHYASGREKSRDRETPVKIPTHSTMKKTGDSKRDKVHEILQSSLAKVATEVVDTEMKRRVMTVCDPWVVAVSVESAMFEKLGCFMGPQKAKYRSILFNMGDSNNPDLRRKVLIGEISGERLVKMEKDEMGSEKIQKEVQRIKERARFKEESRMKMLLASADMIMT

SEQ ID NO: 2391 - protein, 214 aa, Arabidopsis thaliana
  misc_feature (1)..(214): Ceres Seq. ID no. 12371230
MNRLKEAPKSLVCDVVCKTSMGKGLGFFIDHKNPKIRSEGRILRDLWMKIHYASGREKSRDRETPVKIPTHSTMKKTGDSKRDKVHEILQSSLAKVATEVVDTEMKRRVMTVCDPWVVAVSVESAMFEKLGCFMGPQKAKYRSILFNMGDSNNPDLRRKVLIGEISGERLVKMEKDEMGSEKIQKEVQRIKERARFKEESRMKMLLASADMIMT

SEQ ID NO: 2392 - protein, 194 aa, Arabidopsis thaliana
  misc_feature (1)..(194): Ceres Seq. ID no. 12371231
MGKGLGFFIDHKNPKIRSEGRILRDLWMKIHYASGREKSRDRETPVKIPTHSTMKKTGDSKRDKVHEILQSSLAKVATEVVDTEMKRRVMTVCDPWVVAVSVESAMFEKLGCFMGPQKAKYRSILFNMGDSNNPDLRRKVLIGEISGERLVKMEKDEMGSEKIQKEVQRIKERARFKEESRMKMLLASADMIMT

SEQ ID NO: 2393 - protein, 249 aa, Arabidopsis thaliana; identical to SEQ ID NO: 2390
  misc_feature (1)..(249): Ceres Seq. ID no. 16625329

SEQ ID NO: 2394 - DNA, 611 bp, Arabidopsis thaliana
  misc_feature (1)..(611): Ceres Seq. ID no. 12738438
aaaaagtcagctccgagtctgcgttttacttcttctccttgagtttcttcttctagatctgatcgcgaatcaccaaaaggttttattttatacaatgggtcgtggaaacagctgtggtggaggtcaaagctcattggattatctctttggtggtgacgctcctgctcctaagccagttccagctcctcgtcccgctcctactgagtctaacaacggacctgcaccaccagtaacagctgtgactgcaaccgcactcacgactgctactacttctgttgagcctgcagagcttaacaagcagattcctgctggtatcaaaactcctgttaacaactatgccagagctgaaggacagaacaccggcaacttcctcactgaccgtccttcgaccaaagttcacgcagctccgggaggaggatcatccttggattatctcttcactggtggcaagtaaaataattgcaaagacctttatctatccattgtctttgctgcgttatctcactatgaaactgtttgatgtgagcctttaaatgataagaagtcggtttcttgtctcaactcttatctgtaatattttgctgaaaaaatgtttgaatcaaaaccttccc

SEQ ID NO: 2395 - protein, 150 aa, Arabidopsis thaliana
  misc_feature (1)..(150): Ceres Seq. ID no. 12738439
KSQLRVCVLLLLLEFLLLDLIANHQKVLFYTMGRGNSCGGGQSSLDYLFGGDAPAPKPVPAPRPAPTESNNGPAPPVTAVTATALTTATTSVEPAELNKQIPAGIKTPVNNYARAEGQNTGNFLTDRPSTKVHAAPGGGSSLDYLFTGGK

SEQ ID NO: 2396 - protein, 119 aa, Arabidopsis thaliana
  misc_feature (1)..(119): Ceres Seq. ID no. 12738440
MGRGNSCGGGQSSLDYLFGGDAPAPKPVPAPRPAPTESNNGPAPPVTAVTATALTTATTSVEPAELNKQIPAGIKTPVNNYARAEGQNTGNFLTDRPSTKVHAAPGGGSSLDYLFTGGK

SEQ ID NO: 2397 - protein, 119 aa, Arabidopsis thaliana; identical to SEQ ID NO: 2396
  misc_feature (1)..(119): Ceres Seq. ID no. 16625388

SEQ ID NO: 2398 - DNA, 1176 bp, Arabidopsis thaliana
  misc_feature (1)..(1176): Ceres Seq. ID no. 13647858
gagagagtaatcgccatttttctttattgggggagtgaagaaggataggattcagatgatgaagtacagatgaatgctccataaaccctactcttcttcttttacctccagcttcgattataccattccttgtttgtgaaggcattttagttggtaaggatgataactggatacagcacgccaagtgcacatgttctaatgagctctcgggcattcaagtcatcatcatatagagctgcagcaggacagactcaacattatcttgctcgaagttcattgcctgtcgtaaagaactcgtggggatcaccaccttcacctttcaatgagcttccgagagtgtcaagaggtgtgcctctgtcatatctctcagcctcgtcttctctgcttctgaatggagaacaaggtagtctatctggtacattacctgtgttacctgtccgcagaaaaactcttttgactccacgagcgtcaaaagatgtaccttctagcttccgatttcccccgatgaccaagaagccacaatggtggtggagaactttggcttgcctgccttacctaatgccactgcatgaaacttggatgtatgcagaaaccgcttaccatctccacccattcctagaagattttgaattcttaacctacccatttctaggcgccataggaagattaccaagctggttcctcatggcttacttttttgtagcttatctagggatagtgcgaagaaaagaatggcctcacttcttcaggttccatgtagtgatgggtatgctgcttgaaatcgcactccaggttatagggaccgttagcaagtggatgcctcttggagtctattggggtaagtttgggatgcatttctggactgctgttgcgtttgcttatctgtttaccgtccttgaaagcatacggtgtgcacttgcgggtatgtacgcagacatcccgtttgtctgtgatgctgcctatatccagattccgtacgactaagaagaaacaacattggatcgttatgactcctctttttttttttttttgttaattaggtccttgttttgttgttacaaagactcttcttgaatgacaattatgtttgtaatcaacgtttcatgaacgcagccgtcaaagttacaaacttttgaacaaaaaaaaaaaaaaaaaaaactcgagggggggcccggt

SEQ ID NO: 2399 - protein, 274 aa, Arabidopsis thaliana
  misc_feature (1)..(274): Ceres Seq. ID no. 13647859
MITGYSTPSAHVLMSSRAFKSSSYRAAAGQTQHYLARSSLPVVKNSWGSPPSPFNELPRVSRGVPLSYLSASSSLLLNGEQGSLSGTLPVLPVRRKTLLTPRASKDVPSSFRFPPMTKKPQWWWRTLACLPYLMPLHETWMYAETAYHLHPFLEDFEFLTYPFLGAIGRLPSWFLMAYFFVAYLGIVRRKEWPHFFRFHVVMGMLLEIALQVIGTVSKWMPLGVYWGKFGMHFWTAVAFAYLFTVLESIRCALAGMYADIPFVCDAAYIQIPYD

SEQ ID NO: 2400 - protein, 261 aa, Arabidopsis thaliana
  misc_feature (1)..(261): Ceres Seq. ID no. 13647860
MSSRAFKSSSYRAAAGQTQHYLARSSLPVVKNSWGSPPSPFNELPRVSRGVPLSYLSASSSLLLNGEQGSLSGTLPVLPVRRKTLLTPRASKDVPSSFRFPPMTKKPQWWWRTLACLPYLMPLHETWMYAETAYHLHPFLEDFEFLTYPFLGAIGRLPSWFLMAYFFVAYLGIVRRKEWPHFFRFHVVMGMLLEIALQVIGTVSKWMPLGVYWGKFGMHFWTAVAFAYLFTVLESIRCALAGMYADIPFVCDAAYIQIPYD

SEQ ID NO: 2401 - protein, 159 aa, Arabidopsis thaliana
  misc_feature (1)..(159): Ceres Seq. ID no. 13647861
MTKKPQWWWRTLACLPYLMPLHETWMYAETAYHLHPFLEDFEFLTYPFLGAIGRLPSWFLMAYFFVAYLGIVRRKEWPHFFRFHVVMGMLLEIALQVIGTVSKWMPLGVYWGKFGMHFWTAVAFAYLFTVLESIRCALAGMYADIPFVCDAAYIQIPYD

SEQ ID NO: 2402 - protein, 274 aa, Arabidopsis thaliana; identical to SEQ ID NO: 2399
  misc_feature (1)..(274): Ceres Seq. ID no. 16611710

SEQ ID NO: 2403 - DNA, 721 bp, Arabidopsis thaliana
  misc_feature (1)..(721): Ceres Seq. ID no. 13648444
cggcacgagagagagagagagagagagagctcatagtccccccccccccccccccaaaaaaaaaattgaaaaccctaaattggttgaatgggaaaatcgatggtcagattcgcagaattcgccattagactctcttccgagaatccaaccagaccacacagaccttctccttctccacggaacaaagtcttcgtcaagaagacgacgagagacaccacgtcacacctcgattactccaatctggttaagctggagaaggcgggatcgcactcgggttcgaatcccgctccggcttcgggttcggatcctattaaccgggttcccctcgctcaggtcgtcgaggattgcgtcagacgctggttccaggatacgctcaaggaagccaaatctggtgacgttggtatgcaggtcttggttggtcagatgtattgcagcggctatggaatccctaaagatgaaaacaagggtcgtgcttggattaacaaagcttcaagaactagatcatcagcttggcaagtgagtgataagcctccagggtataatgcaagcgattcagattccaatgataagaaagattgatgatcatcttttgaatgtttgtattgccattgactttgatttgttagtttctctctcctttgtttaactctacttgatttattcaaatttgaagcttttgtatcaaaaaaaaaaaaaaaaaactcgagggggggcccggtac

SEQ ID NO: 2404 - protein, 172 aa, Arabidopsis thaliana
  misc_feature (1)..(172): Ceres Seq. ID no. 15218562
GTRERERERAHSPPPPPPKKKIENPKLVEWENRWSDSQNSPLDSLPRIQPDHTDLLLLHGTKSSSRRRRETPRHTSITPIWLSWRRRDRTRVRIPLRLRVRILLTGFPSLRSSRIASDAGSRIRSRKPNLVTLVCRSWLVRCIAAAMESLKMKTRVVLGLTKLQELDHQLGK

SEQ ID NO: 2405 - protein, 163 aa, Arabidopsis thaliana
  misc_feature (1)..(163): Ceres Seq. ID no. 15218563
MGKSMVRFAEFAIRLSSENPTRPHRPSPSPRNKVFVKKTTRDTTSHLDYSNLVKLEKAGSHSGSNPAPASGSDPINRVPLAQVVEDCVRRWFQDTLKEAKSGDVGMQVLVGQMYCSGYGIPKDENKGRAWINKASRTRSSAWQVSDKPPGYNASDSDSNDKKD

SEQ ID NO: 2406 - protein, 159 aa, Arabidopsis thaliana
  misc_feature (1)..(159): Ceres Seq. ID no. 15218564
MVRFAEFAIRLSSENPTRPHRPSPSPRNKVFVKKTTRDTTSHLDYSNLVKLEKAGSHSGSNPAPASGSDPINRVPLAQVVEDCVRRWFQDTLKEAKSGDVGMQVLVGQMYCSGYGIPKDENKGRAWINKASRTRSSAWQVSDKPPGYNASDSDSNDKKD

SEQ ID NO: 2407 - protein, 163 aa, Arabidopsis thaliana; identical to SEQ ID NO: 2405
  misc_feature (1)..(163): Ceres Seq. ID no. 16611672

SEQ ID NO: 2408 - DNA, 1862 bp, Arabidopsis thaliana
  misc_feature (1)..(1862): Ceres Seq. ID no. 14312112
gattgccaaatttaaactcgaaatctctctctcactcactcaatgagcgaattcattttgatctccgacggcgaggatgaagctactccaccaccgtcgaagagggctcgaaagaatcgtacacccacggatttgaacttggataccgaaccatcactgcagaagcaaccgccaggatctgcttctactccgtttttcctcgacgagacacctctctctgacgatgtcactgtcctaaagtcttcctttggttccggaaccggagcttcttcaggccgcgagaacaatttttatggtaaacgagttatatctcttgaatcggattctgaagacagtcctggacctgagagttcaaaaaagtatgaacctgtttatactgattcttggaagaaaccttgcagattggaatttggatccagtgatgctaattctgatgatgatcctagttggatgcggagagctagttttcaatcttcgctgtctaaagatgctatcgaggtagattctgaccatgagaaagaagatacaggcgttgagaagatgggtcgaaaaaagcagaccataacttctaaaagtacatctctttctgctgattcattgcctaaaaagaagatgtcaaaagatgaaaaaacccgcgcggcagaggaaaagaagttacaaaaagaacaagaaaaattacagaaagctgcctcgaaagcagaagatgctgagcataaaaagttggagagggaaaagcagaaatgggcaaaggaaaaggataaagcacttaaatgtattgttgcctggattgacaataaagtgcttgaaggatcttttggaggacttctcatttcgggattgaaagagaaaggtattacataccatgtcaccactaatccgattcagagatccattgtgtggacaatgacacttccagaagatattgctcagtcattgcctctagggtccaatattccatatgttttactcttgtatgaggctgaagacttttgtaatcttgttgctaagaaagaacttctagaaaacgtctacagagttcgtgacgaatacccatcttatacaatgtgctacctcaccaataagttactgtcctacgtaaacaaaaaggaaagggttgagtacaaggaccctgtaaatggctgtggttggcgaaagcctcctattgatgaggcaattgcgaagttatcaactcactatattggagtacattcccggcattgtgtagacgaggctgaggtggctgaccatgttgttcggttaacaagtagtctggcccattgccaagtcaggaagaagttaactcggttatcagtatacgctgatggtacattaatgtccaagaatgcagctgataagcacttgattagagagagcatatggttgaaagtgttggtagcaataccaaaggtacagccaagatacgctatagcagtgtcaaagaaatacccatccttgaagtcacttcttaaggtttatatggatcctaacatatcggttcatgagaaggagtttctactgaaagacttgaaagtggaaaatttagtaggaagagacacaagtgtaggtgaggcctgttcgaagcggatatacagagtgcttatgtctttagatggaaccattaagactgatgacgtcgaaaatggtgctgcttccttcacacttcctccatctgacttaatttagaactagagagaacatcaaataggtttttaactttctatgtcaaacaaaacagaagaatgattgtgtctgagatttttttttgtatatgcatgcaaagttcattatgttgtttgaagtctttaatgtgtgtagtcctgactcgttttctaaagagtaaagataatgatatattttctggc

SEQ ID NO: 2409 - protein, 546 aa, Arabidopsis thaliana
  misc_feature (1)..(546): Ceres Seq. ID no. 14312113
MSEFILISDGEDEATPPPSKRARKNRTPTDLNLDTEPSLQKQPPGSASTPFFLDETPLSDDVTVLKSSFGSGTGASSGRENNFYGKRVISLESDSEDSPGPESSKKYEPVYTDSWKKPCRLEFGSSDANSDDDPSWMRRASFQSSLSKDAIEVDSDHEKEDTGVEKMGRKKQTITSKSTSLSADSLPKKKMSKDEKTRAAEEKKLQKEQEKLQKAASKAEDAEHKKLEREKQKWAKEKDKALKCIVAWIDNKVLEGSFGGLLISGLKEKGITYHVTTNPIQRSIVWTMTLPEDIAQSLPLGSNIPYVLLLYEAEDFCNLVAKKELLENVYRVRDEYPSYTMCYLTNKLLSYVNKKERVEYKDPVNGCGWRKPPIDEAIAKLSTHYIGVHSRHCVDEAEVADHVVRLTSSLAHCQVRKKLTRLSVYADGTLMSKNAADKHLIRESIWLKVLVAIPKVQPRYAIAVSKKYPSLKSLLKVYMDPNISVHEKEFLLKDLKVENLVGRDTSVGEACSKRIYRVLMSLDGTIKTDDVENGAASFTLPPSDLI

SEQ ID NO: 2410 - protein, 410 aa, Arabidopsis thaliana
  misc_feature (1)..(410): Ceres Seq. ID no. 14312114
MRRASFQSSLSKDAIEVDSDHEKEDTGVEKMGRKKQTITSKSTSLSADSLPKKKMSKDEKTRAAEEKKLQKEQEKLQKAASKAEDAEHKKLEREKQKWAKEKDKALKCIVAWIDNKVLEGSFGGLLISGLKEKGITYHVTTNPIQRSIVWTMTLPEDIAQSLPLGSNIPYVLLLYEAEDFCNLVAKKELLENVYRVRDEYPSYTMCYLTNKLLSYVNKKERVEYKDPVNGCGWRKPPIDEAIAKLSTHYIGVHSRHCVDEAEVADHVVRLTSSLAHCQVRKKLTRLSVYADGTLMSKNAADKHLIRESIWLKVLVAIPKVQPRYAIAVSKKYPSLKSLLKVYMDPNISVHEKEFLLKDLKVENLVGRDTSVGEACSKRIYRVLMSLDGTIKTDDVENGAASFTLPPSDLI

SEQ ID NO: 2411 - protein, 380 aa, Arabidopsis thaliana
  misc_feature (1)..(380): Ceres Seq. ID no. 14312115
MGRKKQTITSKSTSLSADSLPKKKMSKDEKTRAAEEKKLQKEQEKLQKAASKAEDAEHKKLEREKQKWAKEKDKALKCIVAWIDNKVLEGSFGGLLISGLKEKGITYHVTTNPIQRSIVWTMTLPEDIAQSLPLGSNIPYVLLLYEAEDFCNLVAKKELLENVYRVRDEYPSYTMCYLTNKLLSYVNKKERVEYKDPVNGCGWRKPPIDEAIAKLSTHYIGVHSRHCVDEAEVADHVVRLTSSLAHCQVRKKLTRLSVYADGTLMSKNAADKHLIRESIWLKVLVAIPKVQPRYAIAVSKKYPSLKSLLKVYMDPNISVHEKEFLLKDLKVENLVGRDTSVGEACSKRIYRVLMSLDGTIKTDDVENGAASFTLPPSDLI

SEQ ID NO: 2412 - protein, 546 aa, Arabidopsis thaliana; identical to SEQ ID NO: 2409
  misc_feature (1)..(546): Ceres Seq. ID no. 16625507

SEQ ID NO: 2413 - DNA, 1371 bp, Arabidopsis thaliana
  misc_feature (1)..(1371): Ceres Seq. ID no. 15168697
acttgacagaaacattcgcatttaacttcatcgtcttctctctgtttctttcttctccaacaaatcaccaaaaatggagagattcaatttctttaatctgatgatcatagctttatgtttatcatccttcgttcacagtctcgagatgggagaaacatgtagttcgaccagcgaatgcgacgccggattgagctgtcaaagttgtccggcgaatggaaataccggctctacttgtacccggatccaacctcttaacccgacttcaaaggtgaatggtttgccgtttaacaagtactcgtggctaacaacacacaattcgtacgcaatcacgggggcaaattcggcaactggttcattccttgtctctccaaagaatcaagaagactccatcaccaatcagcttaagaatggtgtgagaggtataatgctagatacatatgattttcaaaacgatatatggttgtgtcattccactggagggacttgctttaacttcacagcctttcaaccagctatcaatgcacttaaagagatcaatgattttcttgaatcaaacttgtctgagattgttactatcatacttgaagattatgtcaaatctcaaatgggattgactaatgtattcaatgcatctggattgagtaagttcttgttaccaatctcgagaatgccgaaagacggtacagactggccaacggttgatgatatggtgaagcagaaccaaaggcttgtggtttttacttccaagaaggataaagaagcttctgaaggtcttgcttaccagtggaattacatggttgaaaatcaatatggtaatgatggaatgaaggatggatcatgctcgagtcgatctgaatcttcttcactagataccatgtctcggtctttggtgtttcagaactactttgaaaccagtccgaattcaacgcaagcgtgtgcggataattcctctccgttgatcgaaatgatgagaacttgccatgaagcagcgggtaaaaggtggcctaacttcatagctgttgatttttatcagaggagtgatagtggaggagctgccgaagctgtagatgaagcaaacggtcgtctcacatgtggttgtgacagcttagtctattgcaagtcaaacgcaccttttggcacttgtgatgctcctcctccgaagtcgtctccatcaccagtctccggagggaaggatacttcacggaaaccaagaaatcttcctgcgggtaatgctgattctacagctattggattgtcatctctctttctaatctctgcggcgactctcttgctgtggtgatagttcctcagtgagctcagtttgctttgatctgatacaaatgatttttgatttcccctttatacgtttcc

SEQ ID NO: 2414 - protein, 408 aa, Arabidopsis thaliana
  misc_feature (1)..(408): Ceres Seq. ID no. 15168698
MERFNFFNLMIIALCLSSFVHSLEMGETCSSTSECDAGLSCQSCPANGNTGSTCTRIQPLNPTSKVNGLPFNKYSWLTTHNSYAITGANSATGSFLVSPKNQEDSITNQLKNGVRGIMLDTYDFQNDIWLCHSTGGTCFNFTAFQPAINALKEINDFLESNLSEIVTIILEDYVKSQMGLTNVFNASGLSKFLLPISRMPKDGTDWPTVDDMVKQNQRLVVFTSKKDKEASEGLAYQWNYMVENQYGNDGMKDGSCSSRSESSSLDTMSRSLVFQNYFETSPNSTQACADNSSPLIEMMRTCHEAAGKRWPNFIAVDFYQRSDSGGAAEAVDEANGRLTCGCDSLVYCKSNAPFGTCDAPPPKSSPSPVSGGKDTSRKPRNLPAGNADSTAIGLSSLFLISAATLLLW

SEQ ID NO: 2415 - protein, 399 aa, Arabidopsis thaliana
  misc_feature (1)..(399): Ceres Seq. ID no. 15168699
MIIALCLSSFVHSLEMGETCSSTSECDAGLSCQSCPANGNTGSTCTRIQPLNPTSKVNGLPFNKYSWLTTHNSYAITGANSATGSFLVSPKNQEDSITNQLKNGVRGIMLDTYDFQNDIWLCHSTGGTCFNFTAFQPAINALKEINDFLESNLSEIVTIILEDYVKSQMGLTNVFNASGLSKFLLPISRMPKDGTDWPTVDDMVKQNQRLVVFTSKKDKEASEGLAYQWNYMVENQYGNDGMKDGSCSSRSESSSLDTMSRSLVFQNYFETSPNSTQACADNSSPLIEMMRTCHEAAGKRWPNFIAVDFYQRSDSGGAAEAVDEANGRLTCGCDSLVYCKSNAPFGTCDAPPPKSSPSPVSGGKDTSRKPRNLPAGNADSTAIGLSSLFLISAATLLLW

SEQ ID NO: 2416 - protein, 384 aa, Arabidopsis thaliana
  misc_feature (1)..(384): Ceres Seq. ID no. 15168700
MGETCSSTSECDAGLSCQSCPANGNTGSTCTRIQPLNPTSKVNGLPFNKYSWLTTHNSYAITGANSATGSFLVSPKNQEDSITNQLKNGVRGIMLDTYDFQNDIWLCHSTGGTCFNFTAFQPAINALKEINDFLESNLSEIVTIILEDYVKSQMGLTNVFNASGLSKFLLPISRMPKDGTDWPTVDDMVKQNQRLVVFTSKKDKEASEGLAYQWNYMVENQYGNDGMKDGSCSSRSESSSLDTMSRSLVFQNYFETSPNSTQACADNSSPLIEMMRTCHEAAGKRWPNFIAVDFYQRSDSGGAAEAVDEANGRLTCGCDSLVYCKSNAPFGTCDAPPPKSSPSPVSGGKDTSRKPRNLPAGNADSTAIGLSSLFLISAATLLLW

SEQ ID NO: 2417 - protein, 408 aa, Arabidopsis thaliana; identical to SEQ ID NO: 2414
  misc_feature (1)..(408): Ceres Seq. ID no. 16625525

SEQ ID NO: 2418 - DNA, 1854 bp, Arabidopsis thaliana
  misc_feature (1)..(1854): Ceres Seq. ID no. 15174489
aactcatcttcacagatgtctcaagcagctctctctctttctctctctctctctcttctttctctgatcacaagggttatttgtctgaatctcattctattgagtcattattgacctctgcagagatccggacaaagttttgaaaccgaccacaagtccaagaatcatcgatcatacaacaatgtctggagactctctgctcacatctaaacaaggaggaggttctttgtccatatactcacagccaaagaatgttactaaagagttcaacggtcgtgattcccccaagaacagcaaattccaccattacagatttgagctcgagcacgatgtgaagcgattgaaaaatcaattgcagaaagagactgcaatgcgcgctcttttgctgaaagcttctgatcaaagccataagattgagctgtctcacgcatcttctcttccgcgcagtgttcaagaacttctcaccaatatagcagctatggaagctacggtctctaagctcgaacaagagatcatgtctctgcatttcttgctgattcaagaacgaaacgagagaaaacttgccgagtacaacctcacccattctctatctccacctaatgctttagatttggttagactttccgaaaagaatgaaagtctacgccctaaagaccacaaagcacaacctagaagcaaagtggcaaagtccttgcagagttttgacaatgctaatgaactatccaaggagatgatcagatgcatgagaaacatatttgtgtctctaggagagacatctgcaggatccaaatcctcacaagagactgccagtgtttcttctcgtgagaatcctccatcatcatcaacgtcatggtggtctccttcagaacactcacggatctccaggtgggcacagagtccacggatcgatattcagaagaactcagatgttttagccacagagagcgatgtgtttgatctttatacagtccaaggaaagctgagctgggctgacatcgggagttacagatctgcaactgaagtggcttcaatgtctgttgaggagaaaaggctcggatatgcttcagatgagttatggagattcaggaacctcgttgaaagacttgccagagtaaatccagcagaactaagccacaacgagaagcttgccttctggatcaacatatacaatgccatgatcatgcatgcatacttggcttacggcgtaccaaaaactgacttaaagctcttctccttgatgcaaaaggctgcttatacagttggtggccattcatacaacgcagcaacgatcgaatacatgactttaaagatgagccctcctctgcatcgtcctcaaattgctctgcttctctccattctcaagctgaaagtatcagacgaacagagacaagcggggataagtacaccggaacctctagtgtcatttgctctcagctgcgggatgcactcatctcctgcggtgagaatatactcagccgagaacgtaggagaagaacttgaagaagctcagaaagattatatccaggcgtcagtgggagtgagcccaaggggaaagttgattgtgccccaaatgcttcactgtttcgccaagaaatctgtcgatgactgcaaggttgctctgtggatttctcgtcatttgcctcctcgccaagctgcatttgttgagcagtgtattcacaggcgacaacggtggggttttctgggttcatctagtagcaaatgcggcatagttccttttgattcacggttccgatatttgtttcttccgtagcaaggcattgattcacaatgatgtgattaaagcaaatactgttccgatcctagggtttagatctatgattatttaggtgattc

SEQ ID NO: 2419 - protein, 529 aa, Arabidopsis thaliana
  misc_feature (1)..(529): Ceres Seq. ID no. 15174490
MSGDSLLTSKQGGGSLSIYSQPKNVTKEFNGRDSPKNSKFHHYRFELEHDVKRLKNQLQKETAMRALLLKASDQSHKIELSHASSLPRSVQELLTNIAAMEATVSKLEQEIMSLHFLLIQERNERKLAEYNLTHSLSPPNALDLVRLSEKNESLRPKDHKAQPRSKVAKSLQSFDNANELSKEMIRCMRNIFVSLGETSAGSKSSQETASVSSRENPPSSSTSWWSPSEHSRISRWAQSPRIDIQKNSDVLATESDVFDLYTVQGKLSWADIGSYRSATEVASMSVEEKRLGYASDELWRFRNLVERLARVNPAELSHNEKLAFWINIYNAMIMHAYLAYGVPKTDLKLFSLMQKAAYTVGGHSYNAATIEYMTLKMSPPLHRPQIALLLSILKLKVSDEQRQAGISTPEPLVSFALSCGMHSSPAVRIYSAENVGEELEEAQKDYIQASVGVSPRGKLIVPQMLHCFAKKSVDDCKVALWISRHLPPRQAAFVEQCIHRRQRWGFLGSSSSKCGIVPFDSRFRYLFLP

SEQ ID NO: 2420 - protein, 466 aa, Arabidopsis thaliana
  misc_feature (1)..(466): Ceres Seq. ID no. 15174491
MRALLLKASDQSHKIELSHASSLPRSVQELLTNIAAMEATVSKLEQEIMSLHFLLIQERNERKLAEYNLTHSLSPPNALDLVRLSEKNESLRPKDHKAQPRSKVAKSLQSFDNANELSKEMIRCMRNIFVSLGETSAGSKSSQETASVSSRENPPSSSTSWWSPSEHSRISRWAQSPRIDIQKNSDVLATESDVFDLYTVQGKLSWADIGSYRSATEVASMSVEEKRLGYASDELWRFRNLVERLARVNPAELSHNEKLAFWINIYNAMIMHAYLAYGVPKTDLKLFSLMQKAAYTVGGHSYNAATIEYMTLKMSPPLHRPQIALLLSILKLKVSDEQRQAGISTPEPLVSFALSCGMHSSPAVRIYSAENVGEELEEAQKDYIQASVGVSPRGKLIVPQMLHCFAKKSVDDCKVALWISRHLPPRQAAFVEQCIHRRQRWGFLGSSSSKCGIVPFDSRFRYLFLP

SEQ ID NO: 2421 - protein, 430 aa, Arabidopsis thaliana
  misc_feature (1)..(430): Ceres Seq. ID no. 15174492
MEATVSKLEQEIMSLHFLLIQERNERKLAEYNLTHSLSPPNALDLVRLSEKNESLRPKDHKAQPRSKVAKSLQSFDNANELSKEMIRCMRNIFVSLGETSAGSKSSQETASVSSRENPPSSSTSWWSPSEHSRISRWAQSPRIDIQKNSDVLATESDVFDLYTVQGKLSWADIGSYRSATEVASMSVEEKRLGYASDELWRFRNLVERLARVNPAELSHNEKLAFWINIYNAMIMHAYLAYGVPKTDLKLFSLMQKAAYTVGGHSYNAATIEYMTLKMSPPLHRPQIALLLSILKLKVSDEQRQAGISTPEPLVSFALSCGMHSSPAVRIYSAENVGEELEEAQKDYIQASVGVSPRGKLIVPQMLHCFAKKSVDDCKVALWISRHLPPRQAAFVEQCIHRRQRWGFLGSSSSKCGIVPFDSRFRYLFLP

SEQ ID NO: 2422 - protein, 529 aa, Arabidopsis thaliana; identical to SEQ ID NO: 2419
  misc_feature (1)..(529): Ceres Seq. ID no. 16625575

SEQ ID NO: 2423 - DNA, 408 bp, Arabidopsis thaliana
  misc_feature (1)..(408): Ceres Seq. ID no. 12606252
ggaaacgaattctctctctctcagcttatagatacccaaattaagaagaagtgaaagatgcatcctccacttacaccacatagacatccaatgtgtctggagataattgaggaatttcaaaagtgtcatatagaccatccgattgggaaattctttggagaatgtacagagctgaaagtaaagcttgatcgatgtttccgccaagagaaagctgtgaagcggaaggtaaatttcgaacaaagcaagaaacttcaagaaagactgaaagctataaggaaagaagaaaccgcagagacttgagcattgttgtataataatcctataaagaacatgtgcgtgtgtctatttcaaaagaacacatttctaaattgatccacaaagaagagttttgatactcttttgcctcgt

SEQ ID NO: 2424 - protein, 80 aa, Arabidopsis thaliana
  misc_feature (1)..(80): Ceres Seq. ID no. 12606253
MHPPLTPHRHPMCLEIIEEFQKCHIDHPIGKFFGECTELKVKLDRCFRQEKAVKRKVNFEQSKKLQERLKAIRKEETAET

SEQ ID NO: 2425 - protein, 69 aa, Arabidopsis thaliana
  misc_feature (1)..(69): Ceres Seq. ID no. 12606254
MCLEIIEEFQKCHIDHPIGKFFGECTELKVKLDRCFRQEKAVKRKVNFEQSKKLQERLKAIRKEETAET

SEQ ID NO: 2426 - protein, 40 aa, Arabidopsis thaliana
  misc_feature (1)..(40): Ceres Seq. ID no. 12606255
MFPPRESCEAEGKFRTKQETSRKTESYKERRNRRDLSIVV

SEQ ID NO: 2427 - DNA, 1905 bp, Arabidopsis thaliana
  misc_feature (1)..(1905): Ceres Seq. ID no. 13486771
acatcctaatcgaaaatccattaattctgctgctgcaaattctatcgaactggtgagttttgttaatctctttcctcgttcgtccttgtctgtatatcagatcgatctctattaccgttttagcttgttcttgatctttgtcaacataaaaacaatcaaacaaagtttcttctatgagttctggtctgaacgaagatttcctcgattgtatcgtgcgtttagaggagacacatgttcaacaaggcttcgatgagggttacgaagaaggtcttgtgtccggtcgtgaagacgctcgtcatctgggtttgaaactcgggttcgagacaggcgagctgattggattctacagaggttgctctgctctttggaattcagctctccgtattgatcctacacgcttctctcctcagctccataagcatctcaatgatttccatgtcttgctcgataaattcccgcttttggatcccgaggacgaagctaaagacgggatcaaggatgatctcagagtcaaattcagcatcatttgtgcatctctcggcttttccaagaaacaatttgagtataaaggatacccgaatccttcctccaatctcgacttttaagacctccctccatcaaaacactcttgtattgtatgtatggctttcaaagtttctctcgtttcctcaaagttkgtatttttaagagaagtgtgtgtgtagacaatctatgttttattggcttgtccttttttctggacatgtgaatgctgaccacaagtctaaatctggtggataacttcttttttagccttataatgaacaaacaaactcacatctgtagatatatatttgtataggtggtcggaggagatgttgagagaaatgcttggttgttgcaaggtttacatatctgaagcgcggaataagacggccctcgaagccattgagagagctttaaagccttttccaccagctgcaattgtcaacaagtttgaagatgcggcttatggcagggttggttacactgttgtatcctcgcttgctaacgggtcgtcttcttccttgaagaatgcggtgtttgctatggttaagactgctctcgacactatcaatcttgagttgcactgtggatcccatccccgccttggagtggttgaccacatatgctttcaccccttatctcaaacctctatagaacaagtttcttccgttgccaattcccttgcaatggatatcggctccattcttcgagttcctacatatctctatggagcagcagaaaaggagcagtgcaccctggattcgatcagaagaaagctggggtacttcaaggcaaacagggagggacatgaatgggcaggtgggtttgacctggagatggtgccactgaagccagacgcagggccacaagaggtgagcaaagccaaaggggttgtagcggttggggcgtgtgggtgggtaagtaactataacgtgcctgtcatgtcaaacgatctcaaggcagtgaggagaatagcgaggaagacgagcgagagaggagggggcttggcttcagtgcagacaatggcgctggtgcacggggaaggagtcatagaggttgcctgtaacttgttgaatccaagccaagtggggggagatgaagtacagggactgatcgagaggcttggcagagaggaaggtctgcttgtgggaaaagggtattatacggactatacacctgaccagatcgttgaaagatatatggacttgctcaacaattcataaatttcaaagtaaaaaaagtaaaaacagtatgatgttgtcattcttagaacgtattattaccgatatcgatcatttatcttcattttgtgtttagatgtgatatacattgccatgagtgacaattgaaattagcaaagattaaataaaaagtgaaatg

SEQ ID NO: 2428 - protein, 297 aa, Arabidopsis thaliana
  misc_feature (1)..(297): Ceres Seq. ID no. 15218567
MLREMLGCCKVYISEARNKTALEAIERALKPFPPAAIVNKFEDAAYGRVGYTVVSSLANGSSSSLKNAVFAMVKTALDTINLELHCGSHPRLGVVDHICFHPLSQTSIEQVSSVANSLAMDIGSILRVPTYLYGAAEKEQCTLDSIRRKLGYFKANREGHEWAGGFDLEMVPLKPDAGPQEVSKAKGVVAVGACGWVSNYNVPVMSNDLKAVRRIARKTSERGGGLASVQTMALVHGEGVIEVACNLLNPSQVGGDEVQGLIERLGREEGLLVGKGYYTDYTPDQIVERYMDLLNNS

SEQ ID NO: 2429 - protein, 293 aa, Arabidopsis thaliana
  misc_feature (1)..(293): Ceres Seq. ID no. 15218568
MLGCCKVYISEARNKTALEAIERALKPFPPAAIVNKFEDAAYGRVGYTVVSSLANGSSSSLKNAVFAMVKTALDTINLELHCGSHPRLGVVDHICFHPLSQTSIEQVSSVANSLAMDIGSILRVPTYLYGAAEKEQCTLDSIRRKLGYFKANREGHEWAGGFDLEMVPLKPDAGPQEVSKAKGVVAVGACGWVSNYNVPVMSNDLKAVRRIARKTSERGGGLASVQTMALVHGEGVIEVACNLLNPSQVGGDEVQGLIERLGREEGLLVGKGYYTDYTPDQIVERYMDLLNNS

SEQ ID NO: 2430 - protein, 226 aa, Arabidopsis thaliana
  misc_feature (1)..(226): Ceres Seq. ID no. 15218569
MVKTALDTINLELHCGSHPRLGVVDHICFHPLSQTSIEQVSSVANSLAMDIGSILRVPTYLYGAAEKEQCTLDSIRRKLGYFKANREGHEWAGGFDLEMVPLKPDAGPQEVSKAKGVVAVGACGWVSNYNVPVMSNDLKAVRRIARKTSERGGGLASVQTMALVHGEGVIEVACNLLNPSQVGGDEVQGLIERLGREEGLLVGKGYYTDYTPDQIVERYMDLLNNS

SEQ ID NO: 2431 - DNA, 1925 bp, Arabidopsis thaliana
  misc_feature (1)..(1925): Ceres Seq. ID no. 13592848
ctcctccatttttgctacatttttttttctttgattaaaaacattttttctatttttcgttttttgctatttccttgtaacttaaaagaagaaaaaatgagaggtagcggagcaaagatcgccggcgttttgccgttgtttatgctattcatcgccggaacaatctccgcctttgaagacatagagaggttgaggatttggccgttaccggcacaagttagccacggtggccggagaatgtatctaagtggagatttcaagcttgttacggagggaagcaaatatggagacgcctcagggattttgaaagaaggatttgatagaatgcttggtgttgtgaggctgagccacgtcatctccggtgaccggaattcttcaggcaccggtggatctgctttgcttcagggacttcacgtcatcatctcctcctctaccgatgagttggaatatggagcagacgagtcgtacaaattagtggttccatctccagagaagccgtcttatgcacaacttgaggccaagagtgtttatggtgcattgcacggtctacagacatttagccagttatgtcattttaatttgaagaaaaaggtcatagagattctaatgactccatggaatatcatagaccagcctagattctcttaccgtggccttttaatcgatacatcccgacattatttgccacttccggttataaagaacgtgattgattccatgacatatgccaaacttaatgtgttacattggcacattgtggatacacaatcatttcctttagagataccttcttacccaaagctatggaacggcgcttactcttcctctcagcgatacaccttcgaagacgctgctgaaatcgtcaattatgctcggcgacgagggatccatgtcttggctgagattgatgttccaggacatgctctctcatggggaaagggatatcctgccttgtggccctccaagaattgtcaagaaccacttgacgtgagcagtgacttcacattcaaagtcattgatggcattctctctgatttcagcaagatctttaagtttaaatttgtccacttgggtggtgatgaagtaaatacaacttgttggtctgcaacaccgcgaatagcccaatggcttaaaaaacatcggatgagtgaaaaagaagcctatcaatatttcgtgttgcgggcgcaaaaaatcgccttgtctcacggatatgaaattatcaactgggaagagaccttcatcaattttggaagcaaattaaaccggaaaaccgtggttcacaactggcttaacacaggacttgttgagaatgtgactgcgtccggtttaaggtgtatagttagtaaccaagaattttggtatttggatcatatagacgcaccttggcaaggcttttacgcaaacgagccatttcaaaacataacggataaaaagcaacaaagtctagtacttggtggcgaggtttgcatgtggggtgaacatattgatgcttctgacattgaacaaaccatttggcctcgcgctgccgcagctgcagagcggttgtggacaccctatgcaaaattggctaaaaatcccaacaatgtaacgacgaggttggctcacttcagatgtctattgaatcaaagaggagttgcagctgcacctttggttggtggcggacgagttgtgccttttgaaccaggttcttgtctcgctcagtgattcgaaagattagcattgtagaatatattacagtcagcaacaccttggtcaattcaggttgaaatgaacccctacaaaaaagggatactttgaatttttttcttggttgattttttagtggtagaaatattccttcttacaatttgggaataattgttgcaacattcatgtataaaaggccttaccaatttcaggcttgaataagaatacatagtttgcac

SEQ ID NO: 2432 - protein, 567 aa, Arabidopsis thaliana
  misc_feature (1)..(567): Ceres Seq. ID no. 13592849
LLHFCYIFFSLIKNIFSIFRFLLFPCNLKEEKMRGSGAKIAGVLPLFMLFIAGTISAFEDIERLRIWPLPAQVSHGGRRMYLSGDFKLVTEGSKYGDASGILKEGFDRMLGVVRLSHVISGDRNSSGTGGSALLQGLHVIISSSTDELEYGADESYKLVVPSPEKPSYAQLEAKSVYGALHGLQTFSQLCHFNLKKKVIEILMTPWNIIDQPRFSYRGLLIDTSRHYLPLPVIKNVIDSMTYAKLNVLHWHIVDTQSFPLEIPSYPKLWNGAYSSSQRYTFEDAAEIVNYARRRGIHVLAEIDVPGHALSWGKGYPALWPSKNCQEPLDVSSDFTFKVIDGILSDFSKIFKFKFVHLGGDEVNTTCWSATPRIAQWLKKHRMSEKEAYQYFVLRAQKIALSHGYEIINWEETFINFGSKLNRKTVVHNWLNTGLVENVTASGLRCIVSNQEFWYLDHIDAPWQGFYANEPFQNITDKKQQSLVLGGEVCMWGEHIDASDIEQTIWPRAAAAAERLWTPYAKLAKNPNNVTTRLAHFRCLLNQRGVAAAPLVGGGRVVPFEPGSCLAQ

SEQ ID NO: 2433 - protein, 535 aa, Arabidopsis thaliana
  misc_feature (1)..(535): Ceres Seq. ID no. 13592850
MRGSGAKIAGVLPLFMLFIAGTISAFEDIERLRIWPLPAQVSHGGRRMYLSGDFKLVTEGSKYGDASGILKEGFDRMLGVVRLSHVISGDRNSSGTGGSALLQGLHVIISSSTDELEYGADESYKLVVPSPEKPSYAQLEAKSVYGALHGLQTFSQLCHFNLKKKVIEILMTPWNIIDQPRFSYRGLLIDTSRHYLPLPVIKNVIDSMTYAKLNVLHWHIVDTQSFPLEIPSYPKLWNGAYSSSQRYTFEDAAEIVNYARRRGIHVLAEIDVPGHALSWGKGYPALWPSKNCQEPLDVSSDFTFKVIDGILSDFSKIFKFKFVHLGGDEVNTTCWSATPRIAQWLKKHRMSEKEAYQYFVLRAQKIALSHGYEIINWEETFINFGSKLNRKTVVHNWLNTGLVENVTASGLRCIVSNQEFWYLDHIDAPWQGFYANEPFQNITDKKQQSLVLGGEVCMWGEHIDASDIEQTIWPRAAAAAERLWTPYAKLAKNPNNVTTRLAHFRCLLNQRGVAAAPLVGGGRVVPFEPGSCLAQ

SEQ ID NO: 2434 - protein, 520 aa, Arabidopsis thaliana
  misc_feature (1)..(520): Ceres Seq. ID no. 13592851
MLFIAGTISAFEDIERLRIWPLPAQVSHGGRRMYLSGDFKLVTEGSKYGDASGILKEGFDRMLGVVRLSHVISGDRNSSGTGGSALLQGLHVIISSSTDELEYGADESYKLVVPSPEKPSYAQLEAKSVYGALHGLQTFSQLCHFNLKKKVIEILMTPWNIIDQPRFSYRGLLIDTSRHYLPLPVIKNVIDSMTYAKLNVLHWHIVDTQSFPLEIPSYPKLWNGAYSSSQRYTFEDAAEIVNYARRRGIHVLAEIDVPGHALSWGKGYPALWPSKNCQEPLDVSSDFTFKVIDGILSDFSKIFKFKFVHLGGDEVNTTCWSATPRIAQWLKKHRMSEKEAYQYFVLRAQKIALSHGYEIINWEETFINFGSKLNRKTVVHNWLNTGLVENVTASGLRCIVSNQEFWYLDHIDAPWQGFYANEPFQNITDKKQQSLVLGGEVCMWGEHIDASDIEQTIWPRAAAAAERLWTPYAKLAKNPNNVTTRLAHFRCLLNQRGVAAAPLVGGGRVVPFEPGSCLAQ

SEQ ID NO: 2435 - DNA, 507 bp, Arabidopsis thaliana
  misc_feature (1)..(507): Ceres Seq. ID no. 13592939
tacctagaacatcctaatcgaaaaaacaacttcttcatctaatctgataagctaaaggagacttctaagctgaatctttttccaggatccatcagagcagaacaaaaaaatgggagtgttccgaggtcttatgggcgcaaagaagatctttcaaggtcgatcaatggcagcttcgacaccaaaagggtttcttgcagtgtacgttggagaaagccagatgaaaagatacatagtgccagtctcatatttgaaccagccttcatttcaagctttgttgagtaaatctgaacaagagtttgggtttgatcatccaatgggcggcttgaccatcccttgccctgtagatacatttatcaccgtcacttctcagcttcattagatccaattcacaaggatcacatatatgtaacaatttttgaggtcattaattagatgtagaagatatttagaacccagctgtgtaattacttacatagaagataacatttatcgtctgatatttgcccc

SEQ ID NO: 2436 - protein, 89 aa, Arabidopsis thaliana
  misc_feature (1)..(89): Ceres Seq. ID no. 13592940
MGVFRGLMGAKKIFQGRSMAASTPKGFLAVYVGESQMKRYIVPVSYLNQPSFQALLSKSEQEFGFDHPMGGLTIPCPVDTFITVTSQLH

SEQ ID NO: 2437 - protein, 82 aa, Arabidopsis thaliana
  misc_feature (1)..(82): Ceres Seq. ID no. 13592941
MGAKKIFQGRSMAASTPKGFLAVYVGESQMKRYIVPVSYLNQPSFQALLSKSEQEFGFDHPMGGLTIPCPVDTFITVTSQLH

SEQ ID NO: 2438 - protein, 71 aa, Arabidopsis thaliana
  misc_feature (1)..(71): Ceres Seq. ID no. 13592942
MAASTPKGFLAVYVGESQMKRYIVPVSYLNQPSFQALLSKSEQEFGFDHPMGGLTIPCPVDTFITVTSQLH

SEQ ID NO: 2439 - DNA, 1451 bp, Arabidopsis thaliana
  misc_feature (1)..(1451): Ceres Seq. ID no. 13593210
gtcgtcctcagctcatcgccggcgtttaccatccgctagatccgtcgcctctcaggtagacactttggatggaatggtaaatttacagaaactaataagaagagtgtgagcaaaatctgtagttggaaataatggcgatgagcaattctttgaaaaagctatcttcttgtgttcttattgatctcgatggtaccttaatcaacacagatggtgttgttggtgacattttgaggaaatacttgtgtaaatatggtaaacagtgggatggaagagaatcattgaaaatagttggcaaaactccattagaagctgctactactattgttgaagattatgaacttccttgtaaagttgatgaattcaattctgaattctaccctttgttctctgctcagatggacaaaatcaaatcccttcctggtgccaataggttgattcgacatttgaagtgtcatggagttcctgtggctttggcttccaattcttcaagagctaatattgaatccaaaatttcatatcatgaagggtggaaggaatgcttctcagttattgttggtagtgatgaagtttctaaaggaaagccttctcctgatatttttcttgaagcagccaagagattgaataaagatccagaggactgtttggttattgaagattctgtgcctggtgttatggctggtaaagctgctggtacaaaagtgattgctgttccttctctacctaagcaaacacatctttatacatctgcagatgaaatcatcaattctctactcgacataagacttgaaaaatggggacttcctccatttcaagactggatagagaacactttaccaattgatccgtggcatattggaggtccagtcatcaaaggatttggccgtggctcgaaagtacttggaatccccacagctaacttgtcaacaaaggattatgcggatgagctactggaacatccttcgggagtgtactttggttgggcaggcttggcaaccagaggtgtcttcaaaatggtcatgagcattggttggaatccttatttcaacaacaaggagaaaactattgaaccatggctgcttcacgatttcactgaggatttctacggagaagagctacgtcttattatcgttggctatatacgccctgaggctaatttctcttcactggagagtctcattgcaaagattcacgaggacagggaagttgcagagaaagctcttgatcttccttcgtatgctaagtttaagggtgatccttatctgactaaatgatagaagcttttatgaaaagaattcaaacacttggatttgtaatttcataactcaaatcagacttgcattgttctttagtactatcagcctcattgatttgattaaaagcaactttctagataacaactaaaaaaaaamagaaaaaaaaaaaaaaaaaaaactcgagggggggcccggtac

SEQ ID NO: 2440 - protein, 379 aa, Arabidopsis thaliana
  misc_feature (1)..(379): Ceres Seq. ID no. 15221205
MAMSNSLKKLSSCVLIDLDGTLINTDGVVGDILRKYLCKYGKQWDGRESLKIVGKTPLEAATTIVEDYELPCKVDEFNSEFYPLFSAQMDKIKSLPGANRLIRHLKCHGVPVALASNSSRANIESKISYHEGWKECFSVIVGSDEVSKGKPSPDIFLEAAKRLNKDPEDCLVIEDSVPGVMAGKAAGTKVIAVPSLPKQTHLYTSADEIINSLLDIRLEKWGLPPFQDWIENTLPIDPWHIGGPVIKGFGRGSKVLGIPTANLSTKDYADELLEHPSGVYFGWAGLATRGVFKMVMSIGWNPYFNNKEKTIEPWLLHDFTEDFYGEELRLIIVGYIRPEANFSSLESLIAKIHEDREVAEKALDLPSYAKFKGDPYLTK

SEQ ID NO: 2441 - protein, 377 aa, Arabidopsis thaliana
  misc_feature (1)..(377): Ceres Seq. ID no. 15221206
MSNSLKKLSSCVLIDLDGTLINTDGVVGDILRKYLCKYGKQWDGRESLKIVGKTPLEAATTIVEDYELPCKVDEFNSEFYPLFSAQMDKIKSLPGANRLIRHLKCHGVPVALASNSSRANIESKISYHEGWKECFSVIVGSDEVSKGKPSPDIFLEAAKRLNKDPEDCLVIEDSVPGVMAGKAAGTKVIAVPSLPKQTHLYTSADEIINSLLDIRLEKWGLPPFQDWIENTLPIDPWHIGGPVIKGFGRGSKVLGIPTANLSTKDYADELLEHPSGVYFGWAGLATRGVFKMVMSIGWNPYFNNKEKTIEPWLLHDFTEDFYGEELRLIIVGYIRPEANFSSLESLIAKIHEDREVAEKALDLPSYAKFKGDPYLTK

SEQ ID NO: 2442 - protein, 291 aa, Arabidopsis thaliana
  misc_feature (1)..(291): Ceres Seq. ID no. 15221207
MDKIKSLPGANRLIRHLKCHGVPVALASNSSRANIESKISYHEGWKECFSVIVGSDEVSKGKPSPDIFLEAAKRLNKDPEDCLVIEDSVPGVMAGKAAGTKVIAVPSLPKQTHLYTSADEIINSLLDIRLEKWGLPPFQDWIENTLPIDPWHIGGPVIKGFGRGSKVLGIPTANLSTKDYADELLEHPSGVYFGWAGLATRGVFKMVMSIGWNPYFNNKEKTIEPWLLHDFTEDFYGEELRLIIVGYIRPEANFSSLESLIAKIHEDREVAEKALDLPSYAKFKGDPYLTK

SEQ ID NO: 2443 - DNA, 3082 bp, Arabidopsis thaliana
  misc_feature (1)..(3082): Ceres Seq. ID no. 13646354
gagctcactagtcccccccccccccccgcaaaccaaattttgtcaatctaatttatcttctcctctcccggagaagaaggaaacttacaatttacaaagaacgagcttcaataaaaatttccaaagaaattaccgtcggcgaatcgttaggctcgagaagaatcaccaaattccaaggggagagagactgaattttcttttgattcacgtaacaacaacgctcagagactatgtcgtcggaggtgaaacagctgatcgtcgttgctgaaggcaccgccgctttgggtccttattggcaaaccatcgtctccgactatctcgagaaaatcatcaggtctttctgtggcagtgagttaaatggagagaggaaccctgtttctactgttgagctatcactggtgatcttcaattctcatggttcatattgtgcttgcttggtacaacggagtggctggacaagggatgttgatattttcttgcattggctttcttccatacaatttggtggtggtggtttcaatgaggttgccacagctgaagggcttgccgaagcattgatgatgttttctcctccttcaggccaagctcaaccaagtaacgatctgaaaagacactgtatcctaatcacagccagcaatcctcacatattgccaacacctgtatatcgtccacgattgcaaaatgtggaacggaatgagaatggtgatgcgcaagctgagagtcgattatcagatgctgagacagtggcttcatattttgctaagtgttctgtttctttgtctgttgtatgtccaaagcagcttccaaaaattagagcactatacaatgcgggaaagcccaatcaacaaagtgcggacttgtcaattgacacggctaagaacacattctatcttgtcctgatctcggagaattttgtggaggcacgtgctgccttaagtcattctgctacaaatttgccacagactcagagccctgtgaaagtggacagggccactgttgctccatctattccagtcactgggcaacctccagctcctgtgtcatcagccaatggacctattcagaatcggcaaccagtttctgttggaccagttccaactgctactgtgaaagttgagcctagcaccgtaacttctatggcaccagttcctagttttccccatatcccggctgtagctcggcctgctacacaagcaattccttcgattcaaacatcttcagcatcaccagtttctcaggatatggtcagcaacgccgagaatgcaccagatattaagcctgtggtggtcagtggaatgacgccaccattgcgtactggtcctcctggtggagccaatgtaaatctgcttaataatctttctcaagtccgacaagtcatgagctctgcagctctggcaggtgcagcctcatcggttgggcaaagtgcggttgcaatgcatatgtcaaatatgatatcaacaggaatggctacatctttgcctccttcacaaactgtgttttcaactggacagcagggaattacttcaatggctggttcgggtgcactaatgggatctgcacaaacgggacaaagcccgggtcctaataatgcctttagtcctcaaacaacgtcaaatgtcgcttcaaaccttggtgtttcacaaccaatgcaagggatgaaccaaggaagtcattctggagcaatgatgcaaggtggaatttccatgaaccaaaacatgatgagtggtcttggtcaaggaaatgtctcctctggaacaggtggaatgatgcctactccaggagttggccaacaagcgcaatcaggaatacaacaacttggtggcagtaacagctcagctcctaatatgcagctatcacagccatcatcgggggctatgcagacttcacaatccaaatatgtgaaagtctgggagggaaatttatctgggcaaaggcaagggcagcctgttcttatcaccagacttgagggttaccgaagtgcttctgcctctgattcgttggcagcaaactggccaccaactatgcagattgttcgtctcatatcccaggaccatatgaataacaagcaatatgttggcaaagctgacttccttgtgtttcgggccatgagtcaacatgggttcttaggacaacttcaggataaaaagctttgtgcagtcatccagttgccatcacagacgcttcttctctctgtctctgacaaggcttgccgcttgattggaatgcttttcccaggggatatggttgtgtttaaaccacaaattccaaatcagcaacagcagcagcaacaacaactccaccagcaacaacaacaacaacagcagatccagcagcagcagcaacaacaacaacacctccaacagcaacagatgccacaactccagcaacaacaacaacaacaccagcagcaacagcaacagcagcatcaattgtcacagctccadcatcatcagcagcaacaacaacaacagcagcaacaacagcagcagcatcaattgacacagcttcaacaccatcatcagcagcagcagcaggcgtcgccgctgaatcagatgcagcagcagacttcgccgctcaatcagatgcagcaacagacttcgcctctgaatcagatgcagcagcaacagcagcctcaacagatggtaatgggtggtcaagcttttgcacaagcccctggaagatcacaacaaggtggtggtggagggcagcctaacatgcctggagctggcttcatgggataaataaaaatatcagcttcagtgctaattaattagatttatcataacttaacattctttctttctcctttggtcaactcgatcgtcgccatggttttagactctgtttagttgtcctttctgttcttttgagcctgaaaatggcatgtcctattctgtatgggtctgaccatttagctacggcaccaaactattttgtcattttcttaagataaatagaaamamaataaagtykggagggttttttwmaaaaaaaaaaaaaaaaaaaaaaaaaaaaaaaaaaaaaaaaaaaaaaagraaaaaaaaaaaaaaaaaaactcgagggggggcccggtacccaattc

SEQ ID NO: 2444 - protein, 836 aa, Arabidopsis thaliana
  misc_feature (1)..(836): Ceres Seq. ID no. 15219048
  misc_feature (738)..(738): Xaa is any aa, unknown or other
MSSEVKQLIVVAEGTAALGPYWQTIVSDYLEKIIRSFCGSELNGERNPVSTVELSLVIFNSHGSYCACLVQRSGWTRDVDIFLHWLSSIQFGGGGFNEVATAEGLAEALMMFSPPSGQAQPSNDLKRHCILITASNPHILPTPVYRPRLQNVERNENGDAQAESRLSDAETVASYFAKCSVSLSVVCPKQLPKIRALYNAGKPNQQSADLSIDTAKNTFYLVLISENFVEARAALSHSATNLPQTQSPVKVDRATVAPSIPVTGQPPAPVSSANGPIQNRQPVSVGPVPTATVKVEPSTVTSMAPVPSFPHIPAVARPATQAIPSIQTSSASPVSQDMVSNAENAPDIKPVVVSGMTPPLRTGPPGGANVNLLNNLSQVRQVMSSAALAGAASSVGQSAVAMHMSNMISTGMATSLPPSQTVFSTGQQGITSMAGSGALMGSAQTGQSPGPNNAFSPQTTSNVASNLGVSQPMQGMNQGSHSGAMMQGGISMNQNMMSGLGQGNVSSGTGGMMPTPGVGQQAQSGIQQLGGSNSSAPNMQLSQPSSGAMQTSQSKYVKVWEGNLSGQRQGQPVLITRLEGYRSASASDSLAANWPPTMQIVRLISQDHMNNKQYVGKADFLVFRAMSQHGFLGQLQDKKLCAVIQLPSQTLLLSVSDKACRLIGMLFPGDMVVFKPQIPNQQQQQQQQLHQQQQQQQQIQQQQQQQQHLQQQQMPQLQQQQQQHQQQQQQQHQLSQLXHHQQQQQQQQQQQQQHQLTQLQHHHQQQQQASPLNQMQQQTSPLNQMQQQTSPLNQMQQQQQPQQMVMGGQAFAQAPGRSQQGGGGGQPNMPGAGFMG

SEQ ID NO: 2445 - protein, 727 aa, Arabidopsis thaliana
  misc_feature (1)..(727): Ceres Seq. ID no. 15219049
  misc_feature (629)..(629): Xaa is any aa, unknown or other
MMFSPPSGQAQPSNDLKRHCILITASNPHILPTPVYRPRLQNVERNENGDAQAESRLSDAETVASYFAKCSVSLSVVCPKQLPKIRALYNAGKPNQQSADLSIDTAKNTFYLVLISENFVEARAALSHSATNLPQTQSPVKVDRATVAPSIPVTGQPPAPVSSANGPIQNRQPVSVGPVPTATVKVEPSTVTSMAPVPSFPHIPAVARPATQAIPSIQTSSASPVSQDMVSNAENAPDIKPVVVSGMTPPLRTGPPGGANVNLLNNLSQVRQVMSSAALAGAASSVGQSAVAMHMSNMISTGMATSLPPSQTVFSTGQQGITSMAGSGALMGSAQTGQSPGPNNAFSPQTTSNVASNLGVSQPMQGMNQGSHSGAMMQGGISMNQNMMSGLGQGNVSSGTGGMMPTPGVGQQAQSGIQQLGGSNSSAPNMQLSQPSSGAMQTSQSKYVKVWEGNLSGQRQGQPVLITRLEGYRSASASDSLAANWPPTMQIVRLISQDHMNNKQYVGKADFLVFRAMSQHGFLGQLQDKKLCAVIQLPSQTLLLSVSDKACRLIGMLFPGDMVVFKPQIPNQQQQQQQQLHQQQQQQQQIQQQQQQQQHLQQQQMPQLQQQQQQHQQQQQQQHQLSQLXHHQQQQQQQQQQQQQHQLTQLQHHHQQQQQASPLNQMQQQTSPLNQMQQQTSPLNQMQQQQQPQQMVMGGQAFAQAPGRSQQGGGGGQPNMPGAGFMG

SEQ ID NO: 2446 - protein, 726 aa, Arabidopsis thaliana
  misc_feature (1)..(726): Ceres Seq. ID no. 15219050
  misc_feature (628)..(628): Xaa is any aa, unknown or other
MFSPPSGQAQPSNDLKRHCILITASNPHILPTPVYRPRLQNVERNENGDAQAESRLSDAETVASYFAKCSVSLSVVCPKQLPKIRALYNAGKPNQQSADLSIDTAKNTFYLVLISENFVEARAALSHSATNLPQTQSPVKVDRATVAPSIPVTGQPPAPVSSANGPIQNRQPVSVGPVPTATVKVEPSTVTSMAPVPSFPHIPAVARPATQAIPSIQTSSASPVSQDMVSNAENAPDIKPVVVSGMTPPLRTGPPGGANVNLLNNLSQVRQVMSSAALAGAASSVGQSAVAMHMSNMISTGMATSLPPSQTVFSTGQQGITSMAGSGALMGSAQTGQSPGPNNAFSPQTTSNVASNLGVSQPMQGMNQGSHSGAMMQGGISMNQNMMSGLGQGNVSSGTGGMMPTPGVGQQAQSGIQQLGGSNSSAPNMQLSQPSSGAMQTSQSKYVKVWEGNLSGQRQGQPVLITRLEGYRSASASDSLAANWPPTMQIVRLISQDHMNNKQYVGKADFLVFRAMSQHGFLGQLQDKKLCAVIQLPSQTLLLSVSDKACRLIGMLFPGDMVVFKPQIPNQQQQQQQQLHQQQQQQQQIQQQQQQQQHLQQQQMPQLQQQQQQHQQQQQQQHQLSQLXHHQQQQQQQQQQQQQHQLTQLQHHHQQQQQASPLNQMQQQTSPLNQMQQQTSPLNQMQQQQQPQQMVMGGQAFAQAPGRSQQGGGGGQPNMPGAGFMG

SEQ ID NO: 2447 - DNA, 1414 bp, Arabidopsis thaliana
  misc_feature (1)..(1414): Ceres Seq. ID no. 13646638
accatttgcgtgatccctatcttctttatcttcgccctccggattcttcaatattactaaatctgccatcatctcctcgatttcgatgacgatagagccgatgcaatcgccgtcttcggagccggaggttcactctggagaggacttcgttcacatcgatgaccctaggcctaccggcgatatctctttaagcgacagcatagttaatgtggagaaggatgaactgctcgacgaagcggcggaggaagaatttagatgctccgattctgtgtttagcggcggcgatggcggtggagcggatgatgatggcggcgagtgttcatcggaggctactaaagtggagctaccggaggaattggcgaaaagtgttgtgattctgacgtgcgagtcaacagcggatggtggatcttgcgatgtgtacttggttggtactgctcatgtatcaaagcaatcctgtcttgaggttgaagcaataatcagcatcttgaaaccagaggttgtcttcgttgaattgtgttcgagccgattgtctgttctcaaacctcaaactttgaagattccaaccatgtcggacatgatagaaagttggaagcagaaacagaacacattcggaatactttatggatggtttcttgcaaagatcgccagtcatcttgaggtttttcctggtgctgagtttcgtgtggcgtatgaagaggcgattaaatatggcggcaaggtgatacttggtgatcgtcctgtacagattacgttaaagagaacatgggccaagatgcctgtatggcacaaggttaagtttttatactccatactgtttcaagctgtcttcttgccgggcgctgaggaactcgagaaaatgctgaaagatatggacaatgtggatatggtgactttggtgattcaagaaatgagcaaggaatttccaactctcatggatacaattgtgcatgagcgagaccagtacatggcatcctctttgctgagagttgcaagtgaccatagttcggttgtagcagttatcggaaaaggacatattaatggaatcaagaagaattggaagcaacctattacgatgaatgatctaatggagataccaagcgacaagtcagtgtttacgttaaagagaataatatcatcagtggcagttgcagttgcagggacagctatagtttcgggtatacttctttcaagaagaaagtgaaaaaggattgtaattggggcagagtttttctcttctttctcctgagccatacgaaggaatgatacaaactcaaataacttttacactcgtttactctttcttttttttcttttttttcacttctgtacgtttattgatgaaaataataaagctttttttttggtcaaaaaaaaagaaaaaaaaaaaaaaaaaaaactcgagggggggcccggt

SEQ ID NO: 2448 - protein, 371 aa, Arabidopsis thaliana
  misc_feature (1)..(371): Ceres Seq. ID no. 15219080
MTIEPMQSPSSEPEVHSGEDFVHIDDPRPTGDISLSDSIVNVEKDELLDEAAEEEFRCSDSVFSGGDGGGADDDGGECSSEATKVELPEELAKSVVILTCESTADGGSCDVYLVGTAHVSKQSCLEVEAIISILKPEVVFVELCSSRLSVLKPQTLKIPTMSDMIESWKQKQNTFGILYGWFLAKIASHLEVFPGAEFRVAYEEAIKYGGKVILGDRPVQITLKRTWAKMPVWHKVKFLYSILFQAVFLPGAEELEKMLKDMDNVDMVTLVIQEMSKEFPTLMDTIVHERDQYMASSLLRVASDHSSVVAVIGKGHINGIKKNWKQPITMNDLMEIPSDKSVFTLKRIISSVAVAVAGTAIVSGILLSRRK

SEQ ID NO: 2449 - protein, 366 aa, Arabidopsis thaliana
  misc_feature (1)..(366): Ceres Seq. ID no. 15219081
MQSPSSEPEVHSGEDFVHIDDPRPTGDISLSDSIVNVEKDELLDEAAEEEFRCSDSVFSGGDGGGADDDGGECSSEATKVELPEELAKSVVILTCESTADGGSCDVYLVGTAHVSKQSCLEVEAIISILKPEVVFVELCSSRLSVLKPQTLKIPTMSDMIESWKQKQNTFGILYGWFLAKIASHLEVFPGAEFRVAYEEAIKYGGKVILGDRPVQITLKRTWAKMPVWHKVKFLYSILFQAVFLPGAEELEKMLKDMDNVDMVTLVIQEMSKEFPTLMDTIVHERDQYMASSLLRVASDHSSVVAVIGKGHINGIKKNWKQPITMNDLMEIPSDKSVFTLKRIISSVAVAVAGTAIVSGILLSRRK

SEQ ID NO: 2450 - protein, 211 aa, Arabidopsis thaliana
  misc_feature (1)..(211): Ceres Seq. ID no. 15219082
MSDMIESWKQKQNTFGILYGWFLAKIASHLEVFPGAEFRVAYEEAIKYGGKVILGDRPVQITLKRTWAKMPVWHKVKFLYSILFQAVFLPGAEELEKMLKDMDNVDMVTLVIQEMSKEFPTLMDTIVHERDQYMASSLLRVASDHSSVVAVIGKGHINGIKKNWKQPITMNDLMEIPSDKSVFTLKRIISSVAVAVAGTAIVSGILLSRRK

SEQ ID NO: 2451 - DNA, 521 bp, Arabidopsis thaliana
  misc_feature (1)..(521): Ceres Seq. ID no. 13646919
  misc_feature (3)..(3): n is a, c, t, g, unknown, or other
  misc_feature (4)..(4): n is a, c, t, g, unknown, or other
  misc_feature (5)..(5): n is a, c, t, g, unknown, or other
gannnaaaattgaaagcaacaaatttcttcttctcttcttcaagctcatcaatcaatggcgtcgtctctatctccaccggaagaagcttcgtatcaccaccgtcataccaaaaggtacacctcctccgcttcctccaccaccaacggaaccgtcgaatcatcggtttccgatttcgtcaaacgtcccaaaatctctcatccgaattacatatcaagttccgagatcgaatcagagttttctcatcacgatccagatttcgcaagaatcaacaacggtagttttggttgttgtccgtcatcaatcctagctttacaacgagattggcagctccggttccttcgtcaaccggatcgattctatttcgacgaactcaaaccaaaaatctccgattctagatctgtaatcaaacggttaataaacgccgagcatgacgatgaagtctcgatcgtcgataacgcaacaaccgcagctgcaatcgttcttcaacaaaccgcttggggcttttcgtgaaggtcggttc

SEQ ID NO: 2452 - protein, 151 aa, Arabidopsis thaliana
  misc_feature (1)..(151): Ceres Seq. ID no. 13646920
MASSLSPPEEASYHHRHTKRYTSSASSTTNGTVESSVSDFVKRPKISHPNYISSSEIESEFSHHDPDFARINNGSFGCCPSSILALQRDWQLRFLRQPDRFYFDELKPKISDSRSVIKRLINAEHDDEVSIVDNATTAAAIVLQQTAWGFS

SEQ ID NO: 2453 - protein, 101 aa, Arabidopsis thaliana
  misc_feature (1)..(101): Ceres Seq. ID no. 13646921
  misc_feature (1)..(1): Xaa is any aa, unknown or other
XKIESNKFLLLFFKLINQWRRLYLHRKKLRITTVIPKGTPPPLPPPPTEPSNHRFPISSNVPKSLIRITYQVPRSNQSFLITIQISQESTTVVLVVVRHQS

SEQ ID NO: 2454 - protein, 92 aa, Arabidopsis thaliana
  misc_feature (1)..(92): Ceres Seq. ID no. 13646922
  misc_feature (1)..(1): Xaa is any aa, unknown or other
  misc_feature (2)..(2): Xaa is any aa, unknown or other
XXKLKATNFFFSSSSSSINGVVSISTGRSFVSPPSYQKVHLLRFLHHQRNRRIIGFRFRQTSQNLSSELHIKFRDRIRVFSSRSRFRKNQQR

SEQ ID NO: 2455 - DNA, 2728 bp, Arabidopsis thaliana
  misc_feature (1)..(2728): Ceres Seq. ID no. 13646955
  misc_feature (1261)..(1261): n is a, c, t, g, unknown, or other
  misc_feature (1262)..(1262): n is a, c, t, g, unknown, or other
  misc_feature (1818)..(1818): n is a, c, t, g, unknown, or other
  misc_feature (1819)..(1819): n is a, c, t, g, unknown, or other
  misc_feature (2676)..(2676): n is a, c, t, g, unknown, or other
  misc_feature (2677)..(2677): n is a, c, t, g, unknown, or other
  misc_feature (2678)..(2678): n is a, c, t, g, unknown, or other
  misc_feature (2679)..(2679): n is a, c, t, g, unknown, or other
gagctcactagtccccccccccccgaaagtcataataaccttgacttggaccagtcgcctgaaagtcttgagtttttttcccttaagatcccgccgggctccggtgctggcggttaaacccttccaaaacctgaaattcgtttagcttaggacaaacaagtgaagcccaccatacagaaatgtctaacagaagcctccatttgaagaaaatatcatggctttcttctcggattctctcagacaatgttcacggtcgatttcgccgatcaatcactactccagccacttgtttagctccttcactcgatggagacatgaacattggatccaagacattggtcgaacaacgtttctctcgcggatttgcatcagtacgacgagtatctcgagcttcttcttcttcttctccttcctctccacatgttgatttgctctcttttattaaagcttcacttgataaacttgaaggtccttcccatcattggttgaatcgagactttgggaataaacagcttttcaaggacaaaggaacttatgtagttctagctggacatttgctagacggaacaagtgatctgagtggtttctttgagaaactaaagttgcttcagcagaggtctccgggtgtctgtttcatgggcatccacttcagtgatcaagctcgaatcgctgatgatcgaactgctctagctgagttgattttgaaggaatacctcacttttcctgtgctactttccgaaaaagaatttcccaagacaagtggggaagtacgttacatcgtgtttaaagattttaagaatcctctaatctacgaagagaaggatcttgatattgcttctgtagttaaagctcttgacagcctcctcactcaagatactgagaaatccaagtctgtcagacttttcacgaacacttggtcaaaacaagcagaggctatcaaggaatcacatttcccttctttctttcaggaattgttactttactttccaggttgtatctctgcagacgaagttggagaccgtctgtttctttctgataccaaccatcatcgtattattattttcgaaaacagtgggaagattgtagacagtattggttgtttcccaggttttgaggatggagattttgaatctgcaaagatgttacgtcctacagggaccctttacgacgaagcggaggattgtctttacattgtagattctgagaatcacgccattagaagagcaaatataaatagccgggtcctggaaacagtatatcnnaaggttattaagaaaactggtggcttatggtcttggataatggagaaaatgggtcttggaaaagatgacgatacaacagttgatgctgataccaaatcagaagaatttgatgcacgctctcttttgtttccatggcatatactgaagcgtgacgatgagagtcttttagtcattaacaaaagcttttcgaagttatggataataaatttagcttcaggagagatcgaagaagttgtggaagggttttcgaagataattgagatctgcggtcaatcaatcacagagaagctatcagtgttggaacatatgccttctaactggttgcaacagcaaactgcggctatcgcctcatttaaggagcagccaagtgcttcccttttgtcttmtwwyactaaacttggagacgacattgtcatgacagatatagcttgtcagagggtgttgaagctaaatagagattctggagcatgctctagcattcaattctcaaacagtgggatccttgggttgccctattggttgttcattccactggagagagtttttaatctagctnntggagttcaggaagcacatctcagtcatactcaggaattccggttattgccaggtaaaattagcatacggttgaacatagagattcctccatgcacggagcttgttgadccgatacaagaaagctgcatatggcgacagacaagaggcgcaatcagtgaattctcgagtgctggaagtgcagttgaaccttcagaaaaggttggagtttcacaacaatggtatgatgaattagacagcctcgccaaagaaatagccaaccctgaagcagctgaggaagaggaagaagaagatgttaacccctctgaggttgacagagaagaagatggacgtatccacattgattgtcctgtcaaaacaagtcctggctcaagtgagcttattgtttatgcagctttgtatttaagactagcgagaaacgaagagacagaaagtgcgacccaggaagaactggcgagaaaaatagcaaagattttaaagccagtacggaacattacaactatgaaggaagatttgtttgtgaatttgttgtccaagtcaaagagagaattgagagacattgtcttcataaagccgatgcatgtgcggataaggttagactcgaaggatcatccaaaagccgataactcaagagacgtaatcttgactgactcctctgttgaggttgatgtctctctctgacaacgaataacgatgcttttgcagtccattctttctcaaaagtaccaaatggctactctaattctttttgaggtggtaaaaatgagctcaataagacttgtataagtagtttatgacattatattaacgatggtccaagtttcatttggatttctatattttagtgtttcttctattnnnnaaaaaaaagaaaaaaaaaaaaaaaaaaaactcgagggggggcccggtac

SEQ ID NO: 2456 - protein, 772 aa, Arabidopsis thaliana
  misc_feature (1)..(772): Ceres Seq. ID no. 15219260
  misc_feature (361)..(361): Xaa is any aa, unknown or other
  misc_feature (490)..(490): Xaa is any aa, unknown or other
  misc_feature (491)..(491): Xaa is any aa, unknown or other
  misc_feature (547)..(547): Xaa is any aa, unknown or other
  misc_feature (583)..(583): Xaa is any aa, unknown or other
MSNRSLHLKKISWLSSRILSDNVHGRFRRSITTPATCLAPSLDGDMNIGSKTLVEQRFSRGFASVRRVSRASSSSSPSSPHVDLLSFIKASLDKLEGPSHHWLNRDFGNKQLFKDKGTYVVLAGHLLDGTSDLSGFFEKLKLLQQRSPGVCFMGIHFSDQARIADDRTALAELILKEYLTFPVLLSEKEFPKTSGEVRYIVFKDFKNPLIYEEKDLDIASVVKALDSLLTQDTEKSKSVRLFTNTWSKQAEAIKESHFPSFFQELLLYFPGCISADEVGDRLFLSDTNHHRIIIFENSGKIVDSIGCFPGFEDGDFESAKMLRPTGTLYDEAEDCLYIVDSENHAIRRANINSRVLETVYXKVIKKTGGLWSWIMEKMGLGKDDDTTVDADTKSEEFDARSLLFPWHILKRDDESLLVINKSFSKLWIINLASGEIEEVVEGFSKIIEICGQSITEKLSVLEHMPSNWLQQQTAAIASFKEQPSASLLSXXTKLGDDIVMTDIACQRVLKLNRDSGACSSIQFSNSGILGLPYWLFIPLERVFNLAXGVQEAHLSHTQEFRLLPGKISIRLNIEIPPCTELVXPIQESCIWRQTRGAISEFSSAGSAVEPSEKVGVSQQWYDELDSLAKEIANPEAAEEEEEEDVNPSEVDREEDGRIHIDCPVKTSPGSSELIVYAALYLRLARNEETESATQEELARKIAKILKPVRNITTMKEDLFVNLLSKSKRELRDIVFIKPMHVRIRLDSKDHPKADNSRDVILTDSSVEVDVSL

SEQ ID NO: 2457 - protein, 727 aa, Arabidopsis thaliana
  misc_feature (1)..(727): Ceres Seq. ID no. 15219261
  misc_feature (316)..(316): Xaa is any aa, unknown or other
  misc_feature (445)..(445): Xaa is any aa, unknown or other
  misc_feature (446)..(446): Xaa is any aa, unknown or other
  misc_feature (502)..(502): Xaa is any aa, unknown or other
  misc_feature (538)..(538): Xaa is any aa, unknown or other
MNIGSKTLVEQRFSRGFASVRRVSRASSSSSPSSPHVDLLSFIKASLDKLEGPSHHWLNRDFGNKQLFKDKGTYVVLAGHLLDGTSDLSGFFEKLKLLQQRSPGVCFMGIHFSDQARIADDRTALAELILKEYLTFPVLLSEKEFPKTSGEVRYIVFKDFKNPLIYEEKDLDIASVVKALDSLLTQDTEKSKSVRLFTNTWSKQAEAIKESHFPSFFQELLLYFPGCISADEVGDRLFLSDTNHHRIIIFENSGKIVDSIGCFPGFEDGDFESAKMLRPTGTLYDEAEDCLYIVDSENHAIRRANINSRVLETVYXKVIKKTGGLWSWIMEKMGLGKDDDTTVDADTKSEEFDARSLLFPWHILKRDDESLLVINKSFSKLWIINLASGEIEEVVEGFSKIIEICGQSITEKLSVLEHMPSNWLQQQTAAIASFKEQPSASLLSXXTKLGDDIVMTDIACQRVLKLNRDSGACSSIQFSNSGILGLPYWLFIPLERVFNLAXGVQEAHLSHTQEFRLLPGKISIRLNIEIPPCTELVXPIQESCIWRQTRGAISEFSSAGSAVEPSEKVGVSQQWYDELDSLAKEIANPEAAEEEEEEDVNPSEVDREEDGRIHIDCPVKTSPGSSELIVYAALYLRLARNEETESATQEELARKIAKILKPVRNITTMKEDLFVNLLSKSKRELRDIVFIKPMHVRIRLDSKDHPKADNSRDVILTDSSVEVDVSL

SEQ ID NO: 2458 - protein, 620 aa, Arabidopsis thaliana
  misc_feature (1)..(620): Ceres Seq. ID no. 15219262
  misc_feature (209)..(209): Xaa is any aa, unknown or other
  misc_feature (338)..(338): Xaa is any aa, unknown or other
  misc_feature (339)..(339): Xaa is any aa, unknown or other
  misc_feature (395)..(395): Xaa is any aa, unknown or other
  misc_feature (431)..(431): Xaa is any aa, unknown or other
MGIHFSDQARIADDRTALAELILKEYLTFPVLLSEKEFPKTSGEVRYIVFKDFKNPLIYEEKDLDIASVVKALDSLLTQDTEKSKSVRLFTNTWSKQAEAIKESHFPSFFQELLLYFPGCISADEVGDRLFLSDTNHHRIIIFENSGKIVDSIGCFPGFEDGDFESAKMLRPTGTLYDEAEDCLYIVDSENHAIRRANINSRVLETVYXKVIKKTGGLWSWIMEKMGLGKDDDTTVDADTKSEEFDARSLLFPWHILKRDDESLLVINKSFSKLWIINLASGEIEEVVEGFSKIIEICGQSITEKLSVLEHMPSNWLQQQTAAIASFKEQPSASLLSXXTKLGDDIVMTDIACQRVLKLNRDSGACSSIQFSNSGILGLPYWLFIPLERVFNLAXGVQEAHLSHTQEFRLLPGKISIRLNIEIPPCTELVXPIQESCIWRQTRGAISEFSSAGSAVEPSEKVGVSQQWYDELDSLAKEIANPEAAEEEEEEDVNPSEVDREEDGRIHIDCPVKTSPGSSELIVYAALYLRLARNEETESATQEELARKIAKILKPVRNITTMKEDLFVNLLSKSKRELRDIVFIKPMHVRIRLDSKDHPKADNSRDVILTDSSVEVDVSL

SEQ ID NO: 2459 - DNA, 1300 bp, Arabidopsis thaliana
  misc_feature (1)..(1300): Ceres Seq. ID no. 13647011
gctcactagtcccccccccccatagttaaacttcttgggtccagatcattgccttggctaataagagctttactggaccatatatcaaataagataacaacacttgagccaatgatctctggattgcaagaagcattgcccaagtccattggattgctttcttttgatggtggtgttacaggttgtatgaagcttatacgagagcaactaaactggggcactaagtcagaactcaaatcagaagttctacgaggaataaaggaaattggaagtgtgatatatacaatgggacttctcgatatcgtattgagagaggtagacacaaagcggttcatgcaaacagctccatggttgggattaatcccaggtgctgaaggacagatagttaatgctcaagacggcgaaagccctcttgtcaatctcttaaagtcagcaacttctgcagttgtatcaagtccaggttgtcttaatccagctgcgttctataccatgtccaaacaggcagaagctgcagatcttttgtacaaggcaaacatgaacggtgggagtgttcttgaatacacacttgcattcacaagtgcgtcgctcgacaaatattgcagtaaatggagtgctcctccaaagacgggcttcgttgatattacaacttcaaaggatttttaccgtatatacggtggtcttcagattggatatctagaggagataacagctccacagtcagctcaacatgaagtcctcggtgattcaatagcttggggtggttgcaccattatttacttgctcggccagcaacttcacnnngagttgtttgatttctcgtaccaagtactcaatgtctctgaggttgaaactgtctctgcttcacatacccataggaatccacaaatccatcagggatgggaaggtttgttggaagggatgaagaaagctcggaggttgaacaaccatgtcttctccatgcataaagctcgttgtcctctagaagacaaaacggcatgtgccatcaaacagagcggcgcaccgctgccacgtgtcaggtttgagaataccgtgtctgctttcgagactctacctcagaaaggcaccgttggctgatgcaatttgtacaataaccagaatgtgtttttcatcttcataataaccatgtatccacctttctttctgaacaagtaacctggaaaatcgtttgtatcaatggagttttctttgtatgttaccgaagataaacgcatacacagacgttcctagkrmttttggyttrhwcgggwcmrtwwagtnnnaactggaggggggaaaggag

SEQ ID NO: 2460 - protein, 327 aa, Arabidopsis thaliana
  misc_feature (1)..(327): Ceres Seq. ID no. 15219125
  misc_feature (230)..(230): Xaa is any aa, unknown or other
MISGLQEALPKSIGLLSFDGGVTGCMKLIREQLNWGTKSELKSEVLRGIKEIGSVIYTMGLLDIVLREVDTKRFMQTAPWLGLIPGAEGQIVNAQDGESPLVNLLKSATSAVVSSPGCLNPAAFYTMSKQAEAADLLYKANMNGGSVLEYTLAFTSASLDKYCSKWSAPPKTGFVDITTSKDFYRIYGGLQIGYLEEITAPQSAQHEVLGDSIAWGGCTIIYLLGQQLHXELFDFSYQVLNVSEVETVSASHTHRNPQIHQGWEGLLEGMKKARRLNNHVFSMHKARCPLEDKTACAIKQSGAPLPRVRFENTVSAFETLPQKGTVG

SEQ ID NO: 2461 - protein, 302 aa, Arabidopsis thaliana
  misc_feature (1)..(302): Ceres Seq. ID no. 15219126
  misc_feature (205)..(205): Xaa is any aa, unknown or other
MKLIREQLNWGTKSELKSEVLRGIKEIGSVIYTMGLLDIVLREVDTKRFMQTAPWLGLIPGAEGQIVNAQDGESPLVNLLKSATSAVVSSPGCLNPAAFYTMSKQAEAADLLYKANMNGGSVLEYTLAFTSASLDKYCSKWSAPPKTGFVDITTSKDFYRIYGGLQIGYLEEITAPQSAQHEVLGDSIAWGGCTIIYLLGQQLHXELFDFSYQVLNVSEVETVSASHTHRNPQIHQGWEGLLEGMKKARRLNNHVFSMHKARCPLEDKTACAIKQSGAPLPRVRFENTVSAFETLPQKGTVG

SEQ ID NO: 2462 - protein, 269 aa, Arabidopsis thaliana
  misc_feature (1)..(269): Ceres Seq. ID no. 15219127
  misc_feature (172)..(172): Xaa is any aa, unknown or other
MGLLDIVLREVDTKRFMQTAPWLGLIPGAEGQIVNAQDGESPLVNLLKSATSAVVSSPGCLNPAAFYTMSKQAEAADLLYKANMNGGSVLEYTLAFTSASLDKYCSKWSAPPKTGFVDITTSKDFYRIYGGLQIGYLEEITAPQSAQHEVLGDSIAWGGCTIIYLLGQQLHXELFDFSYQVLNVSEVETVSASHTHRNPQIHQGWEGLLEGMKKARRLNNHVFSMHKARCPLEDKTACAIKQSGAPLPRVRFENTVSAFETLPQKGTVG

SEQ ID NO: 2463 - DNA, 1281 bp, Arabidopsis thaliana
  misc_feature (1)..(1281): Ceres Seq. ID no. 13647851
gatctctgcgattattattattcactctctcctcttctctccgccgaagtagtcacagttccggccaccaggcaaagaagagagaaaacgaccctgactccaataatggctcctagttctaggtctccttcaccacgtacgaagagactgagaagagctcgaggagagaaggaaattgggagaagtagagagagagaagatgatggtagagaaagggagaagagaaacagtagggaaagggatagagatataggaagagatagggatagggagagaaaaggagaaggagaaagagatagggaagttggggataagagaagacgatcagggagagaggatactgaaaaaaggagaaggacaagagcagatgatgagagatactctagaggaagacatgagaggtctacttcaccgtcagataggagtcacaggagtagtaggcgttcacctgaaagagctattgcctcaaggcatgatgaggggtctaatgcaagagggggcagcgaggagccaaatgtcgaggaagattcagtcgcgagaatgagagcagttgaagaggctctggcagcgaagaaaaaggaagaaccatcatttgagctatcagggaaacttgctgaagaaactaacagatacagaggtatcacactcctcttcaatgagcccccagaggctagaaaacccagcgaacgatggagactgtatgtttttaaggatggtgaaccactgaatgagccactctgccttcaccgccaaagctgctacctctttggacgtgaaagaaggattgccgacattcctacggatcacccatcttgcagcaagcagcatgctgtcattcagtaccgggaaatggaaaaggagaaaccagatggtatgatggggaagcaagtgaagccttacataatggatcttggtagtaccaacaaaacttatatcaatgaaagtcccattgagccacaaagatattatgagctttttgagaaagacaccataaagtttggcaacagcagccgagagtacgtactgttgcacgagaattctgccgagtgaatgaaatcagagtcaagcagaaacgagtaaatcacaagattagatagttgcgtttctcagggtttttagagatgtttgagctgcttcatgtatgctttctaccgtgctggtgataatctcagacatcatttagaaatcttttgcttgcttgttttataataaatgatgatgaacgattggtaagagaaaaaggttaacttttggtataactgtataagatcaatctctact

SEQ ID NO: 2464 - protein, 349 aa, Arabidopsis thaliana
  misc_feature (1)..(349): Ceres Seq. ID no. 13647852
DLCDYYYSLSPLLSAEVVTVPATRQRREKTTLTPIMAPSSRSPSPRTKRLRRARGEKEIGRSREREDDGREREKRNSRERDRDIGRDRDRERKGEGERDREVGDKRRRSGREDTEKRRRTRADDERYSRGRHERSTSPSDRSHRSSRRSPERAIASRHDEGSNARGGSEEPNVEEDSVARMRAVEEALAAKKKEEPSFELSGKLAEETNRYRGITLLFNEPPEARKPSERWRLYVFKDGEPLNEPLCLHRQSCYLFGRERRIADIPTDHPSCSKQHAVIQYREMEKEKPDGMMGKQVKPYIMDLGSTNKTYINESPIEPQRYYELFEKDTIKFGNSSREYVLLHENSAE

SEQ ID NO: 2465 - protein, 314 aa, Arabidopsis thaliana
  misc_feature (1)..(314): Ceres Seq. ID no. 13647853
MAPSSRSPSPRTKRLRRARGEKEIGRSREREDDGREREKRNSRERDRDIGRDRDRERKGEGERDREVGDKRRRSGREDTEKRRRTRADDERYSRGRHERSTSPSDRSHRSSRRSPERAIASRHDEGSNARGGSEEPNVEEDSVARMRAVEEALAAKKKEEPSFELSGKLAEETNRYRGITLLFNEPPEARKPSERWRLYVFKDGEPLNEPLCLHRQSCYLFGRERRIADIPTDHPSCSKQHAVIQYREMEKEKPDGMMGKQVKPYIMDLGSTNKTYINESPIEPQRYYELFEKDTIKFGNSSREYVLLHENSAE

SEQ ID NO: 2466 - DNA, 582 bp, Arabidopsis thaliana
  misc_feature (1)..(582): Ceres Seq. ID no. 13648103
gaaaataatcttcatagtctctcatccaatcttacaaactttctgatttcctttctacattcatcgaccaatggcagcaaacaaaactcttcctacgtatttttgcagaaactgcgagaatccactagctctcggtgaagatctcatctccaaaaaatttgtgggagcttcagggccagcgtttatgttttcacacgcgatgaacgtggtggttggaccgaagattgggaggaaactgataaccggatcgtatgtagtggcagatgtgatgtgcagtaagtgtggtgagacgttgggttggaaatatgttgagacattcgatcttaaacagaggtataaagaaggcatgtttgtcatcgagaagctcaagttgaccaaaagatattgaaacctagtcaagaagaataatactcttggagggttaagctaataaataaatgaaggaaacttgaggattgtatatgtatatataacctttgttgtataaatgtcatcactatattggttgttctctataaagggatttgaaaacaaagtaaaaaaaaaaaaaaaaaaaactcgagggggggcccggtacccaat

SEQ ID NO: 2467 - protein, 105 aa, Arabidopsis thaliana
  misc_feature (1)..(105): Ceres Seq. ID no. 13648104
MAANKTLPTYFCRNCENPLALGEDLISKKFVGASGPAFMFSHAMNVVVGPKIGRKLITGSYVVADVMCSKCGETLGWKYVETFDLKQRYKEGMFVIEKLKLTKRY

SEQ ID NO: 2468 - protein, 67 aa, Arabidopsis thaliana
  misc_feature (1)..(67): Ceres Seq. ID no. 13648105
MFSHAMNVVVGPKIGRKLITGSYVVADVMCSKCGETLGWKYVETFDLKQRYKEGMFVIEKLKLTKRY

SEQ ID NO: 2469 - protein, 62 aa, Arabidopsis thaliana
  misc_feature (1)..(62): Ceres Seq. ID no. 13648106
MNVVVGPKIGRKLITGSYVVADVMCSKCGETLGWKYVETFDLKQRYKEGMFVIEKLKLTKRY

SEQ ID NO: 2470 - DNA, 3205 bp, Arabidopsis thaliana
  misc_feature (1)..(3205): Ceres Seq. ID no. 13648499
gatgcttcggtgttggtcagtcaccgtcgagagatcatgcgaaggaatgctcctcaggcggaggatactatcgctctctgcgtcgtcgttcagaaactttacttccggtaacaacggcgacgctattccgttctctaccttcacgaaaccttcttcttcaatcgctcccggagatttcctcgtccgtgaatggaaagactggtttaagcatcgagatgtgaaacagagccaccaattaatcgatcgaatctttgacatccttcgagctccttctaacgatggagacgatagagctttttatctccacctctccaatctccgacttcgtctcactgagaaattcgtcctcgacgtgctttcacacactcgttacgatatcctctgttgtctcaaattcttcgattgggctgctcgtcagcctgggtttcatcacacgcgtgctacttttcatgctatcttcaagatccttcgtggtgcgaagcttgtgactcttatgattgactttttggatcgaagtgttggttttgaaagttgccgtcattctcttcgtctctgtgatgctcttgttgttggttatgctgtagctggtcgtactgatatagctcttcagcattttggtaatatgagatttcgaggtttggatttggattcttttgggtatcatgtgcttttgaatgcacttgttgaggagaagtgttttgatagttttgatgtcatcttcgaccagatctccgtgcgtggcttcgtatgtgctgttacgcattcgattttggtgaagaagttttgcaagcaagggaagcttgatgaggctgaagattatcttcgagccttgctgcctaatgatcctgctggatgtggttctggcttaggtatattggttgatgctctatgttccaaacgaaagtttcaggaagctactaagttgttagacgagatcaaactggtgggaacagtgaatatggaccgtgcttataacatttggattagggcgcttattaaagctggattcttgaataaccctgcggatttcttgcagaagattagtcctttggaaggttgtgaactcgaagttttcaggtataactctatggtctttcaacttttgaaggagaacaatcttgatggtgtgtatgatattcttacggagatgatggtacgtggagtttcgccgaataagaaaacgatgaatgctgctttatgcttcttttgcaaagctggatttgtagatgaagccctcgagttataccggtcgaggtcagaaattgggtttgctcctaccgccatgtcttacaactatctgattcataccctttgtgccaatgaaagtgttgaacaagcttatgatgtcttgaaaggggcaattgaccgagggcattttcttggtggaaagacatttagtacactaaccaatgccttgtgctggaaggggaagcctgacatggcaagggagctggttattgctgccgctgaacgggacttattgcctaaacgtatagctggttgcaagattatatcagctctttgcgatgttgggaaagtggaggacgctcttatgattaatgagctattcaataaaagtggtgtagacacctcctttaaaatgttcaccagtttgatatatggctcaatcacactaatgaggggagacatagctgctaaacttatcatcaggatgcaggaaaagggctacaccccgacccgtagtctctatcgaaatgttattcaatgtgtttgtgagatggaaagtggtgaaaaaaacttctttactactttgctaaagtttcagttgtctctttgggaacacaaggttcaggcctacaacttattcattgaaggagctgggtttgcaggaaaaccaaaacttgcaagactagtgtatgatatgatggatagagatggtatcacgcccacagtagcttcaaacattctcatgcttcagagttatctaaaaaatgagaaaatcgccgatgctcttcactttttccatgacctgcgtgaacaaggtaagaccaaaaaaagactgtaccaagttatgattgttggtctctgtaaagcaaataaattggatgatgctatgcatttcttggaagaaatgaagggagaaggactacagcctagtatcgaatgttacgaagtaaacatacaaaaattgtgcaacgaagaaaagtatgatgaggcagttggattagtcaatgaatttaggaaaagtgggcgtcgtattacagctttcataggtaatgtccttttgcataacgcaatgaagagcaaaggggtgtatgaagcatggacacggatgagaaatatagaagataagatccctgagatgaagtcacttggtgagttgataggattattctcaggacgaatagatatggaagtagaactgaagcggttagatgaagttatagagaaatgctatcctcttgatatgtacacgtacaatatgctgttgagaatgattgtaatgaaccaggcggaagatgcatatgagatggttgaaagaatagctcggagaggatatgtgcctaatgaacggactgacatgatccttgaacgggctaaccgcatactagaggaacggaattcaaggtcaaacttagggaggaatggttggaatagtagacagaggcaacttgaatgatgaaaagtatgtcacagagaggtcagaattgttgaatagagagaacaagggagttgatttggattcagtatctgttttgggatttggatcatggacaacagatgaatgagaaaagccagattcttcttcttgaggctttatatgtcctggacgttgtaacttgcaggagcttttttatctctggattgcaaaagatcgatggtattttcccagaagctttttgtttttttttaagtaaagatcgatgtgtcactaaagacacttacagaattgggtagtatccattatgtacacaattgtttgtagtctttccaagaaacacacaagaattgggtagtatccattatgtacacaattgtttgtagtctttcctagaaacacacaagttttgttgtgcgacacaactactcagagagagatttcaacaattttttgtcatattctttatgtgttgcctgttggtaaggaaaatcaatggtggtcgcccgccttgtttcgaaaattggtgtttgtaattacatttgtttactagttctagtaatgatgaatcttcttattttgttg

SEQ ID NO: 2471 - protein, 879 aa, Arabidopsis thaliana
  misc_feature (1)..(879): Ceres Seq. ID no. 13648500
MLRCWSVTVERSCEGMLLRRRILSLSASSFRNFTSGNNGDAIPFSTFTKPSSSIAPGDFLVREWKDWFKHRDVKQSHQLIDRIFDILRAPSNDGDDRAFYLHLSNLRLRLTEKFVLDVLSHTRYDILCCLKFFDWAARQPGFHHTRATFHAIFKILRGAKLVTLMIDFLDRSVGFESCRHSLRLCDALVVGYAVAGRTDIALQHFGNMRFRGLDLDSFGYHVLLNALVEEKCFDSFDVIFDQISVRGFVCAVTHSILVKKFCKQGKLDEAEDYLRALLPNDPAGCGSGLGILVDALCSKRKFQEATKLLDEIKLVGTVNMDRAYNIWIRALIKAGFLNNPADFLQKISPLEGCELEVFRYNSMVFQLLKENNLDGVYDILTEMMVRGVSPNKKTMNAALCFFCKAGFVDEALELYRSRSEIGFAPTAMSYNYLIHTLCANESVEQAYDVLKGAIDRGHFLGGKTFSTLTNALCWKGKPDMARELVIAAAERDLLPKRIAGCKIISALCDVGKVEDALMINELFNKSGVDTSFKMFTSLIYGSITLMRGDIAAKLIIRMQEKGYTPTRSLYRNVIQCVCEMESGEKNFFTTLLKFQLSLWEHKVQAYNLFIEGAGFAGKPKLARLVYDMMDRDGITPTVASNILMLQSYLKNEKIADALHFFHDLREQGKTKKRLYQVMIVGLCKANKLDDAMHFLEEMKGEGLQPSIECYEVNIQKLCNEEKYDEAVGLVNEFRKSGRRITAFIGNVLLHNAMKSKGVYEAWTRMRNIEDKIPEMKSLGELIGLFSGRIDMEVELKRLDEVIEKCYPLDMYTYNMLLRMIVMNQAEDAYEMVERIARRGYVPNERTDMILERANRILEERNSRSNLGRNGWNSRQRQLE

SEQ ID NO: 2472 - protein, 864 aa, Arabidopsis thaliana
  misc_feature (1)..(864): Ceres Seq. ID no. 13648501
MLLRRRILSLSASSFRNFTSGNNGDAIPFSTFTKPSSSIAPGDFLVREWKDWFKHRDVKQSHQLIDRIFDILRAPSNDGDDRAFYLHLSNLRLRLTEKFVLDVLSHTRYDILCCLKFFDWAARQPGFHHTRATFHAIFKILRGAKLVTLMIDFLDRSVGFESCRHSLRLCDALVVGYAVAGRTDIALQHFGNMRFRGLDLDSFGYHVLLNALVEEKCFDSFDVIFDQISVRGFVCAVTHSILVKKFCKQGKLDEAEDYLRALLPNDPAGCGSGLGILVDALCSKRKFQEATKLLDEIKLVGTVNMDRAYNIWIRALIKAGFLNNPADFLQKISPLEGCELEVFRYNSMVFQLLKENNLDGVYDILTEMMVRGVSPNKKTMNAALCFFCKAGFVDEALELYRSRSEIGFAPTAMSYNYLIHTLCANESVEQAYDVLKGAIDRGHFLGGKTFSTLTNALCWKGKPDMARELVIAAAERDLLPKRIAGCKIISALCDVGKVEDALMINELFNKSGVDTSFKMFTSLIYGSITLMRGDIAAKLIIRMQEKGYTPTRSLYRNVIQCVCEMESGEKNFFTTLLKFQLSLWEHKVQAYNLFIEGAGFAGKPKLARLVYDMMDRDGITPTVASNILMLQSYLKNEKIADALHFFHDLREQGKTKKRLYQVMIVGLCKANKLDDAMHFLEEMKGEGLQPSIECYEVNIQKLCNEEKYDEAVGLVNEFRKSGRRITAFIGNVLLHNAMKSKGVYEAWTRMRNIEDKIPEMKSLGELIGLFSGRIDMEVELKRLDEVIEKCYPLDMYTYNMLLRMIVMNQAEDAYEMVERIARRGYVPNERTDMILERANRILEERNSRSNLGRNGWNSRQRQLE

SEQ ID NO: 2473 - protein, 715 aa, Arabidopsis thaliana
  misc_feature (1)..(715): Ceres Seq. ID no. 13648502
MIDFLDRSVGFESCRHSLRLCDALVVGYAVAGRTDIALQHFGNMRFRGLDLDSFGYHVLLNALVEEKCFDSFDVIFDQISVRGFVCAVTHSILVKKFCKQGKLDEAEDYLRALLPNDPAGCGSGLGILVDALCSKRKFQEATKLLDEIKLVGTVNMDRAYNIWIRALIKAGFLNNPADFLQKISPLEGCELEVFRYNSMVFQLLKENNLDGVYDILTEMMVRGVSPNKKTMNAALCFFCKAGFVDEALELYRSRSEIGFAPTAMSYNYLIHTLCANESVEQAYDVLKGAIDRGHFLGGKTFSTLTNALCWKGKPDMARELVIAAAERDLLPKRIAGCKIISALCDVGKVEDALMINELFNKSGVDTSFKMFTSLIYGSITLMRGDIAAKLIIRMQEKGYTPTRSLYRNVIQCVCEMESGEKNFFTTLLKFQLSLWEHKVQAYNLFIEGAGFAGKPKLARLVYDMMDRDGITPTVASNILMLQSYLKNEKIADALHFFHDLREQGKTKKRLYQVMIVGLCKANKLDDAMHFLEEMKGEGLQPSIECYEVNIQKLCNEEKYDEAVGLVNEFRKSGRRITAFIGNVLLHNAMKSKGVYEAWTRMRNIEDKIPEMKSLGELIGLFSGRIDMEVELKRLDEVIEKCYPLDMYTYNMLLRMIVMNQAEDAYEMVERIARRGYVPNERTDMILERANRILEERNSRSNLGRNGWNSRQRQLE

SEQ ID NO: 2474 - DNA, 1720 bp, Arabidopsis thaliana
  misc_feature (1)..(1720): Ceres Seq. ID no. 14302805
tcactagtccccccccccccgacaccagttcttcttctcagggattacttactacctcttgtaagttctcattcgattctatttttgcttgaattctgtttcagctgatgaaacgcttgttatcatcttagccgtttcgttttctactctttctagttataaaattttgacttcttcaagagaattttttttgggttccaatcaatcagattgctatgatcctctgaatagaattttcttgttgatatagggacttgtgttgttgagtttgagcctatagtgatcaaacgggattttcatatgaactttactcaaatttagttacttttttaatcttataactgtagacaaaagcttatccttttattggttacaaatcgtatgaacatttgattctatgctttttgctttgccattaagcaattgattttttttagtttgcttgtttccggattatgggaatgaagcttcactgggattaagaatctgtaagtaatatgtttttgtttaataagctttaggcttatagatatgtttttttaaagttctaagttagtgttgtgtttgttactcttaaacatacttaaaaagctactaaatgagtgctattcaataatgttctgtttgatttcgatggaataatttagtgtgactgatgttgcttttatgtcgcttatgtattattggtgatctatgtgtaaaacatgtgttgcaggatagtaatgaaccgaagtaaagaagagaacgttgctccgacaatgaaagatgatagtccatttggaaagcttacagaggatctcttgatagagatatttatcagaattccaataacaaattgggaacaagtatcgtgtgttagaaagcagtgggctaatttattccgcggagaatgcttatggctggctgctcttaatcgggcgtatccacttgctagcaaaactaagagctggattggaccaattcgtcaaggattaagcaaacggtgactggaaacacacttgatttctatgaaaaaagctagcttaataatgtcttagttagattcaaggaacttaacagccttttagctgcaggagatatgtggctttatacatcagcagaaacatattaggtgtggatgatacagacatagatgagatgcttggacatatttacgtgttcttgaatgatcagcttcaactttccactatgcctgcttcaggcattttgcatggaacccttatcgaccaattgattgtttgtggccaatcgaaagaagaagctggtgagcttgcaacaaagatttggctggctcttcttgacaatttagaggacacaaaacatacatttaccgtgctgaaatcaatcgcacaagaatatgatggctttcttccatatccatattcaagaccaatcaaagtgcagtggaaggtgttcgagaaactgtttgtagatttccgtgacttgcttgatcattcagagtactgcgacttaataggaattgccaaaaataagtttcaaaccataccttatgtttggttaggctactaaacttagcctgcttcttccagtttccacagccctgtaaagtaatttgaggtccaattctacaacatacttgtacataagacattcaaagtctgcatcttgtaagaaagaaagacgtgtaaaatgcagattcttggccatgtataattcgtggttcgttttaaagcaaaagtcaaacattttgttgactaat

SEQ ID NO: 2475 - protein, 130 aa, Arabidopsis thaliana
  misc_feature (1)..(130): Ceres Seq. ID no. 14302806
MLGHIYVFLNDQLQLSTMPASGILHGTLIDQLIVCGQSKEEAGELATKIWLALLDNLEDTKHTFTVLKSIAQEYDGFLPYPYSRPIKVQWKVFEKLFVDFRDLLDHSEYCDLIGIAKNKFQTIPYVWLGY

SEQ ID NO: 2476 - protein, 113 aa, Arabidopsis thaliana
  misc_feature (1)..(113): Ceres Seq. ID no. 14302807
MPASGILHGTLIDQLIVCGQSKEEAGELATKIWLALLDNLEDTKHTFTVLKSIAQEYDGFLPYPYSRPIKVQWKVFEKLFVDFRDLLDHSEYCDLIGIAKNKFQTIPYVWLGY

SEQ ID NO: 2477 - protein, 93 aa, Arabidopsis thaliana
  misc_feature (1)..(93): Ceres Seq. ID no. 14302808
MCCRIVMNRSKEENVAPTMKDDSPFGKLTEDLLIEIFIRIPITNWEQVSCVRKQWANLFRGECLWLAALNRAYPLASKTKSWIGPIRQGLSKR

SEQ ID NO: 2478 - DNA, 664 bp, Arabidopsis thaliana
  misc_feature (1)..(664): Ceres Seq. ID no. 14302927
gatcacaaatatcatcttactaaaataaaaatccaatggatccatcagaatttcccttcgatatcgaagcttacaaaagacaatttcatatcaaagagaggtatatcatcaaccggtttagagagcgtcacaaaaaaattgaagaagattatccacgtcgcaataaaagaacatatatcaagagggatcatgtagcaccaaactaaaggttgattgacaactactttgctattcaacctacgtatgatgatgcaatgtttcgacggtgattccggatgcgaaaacatgtttttcttcgaatcgttggagccttatcaagaaatgacgactacttcacccaacgtgttgacgaaacaaataaagaaggtatatctccactagcaaaatgtatcacggccatgcggatgttagcatatggtatggcgtcagacacggtggatgaatacatcaaaataggaggttctacaacattagagtgcttgcgtagattctgtaatggaatcatacaattgtacgagcaagaatatcttagagcttgtcgcatctggtccccatctttttgttttctactgcgttgaatccacgtatgattttttgctttttcaacaccctcattgtaagagttcaacagttaaataaattattcaacatctccattgcacat

SEQ ID NO: 2479 - protein, 100 aa, Arabidopsis thaliana
  misc_feature (1)..(100): Ceres Seq. ID no. 14302928
MRKHVFLRIVGALSRNDDYFTQRVDETNKEGISPLAKCITAMRMLAYGMASDTVDEYIKIGGSTTLECLRRFCNGIIQLYEQEYLRACRIWSPSFCFLLR

SEQ ID NO: 2480 - protein, 64 aa, Arabidopsis thaliana
  misc_feature (1)..(64): Ceres Seq. ID no. 14302929
DHKYHLTKIKIQWIHQNFPSISKLTKDNFISKRGISSTGLESVTKKLKKIIHVAIKEHISRGIM

SEQ ID NO: 2481 - protein, 59 aa, Arabidopsis thaliana
  misc_feature (1)..(59): Ceres Seq. ID no. 14302930
MRMLAYGMASDTVDEYIKIGGSTTLECLRRFCNGIIQLYEQEYLRACRIWSPSFCFLLR

SEQ ID NO: 2482 - DNA, 1811 bp, Arabidopsis thaliana
  misc_feature (1)..(1811): Ceres Seq. ID no. 14302935
agttccttttccacttttaaccatcaccctataagtggttataactagtaacttgaaatagaaacactctatctctaaaagaggcaaccaaacaaacaaggtctagctttttataaccaaactctgcttctgaacagagttagtcaaagagagagaagccatggaagctatgaaggagactgtggaggagagcttgagagagatgagagagacgtttgcgagtgggaggacgaagagtctgaagtggaggaaggcacagatcggagctatatacgagatggttaaagacaacgaagacaagatctgcaatgctctgtttcaagatttgggcaaacacagtactgaagcttttagagatgagcttggtgttgtcttgcgaacagctactggtgcaatcaactgtcttgataaatgggccgtccccaaacatagcaaacttcctctgttgttctacccagcaaaagggaaagtcatatcggaaccctatgggacggttcttgttctgtctagctggaattttcctatatctttgtctctggatccattgattggggcaatagcagcaggaaataccgtgcttctcaagtcatctgaactaagccctaacgcatctgccttccttgccaagacaattccagcttatctcgatactaaagccatcaaagttatcgaaggaggacctgatgtcgctactatcctcttgcagcatcaatgggacaagatcttcttcaccgggagtcccaagattggaaggatcataatggctgcagcagcacagcatctgactcctgtgacattggagcttggtggaaaatgtcccaccattgttgatcatcacaccatttcaaagaacatcaagtcggttgtcaagaggattgctggaggaaaatggggatcttgcaatggacaagcttgtatctctgtagattacgttcttatcgaaaagagtttcgcgcctactctgattgatatgttgaagcctacgataaagtctttctttggcgaaaatcctaaagaatctggatgtctctcaaggattgcaaacaagcaccacgttcagagactgtctcgtcttcttagcgatcctcgtgtccaagcttccatcgtctatggtggttctatagacgaagataagctgtatgttgagccaacgatcttgttggaccctcctcttgattctgagatcatgaatgaagagatctttggtccaattctcccgattatcacggtacgtgacatccaagaaagcatagggatcattaatacaaaaccgaagccacttgccatttatgcattcacaaatgacgagaaccttaaaactagaattttgtcagaaacatcctcaggaagtgttaccttcaatgacgtcatgatccagtatatgtgtgatgcgttaccttttggaggagtgggagaaagtggaatagggaggtatcacgggaaatactcatttgattgtttcagtcacgagaaagcaataatggaaggaagcttaggtatggatcttgaagctcgataccctccatggaacaacttcaagctcaccttcatcagactcgcatttcgtgaagcttacttcaagcttatcctccttatgcttggtcttaaaagataaaagggggaaagtgagagacagagacacatacacacaaacagagacaatataagtgattgaattacatcacacttatgtttgcttatcatatcttcacctaataagtctcattccgaatgttttacatttctttcaagcttgagagattctatataaagtgatttgatatctatttctacgggatacgttcttagtg

SEQ ID NO: 2483 - protein, 484 aa, Arabidopsis thaliana
  misc_feature (1)..(484): Ceres Seq. ID no. 14302936
MEAMKETVEESLREMRETFASGRTKSLKWRKAQIGAIYEMVKDNEDKICNALFQDLGKHSTEAFRDELGVVLRTATGAINCLDKWAVPKHSKLPLLFYPAKGKVISEPYGTVLVLSSWNFPISLSLDPLIGAIAAGNTVLLKSSELSPNASAFLAKTIPAYLDTKAIKVIEGGPDVATILLQHQWDKIFFTGSPKIGRIIMAAAAQHLTPVTLELGGKCPTIVDHHTISKNIKSVVKRIAGGKWGSCNGQACISVDYVLIEKSFAPTLIDMLKPTIKSFFGENPKESGCLSRIANKHHVQRLSRLLSDPRVQASIVYGGSIDEDKLYVEPTILLDPPLDSEIMNEEIFGPILPIITVRDIQESIGIINTKPKPLAIYAFTNDENLKTRILSETSSGSVTFNDVMIQYMCDALPFGGVGESGIGRYHGKYSFDCFSHEKAIMEGSLGMDLEARYPPWNNFKLTFIRLAFREAYFKLILLMLGLKR

SEQ ID NO: 2484 - protein, 481 aa, Arabidopsis thaliana
  misc_feature (1)..(481): Ceres Seq. ID no. 14302937
MKETVEESLREMRETFASGRTKSLKWRKAQIGAIYEMVKDNEDKICNALFQDLGKHSTEAFRDELGVVLRTATGAINCLDKWAVPKHSKLPLLFYPAKGKVISEPYGTVLVLSSWNFPISLSLDPLIGAIAAGNTVLLKSSELSPNASAFLAKTIPAYLDTKAIKVIEGGPDVATILLQHQWDKIFFTGSPKIGRIIMAAAAQHLTPVTLELGGKCPTIVDHHTISKNIKSVVKRIAGGKWGSCNGQACISVDYVLIEKSFAPTLIDMLKPTIKSFFGENPKESGCLSRIANKHHVQRLSRLLSDPRVQASIVYGGSIDEDKLYVEPTILLDPPLDSEIMNEEIFGPILPIITVRDIQESIGIINTKPKPLAIYAFTNDENLKTRILSETSSGSVTFNDVMIQYMCDALPFGGVGESGIGRYHGKYSFDCFSHEKAIMEGSLGMDLEARYPPWNNFKLTFIRLAFREAYFKLILLMLGLKR

SEQ ID NO: 2485 - protein, 470 aa, Arabidopsis thaliana
  misc_feature (1)..(470): Ceres Seq. ID no. 14302938
MRETFASGRTKSLKWRKAQIGAIYEMVKDNEDKICNALFQDLGKHSTEAFRDELGVVLRTATGAINCLDKWAVPKHSKLPLLFYPAKGKVISEPYGTVLVLSSWNFPISLSLDPLIGAIAAGNTVLLKSSELSPNASAFLAKTIPAYLDTKAIKVIEGGPDVATILLQHQWDKIFFTGSPKIGRIIMAAAAQHLTPVTLELGGKCPTIVDHHTISKNIKSVVKRIAGGKWGSCNGQACISVDYVLIEKSFAPTLIDMLKPTIKSFFGENPKESGCLSRIANKHHVQRLSRLLSDPRVQASIVYGGSIDEDKLYVEPTILLDPPLDSEIMNEEIFGPILPIITVRDIQESIGIINTKPKPLAIYAFTNDENLKTRILSETSSGSVTFNDVMIQYMCDALPFGGVGESGIGRYHGKYSFDCFSHEKAIMEGSLGMDLEARYPPWNNFKLTFIRLAFREAYFKLILLMLGLKR

SEQ ID NO: 2486 - DNA, 1196 bp, Arabidopsis thaliana
  misc_feature (1)..(1196): Ceres Seq. ID no. 14302949
atcttcttcttctacttcttattaagctccattgggtttagagattctggtgtataaactgctaatgacgagtaaccttatccagccaccatcaatggcagcttcacgaggagcaatctcgagaagaacaggaaacgtgaaagtattagtctctttcaccagttctaatagcaaaacgctgagttttagtgacaactcatttaggctcagacccatgttcatcgggaaagtcacagaacagagttcttgctcctctttaaatgaacaacaacaagatgaagaacaagaacaagaagaagaagagattacagtttctcatataaaagaagagctctacgaagctctcaaagggatcaatagagggatattcggagttaagtcggataaaaagacagagatcgagggactggtgaagcttttggaatgtcggaatccgacaccggagccgactggagagttagacaagatcggaggttgctggaaactcatttacagtacaatcactgtattgggttctaaacgaactaaattgggtcttcgagatttcgtctctcttggtgatcttcttcaacagattgacattgctcagggcaaaacggtccatgtgttgaaattcgatgtccggggattgaatctactcgacggcgagtttagaatcgtcgcttccttcaagatctcgtccaaatcgagtgtagagattacttatgaaagctcaacgatcaaaccagaccagttgatgaacatatttaggaagaacatggatcttcttttgggaatcttcaaccccgagggactattcgagatttcatacttagacgaagatttacaagtagggagagatgggaaagggaatgtttttgttttggaaagaatagagaaaccttaaatcttttataccaaaatgtttactgcatttttttcaaactcatttccataagaagaaattgcttgtttctcaagaaaattttcaattttttctttggtttgggttatgaccatcagtatttcttctttcttttggtttaaaagaagaagaaaaatctagatttagtctttttttgtcttgggaatgttagtaactccagttcattcattattgacataattgattgctcaataatactgtataagtactattagcttgctcccatctgtttacttctaaatcctagtgttgatattacaacaaaagaact

SEQ ID NO: 2487 - protein, 273 aa, Arabidopsis thaliana
  misc_feature (1)..(273): Ceres Seq. ID no. 14302950
MTSNLIQPPSMAASRGAISRRTGNVKVLVSFTSSNSKTLSFSDNSFRLRPMFIGKVTEQSSCSSLNEQQQDEEQEQEEEEITVSHIKEELYEALKGINRGIFGVKSDKKTEIEGLVKLLECRNPTPEPTGELDKIGGCWKLIYSTITVLGSKRTKLGLRDFVSLGDLLQQIDIAQGKTVHVLKFDVRGLNLLDGEFRIVASFKISSKSSVEITYESSTIKPDQLMNIFRKNMDLLLGIFNPEGLFEISYLDEDLQVGRDGKGNVFVLERIEKP

SEQ ID NO: 2488 - protein, 263 aa, Arabidopsis thaliana
  misc_feature (1)..(263): Ceres Seq. ID no. 14302951
MAASRGAISRRTGNVKVLVSFTSSNSKTLSFSDNSFRLRPMFIGKVTEQSSCSSLNEQQQDEEQEQEEEEITVSHIKEELYEALKGINRGIFGVKSDKKTEIEGLVKLLECRNPTPEPTGELDKIGGCWKLIYSTITVLGSKRTKLGLRDFVSLGDLLQQIDIAQGKTVHVLKFDVRGLNLLDGEFRIVASFKISSKSSVEITYESSTIKPDQLMNIFRKNMDLLLGIFNPEGLFEISYLDEDLQVGRDGKGNVFVLERIEKP

SEQ ID NO: 2489 - protein, 223 aa, Arabidopsis thaliana
  misc_feature (1)..(223): Ceres Seq. ID no. 14302952
MFIGKVTEQSSCSSLNEQQQDEEQEQEEEEITVSHIKEELYEALKGINRGIFGVKSDKKTEIEGLVKLLECRNPTPEPTGELDKIGGCWKLIYSTITVLGSKRTKLGLRDFVSLGDLLQQIDIAQGKTVHVLKFDVRGLNLLDGEFRIVASFKISSKSSVEITYESSTIKPDQLMNIFRKNMDLLLGIFNPEGLFEISYLDEDLQVGRDGKGNVFVLERIEKP

SEQ ID NO: 2490 - DNA, 2405 bp, Arabidopsis thaliana
  misc_feature (1)..(2405): Ceres Seq. ID no. 14302972
gatcttcattattttagatttgaccgtttagaaaagtaagaaccagaccgtaccgaaccaaaacgaaccagagccagacgactccttaacggcggctaagctatctgtaaaccgaccgaaccacacagccacaggcacacaaatcaaaccttctagaaatcaaagagagacatttattctctaaattcattttcctattttgcccctacgaatatttttcttcttcgtctctctctctcagctcttgaagtctttggtctgttggcgaattttcaagcagctttctaattctgaactgaaaatttcgtctttggaactttatattctctcatctgaaactgaaggagaaggaagatgacgactatggagagtttgattgggttagttaataggatacagagagcatgtaccgtactcggtgactatggtggtggaactggaagtaacgctttcaattctctctgggaagctcttccaaccgtcgccgtcgtcggtggtcagagttctgggaaatcttcggttcttgagagtatagttgggagagattttcttcctagaggatctggtatcgttacgagacggcctttagtgttgcagcttcataagactgatgatggaacagaggagtatgcagagttccttcatcttcccaagaagcaattcacagattttgctttggttcgcagggagattcaggatgagactgatagaatcacagggaaaaacaaacagatatctccagttcctattcacctcagtatctactctccaaatgttgtgaatttgacactcattgatttgcccggtttaactaaagtggctgttgagggacagccggaaaccattgctgaggatatcgaatccatggttcgcacatatgttgataagcccaattgtatcatattggctatatctcctgccaaccaagacattgccacatcagatgcaattaagctcgcaaaagatgtcgatccaacaggtgagaggacatttggtgttcttaccaagttagacttgatggacaaaggaactaatgcgttagaagttcttgaaggaagatcttacaggctgcaacatccttaggttgggatagtgaaccgttcacaagcagatattaataagaatgtcgatatgatgcttgcaagacgcaaggaacgagaatattttgataccagtcctgactatggtcacttagccagcaaaatgggttcagaatatctggcaaaactgctctctaagcacttggagtctgttatcaggacccgtattccaagtatactatccttaataaacaaaagcattgaagaacttgaaagagagttagaccgaatgggtcggcctgtcgcagttgatgctggggctcaactatacactatattggagatgtgccgtgcattcgataagatattcaaggaacatcttgatggcgggcgtcctggaggtgaccgtatctatggagtctttgacaaccaacttccagctgcacttaaaaagcttccttttgatcgccatctttctctacaaagcgtgaagaaaatcgtgtccgaggcagatggttatcaacctcacttgattgcaccagaacagggttatcgccgtctaatcgaaggggcactgggttactttagaggtccagctgaagcttctgtggatgctgttcactatgtcttgaaagagcttgtgaggaaatcaatatcagaaactgaggagctaaagcgtttcccttcactgcaagtcgagcttgctgcagcagccaacagctccttggagaaattcagggaagaaagcaagaagtcggttattcgacttgttgacatggaatctgcgtatctaacagctgagttcttccggaaacttcctcaagaaatagaaagaccagtaaccaacagcaaaaaccaaaccgcttctccttcgtctgcaacattagaccagtatggagacggacatttcagaaggatagcatcaaatgtatctgcgtatgttaatatggtttcggacacacttcgtaacaccattccaaaagcttgtgtgtactgtcaggttagacaagccaagctcgcattgctcaattacttctactctcagatcagcaagagagaggggaaacagttgggacagttactagatgaagatccggcattgatggaccggagactagagtgcgcgaagaggctagagttatacaagaaagcaagagatgaaattgatgctgttgcttgggtaagatgataaaacctaaaagtgtgtttctggtgatggttttagagaactataaattcgtctgttgtttaagttcgttgactatgtctttgtatgtatgtatatgatcatcagaccctattgagagagacttgagacgttttgtaataaacttatcattactatttaaaaacgccatagcgtgt

SEQ ID NO: 2491 - protein, 365 aa, Arabidopsis thaliana
  misc_feature (1)..(365): Ceres Seq. ID no. 14302973
MMLARRKEREYFDTSPDYGHLASKMGSEYLAKLLSKHLESVIRTRIPSILSLINKSIEELERELDRMGRPVAVDAGAQLYTILEMCRAFDKIFKEHLDGGRPGGDRIYGVFDNQLPAALKKLPFDRHLSLQSVKKIVSEADGYQPHLIAPEQGYRRLIEGALGYFRGPAEASVDAVHYVLKELVRKSISETEELKRFPSLQVELAAAANSSLEKFREESKKSVIRLVDMESAYLTAEFFRKLPQEIERPVTNSKNQTASPSSATLDQYGDGHFRRIASNVSAYVNMVSDTLRNTIPKACVYCQVRQAKLALLNYFYSQISKREGKQLGQLLDEDPALMDRRLECAKRLELYKKARDEIDAVAWVR

SEQ ID NO: 2492 - protein, 364 aa, Arabidopsis thaliana
  misc_feature (1)..(364): Ceres Seq. ID no. 14302974
MLARRKEREYFDTSPDYGHLASKMGSEYLAKLLSKHLESVIRTRIPSILSLINKSIEELERELDRMGRPVAVDAGAQLYTILEMCRAFDKIFKEHLDGGRPGGDRIYGVFDNQLPAALKKLPFDRHLSLQSVKKIVSEADGYQPHLIAPEQGYRRLIEGALGYFRGPAEASVDAVHYVLKELVRKSISETEELKRFPSLQVELAAAANSSLEKFREESKKSVIRLVDMESAYLTAEFFRKLPQEIERPVTNSKNQTASPSSATLDQYGDGHFRRIASNVSAYVNMVSDTLRNTIPKACVYCQVRQAKLALLNYFYSQISKREGKQLGQLLDEDPALMDRRLECAKRLELYKKARDEIDAVAWVR

SEQ ID NO: 2493 - protein, 341 aa, Arabidopsis thaliana
  misc_feature (1)..(341): Ceres Seq. ID no. 14302975
MGSEYLAKLLSKHLESVIRTRIPSILSLINKSIEELERELDRMGRPVAVDAGAQLYTILEMCRAFDKIFKEHLDGGRPGGDRIYGVFDNQLPAALKKLPFDRHLSLQSVKKIVSEADGYQPHLIAPEQGYRRLIEGALGYFRGPAEASVDAVHYVLKELVRKSISETEELKRFPSLQVELAAAANSSLEKFREESKKSVIRLVDMESAYLTAEFFRKLPQEIERPVTNSKNQTASPSSATLDQYGDGHFRRIASNVSAYVNMVSDTLRNTIPKACVYCQVRQAKLALLNYFYSQISKREGKQLGQLLDEDPALMDRRLECAKRLELYKKARDEIDAVAWVR

SEQ ID NO: 2494 - DNA, 1037 bp, Arabidopsis thaliana
  misc_feature (1)..(1037): Ceres Seq. ID no. 14304439
ctcctttgtctcgcttttttcttttgttctttcacatgtgtatatacacacagaacacacacttacatttctattatcatataaaacttcaactttaccttttatcttccaaaaaaaacactatcttcttcatcaaattctcttgattctgtttctttttatcctcctccatggccctctcacctaattcaagctctttagatttaacaatctcaattccgagcttctctccatctccttcacttggtgatcatcacgggatgagagattttgacataaaccaaacaccaaagacggaagaagatcgtgagtggatgatcggtgcaacaccacatgtcaacgaagatgatagcaactcgggtggccggcggcgcaaaaagctccgtctaacgaaagaacaatcacatcttcttgaagagagtttcatacaaaaccataccttaacccctaagcaaaaaaaagatttggccacctttttgaagcttagtcaaaggcaagttgaggtgtggtttcaaaatcgaagagctcggagtaagctaaagcacacggaaatggaatgtgagtatctaaaaagatggttcggatcgttgaaggaacaaaatcgacggctacaaatagaagttgaagaactacgagcgctaaagccatcatcgacctcggctttaaccatgtgtcctcggtgtgaacgtgtgactgatgcagtagataatgactctaatgccgttcaagagggggcagttcttagcagccggtcacggatgacaatttcctcttcctcttccctctgttgactggtttggtcgaagtcaaaagtcaaaagataaacgcctgtttcggggtaaaaagcaaagatttgatgatgattaggaggattttgtgtatagtttgctaattatttattacaaatttacaaaccagtgaggaaaaaagataatttaattctcgatctttaattagctttttgtgttatttattcataattttatttttcgtgtttaaccaaaaaatagacaaaacaaatattgcttttcgtgttc

SEQ ID NO: 2495 - protein, 206 aa, Arabidopsis thaliana
  misc_feature (1)..(206): Ceres Seq. ID no. 14304440
MALSPNSSSLDLTISIPSFSPSPSLGDHHGMRDFDINQTPKTEEDREWMIGATPHVNEDDSNSGGRRRKKLRLTKEQSHLLEESFIQNHTLTPKQKKDLATFLKLSQRQVEVWFQNRRARSKLKHTEMECEYLKRWFGSLKEQNRRLQIEVEELRALKPSSTSALTMCPRCERVTDAVDNDSNAVQEGAVLSSRSRMTISSSSSLC

SEQ ID NO: 2496 - protein, 176 aa, Arabidopsis thaliana
  misc_feature (1)..(176): Ceres Seq. ID no. 14304441
MRDFDINQTPKTEEDREWMIGATPHVNEDDSNSGGRRRKKLRLTKEQSHLLEESFIQNHTLTPKQKKDLATFLKLSQRQVEVWFQNRRARSKLKHTEMECEYLKRWFGSLKEQNRRLQIEVEELRALKPSSTSALTMCPRCERVTDAVDNDSNAVQEGAVLSSRSRMTISSSSSLC

SEQ ID NO: 2497 - protein, 158 aa, Arabidopsis thaliana
  misc_feature (1)..(158): Ceres Seq. ID no. 14304442
MIGATPHVNEDDSNSGGRRRKKLRLTKEQSHLLEESFIQNHTLTPKQKKDLATFLKLSQRQVEVWFQNRRARSKLKHTEMECEYLKRWFGSLKEQNRRLQIEVEELRALKPSSTSALTMCPRCERVTDAVDNDSNAVQEGAVLSSRSRMTISSSSSLC

SEQ ID NO: 2498 - DNA, 467 bp, Arabidopsis thaliana
  misc_feature (1)..(467): Ceres Seq. ID no. 14306822
gataacaaattttcactgtcttgtcattcttctcatctcctagacaaaggaaactcaggagatgagaagaaaattttggtggttgtttataaactataatataatacacatcaaatctttgacacgataccaacttaaagaagaagaagaagaagctgcattgatcttcccaaaagatcctccatggttcaaggcatggatggttcctgtgatgatgcttttcgttttctttgtattttctattgtaggaatttgtcgacgttgtcgcaattgtcgccgtggtgaaaattctcccagcattcatcctattaactaattatttagattttttttcctttttcttttctttctataatatgtaaatcattgttggtgaaatgtaaaattttacagtttcaccatatcgatttcttatcgctttgatctaatgaaagcaaaaaagaataaatatgccaaagattaaggat

SEQ ID NO: 2499 - protein, 84 aa, Arabidopsis thaliana
  misc_feature (1)..(84): Ceres Seq. ID no. 14306823
MRRKFWWLFINYNIIHIKSLTRYQLKEEEEEAALIFPKDPPWFKAWMVPVMMLFVFFVFSIVGICRRCRNCRRGENSPSIHPIN

SEQ ID NO: 2500 - DNA, 2791 bp, Arabidopsis thaliana
  misc_feature (1)..(2791): Ceres Seq. ID no. 14308948
aaaagaaacaacactcgaaaaagttcttctttttcttccgcacatgtctgactctctcataagcgtaaatcgctctgtcaaatatctctgaccagagagacagagttgcctccacgtttcttcagacaagactcacgctcttccctttcaccacattcccttctccatttctcaatctcacttaccttctcgattcttgctccaatttcgaatcttccgagtgaaaaaagcttcaaagtttggaactttctagtgtttattaatctgggtctgctctgagtttcgtgtgtagctgcatatgagcttaaagctcgagtttttccatctgggtttggaattctagggctagtgattggagattttgggaatttaggttgattttagtaggtttgacttcaggttgcgtaatttaggttgattttgatccgatttgtggaattagggtttgtttgttcacaaagcttcaatttttggagtttaaatggatcgataacgactgtgttagaagaaagtttgctgcttcagattcgtattcgatatagaaatgagtttggttcctcctttaccgattttatcaccaccgtcgtcaaattcttcaacaactgcacctcctccgttacagactcagcccaccactccatctgctccacctccggttacaccacctccttctccgccgcaatctccgccgccggttgtatcatcatcaccaccaccaccggttgtttcgtcacctccaccgtcttcttctccaccaccgtcacctcctgtcatcacttcacctcctcccaccgttgcttcttcccctccacctcctgtggtgattgcttcccctcctccctcaactccggcgacaacaccaccagctcctccgcaaactgtctcacctccaccgcctcctgatgcttctccatcacctcccgcaccaacaacaacaaatcctcctcctaaaccttctccttcaccgccgggagaaacaccttcaccaccgggagaaacaccttcaccgcctaaaccttctccgtcaactccaactccaacaacaaccacatctcctcctcctcctccagctacctctgcttctcctccgtcttcaaatcctactgatccttctacgttagctcctcctccaactccattacctgttgttcccagagagaaaccaattgctaaaccaactggaccagcttcaaacaatggaaacaacactttgccgtctagttcaccaggtaaaagcgaagttggtactggaggtattgtagctatcggagtgattgtgggattggtttttcttagcctttttgtgatgggtgtgtggttcactcggaaacgaaagcgaaaggaccctggaacctttgttggatacacaatgcctccttccgcttattcatctcctcaaggctcagatgtagtgctcttcaactcgcgttcttcagctcctcctaaaatgagaagccattctggtagcgattacatgtatgcgtcatctgattcaggcatggttagcaaccaaagatcaaggttttcatatgatgagttatctcaagttaccagtgggttctccgagaagaatcttctcggtgaaggagggtttggctgtgtatacaaaggcgttctttctgacggaagggaagtggcagttaaacagttaaagattggtggaagccaaggggagagagagttcaaagcagaagttgaaatcatttctcgggttcatcaccgccatttggttacactagttggttattgcatctcagagcaacataggttgcttgtatatgattatgtacctaacaacactctccattatcatctacatgctccaggaagaccagttatgacttgggaaactcgggtaagggtcgctgctggtgcagctcgtggaatcgcctacttacatgaagactgtcatccccgcattattcaccgtgacataaaatcttccaacatacttcttgataacagctttgaagccttggttgcggattttggacttgcaaaaattgcacaagaactggatttaaacacacacgtctcaacgcgcgtaatgggaacctttgggtacatggctcctgaatatgcaacaagtggaaagctgtctgaaaaagcagatgtttattcgtatggggtaatactgttggagcttataactggccgtaaaccggtagatacgtctcaaccacttggtgatgagagccttgttgaatgggcaagacccttgctgggtcaagcaatcgagaacgaagaattcgacgagctagtagatccgaggctagggaaaaacttcatcccaggagagatgttcagaatggtagaagctgcggctgcatgtgtccgccactcagctgcaaaaagaccaaagatgagtcaagtggtgagagctttggacacacttgaagaagcaacggacataaccaacggaatgagaccaggacagagccaagtgtttgactcgagacaacaatctgctcagataaggatgtttcaaagaatggcttttgggagtcaagattatagttctgacttctttgatcgctcacagtcacatagtagctggggcagtcgtgaccagtccagatttgtaccttagtagtttttattgcctttgcttctttcttctttccctttaaacatgtcctcgatcttgtatattcttttgcatgatataatgtatttttgaaatatacatacatacacacataaaatttggtagtcttttgaagaaaaagaataacagatgtatttgatagatagtggtccttgctttatctaatgattgctgaaccgggtt

SEQ ID NO: 2501 - protein, 681 aa, Arabidopsis thaliana
  misc_feature (1)..(681): Ceres Seq. ID no. 14308949
MSLVPPLPILSPPSSNSSTTAPPPLQTQPTTPSAPPPVTPPPSPPQSPPPVVSSSPPPPVVSSPPPSSSPPPSPPVITSPPPTVASSPPPPVVIASPPPSTPATTPPAPPQTVSPPPPPDASPSPPAPTTTNPPPKPSPSPPGETPSPPGETPSPPKPSPSTPTPTTTTSPPPPPATSASPPSSNPTDPSTLAPPPTPLPVVPREKPIAKPTGPASNNGNNTLPSSSPGKSEVGTGGIVAIGVIVGLVFLSLFVMGVWFTRKRKRKDPGTFVGYTMPPSAYSSPQGSDVVLFNSRSSAPPKMRSHSGSDYMYASSDSGMVSNQRSRFSYDELSQVTSGFSEKNLLGEGGFGCVYKGVLSDGREVAVKQLKIGGSQGEREFKAEVEIISRVHHRHLVTLVGYCISEQHRLLVYDYVPNNTLHYHLHAPGRPVMTWETRVRVAAGAARGIAYLHEDCHPRIIHRDIKSSNILLDNSFEALVADFGLAKIAQELDLNTHVSTRVMGTFGYMAPEYATSGKLSEKADVYSYGVILLELITGRKPVDTSQPLGDESLVEWARPLLGQAIENEEFDELVDPRLGKNFIPGEMFRMVEAAAACVRHSAAKRPKMSQVVRALDTLEEATDITNGMRPGQSQVFDSRQQSAQIRMFQRMAFGSQDYSSDFFDRSQSHSSWGSRDQSRFVP

SEQ ID NO: 2502 - protein, 427 aa, Arabidopsis thaliana
  misc_feature (1)..(427): Ceres Seq. ID no. 14308950
MGVWFTRKRKRKDPGTFVGYTMPPSAYSSPQGSDVVLFNSRSSAPPKMRSHSGSDYMYASSDSGMVSNQRSRFSYDELSQVTSGFSEKNLLGEGGFGCVYKGVLSDGREVAVKQLKIGGSQGEREFKAEVEIISRVHHRHLVTLVGYCISEQHRLLVYDYVPNNTLHYHLHAPGRPVMTWETRVRVAAGAARGIAYLHEDCHPRIIHRDIKSSNILLDNSFEALVADFGLAKIAQELDLNTHVSTRVMGTFGYMAPEYATSGKLSEKADVYSYGVILLELITGRKPVDTSQPLGDESLVEWARPLLGQAIENEEFDELVDPRLGKNFIPGEMFRMVEAAAACVRHSAAKRPKMSQVVRALDTLEEATDITNGMRPGQSQVFDSRQQSAQIRMFQRMAFGSQDYSSDFFDRSQSHSSWGSRDQSRFVP

SEQ ID NO: 2503 - protein, 406 aa, Arabidopsis thaliana
  misc_feature (1)..(406): Ceres Seq. ID no. 14308951
MPPSAYSSPQGSDVVLFNSRSSAPPKMRSHSGSDYMYASSDSGMVSNQRSRFSYDELSQVTSGFSEKNLLGEGGFGCVYKGVLSDGREVAVKQLKIGGSQGEREFKAEVEIISRVHHRHLVTLVGYCISEQHRLLVYDYVPNNTLHYHLHAPGRPVMTWETRVRVAAGAARGIAYLHEDCHPRIIHRDIKSSNILLDNSFEALVADFGLAKIAQELDLNTHVSTRVMGTFGYMAPEYATSGKLSEKADVYSYGVILLELITGRKPVDTSQPLGDESLVEWARPLLGQAIENEEFDELVDPRLGKNFIPGEMFRMVEAAAACVRHSAAKRPKMSQVVRALDTLEEATDITNGMRPGQSQVFDSRQQSAQIRMFQRMAFGSQDYSSDFFDRSQSHSSWGSRDQSRFVP

SEQ ID NO: 2504 - DNA, 2894 bp, Arabidopsis thaliana
  misc_feature (1)..(2894): Ceres Seq. ID no. 14309751
gaatgaaggaagaagattcaaaaaaaataagaggataggaatctatttggtcgcttttgcttcctcctattctggggagaatttgggatcttggagttgaatccgttgtgagaagaaggatctttttgagcttgtgtactgtgtcctctcagttgattcatcgcagagagaagaggtcctgtcatgtctatgagttttgtattcatctgaaaggtcttactggaatgacttatcaaaggggagagtctttggttcctgtcttgatttccaacttggtgggggcataggccaaataatgcaaacctaaaatccttgtttcttccagaatcttgtgagctttttaatctctccaacaaagtacaatttctctgaggattgtgttattacacagagaaaacaaaaagagggtccaagaaaatctcttgcattctcttctcctctctctggtattggtatcttcaaatgagtcgactacagaagcgagggaaacaggaaaagcctgttgtatctgatggagctcaaaaggttattgttgccgttaaagcatctagggagattccaaagactgccttgatttgggctttgactcatgttgttcagcctggggattgcattacccttattgttgttgtcccttctcacaactccggacgaaaactttggggtttcaataagagtttccctatgtttgctggggattgtgcaagtggtcatcggaaatcacattctgaagcactaccggagattaaaagtgatctcactgacacttgttcccaaatgattctccagcttcatgatgtctatgacccgaataagataaatgtcaagattaagattgtttctggatcaccctgtggagcagttgctgctgagtcgaagaaagcgcaagcgaactgggtagtaatggacaaacacctcaagcaggaagagaaacggtgtatggatgaattgcaatgcaacattgtggtgatgaagcgttcgcaggcaaaagttctacgcttaaaccttgttggatctcctaagaaagatgctggaaaagagtgtcccttaccatctggaccagaagcagcatctgagaaacactcaaagaacactaaaggattgttagatgctgaaagaggactacctgtcactcctactagcagccctgagctggggacaccgttcacaagtacagaagccgggacttcatctgtgtcgagctccgacctgggaacttcacctttcttcacattgggaatgaacggatacatgaagaaggatggagcattggtgatcaaggagaatgatggtcttgatgattctggctctgaaacagagagtgaaaaccaatcattagcgtcaacgagtatgagattccagccatggatatcagaatatattggcacccatcgccactcatcccaggaggccgaagaaagcttattatggaaaaatgatgacagggcacaaatatccactacaaaggctttgcttgaaaagttctctaaacttgatgttgaagttgggttgtcgtctagtcgaaggatggatttagagtttagtggaaacgtaagagatgcaatatcactctctcgaagtgctcctcctggtccacctcctctctgttcaatttgccagcacaaggcgccaatatttgggaaacccccaaggctgtttacatacgctgaattagagcttgcaacgggtgggttttcacaggctaacttcttggctgagggtggttatggatctgttcatcggggtgtgctaccagaaggccaggtagttgcagtaaagcaacacaaattggccagttctcaaggagatgtagagttttgctccgaagtggaagttctcagctgtgctcagcacagaaacgtcgttatgctaattggtttctgcattgaagacagcagacggctcttggtctatgaatacatttgcaatggttcacttgactctcatctatacggtcgtcaaaaggaaactctggaatggccagcacggcaaaagattgctgttggagctgcaagaggtcttcggtatcttcacgaagagtgcagagttggctgtattgtccacagagacatgcgtcctaacaacatcctcatcactcatgataatgagccactggttggagattttggtctagcaagatggcagcctgatggggaaatgggtgtagatacacgagtgataggaaccttcggctatctagctcccgaatatgctcaaagcgggcaaatcacagaaaaagctgatgtctactcgttcggggttgttctagttgagctagtcactggccgcaaagccattgatatcaccaggccgaaaggccagcaatgcctgactgaatgggcacgtcctctactggaagaatatgcgatagatgaacttatcgatccgaggcttgggaaccgttttgtagaaagtgaggtcatttgtatgcttcatgcagcttcgttgtgcatacgtagagatccacatttgaggccacgcatgtctcaggtgttgcgtatactggaaggagatatgataatggatggaaactacgcatcaactccaggttcagaggcaggcaaccgaagcgggaggttctgggcggatcattacagcggtcagctaacgaatgatggctcggataggttcagtgaaaggctgtctgttgaaacgccaagactagctttgagggagagggaaagaagccagaggtttgaactaaaccataacaagcaatactaatcacactactttgctttatgataagtttagttgatagggtatttagtaaattcctctgttttaagtgatgtggtcaagctggcaacacagctttttttgtttgtatagtggggtaagatgcaaaaacagttgctaaatatgttatcaaggaatttaaaattgtttttggt

SEQ ID NO: 2505 - protein, 753 aa, Arabidopsis thaliana
  misc_feature (1)..(753): Ceres Seq. ID no. 14309752
MSRLQKRGKQEKPVVSDGAQKVIVAVKASREIPKTALIWALTHVVQPGDCITLIVVVPSHNSGRKLWGFNKSFPMFAGDCASGHRKSHSEALPEIKSDLTDTCSQMILQLHDVYDPNKINVKIKIVSGSPCGAVAAESKKAQANWVVMDKHLKQEEKRCMDELQCNIVVMKRSQAKVLRLNLVGSPKKDAGKECPLPSGPEAASEKHSKNTKGLLDAERGLPVTPTSSPELGTPFTSTEAGTSSVSSSDLGTSPFFTLGMNGYMKKDGALVIKENDGLDDSGSETESENQSLASTSMRFQPWISEYIGTHRHSSQEAEESLLWKNDDRAQISTTKALLEKFSKLDVEVGLSSSRRMDLEFSGNVRDAISLSRSAPPGPPPLCSICQHKAPIFGKPPRLFTYAELELATGGFSQANFLAEGGYGSVHRGVLPEGQVVAVKQHKLASSQGDVEFCSEVEVLSCAQHRNVVMLIGFCIEDSRRLLVYEYICNGSLDSHLYGRQKETLEWPARQKIAVGAARGLRYLHEECRVGCIVHRDMRPNNILITHDNEPLVGDFGLARWQPDGEMGVDTRVIGTFGYLAPEYAQSGQITEKADVYSFGVVLVELVTGRKAIDITRPKGQQCLTEWARPLLEEYAIDELIDPRLGNRFVESEVICMLHAASLCIRRDPHLRPRMSQVLRILEGDMIMDGNYASTPGSEAGNRSGRFWADHYSGQLTNDGSDRFSERLSVETPRLALRERERSQRFELNHNKQY

SEQ ID NO: 2506 - protein, 679 aa, Arabidopsis thaliana
  misc_feature (1)..(679): Ceres Seq. ID no. 14309753
MFAGDCASGHRKSHSEALPEIKSDLTDTCSQMILQLHDVYDPNKINVKIKIVSGSPCGAVAAESKKAQANWVVMDKHLKQEEKRCMDELQCNIVVMKRSQAKVLRLNLVGSPKKDAGKECPLPSGPEAASEKHSKNTKGLLDAERGLPVTPTSSPELGTPFTSTEAGTSSVSSSDLGTSPFFTLGMNGYMKKDGALVIKENDGLDDSGSETESENQSLASTSMRFQPWISEYIGTHRHSSQEAEESLLWKNDDRAQISTTKALLEKFSKLDVEVGLSSSRRMDLEFSGNVRDAISLSRSAPPGPPPLCSICQHKAPIFGKPPRLFTYAELELATGGFSQANFLAEGGYGSVHRGVLPEGQVVAVKQHKLASSQGDVEFCSEVEVLSCAQHRNVVMLIGFCIEDSRRLLVYEYICNGSLDSHLYGRQKETLEWPARQKIAVGAARGLRYLHEECRVGCIVHRDMRPNNILITHDNEPLVGDFGLARWQPDGEMGVDTRVIGTFGYLAPEYAQSGQITEKADVYSFGVVLVELVTGRKAIDITRPKGQQCLTEWARPLLEEYAIDELIDPRLGNRFVESEVICMLHAASLCIRRDPHLRPRMSQVLRILEGDMIMDGNYASTPGSEAGNRSGRFWADHYSGQLTNDGSDRFSERLSVETPRLALRERERSQRFELNHNKQY

SEQ ID NO: 2507 - protein, 648 aa, Arabidopsis thaliana
  misc_feature (1)..(648): Ceres Seq. ID no. 14309754
MILQLHDVYDPNKINVKIKIVSGSPCGAVAAESKKAQANWVVMDKHLKQEEKRCMDELQCNIVVMKRSQAKVLRLNLVGSPKKDAGKECPLPSGPEAASEKHSKNTKGLLDAERGLPVTPTSSPELGTPFTSTEAGTSSVSSSDLGTSPFFTLGMNGYMKKDGALVIKENDGLDDSGSETESENQSLASTSMRFQPWISEYIGTHRHSSQEAEESLLWKNDDRAQISTTKALLEKFSKLDVEVGLSSSRRMDLEFSGNVRDAISLSRSAPPGPPPLCSICQHKAPIFGKPPRLFTYAELELATGGFSQANFLAEGGYGSVHRGVLPEGQVVAVKQHKLASSQGDVEFCSEVEVLSCAQHRNVVMLIGFCIEDSRRLLVYEYICNGSLDSHLYGRQKETLEWPARQKIAVGAARGLRYLHEECRVGCIVHRDMRPNNILITHDNEPLVGDFGLARWQPDGEMGVDTRVIGTFGYLAPEYAQSGQITEKADVYSFGVVLVELVTGRKAIDITRPKGQQCLTEWARPLLEEYAIDELIDPRLGNRFVESEVICMLHAASLCIRRDPHLRPRMSQVLRILEGDMIMDGNYASTPGSEAGNRSGRFWADHYSGQLTNDGSDRFSERLSVETPRLALRERERSQRFELNHNKQY

SEQ ID NO: 2508 - DNA, 2205 bp, Arabidopsis thaliana
  misc_feature (1)..(2205): Ceres Seq. ID no. 14309915
gatagattgaagcgtatactctaatttgaccaatctagggtttctagtcacttgaagcttctcttaaaaaacctgtctcactcctcgtcaacctcttcctctcccgctgtcgccaagattgaatcttttttcagttgtggcttcaccggataataaggaattcagtaagagataagttcatcctgacaacatggagaccaagaatgagaattctgatgtttcacgggcagaggagtttaaaagtcaggccaacgaagcttttaaaggtcacaaatactccagtgctattgatctatatacaaaagctattgaactcaacagcaacaacgctgtgtattgggcaaatcgtgcatttgctcacacaaaactggaggaatatggcagtgcaatacaggatgcatcgaaggccattgaagttgattcaagatactataagggctattacaggcgtggtgctgcgtatcttgccatgggaaaatttaaggatgccttgaaggacttccaacaggtaaaaaggctttctcctaatgaccctgatgccacaagaaagctaaaggaatgtgagaaagcagtgatgaaactcaaatttgaagaagcaatctctgtgccagtatctgaaaggcgttcagtagctgagtccattgacttccatacaatagggaacaaacccagatcatcatccatgcccaccaaaacggctttagcagcagttgttgcagcagtaatggtggtggcggtccggggatttgccacaactgagatactcatggtgatggtttcggtggtattagggacattttggtggggtagcttcagtgaggttgagccacaatattctggtgctagaattgagggagaggaagttaccttagattttgtgaaaacgatgatggaggattttaagaaccaaaaaacattgcataaacggtatgcctatcaaatcgtcttacagactaggcaaatcttgctagcactgccttctcttgttgatataagtgttccacatggcaaacatatcactgtttgcggtgacgttcatggtcagttctacgatcttctcaatatctttgagcttaatggcctcccttcggaggagaacccatacctatttaatggcgactttgtggacagaggctcattctccgttgagatcatcctcactttgtttgctttcaagtgcatgtgcccatcatccatatatctagccagaggaaaccatgaaagcaagagcatgaacaaaatttatggttttgagggtgaggttcggtccaagttgagtgaaaaattcgtggatctctttgctgaagttttctgttacctcccgttggctcatgttataaatgggaaggtcttcgtggtacatggaggtcttttcagtgttgacggcgtgaaactctcagacatcagagccattgacagattctgtgagccaccagaggaaggactaatgtgtgaactattgtggagtgatcctcaacctctccctggaagaggcccaagcaagcgaggagttggtctatcatttggtggagatgtgacaaagaggtttttgcaagataacaatttagatttgttggtccggtcacatgaagtaaaagatgaaggttatgaggttgaacatgacggtaaactcataactgtcttctctgcgccaaattactgtgatcagatgggtaataagggagccttcattcgttttgaagctcctgatatgaagccaaacattgttacattctcagcagtgcctcatccggatgtgaagcctatggcatatgcaaacaactttctcaggatgttcaactaaccagcaaaaagcttcttctactcaaaatgctattctaaagactcaagaccagaagtggttcagaaacataatgatataagtttttttttccctttatcttctgcagttttttcatgttgttccagaaaagggaggccatgataattaaaggtacagtatccggatttgatcgttttttttcttcttccttcttttctgataaagattttcactcttcctttaagcttatccagcaacttttgtcccttttgtcttatgttgtaagagggggtaatgtatcattcttattttagatgaaaatcttgtgattactcaacaaaagagtgaccaaatgaccccccaaaactttgtacttaaaatggtttcttgaatcaaaaatcaaaaggtgtttctttaaagcc

SEQ ID NO: 2509 - protein, 537 aa, Arabidopsis thaliana
  misc_feature (1)..(537): Ceres Seq. ID no. 14309916
METKNENSDVSRAEEFKSQANEAFKGHKYSSAIDLYTKAIELNSNNAVYWANRAFAHTKLEEYGSAIQDASKAIEVDSRYYKGYYRRGAAYLAMGKFKDALKDFQQVKRLSPNDPDATRKLKECEKAVMKLKFEEAISVPVSERRSVAESIDFHTIGNKPRSSSMPTKTALAAVVAAVMVVAVRGFATTEILMVMVSVVLGTFWWGSFSEVEPQYSGARIEGEEVTLDFVKTMMEDFKNQKTLHKRYAYQIVLQTRQILLALPSLVDISVPHGKHITVCGDVHGQFYDLLNIFELNGLPSEENPYLFNGDFVDRGSFSVEIILTLFAFKCMCPSSIYLARGNHESKSMNKIYGFEGEVRSKLSEKFVDLFAEVFCYLPLAHVINGKVFVVHGGLFSVDGVKLSDIRAIDRFCEPPEEGLMCELLWSDPQPLPGRGPSKRGVGLSFGGDVTKRFLQDNNLDLLVRSHEVKDEGYEVEHDGKLITVFSAPNYCDQMGNKGAFIRFEAPDMKPNIVTFSAVPHPDVKPMAYANNFLRMFN

SEQ ID NO: 2510 - protein, 444 aa, Arabidopsis thaliana
  misc_feature (1)..(444): Ceres Seq. ID no. 14309917
MGKFKDALKDFQQVKRLSPNDPDATRKLKECEKAVMKLKFEEAISVPVSERRSVAESIDFHTIGNKPRSSSMPTKTALAAVVAAVMVVAVRGFATTEILMVMVSVVLGTFWWGSFSEVEPQYSGARIEGEEVTLDFVKTMMEDFKNQKTLHKRYAYQIVLQTRQILLALPSLVDISVPHGKHITVCGDVHGQFYDLLNIFELNGLPSEENPYLFNGDFVDRGSFSVEIILTLFAFKCMCPSSIYLARGNHESKSMNKIYGFEGEVRSKLSEKFVDLFAEVFCYLPLAHVINGKVFVVHGGLFSVDGVKLSDIRAIDRFCEPPEEGLMCELLWSDPQPLPGRGPSKRGVGLSFGGDVTKRFLQDNNLDLLVRSHEVKDEGYEVEHDGKLITVFSAPNYCDQMGNKGAFIRFEAPDMKPNIVTFSAVPHPDVKPMAYANNFLRMFN

SEQ ID NO: 2511 - protein, 409 aa, Arabidopsis thaliana
  misc_feature (1)..(409): Ceres Seq. ID no. 14309918
MKLKFEEAISVPVSERRSVAESIDFHTIGNKPRSSSMPTKTALAAVVAAVMVVAVRGFATTEILMVMVSVVLGTFWWGSFSEVEPQYSGARIEGEEVTLDFVKTMMEDFKNQKTLHKRYAYQIVLQTRQILLALPSLVDISVPHGKHITVCGDVHGQFYDLLNIFELNGLPSEENPYLFNGDFVDRGSFSVEIILTLFAFKCMCPSSIYLARGNHESKSMNKIYGFEGEVRSKLSEKFVDLFAEVFCYLPLAHVINGKVFVVHGGLFSVDGVKLSDIRAIDRFCEPPEEGLMCELLWSDPQPLPGRGPSKRGVGLSFGGDVTKRFLQDNNLDLLVRSHEVKDEGYEVEHDGKLITVFSAPNYCDQMGNKGAFIRFEAPDMKPNIVTFSAVPHPDVKPMAYANNFLRMFN

SEQ ID NO: 2512 - DNA, 1657 bp, Arabidopsis thaliana
  misc_feature (1)..(1657): Ceres Seq. ID no. 14309919
gagaagagcatttagaaaacaaaagcggaataagaaacaagattgaagaaagaagtcggagaagacagtagaagaaactgatacgaggagaacttactctcaactttaatggcagacgctggagataatcagagaagaagcgatgaaaaagagtcgatatcaactgaagaaacgaaggagaatgaagacttgggatctggaagaaacgacacaggtcatcatgtatacaacgagggacacgaagaggtactagagtatctgaaacaagagagactgaaagatgctgatatgcagaggaaaaggcatgaaacagagtcgaaatccattgagggcacaactcctgatattaggctgagtgattcagggaaagggtctgatgagagaactgataaaatacagaaagcagactcagtttacaaacgctctaacgctgacacgcgagtgagtctaccacaacagagacgactgaaagatgtggtggaggcgcatagggtacgccgtgaaacagagtcaagattatggcaccaagagagggtaaaacaactaacttcttacacagtatcttttgtttgatttacgtgttcctttgattttgattctcaggatagatctctggtttggggaggaagtgaacccaggatgagatttgatgaaagtactcagggttggagagatagtgactatgaatccaaatggaggtttcatgagagaactccggattgggattggagagatagtgaatccagaatgagatctcatgaaagaactcaggataggagagaaagtgaatcccaaggggtatttgatgagagaacagagaggagacaagaaccagtgcgatggcccggtgaagagtgttggtgtctgcggtgtcgaaacggaggaagttgccgttacaatcatcctactcaacttccacaggagcttccggtgaggaatcgtttgcagatttgcaggtattttctgaggggatattgtaagttcggctcagtttgtggatttcaacacataagggacagggatgttgcagaacctatgtatgagaattggagttttgatgtgagaactccaattctcattagaggttctatcctctgcttttcaagttctctgcggcaacagagattacaggggatgcgagagaatcagaacgtggattctcgaatgcatgatccaagacgccatgatacagagttgagactcgaacgagagaagatggtaaacagagaacttgaaaagcagaggatagaacctctaatcggtccactagtgaggcgatacatgcaagcaaagagagataaagaagttgaacagagagagagagctagcattgagagccagaggatagtggctcaagagaatctgcgacaacagagattgcaggggatgcgagagaatcagaacgtggatgctcatgatcaagagaaaactcaggaactcggtttcaaaggaaaagagggagatggagtttaagaggaaacggagttacgagaccaccaaagagaactctcaagatgatttcttttaccgcaagaaactgatgtgtttttcctttgaacgcaaataataagttcattttgataaactgatcgtttcggaatcaattgtgttattgattgattaaacgaatgatgaaacttttaatgcaaaatattcg

SEQ ID NO: 2513 - protein, 277 aa, Arabidopsis thaliana
  misc_feature (1)..(277): Ceres Seq. ID no. 14309920
MRFDESTQGWRDSDYESKWRFHERTPDWDWRDSESRMRSHERTQDRRESESQGVFDERTERRQEPVRWPGEECWCLRCRNGGSCRYNHPTQLPQELPVRNRLQICRYFLRGYCKFGSVCGFQHIRDRDVAEPMYENWSFDVRTPILIRGSILCFSSSLRQQRLQGMRENQNVDSRMHDPRRHDTELRLEREKMVNRELEKQRIEPLIGPLVRRYMQAKRDKEVEQRERASIESQRIVAQENLRQQRLQGMRENQNVDAHDQEKTQELGFKGKEGDGV

SEQ ID NO: 2514 - protein, 241 aa, Arabidopsis thaliana
  misc_feature (1)..(241): Ceres Seq. ID no. 14309921
MRSHERTQDRRESESQGVFDERTERRQEPVRWPGEECWCLRCRNGGSCRYNHPTQLPQELPVRNRLQICRYFLRGYCKFGSVCGFQHIRDRDVAEPMYENWSFDVRTPILIRGSILCFSSSLRQQRLQGMRENQNVDSRMHDPRRHDTELRLEREKMVNRELEKQRIEPLIGPLVRRYMQAKRDKEVEQRERASIESQRIVAQENLRQQRLQGMRENQNVDAHDQEKTQELGFKGKEGDGV

SEQ ID NO: 2515 - protein, 154 aa, Arabidopsis thaliana
  misc_feature (1)..(154): Ceres Seq. ID no. 14309922
MADAGDNQRRSDEKESISTEETKENEDLGSGRNDTGHHVYNEGHEEVLEYLKQERLKDADMQRKRHETESKSIEGTTPDIRLSDSGKGSDERTDKIQKADSVYKRSNADTRVSLPQQRRLKDVVEAHRVRRETESRLWHQERVKQLTSYTVSFV

SEQ ID NO: 2516 - DNA, 2085 bp, Arabidopsis thaliana
  misc_feature (1)..(2085): Ceres Seq. ID no. 14309934
ttctcctgttctaactgaggggtcgaggacaaagctcctcattgagttctccttcagtggggtttgatgcgaggtgctgccaaggtcatttcctcttgctgtgctccgcctctcgttcagataaagcggtcgggataagtttgtaaattgcttgtcaaatcaggacaagattctgaattaggggaacctaccgcatagtttgctcatcagacaggccgaaggacaatgtcatcgcctaacaattctgtcagcgcggcactgtcagaaacgacccccgtgtttcagttgagagtatggcaactgattgccattgctgtcgggatagtcatggcgatcctgctcgtcattgcgctttgcctttcgctccagaggaaaaagaagacagtgaaagggtttgacaacagttcgctggctgagatccctatcgtttctaaggaaatcaatgttgacagagttggtgctcagagtctacatgacagtgaagcgcccttcatgccagtgcgggataagtatacgcagaccaaaggtgcagggcagttgggagagagtagatccgtcgacgccgataccttcagccagttcagctcagtgtacaacgtagagaaggctgggagctcatactctgaagattacagtcacagcagctctggtccagctaggaaaggtagctcaccatatgcatattcagcatcaccgctggttggcctgcctgagttatcacatctaggctggggccactggtttaccttgagggacctggagtgtgcaacgaatcggtttgcaaagagtaatgttcttggggagggtggctatggagttgtctacaagggtcgtctggtaaatgggaccgagattgccgtgaagaagatccttaataatctggggcaggcagagaaggaatttagagttgaagttgaagccatcggccatgttcggcataagaatctggtccgccttctgggatactgcgtggaagggatacataggatgcttgtctatgaatatgtcaataatggcaacctagaacaatggcttcatggcatgaatcaacacggtgtccttagttgggaaaatcgtatgaaaattctccttggcactgcaaaagctctcgcgtaccttcatgaggccatagatcccaaagttgtacacagagatatcaagtcaagtaatatcttaattgacgatgaattcaacagcaaggtttctgattttgggttggctaaacttctgaattctgacaaaagtcatatcaatacaagagtgatgggaacatatgggtatgtagcacctgaatatgcaaacagtgggatgctaaatgaaaagagtgatatttacagtttcggagtggtgctgttagaatgtgcgaccgctagggatccagtcgattactctaagcctgcagatgaggtgaatctcatagagtggcttaaaatgatggtcaccagtaagagggcagaggaggtagtggatccaaacctcaatgttaagccaccaaaacgtgccctcaagcggacaatcctggttggtttcaagtgtgtcgatcctgacgctgacaagaggccaaagatgagtcacgttgtccagatgcttgaagcagttcagaatgcatatcatgaagatcaaagcaagctcagccaggtgggatcacagcagtcgctagaggagacctcaaacagcgctgatgcctgaacctcctattctgaacaagcacatcaaataggaccctgaatcatctgatagcaacattgatttgatcattgctcggcacttaatagagtgagcggtgatcggatttacagtttgggtttgcatatactggaggtggtggttaaatcaattagtagcaagttgtttctaaaaggttcatgtcttttacccttaggatatgtatagttttcctgtaggggagcatagaagcaccttcatctttatttgttgttcgagttacaaggagggactaacctcaggcatataactacagtcactggatttcgttacccatgtgtagtgactttttggaaagtcgttattaccctagagatatgaaaacatgaatttctgcaatgaagtactaccccgttctcg

SEQ ID NO: 2517 - protein, 487 aa, Arabidopsis thaliana
  misc_feature (1)..(487): Ceres Seq. ID no. 14309935
MSSPNNSVSAALSETTPVFQLRVWQLIAIAVGIVMAILLVIALCLSLQRKKKTVKGFDNSSLAEIPIVSKEINVDRVGAQSLHDSEAPFMPVRDKYTQTKGAGQLGESRSVDADTFSQFSSVYNVEKAGSSYSEDYSHSSSGPARKGSSPYAYSASPLVGLPELSHLGWGHWFTLRDLECATNRFAKSNVLGEGGYGVVYKGRLVNGTEIAVKKILNNLGQAEKEFRVEVEAIGHVRHKNLVRLLGYCVEGIHRMLVYEYVNNGNLEQWLHGMNQHGVLSWENRMKILLGTAKALAYLHEAIDPKVVHRDIKSSNILIDDEFNSKVSDFGLAKLLNSDKSHINTRVMGTYGYVAPEYANSGMLNEKSDIYSFGVVLLECATARDPVDYSKPADEVNLIEWLKMMVTSKRAEEVVDPNLNVKPPKRALKRTILVGFKCVDPDADKRPKMSHVVQMLEAVQNAYHEDQSKLSQVGSQQSLEETSNSADA

SEQ ID NO: 2518 - protein, 453 aa, Arabidopsis thaliana
  misc_feature (1)..(453): Ceres Seq. ID no. 14309936
MAILLVIALCLSLQRKKKTVKGFDNSSLAEIPIVSKEINVDRVGAQSLHDSEAPFMPVRDKYTQTKGAGQLGESRSVDADTFSQFSSVYNVEKAGSSYSEDYSHSSSGPARKGSSPYAYSASPLVGLPELSHLGWGHWFTLRDLECATNRFAKSNVLGEGGYGVVYKGRLVNGTEIAVKKILNNLGQAEKEFRVEVEAIGHVRHKNLVRLLGYCVEGIHRMLVYEYVNNGNLEQWLHGMNQHGVLSWENRMKILLGTAKALAYLHEAIDPKVVHRDIKSSNILIDDEFNSKVSDFGLAKLLNSDKSHINTRVMGTYGYVAPEYANSGMLNEKSDIYSFGVVLLECATARDPVDYSKPADEVNLIEWLKMMVTSKRAEEVVDPNLNVKPPKRALKRTILVGFKCVDPDADKRPKMSHVVQMLEAVQNAYHEDQSKLSQVGSQQSLEETSNSADA

SEQ ID NO: 2519 - protein, 398 aa, Arabidopsis thaliana
  misc_feature (1)..(398): Ceres Seq. ID no. 14309937
MPVRDKYTQTKGAGQLGESRSVDADTFSQFSSVYNVEKAGSSYSEDYSHSSSGPARKGSSPYAYSASPLVGLPELSHLGWGHWFTLRDLECATNRFAKSNVLGEGGYGVVYKGRLVNGTEIAVKKILNNLGQAEKEFRVEVEAIGHVRHKNLVRLLGYCVEGIHRMLVYEYVNNGNLEQWLHGMNQHGVLSWENRMKILLGTAKALAYLHEAIDPKVVHRDIKSSNILIDDEFNSKVSDFGLAKLLNSDKSHINTRVMGTYGYVAPEYANSGMLNEKSDIYSFGVVLLECATARDPVDYSKPADEVNLIEWLKMMVTSKRAEEVVDPNLNVKPPKRALKRTILVGFKCVDPDADKRPKMSHVVQMLEAVQNAYHEDQSKLSQVGSQQSLEETSNSADA

SEQ ID NO: 2520 - DNA, 1098 bp, Arabidopsis thaliana
  misc_feature (1)..(1098): Ceres Seq. ID no. 14309954
gaagaagacgaagaagcattgagagtgaaaagaaaaacaatgtcgcagctgttatcttctcctccaatggcggttttctccaaaaccttcataaaccataagttttcagatgctcgttttctctcttctcactcaattctcacctccggtggattcgccggaaaaattattcctttaaaaccgacggcgaggttgaaattaacggtgaagtctcgacaaagtgattactttgagaaacagaggtttggtgactcgtcttcttcgcaaaacgctgaagtatcttctcctagattttacgtgggtcattcgatttacaaagggaaagctgctcttacgatagaaccacgagcaccagagtttgtggctttggaatctggtgcgttcaagctgacaaaggaaggttttttgttgctccaatttgctcctgcagctggtgttcgtcaatatgattggagtaggaagcaggtcttctcgttgtcggttacagaaatcggtaatctagttagccttgggccgagggaatcatgtgaattcttccatgatccattcaagggaaaaggtgatgaaggtaaagtgaggaaagtgttgaaagttgagccgctcccagatggttctggccgcttctttaacctgagtgttcaaaacaagctcttgaatgtagatgagagtgtatacataccaatcactaaagcagagtttgctgttcttatctctgctttcaacttcgtcttgccgccccttataggctggagtgcatttgctaactccatcaaaccagaagactctaaccgacttaacaatgcttcgcctaagtatggaggagactacgaatggagtagatgatggagattagaggcaatcttgcaaactcggtttttcggtccataccatctttttgttgttgcaaatcaatgagtcaccaagagctgttcgagatagagaacggaaagaaaagcagcagcagagactgaagtagtttagaccaaatggaatgtgttgttgtgtaggaaataacttatattttgtgttagacaatctgtattcattcaaaagcaatcaattacaattttgttaatacaagaatcagatactcttcct

SEQ ID NO: 2521 - protein, 280 aa, Arabidopsis thaliana
  misc_feature (1)..(280): Ceres Seq. ID no. 14309955
EEDEEALRVKRKTMSQLLSSPPMAVFSKTFINHKFSDARFLSSHSILTSGGFAGKIIPLKPTARLKLTVKSRQSDYFEKQRFGDSSSSQNAEVSSPRFYVGHSIYKGKAALTIEPRAPEFVALESGAFKLTKEGFLLLQFAPAAGVRQYDWSRKQVFSLSVTEIGNLVSLGPRESCEFFHDPFKGKGDEGKVRKVLKVEPLPDGSGRFFNLSVQNKLLNVDESVYIPITKAEFAVLISAFNFVLPPLIGWSAFANSIKPEDSNRLNNASPKYGGDYEWSR

SEQ ID NO: 2522 - protein, 267 aa, Arabidopsis thaliana
  misc_feature (1)..(267): Ceres Seq. ID no. 14309956
MSQLLSSPPMAVFSKTFINHKFSDARFLSSHSILTSGGFAGKIIPLKPTARLKLTVKSRQSDYFEKQRFGDSSSSQNAEVSSPRFYVGHSIYKGKAALTIEPRAPEFVALESGAFKLTKEGFLLLQFAPAAGVRQYDWSRKQVFSLSVTEIGNLVSLGPRESCEFFHDPFKGKGDEGKVRKVLKVEPLPDGSGRFFNLSVQNKLLNVDESVYIPITKAEFAVLISAFNFVLPPLIGWSAFANSIKPEDSNRLNNASPKYGGDYEWSR

SEQ ID NO: 2523 - protein, 258 aa, Arabidopsis thaliana
  misc_feature (1)..(258): Ceres Seq. ID no. 14309957
MAVFSKTFINHKFSDARFLSSHSILTSGGFAGKIIPLKPTARLKLTVKSRQSDYFEKQRFGDSSSSQNAEVSSPRFYVGHSIYKGKAALTIEPRAPEFVALESGAFKLTKEGFLLLQFAPAAGVRQYDWSRKQVFSLSVTEIGNLVSLGPRESCEFFHDPFKGKGDEGKVRKVLKVEPLPDGSGRFFNLSVQNKLLNVDESVYIPITKAEFAVLISAFNFVLPPLIGWSAFANSIKPEDSNRLNNASPKYGGDYEWSR

SEQ ID NO: 2524 - DNA, 2257 bp, Arabidopsis thaliana
  misc_feature (1)..(2257): Ceres Seq. ID no. 14309985
gttttgtttttgaatcagatccttattcttgacctttcgatcagattcatggcaacgactcaatcacacacctcagatcttacttcagaggagcaacctgctagtttggacatcatgaaggagcagactgtcccggcaaacaacgagacatcagcctcttttaagtcctcccaggaagctccagttgtagttcatccagcaaaagttgctccacttactggaccttatggtttagccggtgattttgccggacacttaccgagcagcatcctctctcctcaagcacaaggcttttactatagaggttatgaaaaccccacaggcgaatgggacgagtattcctcgtatgtcaatgttgaaggattggacatcacatctcctgttggcttcaatgagaatgcttctctggtctaccaaacgggatatggatacaaccctcaaatgccatatgggccatattcccctgcagcaagtcccttgccttctgagggacagttgtattctccacaacagtttccgttttcaggggcatcaccgtattaccagcaggtagttcctcctagcatgcaatatattacttctccaactcagcccgagctcaccagccttgtcggtgttgaccaacaaggtgataacatcggaccacgccagtcctaccatcctcatcccattggaccgtttaatggaaaccagccaaaccttggttttcctgaatggcagcaaggttttgacgggggaatatggtcggattggtccaagccttctgatatgcacaggcattcttcttctatttctccggctttatctcctcagccactcggctcatatggatcatatggccagaacatacccatggggtcacagcgacagagatcattttacggttttggatctggttcgaactcttataacagaggttatatgcatagtggtggtcgtggccagggttctaactatggaagtagactaatttctaatgtgggtatgggaaaccaaggctggattggggttgacaacagtcgagggcgtggaagggttagtgatccatctttgggtggtgcttataatggtacttttgatatcctcaatgagcaaaatcgaggaccaagggcttcaaagcccaagactcaggtcttagaggagcttgattctgctgctgattctaagaaaaataacaaaggcagtgcaaaggagcacgaggaatccaacaacgcagactttgtcaccgactacactaacgccaagttgttcatcatcaagtcttacagtgaagacaatgttcacaaaagcatcaaatacaatgtatgggctagcacccctaatggcaacaaaaagcttgacgctgcttatcgtgaggccaaggatgagaaagaaccgtgtccactttttcttctgttctcggtaaatgcgagctctcaattctgtggtgtagcagagatggttggacctgttgattttgagaagagcgttgattactggcaacaagataaatggagtggacagttcccagtgaagtggcacattatcaaagatgttccaaacagccagttccgccacattatattggaaaacaatgacaataagcctgtgactaatagtcgagacacccaagaagtaaaactggaacagggcatcgagaagctgaagatcttcaagaactacgacgctgacacgtcaatcttggatgatttcgggttttatgaagagcgggagaaaattatacaagaccggaaggcaagaagacagccaagcttgccatctgcaggagtagtagcaggagaaaatgaacataaacctgcttctgctgcattacccacagacttcatgaagaacatgtccaagagttttgcgcaagttgtccgcttggacgaaggcagcaaagaagcagtcaaggccagttcatctccagatgcaattacaacagcagcagtctcttctggtcaatccaactagtaagtaaaagacatcaattagcaaagactatgttttcaaattccataatatgatcttttgtttgttctaagaaggtatttcaaatgaaattttacgtctgaccgggtctggtttttgtgtaaagtaagcctctttcctccgcccttttctgcttcaggggtatttagccaaaatttgattcatttccctcttttcaatgttctataataccctcactcttctgagttgatagaagaagaagatgaagaagataatgtatgaaagacaatataatgtttctcttgtaaagttggcctcatttatc

SEQ ID NO: 2525 - protein, 650 aa, Arabidopsis thaliana
  misc_feature (1)..(650): Ceres Seq. ID no. 14309986
VLFLNQILILDLSIRFMATTQSHTSDLTSEEQPASLDIMKEQTVPANNETSASFKSSQEAPVVVHPAKVAPLTGPYGLAGDFAGHLPSSILSPQAQGFYYRGYENPTGEWDEYSSYVNVEGLDITSPVGFNENASLVYQTGYGYNPQMPYGPYSPAASPLPSEGQLYSPQQFPFSGASPYYQQVVPPSMQYITSPTQPELTSLVGVDQQGDNIGPRQSYHPHPIGPFNGNQPNLGFPEWQQGFDGGIWSDWSKPSDMHRHSSSISPALSPQPLGSYGSYGQNIPMGSQRQRSFYGFGSGSNSYNRGYMHSGGRGQGSNYGSRLISNVGMGNQGWIGVDNSRGRGRVSDPSLGGAYNGTFDILNEQNRGPRASKPKTQVLEELDSAADSKKNNKGSAKEHEESNNADFVTDYTNAKLFIIKSYSEDNVHKSIKYNVWASTPNGNKKLDAAYREAKDEKEPCPLFLLFSVNASSQFCGVAEMVGPVDFEKSVDYWQQDKWSGQFPVKWHIIKDVPNSQFRHIILENNDNKPVTNSRDTQEVKLEQGIEKLKIFKNYDADTSILDDFGFYEEREKIIQDRKARRQPSLPSAGVVAGENEHKPASAALPTDFMKNMSKSFAQVVRLDEGSKEAVKASSSPDAITTAAVSSGQSN

SEQ ID NO: 2526 - protein, 634 aa, Arabidopsis thaliana
  misc_feature (1)..(634): Ceres Seq. ID no. 14309987
MATTQSHTSDLTSEEQPASLDIMKEQTVPANNETSASFKSSQEAPVVVHPAKVAPLTGPYGLAGDFAGHLPSSILSPQAQGFYYRGYENPTGEWDEYSSYVNVEGLDITSPVGFNENASLVYQTGYGYNPQMPYGPYSPAASPLPSEGQLYSPQQFPFSGASPYYQQVVPPSMQYITSPTQPELTSLVGVDQQGDNIGPRQSYHPHPIGPFNGNQPNLGFPEWQQGFDGGIWSDWSKPSDMHRHSSSISPALSPQPLGSYGSYGQNIPMGSQRQRSFYGFGSGSNSYNRGYMHSGGRGQGSNYGSRLISNVGMGNQGWIGVDNSRGRGRVSDPSLGGAYNGTFDILNEQNRGPRASKPKTQVLEELDSAADSKKNNKGSAKEHEESNNADFVTDYTNAKLFIIKSYSEDNVHKSIKYNVWASTPNGNKKLDAAYREAKDEKEPCPLFLLFSVNASSQFCGVAEMVGPVDFEKSVDYWQQDKWSGQFPVKWHIIKDVPNSQFRHIILENNDNKPVTNSRDTQEVKLEQGIEKLKIFKNYDADTSILDDFGFYEEREKIIQDRKARRQPSLPSAGVVAGENEHKPASAALPTDFMKNMSKSFAQVVRLDEGSKEAVKASSSPDAITTAAVSSGQSN

SEQ ID NO: 2527 - protein, 612 aa, Arabidopsis thaliana
  misc_feature (1)..(612): Ceres Seq. ID no. 14309988
MKEQTVPANNETSASFKSSQEAPVVVHPAKVAPLTGPYGLAGDFAGHLPSSILSPQAQGFYYRGYENPTGEWDEYSSYVNVEGLDITSPVGFNENASLVYQTGYGYNPQMPYGPYSPAASPLPSEGQLYSPQQFPFSGASPYYQQVVPPSMQYITSPTQPELTSLVGVDQQGDNIGPRQSYHPHPIGPFNGNQPNLGFPEWQQGFDGGIWSDWSKPSDMHRHSSSISPALSPQPLGSYGSYGQNIPMGSQRQRSFYGFGSGSNSYNRGYMHSGGRGQGSNYGSRLISNVGMGNQGWIGVDNSRGRGRVSDPSLGGAYNGTFDILNEQNRGPRASKPKTQVLEELDSAADSKKNNKGSAKEHEESNNADFVTDYTNAKLFIIKSYSEDNVHKSIKYNVWASTPNGNKKLDAAYREAKDEKEPCPLFLLFSVNASSQFCGVAEMVGPVDFEKSVDYWQQDKWSGQFPVKWHIIKDVPNSQFRHIILENNDNKPVTNSRDTQEVKLEQGIEKLKIFKNYDADTSILDDFGFYEEREKIIQDRKARRQPSLPSAGVVAGENEHKPASAALPTDFMKNMSKSFAQVVRLDEGSKEAVKASSSPDAITTAAVSSGQSN

SEQ ID NO: 2528 - DNA, 2255 bp, Arabidopsis thaliana
  misc_feature (1)..(2255): Ceres Seq. ID no. 14310031
gagaaccttctttttccggcgagggaaaagcttcctcagccctaatcgctaaatcgatgaaattatgctcccaacgtttaacggtttaaagatcattccaaaaactcaaccttttgcgtgtctcctctcgccatgaccctaatctcaagatttttgatctctagagtgattagtagaactctgttttcgaatcagaataatagaacagctattaatgtttctgtaaagttgccacaattcagaattcagagtaatggatatcacacattgggtcttcttcataatgttaaaggaaggtttttaggtagtaatcatcatcagcttgcgcgtaggagctattcgattgcagttgcgagtaatgtagttaagcaacatgctcaagtctcttggggaaggcttgtacagagagtaactctgagtcgtagttggaacttacctcggataagtcagattgctcaagcgtgtagcttgtctttagcccgttcgcacttcttgttacctggtttattggctcttacctatagacaagtggcgtatgcgcaaagggtggttccaaatcctgtggtctattctccttcacacatttctccttataggagttcgataaacttccctatcgttctctcgtctttagtgttttctgcggtcaagggtgttgttctgaacgggagagctctttatttagcaattttgttttctccaaatgttattatggcgttgttgggatttgcttgcgggcctcgttacagacagctgcagtatgaggtcctccatcgaactctggagaaagcaggtcctgcttttatcaaatttggtcaatggattgctacgcgacctgatcggtttaataaggatttgtgtttgcagctttcaaagcttcacagtaatgctcctgagcacagttttgcgttcaccaaaaagagcattgaaaatgcatttggtcgtaaactctctgagatatttgaggaatttgatgaggcgccagtggcatctgggagtatagctcaagtacaccgagcttccttgaagtttcagtatgcaggacaaaaggtgaagtcctcggaagttgctgtgaaagttagacatccttgtgttgaggaaacgatgaagcgagattttgtgataattaatttcgtggcgaggctaaccacttttattccggggttaaattggcttagattggacgagtgtgtgcaacagtttagtgtctacatgttgtcccaagttgatctctcaagggaagcttctcatttgagtcggtttatatataacttccgtggatggaaagatgtctcttttcctaagcccatctatcctctaatacatcccgctgttttagtcgagacgtatgagcacggagagagtgtggctcgttatgttgatggctccgaaggacaagaaaaacttaaggctaaagtagctcatatcggaactaatgctctcttgaaaatgctcctggtcgacaacttcattcatgcagatatgcatcctgggaatattcttgtccggccaaacaatactagaagaggtctattcagatcgaggaagccacacatcgttttcctagatgtgggcatgactgcagaactttcaaaaactgaccgagataacctactcggatttttcaaggccgttgcacgtagagacggccggactgctgctgaacgaacacttaaattatctaaacaacagaattgtcctgatccacaggcctttatcaaggaagtagaagaagcatttacattctggggaacagaggaaggggatctagtccatccagcggattgtatgcacgaactattcgagaaaatgaggagtcatagagttaatatcgacggcaatgtgtccaccgtcatgtttacaacattagttctcgagggttggcaacggaaactggatccaggatacgatgtgatgcgtacgctacaaacaatgctgctgaaaacggattggatgaaatcactttcttacacgatcgatggacttatggctccgtagattgaaaaggttcaatctttgattcttttacccatttaacacttgagagccacatttttgttttgttgccttaggatgtgaagaagaaccaaaacatatattttagagaaaaacaaaggaaaagtcctttactgttttgtcttcttcttatcttttgcttattctttgattattctttttgctagaaattggaattcttcatcattctaaaacagagaatttgtattttgggtatatatcagttttgaatttcctcg

SEQ ID NO: 2529 - protein, 621 aa, Arabidopsis thaliana
  misc_feature (1)..(621): Ceres Seq. ID no. 14310032
MTLISRFLISRVISRTLFSNQNNRTAINVSVKLPQFRIQSNGYHTLGLLHNVKGRFLGSNHHQLARRSYSIAVASNVVKQHAQVSWGRLVQRVTLSRSWNLPRISQIAQACSLSLARSHFLLPGLLALTYRQVAYAQRVVPNPVVYSPSHISPYRSSINFPIVLSSLVFSAVKGVVLNGRALYLAILFSPNVIMALLGFACGPRYRQLQYEVLHRTLEKAGPAFIKFGQWIATRPDRFNKDLCLQLSKLHSNAPEHSFAFTKKSIENAFGRKLSEIFEEFDEAPVASGSIAQVHRASLKFQYAGQKVKSSEVAVKVRHPCVEETMKRDFVIINFVARLTTFIPGLNWLRLDECVQQFSVYMLSQVDLSREASHLSRFIYNFRGWKDVSFPKPIYPLIHPAVLVETYEHGESVARYVDGSEGQEKLKAKVAHIGTNALLKMLLVDNFIHADMHPGNILVRPNNTRRGLFRSRKPHIVFLDVGMTAELSKTDRDNLLGFFKAVARRDGRTAAERTLKLSKQQNCPDPQAFIKEVEEAFTFWGTEEGDLVHPADCMHELFEKMRSHRVNIDGNVSTVMFTTLVLEGWQRKLDPGYDVMRTLQTMLLKTDWMKSLSYTIDGLMAP

SEQ ID NO: 2530 - protein, 428 aa, Arabidopsis thaliana
  misc_feature (1)..(428): Ceres Seq. ID no. 14310033
MALLGFACGPRYRQLQYEVLHRTLEKAGPAFIKFGQWIATRPDRFNKDLCLQLSKLHSNAPEHSFAFTKKSIENAFGRKLSEIFEEFDEAPVASGSIAQVHRASLKFQYAGQKVKSSEVAVKVRHPCVEETMKRDFVIINFVARLTTFIPGLNWLRLDECVQQFSVYMLSQVDLSREASHLSRFIYNFRGWKDVSFPKPIYPLIHPAVLVETYEHGESVARYVDGSEGQEKLKAKVAHIGTNALLKMLLVDNFIHADMHPGNILVRPNNTRRGLFRSRKPHIVFLDVGMTAELSKTDRDNLLGFFKAVARRDGRTAAERTLKLSKQQNCPDPQAFIKEVEEAFTFWGTEEGDLVHPADCMHELFEKMRSHRVNIDGNVSTVMFTTLVLEGWQRKLDPGYDVMRTLQTMLLKTDWMKSLSYTIDGLMAP

SEQ ID NO: 2531 - DNA, 1804 bp, Arabidopsis thaliana
  misc_feature (1)..(1804): Ceres Seq. ID no. 14310109
gataactctttctctccctctaccggcgccggagaaattcccgatcaacacaatctcgagacaactgagacgagttcaaattatcgactcaaataggattctagatggagagacgcgccccaaacgcattccctggtgctccaccaccagttccctactatcataacaactacaacaaccctcctcatcatcagattcatccgccgccgccgccgcaccaccatatcgctgccgttggattccacaaatacccccaaaacgacaacagggatcagcgtttcaatcaaccgcattactccggccaacagcagaacatgatcgttgatcagagtaataacgctcctccgccgtttccgccgagtccttgcggtggcagcagcttaaggaagagacggtctcaatcagctacagataatgctgatggtagtattgccaagttatatgttgcgcccatctcaaagacagctactgaatatgatatccgtcaggtctttgaaaaatatggtaatgtcactgagatcattctacccaaagataagatgaccggtgaaagggcagcttactgttttattaagtacaaaaaggtagaagagggtaatgcggctattgcagctttaactgaacagtttacctttcctggggaaatgcttccagtcaaggtccgatttgctgaagctgaacgagaacggattggttttgccccagtgcaacttcctgataaccctaaactatatgttagatgcctcaacaaacaaactacaaaaatggaagtcaatgaggtcttctctaggtacggaatcattgaagatatttatatggcacttgacgacatgaagatttgtcgtgggtatgcatttgttcagttttcttgtaaagagatggcactagcggcaatcaaagctttaaatggactctttaccatacggggttctgatcagcctctgattgttagatttgctgatcctaaaaaaccccgtctaggggaacaaaggtctacctttaacactccacctgcaatgcaacacttcgacccaaattggcattcacaaccatatccccagtgggaaaacaaggaacctgcaccccctagagtcgttcagcatcatgatttctcttcacagccaaatcacttcccgcaccaaaatactcaagcagtatccgaggttcataaaccactgcatcaagatattccacctgctaattttgagaagcatcagaaatctgagactgccagcgtggagactagaagtgatggtcagaagatttctagtcattcaaatgcattccatgaagatcaaaatacagtgagctcagagtgtgactggagtgaacacacttgtcccaatgggaataaatattacttccattgcatcacttgcgaaagcacgtgggagaaaccggacgaatactccatgtatgaaagatggttgaaagagcaaacaaggctacaggatgaaaaaattaaatctcccccgttaaacaatgagagccaagaagcaatcgaaaacagcgagcaagttgagtctgatgtattacaacagaatggtgaactccaacaaccatccttatccacagcggatcaggagaacaatgtagtagtatatccagtaacaacactagctgttgaaacaacatgttcataaaaggtttcttcagtaaaaaaatctactgaggaagctttgtgtgatgagcaatggagagatgaaagctgtaaaacggagaaagaagcagattttacgttttggttagaaacttttagaattggaaaggaaaaaataatcgaaaaattgttttgataaacggt

SEQ ID NO: 2532 - protein, 512 aa, Arabidopsis thaliana
  misc_feature (1)..(512): Ceres Seq. ID no. 14310110
MERRAPNAFPGAPPPVPYYHNNYNNPPHHQIHPPPPPHHHIAAVGFHKYPQNDNRDQRFNQPHYSGQQQNMIVDQSNNAPPPFPPSPCGGSSLRKRRSQSATDNADGSIAKLYVAPISKTATEYDIRQVFEKYGNVTEIILPKDKMTGERAAYCFIKYKKVEEGNAAIAALTEQFTFPGEMLPVKVRFAEAERERIGFAPVQLPDNPKLYVRCLNKQTTKMEVNEVFSRYGIIEDIYMALDDMKICRGYAFVQFSCKEMALAAIKALNGLFTIRGSDQPLIVRFADPKKPRLGEQRSTFNTPPAMQHFDPNWHSQPYPQWENKEPAPPRVVQHHDFSSQPNHFPHQNTQAVSEVHKPLHQDIPPANFEKHQKSETASVETRSDGQKISSHSNAFHEDQNTVSSECDWSEHTCPNGNKYYFHCITCESTWEKPDEYSMYERWLKEQTRLQDEKIKSPPLNNESQEAIENSEQVESDVLQQNGELQQPSLSTADQENNVVVYPVTTLAVETTCS

SEQ ID NO: 2533 - protein, 442 aa, Arabidopsis thaliana
  misc_feature (1)..(442): Ceres Seq. ID no. 14310111
MIVDQSNNAPPPFPPSPCGGSSLRKRRSQSATDNADGSIAKLYVAPISKTATEYDIRQVFEKYGNVTEIILPKDKMTGERAAYCFIKYKKVEEGNAAIAALTEQFTFPGEMLPVKVRFAEAERERIGFAPVQLPDNPKLYVRCLNKQTTKMEVNEVFSRYGIIEDIYMALDDMKICRGYAFVQFSCKEMALAAIKALNGLFTIRGSDQPLIVRFADPKKPRLGEQRSTFNTPPAMQHFDPNWHSQPYPQWENKEPAPPRVVQHHDFSSQPNHFPHQNTQAVSEVHKPLHQDIPPANFEKHQKSETASVETRSDGQKISSHSNAFHEDQNTVSSECDWSEHTCPNGNKYYFHCITCESTWEKPDEYSMYERWLKEQTRLQDEKIKSPPLNNESQEAIENSEQVESDVLQQNGELQQPSLSTADQENNVVVYPVTTLAVETTCS

SEQ ID NO: 2534 - protein, 367 aa, Arabidopsis thaliana
  misc_feature (1)..(367): Ceres Seq. ID no. 14310112
MTGERAAYCFIKYKKVEEGNAAIAALTEQFTFPGEMLPVKVRFAEAERERIGFAPVQLPDNPKLYVRCLNKQTTKMEVNEVFSRYGIIEDIYMALDDMKICRGYAFVQFSCKEMALAAIKALNGLFTIRGSDQPLIVRFADPKKPRLGEQRSTFNTPPAMQHFDPNWHSQPYPQWENKEPAPPRVVQHHDFSSQPNHFPHQNTQAVSEVHKPLHQDIPPANFEKHQKSETASVETRSDGQKISSHSNAFHEDQNTVSSECDWSEHTCPNGNKYYFHCITCESTWEKPDEYSMYERWLKEQTRLQDEKIKSPPLNNESQEAIENSEQVESDVLQQNGELQQPSLSTADQENNVVVYPVTTLAVETTCS

SEQ ID NO: 2535 - DNA, 2524 bp, Arabidopsis thaliana
  misc_feature (1)..(2524): Ceres Seq. ID no. 14310132
aaaaacacccctcctcgattgtcgaacagtccaggttcctgaaatgttctcgtcagggcgacattagggtttcttcattcccgtccttcagattcgtatttgaaacaggaaggagagaaaaatgggtatacaagggcttttgccgttgttgaaatcgataatggtaccgattcatatcaaggagctcgagggttgtatcgtcgccgtcgatacatattcatggctacacaaaggggctttatcttgtagccgagagctctgcaagggattacccaccaagaggcatattcaatactgtatgcatagagtgaatttacttcgccatcatggagtgaagcctatcatggtctttgatggaggtccgttaccgatgaaactagaacaagagaataagcgtgctaggtccagaaaggaaaatcttgctcgtgcattggagcatgaagcaaatggaaattcctcagctgcttatgagtgctactcaaaggccgtagatatttcaccttctattgcacatgagttgatacaggttctgaggcaggagaatgttgattacgttgttgctccttacgaagctgatgcgcagatggcattcttagctattactaagcaagttgatgcgattatcactgaggattctgatctcataccttttggctgcccaagaatcattttcaaaatggacaagtttggtcatggtgttgagtttcaagcctccaagctacccaaaaataaggatctcagtctatcaggattttcaagccaaatgcttctcgaaatgtgcatattaagtggctgcgattatttgcagtcacttccaggaatgggactcaaaagagcacatgcactcattacaaaattcaaaagctatgacagggtaattaagcacttaaagtacagcacagtttcagttcctcctctttatgaagagtcattcaagagagctttactgactttcaagcatcaacgtgtctatgacccaaatgctgaagatatcatacacttgtgtgacatttctgacaaccttggtgaagattcagattttgttggcccatcgatgccacaagatattgctaagggtatagcactaggccagcttgatcccttcacacagttgccattccaggctgagagtgttactcctaaatcggctgttgatgatatatcccgtcccaaaagtttcaaacctgaaactgtaaagaaaaagcttgatttgccagtccaaaaaaaccttctcaccaagtacttctgctttgcgtctgttgaggcaaaaagaaaattcaaggctcctaggatatcaccaatgtctctgaccccaactgatgagtctccaagcattcctgatgacaacacaccagatttagatgctctttcaagccagacaacaaatgaatccccggtttatagcttgggtgagaatccatgtgttagcgaagttgcagagaaaagagattcacccgatgacgatgcagtggaaaggaatcacaaggaccttcatcataaatactgcgaacgggaagtggataggccgaagtcagatagtttgaaggttatagtaagaagcaagtattttaagcagaaacaggaggacaaaagtctgaaacaatcgatcccatgtcttaatgattgctctgtgattggtcagagaaaggctgttaaaactgtgattaacatgtcaagcgcgtctaaaagagaagagagtcacagagctatagcaacaagtccatgtttacaccatgaccgaatctacaacgatcatgaagatgctaaagaagcgagtttctctgccatgaacgaggtggctgagaggacaataaacacccacaagattaaccatcagatcaatgaagaagaacagaacccatccgttgaaattccttctgcctttagtactcccgagaatgttatacctctctcttccattgctattgatagttgccatggagttgcaacagggaagaggaagcttgactcagatgaaaaccttcacaaggaaaatttgaaatccaagcacatgcgcatggatgaaactgatactgctcttaatgcagaaacaccattggaaaccgatgatgttgagaagtttggatcgaacatttcacatatagggcattactcagaaatagcagagaaatcagtggaaagatttgtctcagctatatcgtctttcaaatattctgggactggctctcgtgctagcggtctccgtgcccctctcaaagatatccgcaacacttgtccgtccaaagggttatctcttaaaccagacatcagcaagtttggctatgcgtcaagcaaccgacacatggtgacaaagtcaaggagaatgtgagctcagatttgtaagttaaccatctctttagagccacatgtgagagctttagctttagaattaacttcttggtcgcatgatgatatttttggtgttgtgtctgtattagctttctacttactgtgcatagcattcttgttcaaagacacttcacacaacagttggattcataaatgaaacaactttcaacttgtc

SEQ ID NO: 2536 - protein, 735 aa, Arabidopsis thaliana
  misc_feature (1)..(735): Ceres Seq. ID no. 14310133
MGIQGLLPLLKSIMVPIHIKELEGCIVAVDTYSWLHKGALSCSRELCKGLPTKRHIQYCMHRVNLLRHHGVKPIMVFDGGPLPMKLEQENKRARSRKENLARALEHEANGNSSAAYECYSKAVDISPSIAHELIQVLRQENVDYVVAPYEADAQMAFLAITKQVDAIITEDSDLIPFGCPRIIFKMDKFGHGVEFQASKLPKNKDLSLSGFSSQMLLEMCILSGCDYLQSLPGMGLKRAHALITKFKSYDRVIKHLKYSTVSVPPLYEESFKRALLTFKHQRVYDPNAEDIIHLCDISDNLGEDSDFVGPSMPQDIAKGIALGQLDPFTQLPFQAESVTPKSAVDDISRPKSFKPETVKKKLDLPVQKNLLTKYFCFASVEAKRKFKAPRISPMSLTPTDESPSIPDDNTPDLDALSSQTTNESPVYSLGENPCVSEVAEKRDSPDDDAVERNHKDLHHKYCEREVDRPKSDSLKVIVRSKYFKQKQEDKSLKQSIPCLNDCSVIGQRKAVKTVINMSSASKREESHRAIATSPCLHHDRIYNDHEDAKEASFSAMNEVAERTINTHKINHQINEEEQNPSVEIPSAFSTPENVIPLSSIAIDSCHGVATGKRKLDSDENLHKENLKSKHMRMDETDTALNAETPLETDDVEKFGSNISHIGHYSEIAEKSVERFVSAISSFKYSGTGSRASGLRAPLKDIRNTCPSKGLSLKPDISKFGYASSNRHMVTKSRRM

SEQ ID NO: 2537 - protein, 722 aa, Arabidopsis thaliana
  misc_feature (1)..(722): Ceres Seq. ID no. 14310134
MVPIHIKELEGCIVAVDTYSWLHKGALSCSRELCKGLPTKRHIQYCMHRVNLLRHHGVKPIMVFDGGPLPMKLEQENKRARSRKENLARALEHEANGNSSAAYECYSKAVDISPSIAHELIQVLRQENVDYVVAPYEADAQMAFLAITKQVDAIITEDSDLIPFGCPRIIFKMDKFGHGVEFQASKLPKNKDLSLSGFSSQMLLEMCILSGCDYLQSLPGMGLKRAHALITKFKSYDRVIKHLKYSTVSVPPLYEESFKRALLTFKHQRVYDPNAEDIIHLCDISDNLGEDSDFVGPSMPQDIAKGIALGQLDPFTQLPFQAESVTPKSAVDDISRPKSFKPETVKKKLDLPVQKNLLTKYFCFASVEAKRKFKAPRISPMSLTPTDESPSIPDDNTPDLDALSSQTTNESPVYSLGENPCVSEVAEKRDSPDDDAVERNHKDLHHKYCEREVDRPKSDSLKVIVRSKYFKQKQEDKSLKQSIPCLNDCSVIGQRKAVKTVINMSSASKREESHRAIATSPCLHHDRIYNDHEDAKEASFSAMNEVAERTINTHKINHQINEEEQNPSVEIPSAFSTPENVIPLSSIAIDSCHGVATGKRKLDSDENLHKENLKSKHMRMDETDTALNAETPLETDDVEKFGSNISHIGHYSEIAEKSVERFVSAISSFKYSGTGSRASGLRAPLKDIRNTCPSKGLSLKPDISKFGYASSNRHMVTKSRRM

SEQ ID NO: 2538 - protein, 676 aa, Arabidopsis thaliana
  misc_feature (1)..(676): Ceres Seq. ID no. 14310135
MHRVNLLRHHGVKPIMVFDGGPLPMKLEQENKRARSRKENLARALEHEANGNSSAAYECYSKAVDISPSIAHELIQVLRQENVDYVVAPYEADAQMAFLAITKQVDAIITEDSDLIPFGCPRIIFKMDKFGHGVEFQASKLPKNKDLSLSGFSSQMLLEMCILSGCDYLQSLPGMGLKRAHALITKFKSYDRVIKHLKYSTVSVPPLYEESFKRALLTFKHQRVYDPNAEDIIHLCDISDNLGEDSDFVGPSMPQDIAKGIALGQLDPFTQLPFQAESVTPKSAVDDISRPKSFKPETVKKKLDLPVQKNLLTKYFCFASVEAKRKFKAPRISPMSLTPTDESPSIPDDNTPDLDALSSQTTNESPVYSLGENPCVSEVAEKRDSPDDDAVERNHKDLHHKYCEREVDRPKSDSLKVIVRSKYFKQKQEDKSLKQSIPCLNDCSVIGQRKAVKTVINMSSASKREESHRAIATSPCLHHDRIYNDHEDAKEASFSAMNEVAERTINTHKINHQINEEEQNPSVEIPSAFSTPENVIPLSSIAIDSCHGVATGKRKLDSDENLHKENLKSKHMRMDETDTALNAETPLETDDVEKFGSNISHIGHYSEIAEKSVERFVSAISSFKYSGTGSRASGLRAPLKDIRNTCPSKGLSLKPDISKFGYASSNRHMVTKSRRM

SEQ ID NO: 2539 - DNA, 2894 bp, Arabidopsis thaliana
  misc_feature (1)..(2894): Ceres Seq. ID no. 14310206
gaattacttttatccattttctctgtatatatatagaaagcaaaagaaagcattttcatcacctaccatcctctgttttcatttcctctgtttttcaaacttcctctgttctctcatggctccacttcacgaatctctgtcatcaatcaacgatgtaatcgaatccaaacctctttttgttccaataactaagccaatcttgcagccaaactcatttaacctatccgaagggtctctctgtgccaaagactctactccaatcctctttgatgttcctcaaaacgtaactttcacaccattctcatctcactccatatccactgatgctcctctcccaatcctcctccgagttcaagccaacgctcacaaaggagggtttctcggattcaccaaagaatcaccctctgatcgtctcacaaactccttgggaagattcgaagacagagagtttctcagtcttttccggttcaaaatgtggtggtcgacggcttggatcgggaaatcagggtcggatcttcaagccgagactcagtgggtgatgctaaagattcctgagatcgattcctacgtggccatcataccaaccattgaaggagcttttagggcttcacttactcctggtgagaaaggtaatgtcttgatttgtgcagagagtggctcaactaaagtaaaagagtcatctttcaaatccattgcctacattcacatttgtgacaacccctataacctcatgaaagaggcttttagtgcacttcgtgttcatatgaacactttcaagcatctagaagagaagaagcttccgaaaatcgtcgataagtttggatggtgcacttgggatgcttgctacttgaccgttgatcctgcaaccatttggactggagttaaggagtttgaagatggtggggtgtgtccgaagtttgtcatcattgatgatggatggcaaagtattaactttgatggtgatgagctagacaaagacgctgagaatcttgttcttggtggggagcaaatgactgcgaggcttaccagcttcaaggagtgtaagaagtttagaaactataaaggtggatcctttataacatctgatgcatctcacttcaatcctctcaagccgaagatgcttatctacaaagcgaccgagcgaattcaggcgattatattgagacggaagttggttaaggagtctggggaacaagatctgaccgaacttgatgaaaagatcaagattttgagtgaagaactcaatgcaatgtttgatgaggttgagaaagaagagtctttgggttctgatgatgtttctggctcaggtatggcggctttcacaaaggatttgaggttaaggtttaagagtttagatgatatatatgtgtggcatgctctttgtggtgcttggaatggtgttaggcctgaaaccatgatggatttgaaggccaaggttgctccttttgagctttcacctagtctaggcgctacgatggctgatctcgcagtcgacaaggttgtagaagctgggattggtcttgttcatccttctaaagctcatgaattctacgactcgatgcactcttatcttgctagtgttggtgttacaggagccaagattgatgttttccaaaccttggagtcactagcagaagaacatggaggacgagtggagcttgctaaagcttactacgatggtctgaccgaatccatgatcaagaattttaatggaactgatgtcattgcgagtatgcaacagtgcaatgagttcttcttccttgccacaaagcaaatctctattggcagagttggtgatgatttttggtgacaagacccatatggtgacccacaaggagtatattggctacaaggagttcacatgattcactgttcttacaacagtatttggatgggtcaaatgattcaaccagattgggacatgttccaatcagaccatgtctgtgccgagtaccacgccgcatctcgagccatttgcggtgggcctgtctatctcaatgaccatcttggcaaagcctcacataactttgatctcatcaagaaacttgctttctttgatggtaccatcccaaggtgtgtccactatgctcttcccactagagattcgctcttcaagaaccctttgtttgacaaagagtcaatcctcaagatcttcaacttcaacaagtttggaggagtgattggaacatttaactgtcaaggtgctgggtggagcccagaggagcataggttcaaaggatacaaagaatgttacacgacagtttcgggaacagttcatgtctcggacattgaatgggatcagaatccagaagctgcaggctctcaggtgacctacactggagattacttggtttacaagcaacaatctgaagaaatccttttcatgaactcgaaatcagaagcgatgaagataacccttgagccatccgcgtttgacctgttgagtttcgtgccagtcacggaacttgtaagttcaggggttagattcgcacctctagggttgatcaacatgttcaactgcgtcggaacagtccaagacatgaaggttactggtgataacagcataagagtggacgtgaaaggcgaaggaagattcatggcgtattcgagttcagctccggtgaagtgttacttgaacgacaaggaagctgagtttaagtgggaagaagaaactggtaaactcagtttctttgttccttgggttgaagaatctggtggcatctctcatctgtctttcaccttttaataatttgtttggatttttgtttttcgttttccttttcttgcattttgttatcagaagttgggttgtcaatttctgtttggtgttttacttttcaatttggagacttctcaaacaaattttaatatcaaatggattttctttgtcggtt

SEQ ID NO: 2540 - protein, 602 aa, Arabidopsis thaliana
  misc_feature (1)..(602): Ceres Seq. ID no. 14310207
NYFYPFSLYIYRKQKKAFSSPTILCFHFLCFSNFLCSLMAPLHESLSSINDVIESKPLFVPITKPILQPNSFNLSEGSLCAKDSTPILFDVPQNVTFTPFSSHSISTDAPLPILLRVQANAHKGGFLGFTKESPSDRLTNSLGRFEDREFLSLFRFKMWWSTAWIGKSGSDLQAETQWVMLKIPEIDSYVAIIPTIEGAFRASLTPGEKGNVLICAESGSTKVKESSFKSIAYIHICDNPYNLMKEAFSALRVHMNTFKHLEEKKLPKIVDKFGWCTWDACYLTVDPATIWTGVKEFEDGGVCPKFVIIDDGWQSINFDGDELDKDAENLVLGGEQMTARLTSFKECKKFRNYKGGSFITSDASHFNPLKPKMLIYKATERIQAIILRRKLVKESGEQDLTELDEKIKILSEELNAMFDEVEKEESLGSDDVSGSGMAAFTKDLRLRFKSLDDIYVWHALCGAWNGVRPETMMDLKAKVAPFELSPSLGATMADLAVDKVVEAGIGLVHPSKAHEFYDSMHSYLASVGVTGAKIDVFQTLESLAEEHGGRVELAKAYYDGLTESMIKNFNGTDVIASMQQCNEFFFLATKQISIGRVGDDFW

SEQ ID NO: 2541 - protein, 564 aa, Arabidopsis thaliana
  misc_feature (1)..(564): Ceres Seq. ID no. 14310208
MAPLHESLSSINDVIESKPLFVPITKPILQPNSFNLSEGSLCAKDSTPILFDVPQNVTFTPFSSHSISTDAPLPILLRVQANAHKGGFLGFTKESPSDRLTNSLGRFEDREFLSLFRFKMWWSTAWIGKSGSDLQAETQWVMLKIPEIDSYVAIIPTIEGAFRASLTPGEKGNVLICAESGSTKVKESSFKSIAYIHICDNPYNLMKEAFSALRVHMNTFKHLEEKKLPKIVDKFGWCTWDACYLTVDPATIWTGVKEFEDGGVCPKFVIIDDGWQSINFDGDELDKDAENLVLGGEQMTARLTSFKECKKFRNYKGGSFITSDASHFNPLKPKMLIYKATERIQAIILRRKLVKESGEQDLTELDEKIKILSEELNAMFDEVEKEESLGSDDVSGSGMAAFTKDLRLRFKSLDDIYVWHALCGAWNGVRPETMMDLKAKVAPFELSPSLGATMADLAVDKVVEAGIGLVHPSKAHEFYDSMHSYLASVGVTGAKIDVFQTLESLAEEHGGRVELAKAYYDGLTESMIKNFNGTDVIASMQQCNEFFFLATKQISIGRVGDDFW

SEQ ID NO: 2542 - protein, 445 aa, Arabidopsis thaliana
  misc_feature (1)..(445): Ceres Seq. ID no. 14310209
MWWSTAWIGKSGSDLQAETQWVMLKIPEIDSYVAIIPTIEGAFRASLTPGEKGNVLICAESGSTKVKESSFKSIAYIHICDNPYNLMKEAFSALRVHMNTFKHLEEKKLPKIVDKFGWCTWDACYLTVDPATIWTGVKEFEDGGVCPKFVIIDDGWQSINFDGDELDKDAENLVLGGEQMTARLTSFKECKKFRNYKGGSFITSDASHFNPLKPKMLIYKATERIQAIILRRKLVKESGEQDLTELDEKIKILSEELNAMFDEVEKEESLGSDDVSGSGMAAFTKDLRLRFKSLDDIYVWHALCGAWNGVRPETMMDLKAKVAPFELSPSLGATMADLAVDKVVEAGIGLVHPSKAHEFYDSMHSYLASVGVTGAKIDVFQTLESLAEEHGGRVELAKAYYDGLTESMIKNFNGTDVIASMQQCNEFFFLATKQISIGRVGDDFW

SEQ ID NO: 2543 - DNA, 1490 bp, Arabidopsis thaliana
  misc_feature (1)..(1490): Ceres Seq. ID no. 14310210
gatctctgtctctctctctccgtatccaaaaagagaaagaaaaaaaatctcaaatcaaagaccaagccagtcaccggaaaatgctgacgtgtatagctcgttcgaagcgagcaggcgatgaatcctccggtcaaccagacgatccagattctaaaaacgccaaatctctaacatctcagctcaaagacatggctctgaaagcatcaggagcttaccggcattgcacgccgtgtacggcggcgcaaggtcagggacaaggacaaggcccgatcaagaacaatccgtcgtcgtcggcggtaaagtcggatttcgaatcggatcaacggtttaaaatgctttacggaagatcaaacagttcgattacagctacggcggcggcggcggcgacgcaacaacagcctagggtttggggaaaggagatggaagcgagacttaaaggaatatcgagcggcgaagcgactccgaaatcggcgagtgggagaaaccgggtcgacccgattgtgttcgtggaggagaaagaacctaaagaatgggttgctcaggttgagcccggagttctcataaccttcgtttctcttcccggcggtggtaatgatctcaagcggatacgtttcagccgagacatgttcaacaagttacaagctcaacgatggtgggcagataactatgacaaagtaatggaactttacaatgttcaaaaactaagccgccaagctttcccgcttcccacaccgcctagatccgaagacgagaatgcaaaagtggagtaccatccagaagacactcctgcaacaccgcctctaaacaaagaacggttgcctcgtactatccatcgtccacctggattggctgcttactcatcctcagattcactcgaccataattcaatgcagagccagcagttctatgactctggtctactcaactcaactcctaaagtttcaagcatcagtgtagccaagacagaaacttcttccatagatgcttccataagaagcagctcgtcgagagatgcagaccggtcagaggaaatgtcggtaagcaatgcgagtgatgttgacaacgaatgggtggagcaagatgagcctggcgtttatatcaccattaaagttttaccaggtgggaaaagagagcttcgaagagtcagattcagccgagagagattcggggagatgcacgcgagattatggtgggaagagaacagggcaaggatacatgaacaatacttgtgatcataaatctaagagttttgttttttcctcattctctcggtatacagtctttttttccagctcaagtaaattcttccacaggtactcattgtgcctcccagaaatctcaaaatatcaattgtgggatatgttttaaggaggtttcttattttcttccttcaaaaaaattgagaaagcttggaaaagataagatgttgtctcctttgctcaatatgtgtatcctttagttctttaaaaaaaatacgttcttcaaattag

SEQ ID NO: 2544 - protein, 409 aa, Arabidopsis thaliana
  misc_feature (1)..(409): Ceres Seq. ID no. 14310211
SLSLSLRIQKEKEKKSQIKDQASHRKMLTCIARSKRAGDESSGQPDDPDSKNAKSLTSQLKDMALKASGAYRHCTPCTAAQGQGQGQGPIKNNPSSSAVKSDFESDQRFKMLYGRSNSSITATAAAAATQQQPRVWGKEMEARLKGISSGEATPKSASGRNRVDPIVFVEEKEPKEWVAQVEPGVLITFVSLPGGGNDLKRIRFSRDMFNKLQAQRWWADNYDKVMELYNVQKLSRQAFPLPTPPRSEDENAKVEYHPEDTPATPPLNKERLPRTIHRPPGLAAYSSSDSLDHNSMQSQQFYDSGLLNSTPKVSSISVAKTETSSIDASIRSSSSRDADRSEEMSVSNASDVDNEWVEQDEPGVYITIKVLPGGKRELRRVRFSRERFGEMHARLWWEENRARIHEQYL

SEQ ID NO: 2545 - protein, 383 aa, Arabidopsis thaliana
  misc_feature (1)..(383): Ceres Seq. ID no. 14310212
MLTCIARSKRAGDESSGQPDDPDSKNAKSLTSQLKDMALKASGAYRHCTPCTAAQGQGQGQGPIKNNPSSSAVKSDFESDQRFKMLYGRSNSSITATAAAAATQQQPRVWGKEMEARLKGISSGEATPKSASGRNRVDPIVFVEEKEPKEWVAQVEPGVLITFVSLPGGGNDLKRIRFSRDMFNKLQAQRWWADNYDKVMELYNVQKLSRQAFPLPTPPRSEDENAKVEYHPEDTPATPPLNKERLPRTIHRPPGLAAYSSSDSLDHNSMQSQQFYDSGLLNSTPKVSSISVAKTETSSIDASIRSSSSRDADRSEEMSVSNASDVDNEWVEQDEPGVYITIKVLPGGKRELRRVRFSRERFGEMHARLWWEENRARIHEQYL

SEQ ID NO: 2546 - protein, 347 aa, Arabidopsis thaliana
  misc_feature (1)..(347): Ceres Seq. ID no. 14310213
MALKASGAYRHCTPCTAAQGQGQGQGPIKNNPSSSAVKSDFESDQRFKMLYGRSNSSITATAAAAATQQQPRVWGKEMEARLKGISSGEATPKSASGRNRVDPIVFVEEKEPKEWVAQVEPGVLITFVSLPGGGNDLKRIRFSRDMFNKLQAQRWWADNYDKVMELYNVQKLSRQAFPLPTPPRSEDENAKVEYHPEDTPATPPLNKERLPRTIHRPPGLAAYSSSDSLDHNSMQSQQFYDSGLLNSTPKVSSISVAKTETSSIDASIRSSSSRDADRSEEMSVSNASDVDNEWVEQDEPGVYITIKVLPGGKRELRRVRFSRERFGEMHARLWWEENRARIHEQYL

SEQ ID NO: 2547 - DNA, 2141 bp, Arabidopsis thaliana
  misc_feature (1)..(2141): Ceres Seq. ID no. 14310346
gagattgtaacgcctcacaatccttcctacccgtgagtccgtgaccgattgtgtatcatccatcttctttcttcttctttcttcttctttcttcttcttttatatataaaccaaaatataattcgtgaagactttcactttctccttgccactttttgacgattcacatgcaccatccaatattttagtgcccttttcacgacatatctgtgtctgtatccaattttcttatttactacttcttttttctatttatatatacaaaaagaatcaaagagagagacgaattttcgaggtaaggtatctatcgactttctatcttcctccacctttgtttgttgtcaccaccacactacgctaatcattgccacacacatgcataattctctccaaccatctaaaagtcccactttagcattcttctgtttgtaattttatctcagagcttgcttcatgggcttttgagttttctctctgtttccaaaaaacaatggaaccggagaagaatccgaccacagtattgagagccattacaagaccttcgtgggcgtttcttctccttgttttcaccgtcttagcgattctctctctccaaatctcttccaattcttttctccctctctggatcccgacttctcaatatgacgaccctgttacctgctccgggtttttcaatcacgacccgttccctaaccggatcgttatgtcgattaccgatttcggcggtgttggagacggaaagacgtcgaacacggccgctttccgccgcgccgtaaggcaccttgaaggttttgcggcggagggtggggcccagctcaatgtcccggagggcacgtggctttctggaagcttcaacctcaccagcaatttcacgctctttctcgaacgcggcgctctcattttgggatccaaggacctagacgaatggccgataatagagccattgccttcttatggaagagggagagagagacctggtggtagacacatcagcctcattcatggagacaatctcactaatgttgtcattacaggagaaaatgggacaattgatggacaggggaaaatgtggtgggagttatggtggaacagaacattggtgcatacgagaggccatcttattgaactcaagaactctcataatatcctcatctctaacctcactttgctcaattctcctttctggacaatccatcctgtttattgcagtaatgttgttattagaaatatgaccatccttgctccgatgaatgctcctaacaccgacggtatagatccagactcaagcaccaatgtctgcattgaggattgttacatcgaaagtggtgatgatctagtagctgtaaagagcgggtgggatcaatatggaatggctgtggcacgtccgagttcaaacatcgtaatccgaagaatctctggtactactcgcacttgttcaggagttgggataggcagtgagatgtctggtgggattttcaacataaccgttgaagatattcacgtctgggattctgcggctgggctccgcataaaaacagataaagggagaggtgggtacatttcgaatatcacctttaataatgtgttattggagaaagtgaaagttccgattagattcagcagtggctcaaatgatcactcagacgataaatgggatccgaaagctcttccgagagtaaaagggatttacattagcaatgttgtgagtctgaattcgagaaaggcccctatgttgctcggtgttgaaggcacatcgtttcaagacgtatgcttgaggaatgttacgcttcttgggttaccgaagaccgagaaatggaaatgcaaggatgtttctggttacgcgagtgacgtttttcctctgtcatgtccacagttgttgcagaagaaaggttcaatagctcagtgttcatatagatgaggtttgagaaagtttttttttttgggtaaagatagagagaggaggccatgagttcgatcaagtttttttgagtgaagattcatggtcacttacgaaaaatgttaaatcttggatttcctttttcacatttttttgttcgtgttttgaatcttgattctttttatacatacattgtgtaacgaaatatactttgaattattccataaaagattttttcttattc

SEQ ID NO: 2548 - protein, 475 aa, Arabidopsis thaliana
  misc_feature (1)..(475): Ceres Seq. ID no. 14310347
MEPEKNPTTVLRAITRPSWAFLLLVFTVLAILSLQISSNSFLPLWIPTSQYDDPVTCSGFFNHDPFPNRIVMSITDFGGVGDGKTSNTAAFRRAVRHLEGFAAEGGAQLNVPEGTWLSGSFNLTSNFTLFLERGALILGSKDLDEWPIIEPLPSYGRGRERPGGRHISLIHGDNLTNVVITGENGTIDGQGKMWWELWWNRTLVHTRGHLIELKNSHNILISNLTLLNSPFWTIHPVYCSNVVIRNMTILAPMNAPNTDGIDPDSSTNVCIEDCYIESGDDLVAVKSGWDQYGMAVARPSSNIVIRRISGTTRTCSGVGIGSEMSGGIFNITVEDIHVWDSAAGLRIKTDKGRGGYISNITFNNVLLEKVKVPIRFSSGSNDHSDDKWDPKALPRVKGIYISNVVSLNSRKAPMLLGVEGTSFQDVCLRNVTLLGLPKTEKWKCKDVSGYASDVFPLSCPQLLQKKGSIAQCSYR

SEQ ID NO: 2549 - protein, 404 aa, Arabidopsis thaliana
  misc_feature (1)..(404): Ceres Seq. ID no. 14310348
MSITDFGGVGDGKTSNTAAFRRAVRHLEGFAAEGGAQLNVPEGTWLSGSFNLTSNFTLFLERGALILGSKDLDEWPIIEPLPSYGRGRERPGGRHISLIHGDNLTNVVITGENGTIDGQGKMWWELWWNRTLVHTRGHLIELKNSHNILISNLTLLNSPFWTIHPVYCSNVVIRNMTILAPMNAPNTDGIDPDSSTNVCIEDCYIESGDDLVAVKSGWDQYGMAVARPSSNIVIRRISGTTRTCSGVGIGSEMSGGIFNITVEDIHVWDSAAGLRIKTDKGRGGYISNITFNNVLLEKVKVPIRFSSGSNDHSDDKWDPKALPRVKGIYISNVVSLNSRKAPMLLGVEGTSFQDVCLRNVTLLGLPKTEKWKCKDVSGYASDVFPLSCPQLLQKKGSIAQCSYR

SEQ ID NO: 2550 - protein, 283 aa, Arabidopsis thaliana
  misc_feature (1)..(283): Ceres Seq. ID no. 14310349
MWWELWWNRTLVHTRGHLIELKNSHNILISNLTLLNSPFWTIHPVYCSNVVIRNMTILAPMNAPNTDGIDPDSSTNVCIEDCYIESGDDLVAVKSGWDQYGMAVARPSSNIVIRRISGTTRTCSGVGIGSEMSGGIFNITVEDIHVWDSAAGLRIKTDKGRGGYISNITFNNVLLEKVKVPIRFSSGSNDHSDDKWDPKALPRVKGIYISNVVSLNSRKAPMLLGVEGTSFQDVCLRNVTLLGLPKTEKWKCKDVSGYASDVFPLSCPQLLQKKGSIAQCSYR

SEQ ID NO: 2551 - DNA, 1670 bp, Arabidopsis thaliana
  misc_feature (1)..(1670): Ceres Seq. ID no. 14313190
atacgtgactcatcgtctttttcactcccacacgttctgctccagcgatactgtgagagaatctctgtgtggttctgaattcttaggctggaattgaattctgaaatggcggaggagtacaaggaagcgttgttggagaagcagaactatcacgacggatgtcccggctgtaaggtggagcagatgaagcagctccggcgaggatatccttacctcgagctttccttcgtttggattatcgtcctctccacttctctaccaatttcctcactctatcccttcctctactatatgattgaggattttggtgtcgcaaagacggagaaagatattgggttttatgctggttttgttggttgctcttttatgcttggaagagcactgacttctgtgttctggggaattgtggctgatcgttatggaagaaaacccattatactcttgggaactatctcaattgcaattttcaacgctctttttggcttgagctcaaatttttggatagcaattggcacaaggtttcttcttgggagtttcaactgtttgcttggaacaatgaaggcctatgcatcagaaatatttcgtgatgaatatcaagctaccgcaatgtcagctgttagtactgcttggggcattggactgatcattggccctgctcttggtggttttttagctcagccggcagacaaatatccaaatgtgttctcccaagaatctctttttggcagattccggtatgcattgccttgctttacgatttcagcttttgccttgcttgtgacagtactatgctgcttcatcccggagacactgcacaatcataagctggacagcttatcacatgatgattcatacgatatacttgaagctgcatctcatgaatcatctccttctaccgggaaggcaggaaaaaacgaaagaaaggcttctcagtctctcttgaagaattggccgctgatgtcatctatcattgtgtattgtgttctgtgtcttcatgatactgcatactcggagatatttgcactatgggctaacagtccaaggaagtatggaggtctgagctactcaacgaatgaagtcggtacagttcttgctatctcaggtctcggcctattctcttttcaggtatttgtttatcctttggctgagaaactgctaggacctgttctggtcacccgatatgctggggcactgatgatacctatacaaatgagttatccatttatagcaggcttgtcaggtctcagtctaagcttgatgttaaattgtgcatcaatcctcataaatgtcttaagtgtgtctgccataaccggcctgttgatccttcaaaatagagcagtggatcagagccaaagaggggcggctaatggaatagctatgactgcgatgtctctatttaagacagttggaccagctggtgctggcatcttattttcttggagtgagaggcgactaaacgctgcatttctaccaggatcgcatatggtattcttcgtcttgaatgtgatagtagtggtcggagtagctctgacattcaagccatttctaacgacgggtcgaagatgaaattcatttgaattggtaagatagggaatgtatggacaagttgattcttttcatttcagatacgaaagaaaccggtaataaaatttcactaaccttaggatttc

SEQ ID NO: 2552 - protein, 486 aa, Arabidopsis thaliana
  misc_feature (1)..(486): Ceres Seq. ID no. 14313191
MAEEYKEALLEKQNYHDGCPGCKVEQMKQLRRGYPYLELSFVWIIVLSTSLPISSLYPFLYYMIEDFGVAKTEKDIGFYAGFVGCSFMLGRALTSVFWGIVADRYGRKPIILLGTISIAIFNALFGLSSNFWIAIGTRFLLGSFNCLLGTMKAYASEIFRDEYQATAMSAVSTAWGIGLIIGPALGGFLAQPADKYPNVFSQESLFGRFRYALPCFTISAFALLVTVLCCFIPETLHNHKLDSLSHDDSYDILEAASHESSPSTGKAGKNERKASQSLLKNWPLMSSIIVYCVLCLHDTAYSEIFALWANSPRKYGGLSYSTNEVGTVLAISGLGLFSFQVFVYPLAEKLLGPVLVTRYAGALMIPIQMSYPFIAGLSGLSLSLMLNCASILINVLSVSAITGLLILQNRAVDQSQRGAANGIAMTAMSLFKTVGPAGAGILFSWSERRLNAAFLPGSHMVFFVLNVIVVVGVALTFKPFLTTGRR

SEQ ID NO: 2553 - protein, 460 aa, Arabidopsis thaliana
  misc_feature (1)..(460): Ceres Seq. ID no. 14313192
MKQLRRGYPYLELSFVWIIVLSTSLPISSLYPFLYYMIEDFGVAKTEKDIGFYAGFVGCSFMLGRALTSVFWGIVADRYGRKPIILLGTISIAIFNALFGLSSNFWIAIGTRFLLGSFNCLLGTMKAYASEIFRDEYQATAMSAVSTAWGIGLIIGPALGGFLAQPADKYPNVFSQESLFGRFRYALPCFTISAFALLVTVLCCFIPETLHNHKLDSLSHDDSYDILEAASHESSPSTGKAGKNERKASQSLLKNWPLMSSIIVYCVLCLHDTAYSEIFALWANSPRKYGGLSYSTNEVGTVLAISGLGLFSFQVFVYPLAEKLLGPVLVTRYAGALMIPIQMSYPFIAGLSGLSLSLMLNCASILINVLSVSAITGLLILQNRAVDQSQRGAANGIAMTAMSLFKTVGPAGAGILFSWSERRLNAAFLPGSHMVFFVLNVIVVVGVALTFKPFLTTGRR

SEQ ID NO: 2554 - protein, 424 aa, Arabidopsis thaliana
  misc_feature (1)..(424): Ceres Seq. ID no. 14313193
MIEDFGVAKTEKDIGFYAGFVGCSFMLGRALTSVFWGIVADRYGRKPIILLGTISIAIFNALFGLSSNFWIAIGTRFLLGSFNCLLGTMKAYASEIFRDEYQATAMSAVSTAWGIGLIIGPALGGFLAQPADKYPNVFSQESLFGRFRYALPCFTISAFALLVTVLCCFIPETLHNHKLDSLSHDDSYDILEAASHESSPSTGKAGKNERKASQSLLKNWPLMSSIIVYCVLCLHDTAYSEIFALWANSPRKYGGLSYSTNEVGTVLAISGLGLFSFQVFVYPLAEKLLGPVLVTRYAGALMIPIQMSYPFIAGLSGLSLSLMLNCASILINVLSVSAITGLLILQNRAVDQSQRGAANGIAMTAMSLFKTVGPAGAGILFSWSERRLNAAFLPGSHMVFFVLNVIVVVGVALTFKPFLTTGRR

SEQ ID NO: 2555 - DNA, 2380 bp, Arabidopsis thaliana
  misc_feature (1)..(2380): Ceres Seq. ID no. 14315747
ggcttttcttctttcttacttaaaaagtcgctatctagtcaaatcggagaagacggtgtttcattgaattcgaatttgtttgtcgattcgattttaccgtcgccggtaatggatccggagtcgaaaaatgcgggagtctctgttgtcgttaatctcgacagtgacagtgacagtgacaatgacgacggagtaggaggaagaggagcttttcgaagcatggcgtccctaatggacaaacatcaagttccaagtacgactgctgacgcgacggttgctcctcgagaaaacctagagtgccggagcttttggaaggccggagaaaacttcgtgatccctaccggtgttactaatccagctgctccaggtatggttgagcatgctcgtgttcatccaaagtttcttcactcgaatgctacttcacacaaataggcttttggagcaatagccgagctaattgacaatgctgttgacgagatacaaaatggtgctacgtttgttaagattgataagatcaatattgtcaaagataattccccagctttagttttccaagatgatggcggtggaatggatcccgatgggctcagaaaatgcatgagcttaggctactcatcaaagaagtctaatacgacgattggacagtatggaaatggtttcaagacaagtaccatgagacttggagctgatgatattgtttttactcgctcaactcgtggaggcaaatctactcagagcgttggccttctgtcatacacattcctcagaaaaactggtcaggatgatgtcgttgttcctatgattgatattgatacatccaaggagcgaccacaaccaattatctatggatctgcagaagattgggctgccagccttgaaattatactcaagtggtctccgttttctacagagggcgaactttggcagcagctcgaggatattggaactcatggaacaaaagtaattatatacaacttgtggcttaatgatgaaggaatctacgagctgagttttcacgacgacaatgaggacatccgactccgagatgaaagtgtccatgacagtaaacgggtgcatcataatttattggaactgagatctcatatttcataccacttacgttactctctgagggcttatgcttcaatgttatatctcaaaaggttcaataatttcaaaattatacttcgtggaatccctgtggagcagttcaacattgctgatgaattaagattacctgagactattaagtacaatccccatacaacaaaggaaaaagctcccactgaaatcaaagttggatttataaaggaggcgcctaagcttgcagtttgtggtttcaatgtctatcacaaaaaccgtctcatccggcctttctggaaggtcactatgggaggggaaaggagaggcagtggtgttgtgggagttcttgaagcaaactttatagaaccggcccacgataagcaagattttgagaggtcttctctatttcagcggttggaggcaaggctgaaaaagattgtctctaattactggtctcctcttcctctccaaaacctttaaaatatatttatgtcaatatcattttggttccaaaccgcaatgtctttggttgactattccactgcttgttatggagaaaaacaggaatacacactgccacgtattcggatactgtacttatggaatgcctgcagataagtcgaaaaggatagcaatacctgatcaaccgcctactgtcaatacattcaatcccttgcctttgccttctgatgaaattagtcaaggtggtcagataatacgtgatcaaccgcctactgttaatacattcaatcctttacctttgccttctgatagagtcagtcaaggtggtccgataatacgtgaaatcagtcttagtaacgccacttcaagccgtatagctgctgttgcagcaccgcatttgagaaattaaacaggtttaagaggtaacttccaaccagtgcagctcaaccctcaacctgcggctaccgatactgaaaacaacctcgttggcaagtcagcgcatgagataagcgaagagaacatacaactcttcatgaggtgcgaggaatatgtaaagaaagagactgaactggaacagacggtaagtaacttagcaaaggaactggaagaaactaaaagtaaatgtgcacgacttgcattactcgtggatgctaagaggagggagatgcaacaagtttagtaaaaatgttaatatggctctctggaatctgaaaaacactagtttaattttgctaatacatatatatgcagcgtatgtatatgtcaggaagacagttataatctaacgcaagtctctggaaatagttctatttaaagaatcataagttgagattgtatg

SEQ ID NO: 2556 - protein, 330 aa, Arabidopsis thaliana
  misc_feature (1)..(330): Ceres Seq. ID no. 14315748
MDPDGLRKCMSLGYSSKKSNTTIGQYGNGFKTSTMRLGADDIVFTRSTRGGKSTQSVGLLSYTFLRKTGQDDVVVPMIDIDTSKERPQPIIYGSAEDWAASLEIILKWSPFSTEGELWQQLEDIGTHGTKVIIYNLWLNDEGIYELSFHDDNEDIRLRDESVHDSKRVHHNLLELRSHISYHLRYSLRAYASMLYLKRFNNFKIILRGIPVEQFNIADELRLPETIKYNPHTTKEKAPTEIKVGFIKEAPKLAVCGFNVYHKNRLIRPFWKVTMGGERRGSGVVGVLEANFIEPAHDKQDFERSSLFQRLEARLKKIVSNYWSPLPLQNL

SEQ ID NO: 2557 - protein, 321 aa, Arabidopsis thaliana
  misc_feature (1)..(321): Ceres Seq. ID no. 14315749
MSLGYSSKKSNTTIGQYGNGFKTSTMRLGADDIVFTRSTRGGKSTQSVGLLSYTFLRKTGQDDVVVPMIDIDTSKERPQPIIYGSAEDWAASLEIILKWSPFSTEGELWQQLEDIGTHGTKVIIYNLWLNDEGIYELSFHDDNEDIRLRDESVHDSKRVHHNLLELRSHISYHLRYSLRAYASMLYLKRFNNFKIILRGIPVEQFNIADELRLPETIKYNPHTTKEKAPTEIKVGFIKEAPKLAVCGFNVYHKNRLIRPFWKVTMGGERRGSGVVGVLEANFIEPAHDKQDFERSSLFQRLEARLKKIVSNYWSPLPLQNL

SEQ ID NO: 2558 - protein, 296 aa, Arabidopsis thaliana
  misc_feature (1)..(296): Ceres Seq. ID no. 14315750
MRLGADDIVFTRSTRGGKSTQSVGLLSYTFLRKTGQDDVVVPMIDIDTSKERPQPIIYGSAEDWAASLEIILKWSPFSTEGELWQQLEDIGTHGTKVIIYNLWLNDEGIYELSFHDDNEDIRLRDESVHDSKRVHHNLLELRSHISYHLRYSLRAYASMLYLKRFNNFKIILRGIPVEQFNIADELRLPETIKYNPHTTKEKAPTEIKVGFIKEAPKLAVCGFNVYHKNRLIRPFWKVTMGGERRGSGVVGVLEANFIEPAHDKQDFERSSLFQRLEARLKKIVSNYWSPLPLQNL

SEQ ID NO: 2559 - DNA, 2130 bp, Arabidopsis thaliana
  misc_feature (1)..(2130): Ceres Seq. ID no. 15168666
gaaagtcactgctgaactttgttcagattgatcagttgaggatatattttgatccatctttgaaaaagtttgtcttggccaagaactctcctgtttctagaactaacacccctcttcatgaatctcctgatgcacttaaaacaaatgggactgaaatggatcacaaggctgctagaagatttgattcagtttcttctaatgtgggctcactgcagtctaaagtgcagttttgtcctgatggtgatgatgaagaagaaattgttttcaagccaacagcttatgagaagttttcaaaagtttcttcagatctgtcagttaatggatacgtccatcctgtaccagtgtctgctgctggtgggccaaccaatgctagtttagtgcctgttcagaacactgcatcaatgtctgcaactcgtttaccatccaatccacatgcaactggtttgccatccaatggtgggtcacttccaagtactgcatctctatcagctgctggtaattacaacactgatcagtcgcttcccaggtcgtctgttggttggactgattgggctgtcaatagtgagcaaaatgttactcctagcattgctccaagatttgaactcatgcagtctgttgaggagcctgtttccagctggacaagcagtggggcacagcatgttggtcctcagcacaagcacacaggtttaactttcccagatgttgtctctgaaccatgtgtatctgcatcaatggttcaatgttttagtagctccgattattcgaaatttctcagagaacaagaaatattcttaatgaatggactgaagactgtcaacataactggaaatggctatctagagcagagattgcagcctggattgagtggtttacagtctatgggttattcatctcagatacctattcaacctggtggtaccactgcaaacctgatgcataatcatgtcaaaattactggagagactgtcccctctacacttgattcagttgtaccttcaatagcaccatcaggtggcatgccaatcaaacttacagaagcaccactaactgcttcgaagaagaaccctgttagtcgtccatcaaagcctgttggaccaccaccaggatttaatcatgtaaccccaaagcgtcaagatgattctattccggttgaaaaactgcagaacccacaggtcgatgattacagctggctagatagctatcagcaatcgattgatcatgttcacagcttaagaactatttatcctggtgtcagtgatactagcactgcatttgccactccattctctttccctgggaggatacacacacaagggaccaatgaaaagacttggcaagatttccacctttttgagccttcaaaacagaacatgttccaaacttaccaccaaagaaatctgcaaagtggtcaaatggatgaacaagagccagcaaattctatctggtctagcagttaccatgtgtgatttggtaacttttaccaggatgattgctggagtttctggggacagactattggattaagtggcacgacctgatctattgagcttagcccatacctgcagcacttagtgttaaatttcttttgagaatggtagtctttcaagcatgacaatggctgctgttaagtttgggagtgccgccatcttttgggccaaagatggggtagaggatgattgatctgtcggcagtctgatggcgatgaattaatacgaggtcttcaatgctgacagaaagggttaatgaaacaaacttgaatccagtgattataggcactccgcacggaccacatgattcatctctcactggacatattgctaccacaagaagcggacggttgctgccgcaactaaaacatgccgtgtggatgtcagttttcagttggcctatgccatccagagagtaaaaagtgaggatcaacgagcatgttgccgagtagtttctcaagtataaattactgcgtctacttgctccttcgctttgggaacaatgtatcaggttgtaagttgcaattaaatgtttggaacagtttgtcatggtaattgtgtggctcctatatggctatattgttctctgtaattgtatggaccaaccctaagtgttacatacaaacatctttgatttgactcc

SEQ ID NO: 2560 - protein, 487 aa, Arabidopsis thaliana
  misc_feature (1)..(487): Ceres Seq. ID no. 15168667
KSLLNFVQIDQLRIYFDPSLKKFVLAKNSPVSRTNTPLHESPDALKTNGTEMDHKAARRFDSVSSNVGSLQSKVQFCPDGDDEEEIVFKPTAYEKFSKVSSDLSVNGYVHPVPVSAAGGPTNASLVPVQNTASMSATRLPSNPHATGLPSNGGSLPSTASLSAAGNYNTDQSLPRSSVGWTDWAVNSEQNVTPSIAPRFELMQSVEEPVSSWTSSGAQHVGPQHKHTGLTFPDVVSEPCVSASMVQCFSSSDYSKFLREQEIFLMNGLKTVNITGNGYLEQRLQPGLSGLQSMGYSSQIPIQPGGTTANLMHNHVKITGETVPSTLDSVVPSIAPSGGMPIKLTEAPLTASKKNPVSRPSKPVGPPPGFNHVTPKRQDDSIPVEKLQNPQVDDYSWLDSYQQSIDHVHSLRTIYPGVSDTSTAFATPFSFPGRIHTQGTNEKTWQDFHLFEPSKQNMFQTYHQRNLQSGQMDEQEPANSIWSSSYHV

SEQ ID NO: 2561 - protein, 436 aa, Arabidopsis thaliana
  misc_feature (1)..(436): Ceres Seq. ID no. 15168668
MDHKAARRFDSVSSNVGSLQSKVQFCPDGDDEEEIVFKPTAYEKFSKVSSDLSVNGYVHPVPVSAAGGPTNASLVPVQNTASMSATRLPSNPHATGLPSNGGSLPSTASLSAAGNYNTDQSLPRSSVGWTDWAVNSEQNVTPSIAPRFELMQSVEEPVSSWTSSGAQHVGPQHKHTGLTFPDVVSEPCVSASMVQCFSSSDYSKFLREQEIFLMNGLKTVNITGNGYLEQRLQPGLSGLQSMGYSSQIPIQPGGTTANLMHNHVKITGETVPSTLDSVVPSIAPSGGMPIKLTEAPLTASKKNPVSRPSKPVGPPPGFNHVTPKRQDDSIPVEKLQNPQVDDYSWLDSYQQSIDHVHSLRTIYPGVSDTSTAFATPFSFPGRIHTQGTNEKTWQDFHLFEPSKQNMFQTYHQRNLQSGQMDEQEPANSIWSSSYHV

SEQ ID NO: 2562 - protein, 354 aa, Arabidopsis thaliana
  misc_feature (1)..(354): Ceres Seq. ID no. 15168669
MSATRLPSNPHATGLPSNGGSLPSTASLSAAGNYNTDQSLPRSSVGWTDWAVNSEQNVTPSIAPRFELMQSVEEPVSSWTSSGAQHVGPQHKHTGLTFPDVVSEPCVSASMVQCFSSSDYSKFLREQEIFLMNGLKTVNITGNGYLEQRLQPGLSGLQSMGYSSQIPIQPGGTTANLMHNHVKITGETVPSTLDSVVPSIAPSGGMPIKLTEAPLTASKKNPVSRPSKPVGPPPGFNHVTPKRQDDSIPVEKLQNPQVDDYSWLDSYQQSIDHVHSLRTIYPGVSDTSTAFATPFSFPGRIHTQGTNEKTWQDFHLFEPSKQNMFQTYHQRNLQSGQMDEQEPANSIWSSSYHV

SEQ ID NO: 2563 - DNA, 2453 bp, Arabidopsis thaliana
  misc_feature (1)..(2453): Ceres Seq. ID no. 15168689
gatcttgggaattttgaaagacataagaatcaacacgaaaaatctcagtctttgactcagactcccaccgcgtaattccgagctaggtttccatttctccggcgaatcggacctctctctcgctctctcttccaatttccccctttttcgtttcccagcgatgatttgcaagtagattccgctaataatcgcaactctctgacggatgctatggcaatgggacttattcgtcttctttttatagcttttacacttgttctactttcaatccttcctcttcatctctctctcgctgatgagataacatctattgaatctgtacctgaccttcagaagctaatgtatgttgctgttgatgggtttccttgtgtacgtcttctcaatctgtctggagagattggatgttcaaatcctggaataaataaagtggtggctccaatcataaaattaaaggacgttaaagatttggttcagccacacactattttggttacagctgatgaaatggaagatttctttaccagggtgtcaactgatttgagctttgctagcaaaattggtggtgttctagttgaatcaggatctaatttccaacaaaagttaaaagggttttctcctgataaaaggtttcctcaagcccagttttcaccctatgaaaacgttgagtacaaatggaattcagctgcatcaagcatcatgtggagaaattataattttcctgtgtacttattgtcagaaagtggcatatcagctgtgcatgagatcctttccaagaaaaagatgaagcatggaacatataccagtgatgttgctgaattcaatatggttatggagactaccaaagctggaacacacaattcggaggcttgtttgcaggagggaacttgcctcccattgggcggatatagtgtttggtcctcgcttccaccaatcagtgtttcgtcttccaacaatcgcaaaccagttgtgctgactgtggcctccatggatactgcatcatttttccgtgacaaaagttttggtgcagattcaccaatatctggtctggtagctcttctaggagcagttgatgctctttctcgagttgatggtattagtaatctcaaaaaacagcttgtgtttttggttctgaccggagagacatggggttaccttggcagcaggaggttcttacacgaattagatctgcattcagatgctgtcgcaggccttagcaatacttcgattgaaacggtgcttgaaataggatctgttggaaaaggtttaagtggagggataaacaccttctttgctcataaaacaagggtttcttcagttacaaacatgacactggatgctttaaagatagctcaggattcacttgcatcaaaaaacatcaaaattctttcagcagatactgcaaaccctggaatacccccatcctccttgatggctttcatgagaaagaaccctcagacttcagctgttgtacttgaagactttgataccaactttgtgaataagttctaccatagtcacctcgatgacttgtcaaatatcaactcctcgtctgtagtagctgctgcttctgttgtggcccgaacactttacatcctagcaagtgacaacaaagatacaagcaattcagctctgggatccatccatgtcaatgcttctttcgttgaagagcttctaacctgtcttttagcttgtgaaccgggcttatcttgcaacttggtaaaagactatatttcaccgacaaacacttgtccaggcaactatgctggcgtcatcctcggagaaccttcctccaaaccttaccttggttacgtcggtgatgtttctagattcctatggaactttctggcagataaaacatctgtccaaaagggaaatacaacctcagtttgttcaaaaggagtctgtagcaaaactgacgaagtgtgcatcaaagcagagagcaacaaggaaggaacatgtgttgtctccacaaccaggtatgttccagcttattcaactcgattgaagtataacgatggagcttggacaattctaccacagaactcatcagattctatggggatggttgatccagtgtggaccgaaagcaactgggacactttaagggtgcatgtgtacacagtccagcactcagcatacgacaatgcagtcctcgttgcaggtattacagtcacaacgttggcttacatcggaattttggctgctaagtcaatcatcacaaaagccttgaagcaggactgagacttgtatttaattccctctcctctcggctcaaaattacttgtcagtttcagtaagacattgcctaaccagcaacaccaccaataccttagtggtagaaaccttttttctcaaccaaggttattaaaatatgtctttgagctaattcatgttaaattctttattacactggcaagaaatttataagaaaaaggtttgctttcacaaaaaag

SEQ ID NO: 2564 - protein, 676 aa, Arabidopsis thaliana
  misc_feature (1)..(676): Ceres Seq. ID no. 15168690
MAMGLIRLLFIAFTLVLLSILPLHLSLADEITSIESVPDLQKLMYVAVDGFPCVRLLNLSGEIGCSNPGINKVVAPIIKLKDVKDLVQPHTILVTADEMEDFFTRVSTDLSFASKIGGVLVESGSNFQQKLKGFSPDKRFPQAQFSPYENVEYKWNSAASSIMWRNYNFPVYLLSESGISAVHEILSKKKMKHGTYTSDVAEFNMVMETTKAGTHNSEACLQEGTCLPLGGYSVWSSLPPISVSSSNNRKPVVLTVASMDTASFFRDKSFGADSPISGLVALLGAVDALSRVDGISNLKKQLVFLVLTGETWGYLGSRRFLHELDLHSDAVAGLSNTSIETVLEIGSVGKGLSGGINTFFAHKTRVSSVTNMTLDALKIAQDSLASKNIKILSADTANPGIPPSSLMAFMRKNPQTSAVVLEDFDTNFVNKFYHSHLDDLSNINSSSVVAAASVVARTLYILASDNKDTSNSALGSIHVNASFVEELLTCLLACEPGLSCNLVKDYISPTNTCPGNYAGVILGEPSSKPYLGYVGDVSRFLWNFLADKTSVQKGNTTSVCSKGVCSKTDEVCIKAESNKEGTCVVSTTRYVPAYSTRLKYNDGAWTILPQNSSDSMGMVDPVWTESNWDTLRVHVYTVQHSAYDNAVLVAGITVTTLAYIGILAAKSIITKALKQD

SEQ ID NO: 2565 - protein, 674 aa, Arabidopsis thaliana
  misc_feature (1)..(674): Ceres Seq. ID no. 15168691
MGLIRLLFIAFTLVLLSILPLHLSLADEITSIESVPDLQKLMYVAVDGFPCVRLLNLSGEIGCSNPGINKVVAPIIKLKDVKDLVQPHTILVTADEMEDFFTRVSTDLSFASKIGGVLVESGSNFQQKLKGFSPDKRFPQAQFSPYENVEYKWNSAASSIMWRNYNFPVYLLSESGISAVHEILSKKKMKHGTYTSDVAEFNMVMETTKAGTHNSEACLQEGTCLPLGGYSVWSSLPPISVSSSNNRKPVVLTVASMDTASFFRDKSFGADSPISGLVALLGAVDALSRVDGISNLKKQLVFLVLTGETWGYLGSRRFLHELDLHSDAVAGLSNTSIETVLEIGSVGKGLSGGINTFFAHKTRVSSVTNMTLDALKIAQDSLASKNIKILSADTANPGIPPSSLMAFMRKNPQTSAVVLEDFDTNFVNKFYHSHLDDLSNINSSSVVAAASVVARTLYILASDNKDTSNSALGSIHVNASFVEELLTCLLACEPGLSCNLVKDYISPTNTCPGNYAGVILGEPSSKPYLGYVGDVSRFLWNFLADKTSVQKGNTTSVCSKGVCSKTDEVCIKAESNKEGTCVVSTTRYVPAYSTRLKYNDGAWTILPQNSSDSMGMVDPVWTESNWDTLRVHVYTVQHSAYDNAVLVAGITVTTLAYIGILAAKSIITKALKQD

SEQ ID NO: 2566 - protein, 633 aa, Arabidopsis thaliana
  misc_feature (1)..(633): Ceres Seq. ID no. 15168692
MYVAVDGFPCVRLLNLSGEIGCSNPGINKVVAPIIKLKDVKDLVQPHTILVTADEMEDFFTRVSTDLSFASKIGGVLVESGSNFQQKLKGFSPDKRFPQAQFSPYENVEYKWNSAASSIMWRNYNFPVYLLSESGISAVHEILSKKKMKHGTYTSDVAEFNMVMETTKAGTHNSEACLQEGTCLPLGGYSVWSSLPPISVSSSNNRKPVVLTVASMDTASFFRDKSFGADSPISGLVALLGAVDALSRVDGISNLKKQLVFLVLTGETWGYLGSRRFLHELDLHSDAVAGLSNTSIETVLEIGSVGKGLSGGINTFFAHKTRVSSVTNMTLDALKIAQDSLASKNIKILSADTANPGIPPSSLMAFMRKNPQTSAVVLEDFDTNFVNKFYHSHLDDLSNINSSSVVAAASVVARTLYILASDNKDTSNSALGSIHVNASFVEELLTCLLACEPGLSCNLVKDYISPTNTCPGNYAGVILGEPSSKPYLGYVGDVSRFLWNFLADKTSVQKGNTTSVCSKGVCSKTDEVCIKAESNKEGTCVVSTTRYVPAYSTRLKYNDGAWTILPQNSSDSMGMVDPVWTESNWDTLRVHVYTVQHSAYDNAVLVAGITVTTLAYIGILAAKSIITKALKQD

SEQ ID NO: 2567 - DNA, 1923 bp, Arabidopsis thaliana
  misc_feature (1)..(1923): Ceres Seq. ID no. 15175511
gatcaccagataccaacagctacaagtttttaaaaaccttctctcatcctcttcctcaagcctccctcctcctctttaatctcaccagtcaccatgaaagtttagagattttttgaaagaacaaacagatatcgaattcgagttttgcaaaaatggtatcggtggaggaacctttatctcattccaattccactcgctttccgttaacaaccgatttctacggttcatcatcgccgtcggcggcgaggttacaccgtcaagctggccggtcgatgagaacagtgagatctaacttctatcaaagcggagatcaatcttgctcattcgtcggctcaatcggcgataaatcagagtatgcgtcggagtttctctcggattccgtcatcgacatgagactcggcgagcttgctttgaaaaacagtaattctctcaattcaaacgcttcctcaatgaaagaggaagcgtttctcgacatttctcaggcgtttagtgatttttccgcttgtagtagtgatatctccggcgagttacagcgtcttgcttgcttgccgtcgccggaggctgatagaaatgagagcggcggagataacgaagcggagcatgatccagagttagagagagagccttgtctagggtttctacagagagaaaacttctctacagagattatcgagtgtatttcgccggaagatctgcagccaactgtgaaactatgcatcgacggacttcgttcctcttcggtggcgataaagcgatctgctgcggcgaagctacggctattggcgaagaatcgagcggataatcgtgtgttgattggggaatctggagctattcaagctttgattccacttcttcgttgtaaagatccatggacgcaagagcacgcagttacagctctgttaaacctctcgttacacgaccagaacaaagctgtaatcgccgcaggaggagcgattaaatcactagtgtgggtactcaaaacggggacggagacttcaaagcagaacgctgcatgtgctttgcttagtttggcgctattggaggagaacaaaggctcaatcggagcttgcggtgctattccgccgctggtttctcttctgttgaacggatcttgcaggggaaagaaggatgcgttgacgacgctctacaagctgtgtacgcttcagcaaaacaaggagagagcggtcactgctggagcggtgaagccgttggtggaccttgtggctgaggaagggactggtatggcggagaaagctatggtggttctgagtagccttgcagcgatagatgatggcaaagaggctattgtcgaggaaggagggatcgcagagcttgttgaggccatcgaggatggatctgtgaaagggaaagaatttgcgatcttgacgctgttgcagctttgttctgatagcgttagaaaccgtgggttgcttgtgagggaaggcgcgattcctccgcttgtgggcctctctcagagcggctccgtcagtgttagagctaagcgcaaggcagaaagacttctggggtatcttcgggagccaaggaaggaggcaagttcatcaagcccatgaaatgcaaccatgtggaggtttcatcagtctagtatgtatatactgagtgtatgtttggtgggttttgtatagcgtcttttgtgtagactgtaaaagagagatcaaatgattaccagaaacttgactgacttttgatctctctcatgtattgatggttaagctagtttttgaggagtttcaagggagagtgcttatttatttggtttacaagtctagcattcaggttttggcttctggtttgtgagggtgggtggattatgctgatttttaaggcaaaaagctttgtagtagcgtcggcaaatggcttgttcaagaactaagcaatttttaatcgatatttcttgatcaaaag

SEQ ID NO: 2568 - protein, 472 aa, Arabidopsis thaliana
  misc_feature (1)..(472): Ceres Seq. ID no. 15175512
MVSVEEPLSHSNSTRFPLTTDFYGSSSPSAARLHRQAGRSMRTVRSNFYQSGDQSCSFVGSIGDKSEYASEFLSDSVIDMRLGELALKNSNSLNSNASSMKEEAFLDISQAFSDFSACSSDISGELQRLACLPSPEADRNESGGDNEAEHDPELEREPCLGFLQRENFSTEIIECISPEDLQPTVKLCIDGLRSSSVAIKRSAAAKLRLLAKNRADNRVLIGESGAIQALIPLLRCKDPWTQEHAVTALLNLSLHDQNKAVIAAGGAIKSLVWVLKTGTETSKQNAACALLSLALLEENKGSIGACGAIPPLVSLLLNGSCRGKKDALTTLYKLCTLQQNKERAVTAGAVKPLVDLVAEEGTGMAEKAMVVLSSLAAIDDGKEAIVEEGGIAELVEAIEDGSVKGKEFAILTLLQLCSDSVRNRGLLVREGAIPPLVGLSQSGSVSVRAKRKAERLLGYLREPRKEASSSSP

SEQ ID NO: 2569 - protein, 432 aa, Arabidopsis thaliana
  misc_feature (1)..(432): Ceres Seq. ID no. 15175513
MRTVRSNFYQSGDQSCSFVGSIGDKSEYASEFLSDSVIDMRLGELALKNSNSLNSNASSMKEEAFLDISQAFSDFSACSSDISGELQRLACLPSPEADRNESGGDNEAEHDPELEREPCLGFLQRENFSTEIIECISPEDLQPTVKLCIDGLRSSSVAIKRSAAAKLRLLAKNRADNRVLIGESGAIQALIPLLRCKDPWTQEHAVTALLNLSLHDQNKAVIAAGGAIKSLVWVLKTGTETSKQNAACALLSLALLEENKGSIGACGAIPPLVSLLLNGSCRGKKDALTTLYKLCTLQQNKERAVTAGAVKPLVDLVAEEGTGMAEKAMVVLSSLAAIDDGKEAIVEEGGIAELVEAIEDGSVKGKEFAILTLLQLCSDSVRNRGLLVREGAIPPLVGLSQSGSVSVRAKRKAERLLGYLREPRKEASSSSP

SEQ ID NO: 2570 - protein, 393 aa, Arabidopsis thaliana
  misc_feature (1)..(393): Ceres Seq. ID no. 15175514
MRLGELALKNSNSLNSNASSMKEEAFLDISQAFSDFSACSSDISGELQRLACLPSPEADRNESGGDNEAEHDPELEREPCLGFLQRENFSTEIIECISPEDLQPTVKLCIDGLRSSSVAIKRSAAAKLRLLAKNRADNRVLIGESGAIQALIPLLRCKDPWTQEHAVTALLNLSLHDQNKAVIAAGGAIKSLVWVLKTGTETSKQNAACALLSLALLEENKGSIGACGAIPPLVSLLLNGSCRGKKDALTTLYKLCTLQQNKERAVTAGAVKPLVDLVAEEGTGMAEKAMVVLSSLAAIDDGKEAIVEEGGIAELVEAIEDGSVKGKEFAILTLLQLCSDSVRNRGLLVREGAIPPLVGLSQSGSVSVRAKRKAERLLGYLREPRKEASSSSP

SEQ ID NO: 2571 - DNA, 2171 bp, Arabidopsis thaliana
  misc_feature (1)..(2171): Ceres Seq. ID no. 15175867
tggtccttccttttataggcgtaaagagaggatccaggtgtacaatgggggtgtagcagagcgctacgtgtctagcgggggagagctagcgccctaagtacatgccgatgtggcagccggagagaatttggcacccagctggtgtgatgtcgtggccgtcggaggagcgacgaagcctggcggagggacagctgtcggagcggttgggtccttgctgacgtcctcctgcttccgtaagagagctgagagccgccgtcgtcacagagcatgcggggcgccatcattgcttatctggcggagctagccagatgggacaccggtcttgttctctgcgacccgagtcagctcggggtagggtgatgatggcgcttcctgttgacgtggctggcctgcgccctaggttgggcgacgtggaggctcctccaaagccgaggtcgagtctgtcttccatggccgaggccgagtccgagcccctgggtcgggcgaggcggaggtcgttcggcagaggccagggcggagttcgagccctggggtcgggcgaagcggagttcgtcgtcttctggggctgagcccgagtccgagccctgggtcgggcggagcggagttcgccgtcttccgggtcttagcccgagtccgagccctgggtcgggcggagcggagttcgccgtcttccgggacttagcccgagtctgagccctgggtcgggcggagcggagttcgccgtcttccgggtcttagcccgagtccgagccctgggtcgggcggagcggagttcgccgtcttccgggacttagcccgagtccgagccctgggtcgggcggagcagagcttcctatggtgcctttggcagggcctgactgcctgtcagtctcactctatcaaatggcactgtagtcggagtggcgcaggcggcgctgtccttctgtcaggccggtcagtggagcggtgaagtgacggcggccacttcggctctgccggggggcgtgcgtcagaataaaggtgtcaggccacctttgcgttaaaagctcctacgatttggtcggtcggtgcggcgatttagtcagggttgcttcttagcgaaggcagggcctcgggcgagccggagatgtgtccgccgttggaggggggcctcgggcgagacggaaatcctccggggtcggctgcccttgtccgaggctaggctcgggcgaggcatgatcaagtcactcgaatggactaatccctgactaatcgcacccatcaggcctttgcagctttatgctgatgggggttaccagctgagaattaggagtcttgagggtacccctaattatggtccccgacactttgagactaaccatttgcttgagtttgcttgaatttagtctcaaaggaagtttgaaagggaaaaggtggacttggaccatgaaagacttccactgcactccgatgagagggtaactaattccaagttcatctcacatcctcttattgcctttgtgttctcatttgaagattttggtgaggcaatggggttaaagtggccaagattgatcccattttggtgtttgatgccaaagggggagaaaataaaggccaaagcaatagatggatcagctaccacttgagaaattttgaaaagagtagaatagaagtagaatagagcttttggtttgtcagaactcttttattgtctctcttgtcaaaagttggcttcttgtggggagaagtgttgattatgggaaaaaggggagtttttgaaatcttgaatcaatttctcttggaatgactctctttatgtcttaacatgtgtgtttgacttagagatagaaatttgagtttgatttgcaaaaacaaaccaagtggtggcaaagagtgatccatatatgtcaaatctgaatcaaaacaatttgagttcttatttgaattgattttgtacttgttctacttgctttatgttgtgttggcataaatcaccaaaaagggggagattgaaagggaaatgtgcctttgggccatttctaagtattttggtgatttagtgtccaacacaagtgcctaagtgtaaaatggtggacaaagtacgaatcaaggataaaggtatgtttctcagacttagtacattgttttagagactaatgtattgtgtctaagtgctggaaacaggaaaagaccaactggaaatgccttgg

SEQ ID NO: 2572 - protein, 86 aa, Arabidopsis thaliana
  misc_feature (1)..(86): Ceres Seq. ID no. 15175868
MGHRSCSLRPESARGRVMMALPVDVAGLRPRLGDVEAPPKPRSSLSSMAEAESEPLGRARRRSFGRGQGGVRALGSGEAEFVVFWG

SEQ ID NO: 2573 - protein, 69 aa, Arabidopsis thaliana
  misc_feature (1)..(69): Ceres Seq. ID no. 15175869
MMALPVDVAGLRPRLGDVEAPPKPRSSLSSMAEAESEPLGRARRRSFGRGQGGVRALGSGEAEFVVFWG

SEQ ID NO: 2574 - protein, 68 aa, Arabidopsis thaliana
  misc_feature (1)..(68): Ceres Seq. ID no. 15175870
MALPVDVAGLRPRLGDVEAPPKPRSSLSSMAEAESEPLGRARRRSFGRGQGGVRALGSGEAEFVVFWG

SEQ ID NO: 2575 - DNA, 2133 bp, Arabidopsis thaliana
  misc_feature (1)..(2133): Ceres Seq. ID no. 15176019
gaatatgctccctgagtaatacctttgatgcacaaacgcgggaaatgaccttcattgtcccaacaccaaaacccaaatccatcaggaagctgagtgaatcagaaaatggtgtcaaagctttctcttttccgagccaattcacttccttttccagtcatctcttcctactctgctcgttttatccttaaaccctatcccaaacctaaaacccttatcttctgtgtcttctccagtaatctctcctccaccacctttccgtatggcccgtctcttctgaaaggaaagaagcctgtgctagatgatattagattagcttcaattggtcgagacagagatgcccatcgaggcaaaattggagagtttgatgaatcaattgagaaagatgttcttttgaatgaagatgaatttactagggtttttgagatttcggcgattcgagtcccggcgaaggattgtttcgcgctcgagaatcgtctccgtggtcatcttcttaattggcctaggattcggaacattgctagggttcctggagatgagattgaagaagatgtggtgaagctgttgggccgtgagactgatgaagaagaagaagatgaagatagtgttgtggattcggttaaccggagaataagagggaaagcagaaggggatggggagagattgagttcagtgttgcatagagataaactcgccaggacatttaattcaactgggtatctcaaattcagaaacttggccaagatttctcggccaaagaggaagaggaagacagagagaacaagggaggggaaggaaaaggaaatagcaagcagacgcaacgaaatggcggtggtggaagtggtggaaactcgaggaggagaagaggattttgaggggttattgggagaaggctatggtagtagaggaagatggagaggttcaacaagattgttgcttttggatgagaaatattccggtgaggaagttcaagacttgcctgaggctatcaaggttctgtttgcagaagctaaaatggctgatgcaagcttaagtttcgagctagtgaaatgcagactgactttgttctatgactattggccaatgattgagatattggaggctgtactacctaagggtatgattgtgccttcggcatttgagatggtggggcatattgcgcatctgaacctaagagatgagcatctaccatacaaaaggctcatagctaaggtagtcctggacaagaatcagccaaagatacaaaccgttgtgaataagattgatcctatccacaatgacttcagaactatgcagctagaggttttagctggaaaccattcgctggtgactctagttgttgaaaatggactgcgctttcatgttgatttagctagagtatattggaattcgaaacttgggacagaaagacagaggctgctactcgggttcgaccaaaatgacgttgtctgtgatgtttttgctggagttggtcctatcgcacttgctgcagcaagaattgtaaaacgtgtatatgccaatgacctgaatcctcatgcagtagaatttatggaacagaatagtgttgtcaataagctcgagaagagaattgagatctttaacatggacggacgaagattcataaaggctatgttttcaagcgaaaaaggtcaaaaagtcacccaagtagtcatgaatttaccaaaagatgctgctgaatctctagatgcatttcgcggagtatacaacgataggcacagagatgaaggcttatctttcccaaccatccatgtgtatggattctccaaggcttctgatccagaattcgacttccacgagcggatacggattgctttatctgaggtagccgtggatgtgaagatgcgaaaggtacgccttgtggctccagggaaatggatgctatgtgcttcattcatacttcccaagaatgtagccttctcaagaaaaaacttaagttatgtagattaatagaatgcaatacatggctgaatataggggcatatttgcaaatacgaaatattttattgtactgcagccagtaatacttgcagtgtctttgttgaagaacaagacaactaacaagtgaaagtgacaatagcttttgttacattatttaatattgaaaaaacatttctc

SEQ ID NO: 2576 - protein, 619 aa, Arabidopsis thaliana
  misc_feature (1)..(619): Ceres Seq. ID no. 15176020
MVSKLSLFRANSLPFPVISSYSARFILKPYPKPKTLIFCVFSSNLSSTTFPYGPSLLKGKKPVLDDIRLASIGRDRDAHRGKIGEFDESIEKDVLLNEDEFTRVFEISAIRVPAKDCFALENRLRGHLLNWPRIRNIARVPGDEIEEDVVKLLGRETDEEEEDEDSVVDSVNRRIRGKAEGDGERLSSVLHRDKLARTFNSTGYLKFRNLAKISRPKRKRKTERTREGKEKEIASRRNEMAVVEVVETRGGEEDFEGLLGEGYGSRGRWRGSTRLLLLDEKYSGEEVQDLPEAIKVLFAEAKMADASLSFELVKCRLTLFYDYWPMIEILEAVLPKGMIVPSAFEMVGHIAHLNLRDEHLPYKRLIAKVVLDKNQPKIQTVVNKIDPIHNDFRTMQLEVLAGNHSLVTLVVENGLRFHVDLARVYWNSKLGTERQRLLLGFDQNDVVCDVFAGVGPIALAAARIVKRVYANDLNPHAVEFMEQNSVVNKLEKRIEIFNMDGRRFIKAMFSSEKGQKVTQVVMNLPKDAAESLDAFRGVYNDRHRDEGLSFPTIHVYGFSKASDPEFDFHERIRIALSEVAVDVKMRKVRLVAPGKWMLCASFILPKNVAFSRKNLSYVD

SEQ ID NO: 2577 - protein, 380 aa, Arabidopsis thaliana
  misc_feature (1)..(380): Ceres Seq. ID no. 15176021
MAVVEVVETRGGEEDFEGLLGEGYGSRGRWRGSTRLLLLDEKYSGEEVQDLPEAIKVLFAEAKMADASLSFELVKCRLTLFYDYWPMIEILEAVLPKGMIVPSAFEMVGHIAHLNLRDEHLPYKRLIAKVVLDKNQPKIQTVVNKIDPIHNDFRTMQLEVLAGNHSLVTLVVENGLRFHVDLARVYWNSKLGTERQRLLLGFDQNDVVCDVFAGVGPIALAAARIVKRVYANDLNPHAVEFMEQNSVVNKLEKRIEIFNMDGRRFIKAMFSSEKGQKVTQVVMNLPKDAAESLDAFRGVYNDRHRDEGLSFPTIHVYGFSKASDPEFDFHERIRIALSEVAVDVKMRKVRLVAPGKWMLCASFILPKNVAFSRKNLSYVD

SEQ ID NO: 2578 - protein, 317 aa, Arabidopsis thaliana
  misc_feature (1)..(317): Ceres Seq. ID no. 15176022
MADASLSFELVKCRLTLFYDYWPMIEILEAVLPKGMIVPSAFEMVGHIAHLNLRDEHLPYKRLIAKVVLDKNQPKIQTVVNKIDPIHNDFRTMQLEVLAGNHSLVTLVVENGLRFHVDLARVYWNSKLGTERQRLLLGFDQNDVVCDVFAGVGPIALAAARIVKRVYANDLNPHAVEFMEQNSVVNKLEKRIEIFNMDGRRFIKAMFSSEKGQKVTQVVMNLPKDAAESLDAFRGVYNDRHRDEGLSFPTIHVYGFSKASDPEFDFHERIRIALSEVAVDVKMRKVRLVAPGKWMLCASFILPKNVAFSRKNLSYVD

SEQ ID NO: 2579 - DNA, 2368 bp, Arabidopsis thaliana
  misc_feature (1)..(2368): Ceres Seq. ID no. 15176027
gacctttttcacttccttctcactgatcgtcgaacaataagaccgtcgcatctcccagttatggctatggccggagaatcttccggcaaaaaaattggagactgtgacggtaaagtcgcggggaacagacagcgaaaggtgggtcttatttacgacgagacgatgtgcaaacacgacacacctgacggcgaggatcaccctgagtgtcccgaccgcatcagagttatctgggagaagcttcagctcgccggagtttctcaaagatgtgtggttcttggtagtagcaaagcagaagataagcatctccaattggttcacacaaaggaccatgttaatttagttaagagtattagcacaaaacagaaagattatcggagaaacaggattgcttcacagttgaattcgatttatctgaatggaggttcatctgaagccgcatatcttgcagctggttctgttgtaaagttggcagaaaaagttgcagaaggagagttagattgtggttttgctattgtcaggcccccagggcaccatgctgaggcagatgaagccatgggtttttgtttattcaacaatgttgccgttgctgctagttttttactaaacgaaagaccggatctaggggtcaagaaaattctgatcgttgattgggatgtccatcacggaaatggtacccagaagatgttttggaaagatcctcgtgtactatttttctctgttcataggcatgagtatgggggtttctatccagcgggtgatgatggcgattataacatggttggggaaggtccaggtgaagggtttaacataaatgttccatgggatcaaggacgatgtggagatgcagattatcttgctgcatgggaccatatcttgattcctgtggcgagggaatttaacccggatgttatttttctttcagctggatttgatgcagctattaatgatccgctagggggttgttgtgtgaccccatatggatattcagttatgttgaagaagctgatggagtttgcacaaggaaagatagtgctggcgttagagggagggtacaatcttgactcaattgcaaagtcttcacttgcatgtgtccaagttttgcttgaagacaaacaaattcaaggacctccggaagcatacccattcgagtcgacatggcgtgtcatacaagcggtgcgcaagaggctatgcacatattggccttcacttgcagatgaattatcgtggaagctaattaatcagaaaactcctactccaatcatccttatctcaagctccgactctgaaactgaagacaacgcccaaggactcctggatcaaatgtcgaaactcagcattgaaaaccctcaaggtacactacttgaaaaccaccaagtagaacctgcatctacatcttggagagctgatctcgcaaaggttgacgtttggtatgcctcttttggatccaacatgtggaaaccaaggtttctttgctatattcaagggggacaggtcgatggattgaaaaaggtatgtgttggctcaatggataaaagtccaccaaaggaaacagtgtgggaaacatttccacatagattgttctttggccgtgaatcttcagttggttggggtgtaggaggagttgctttcaccaacccccttgctaatctcattgatcaaactcacatgtgtttgtaccgtatcacgcttgagcagttcaatgacgttctgtctcaagaaaatggtttgaatgtggattcagattctccggtctttgatctagctgctttgcagttagtagataacaaaggatccattttagaagctcctttgaatagttggtatggaaatgttgtctgcttgggaaaagaacgcgacattcctatacttacaatgacttgcacgctttccgctgttgagaaattcaaatccggtgagatccctataagacctcctgcaaaagcttatgccaacactttaataaggggacttgtggaaggaggaagattatctaaagaagaagctgaggcttacatagacaaggctgtgtctaaacctctctagtgtataattatttactcagaaaccgcccgtttgaacacgatttggagcttcgggtttctgagttattcaattaggataaaaaccacaagtttaggaatattgtgagacctttgaatttgtcttttgaaagagaggactgtgtcctctgttagctgtgttgtgcttgctccctaagcaaactctcaatgtattttagttatcttcgggttttaggctttaccaagaagctgtattcggtaaatgtattaaagaatcctccaaactgctttatattgaccggagagaaacattcttattcttcggaatggtactttgaagtttgaag

SEQ ID NO: 2580 - protein, 680 aa, Arabidopsis thaliana
  misc_feature (1)..(680): Ceres Seq. ID no. 15176028
DLFHFLLTDRRTIRPSHLPVMAMAGESSGKKIGDCDGKVAGNRQRKVGLIYDETMCKHDTPDGEDHPECPDRIRVIWEKLQLAGVSQRCVVLGSSKAEDKHLQLVHTKDHVNLVKSISTKQKDYRRNRIASQLNSIYLNGGSSEAAYLAAGSVVKLAEKVAEGELDCGFAIVRPPGHHAEADEAMGFCLFNNVAVAASFLLNERPDLGVKKILIVDWDVHHGNGTQKMFWKDPRVLFFSVHRHEYGGFYPAGDDGDYNMVGEGPGEGFNINVPWDQGRCGDADYLAAWDHILIPVAREFNPDVIFLSAGFDAAINDPLGGCCVTPYGYSVMLKKLMEFAQGKIVLALEGGYNLDSIAKSSLACVQVLLEDKQIQGPPEAYPFESTWRVIQAVRKRLCTYWPSLADELSWKLINQKTPTPIILISSSDSETEDNAQGLLDQMSKLSIENPQGTLLENHQVEPASTSWRADLAKVDVWYASFGSNMWKPRFLCYIQGGQVDGLKKVCVGSMDKSPPKETVWETFPHRLFFGRESSVGWGVGGVAFTNPLANLIDQTHMCLYRITLEQFNDVLSQENGLNVDSDSPVFDLAALQLVDNKGSILEAPLNSWYGNVVCLGKERDIPILTMTCTLSAVEKFKSGEIPIRPPAKAYANTLIRGLVEGGRLSKEEAEAYIDKAVSKPL

SEQ ID NO: 2581 - protein, 660 aa, Arabidopsis thaliana
  misc_feature (1)..(660): Ceres Seq. ID no. 15176029
MAMAGESSGKKIGDCDGKVAGNRQRKVGLIYDETMCKHDTPDGEDHPECPDRIRVIWEKLQLAGVSQRCVVLGSSKAEDKHLQLVHTKDHVNLVKSISTKQKDYRRNRIASQLNSIYLNGGSSEAAYLAAGSVVKLAEKVAEGELDCGFAIVRPPGHHAEADEAMGFCLFNNVAVAASFLLNERPDLGVKKILIVDWDVHHGNGTQKMFWKDPRVLFFSVHRHEYGGFYPAGDDGDYNMVGEGPGEGFNINVPWDQGRCGDADYLAAWDHILIPVAREFNPDVIFLSAGFDAAINDPLGGCCVTPYGYSVMLKKLMEFAQGKIVLALEGGYNLDSIAKSSLACVQVLLEDKQIQGPPEAYPFESTWRVIQAVRKRLCTYWPSLADELSWKLINQKTPTPIILISSSDSETEDNAQGLLDQMSKLSIENPQGTLLENHQVEPASTSWRADLAKVDVWYASFGSNMWKPRFLCYIQGGQVDGLKKVCVGSMDKSPPKETVWETFPHRLFFGRESSVGWGVGGVAFTNPLANLIDQTHMCLYRITLEQFNDVLSQENGLNVDSDSPVFDLAALQLVDNKGSILEAPLNSWYGNVVCLGKERDIPILTMTCTLSAVEKFKSGEIPIRPPAKAYANTLIRGLVEGGRLSKEEAEAYIDKAVSKPL

SEQ ID NO: 2582 - protein, 658 aa, Arabidopsis thaliana
  misc_feature (1)..(658): Ceres Seq. ID no. 15176030
MAGESSGKKIGDCDGKVAGNRQRKVGLIYDETMCKHDTPDGEDHPECPDRIRVIWEKLQLAGVSQRCVVLGSSKAEDKHLQLVHTKDHVNLVKSISTKQKDYRRNRIASQLNSIYLNGGSSEAAYLAAGSVVKLAEKVAEGELDCGFAIVRPPGHHAEADEAMGFCLFNNVAVAASFLLNERPDLGVKKILIVDWDVHHGNGTQKMFWKDPRVLFFSVHRHEYGGFYPAGDDGDYNMVGEGPGEGFNINVPWDQGRCGDADYLAAWDHILIPVAREFNPDVIFLSAGFDAAINDPLGGCCVTPYGYSVMLKKLMEFAQGKIVLALEGGYNLDSIAKSSLACVQVLLEDKQIQGPPEAYPFESTWRVIQAVRKRLCTYWPSLADELSWKLINQKTPTPIILISSSDSETEDNAQGLLDQMSKLSIENPQGTLLENHQVEPASTSWRADLAKVDVWYASFGSNMWKPRFLCYIQGGQVDGLKKVCVGSMDKSPPKETVWETFPHRLFFGRESSVGWGVGGVAFTNPLANLIDQTHMCLYRITLEQFNDVLSQENGLNVDSDSPVFDLAALQLVDNKGSILEAPLNSWYGNVVCLGKERDIPILTMTCTLSAVEKFKSGEIPIRPPAKAYANTLIRGLVEGGRLSKEEAEAYIDKAVSKPL

SEQ ID NO: 2583 - DNA, 684 bp, Arabidopsis thaliana
  misc_feature (1)..(684): Ceres Seq. ID no. 13646615
ttgttcgagatgatccgagtacataaagcccgtcctgagcgacatgaccctcctcttcagcgtcaattgcgcaagttgtcccggtattgatcgactcagccattctcgacaagatgaagttcaccaacagcatcacacattccgctcttggactggtaaccattctaccaggcctcgctgttgcccagaactctggaaagttcaacgtcctcacttacaacgttgccggtctgccggcattcctcaacaacaacgaagttccaggagataaggcgacaaactcgcgactcattggagctgcgttgggcagagagggtcacgatattgttcatgtccaagaggacttcaactatcatgcctacatctacgagaccgacactcatcctgtcaggactcccacttctggaggagttcccttcggtgatggcctgaacacgctggccaactacgactatacgaccttcacccgcacgaagtggaacaagtgctctctcaactcaggtgactgcctgacgcccaagggcttcaccttcatgcgcatgcctaccatcggcttcgagcttcacctgtacaacctacacgcggacgctgggtaggttcatcgacaagcgtgtactggttcttcgactaatgaccatcttagctcgaacagcgacgatgtcgcagcgcgatctgcaggtatcg

SEQ ID NO: 2584 - protein, 160 aa, Arabidopsis thaliana
  misc_feature (1)..(160): Ceres Seq. ID no. 13646616
MKFTNSITHSALGLVTILPGLAVAQNSGKFNVLTYNVAGLPAFLNNNEVPGDKATNSRLIGAALGREGHDIVHVQEDFNYHAYIYETDTHPVRTPTSGGVPFGDGLNTLANYDYTTFTRTKWNKCSLNSGDCLTPKGFTFMRMPTIGFELHLYNLHADAG

SEQ ID NO: 2585 - DNA, 817 bp, Glycine max
  misc_feature (1)..(817): Ceres Seq. ID no. 12583237
acactttctagtttctactcttcattttgtgttgtagtaagtaacttatgacgagcctgaaaagcagtgaaaggaaaatgatgaaaaggggtttcatgtgccactctcgggcttcaacagctgtgtgcatgagtactcgtgaccctcgatctgtagttgtgcctaagaagcttgaaagaagagtgtttcttgatgatacaaggttgatcaactatgccaagtactccaaacttgttgagcctccaaggtctagtccagttccaaagatcaagcttagagggcaggaacaagatcaagccaataatgaacctagggaatttcagaaaaaacagacagataataatgtctttcaggttttgtgatgcgggttgcaattcattgtcaaggatgtgctggaaaggtgaaaaaacatctgtctaagttggaaggagttacatcatttagtatagacgtagaatctaagagggtgacagtgatggggcacatttcaccagtggaagtccttgagagtatttcaaaggtgaaaagggcagagttctggactgcttgttaaaagcacttcagagtaccttataaagggcagcacagaagatgcagaactagagtcaaaaaaagttagaaaattgccttagcaatctcatttgttaacatctttgtatggtggtggacctggtggtcctcaacacaataaaactagggaatggggtgggtagaaatctgctcaagtgactaggttctggttgatgttcaatgacaatttaatggtatctacccccctcccccccccgttgcacaatgcaatttcttttttttcttt

SEQ ID NO: 2586 - protein, 104 aa, Glycine max
  misc_feature (1)..(104): Ceres Seq. ID no. 12583238
MTSLKSSERKMMKRGFMCHSRASTAVCMSTRDPRSVVVPKKLERRVFLDDTRLINYAKYSKLVEPPRSSPVPKIKLRGQEQDQANNEPREFQKKQTDNNVFQVL

SEQ ID NO: 2587 - protein, 94 aa, Glycine max
  misc_feature (1)..(94): Ceres Seq. ID no. 12583239
MMKRGFMCHSRASTAVCMSTRDPRSVVVPKKLERRVFLDDTRLINYAKYSKLVEPPRSSPVPKIKLRGQEQDQANNEPREFQKKQTDNNVFQVL

SEQ ID NO: 2588 - protein, 93 aa, Glycine max
  misc_feature (1)..(93): Ceres Seq. ID no. 12583240
MKRGFMCHSRASTAVCMSTRDPRSVVVPKKLERRVFLDDTRLINYAKYSKLVEPPRSSPVPKIKLRGQEQDQANNEPREFQKKQTDNNVFQVL

SEQ ID NO: 2589 - DNA, 936 bp, Glycine max
  misc_feature (1)..(936): Ceres Seq. ID no. 13581663
aaattcgttctaacattaaagaaaatcaattacaaaataatgaatagaattgaacctacctaactaacaaaattgatcaacaacaatcaattattcatcgatcagtgtggcaacaaaaaacaaaaaattactcaaaaaataatcccatgatgctttttccctcagatcatagccaaagccacccaaagtgccacgccacccaacaccatcggagccccgaaattggaacttgaacccgaatcatcaccaaccgaaccctgtgaactttccggcgaagaactcgccggcgcagttcccggcgaggcactggtggatggtagtgtgattggtgaacctgccggcacggccgatgaaggaattccggtagaagattccggcgtaggcgcctctgccactggcggagccccgactggagaactcaccggagccaccgtcggcggaggagtcgctggggacggagccggcggcgaagaaacattgttggatgggctggaagccggaggaaccgacgatgggggctgagtggccggagacttcgccggagggttagtcgccggcggcggggtggaaccagatggagaaaccgccggagattgtgaaggcggtgataaagttggagactttgcaggaggcgccggatgggtcgccggagagggtggtttggcggtcggcggagagggggatgacttgggtgaaggggcaggagcattgtctgcgcgaaccgaacacaaagatgtgaagaacaatgcgaatacaaagagtggaagaaacttattattcatcatcgtcattatgagtttgcggtttttgatgatgattcggagaagtacgaggaagtggtgaagtgaagattaaaccaacaccaaacaaatgttaaaaagtgtttgtgatgtttgaaagtggaaagtgttattcgattaggatgtgtttaaacac

SEQ ID NO: 2590 - protein, 54 aa, Glycine max
  misc_feature (1)..(54): Ceres Seq. ID no. 13581664
MEKPPEIVKAVIKLETLQEAPDGSPERVVWRSAERGMTWVKGQEHCLREPNTKM

SEQ ID NO: 2591 - DNA, 513 bp, Glycine max
  misc_feature (1)..(513): Ceres Seq. ID no. 13581749
tctgattaattgatttgatattttaattgtttgtgatgggtatttcagggagtttgtgaactgtgtccgctgtattaaaatactttctcctcaagaagtgcagcagatgagcttggacggagattttggcaatggtggccttcaaaatcaagcctgtagcagctctgacggtggcaatacttaaatgaagttcagtaatacgctaactattcttccgtattgttaacttagattatttctgggagatgcattattgtcctaattccgaaaggcaattattatgccactgggaacttctgtgcccaccatcaggacttgaaaggagaagttttgtctatgttccggacatgcaaatttgaagagccaaatgagggcggagaagtgagctgctgctctggtttaacattgagcggtaattttgaatgtataaagtcttaggcagctagattttgcggaagctttcatgatcttccatccttggaggcaccttattattttttagccaatatgact

SEQ ID NO: 2592 - protein, 37 aa, Glycine max
  misc_feature (1)..(37): Ceres Seq. ID no. 13581750
MHYCPNSERQLLCHWELLCPPSGLERRSFVYVPDMQI

SEQ ID NO: 2593 - protein, 33 aa, Glycine max
  misc_feature (1)..(33): Ceres Seq. ID no. 13581751
MFRTCKFEEPNEGGEVSCCSGLTLSGNFECIKS

SEQ ID NO: 2594 - DNA, 493 bp, Glycine max
  misc_feature (1)..(493): Ceres Seq. ID no. 13581786
atcatcgagaactagttcaatatcctagtataccttaataaataatttaagatactatgatgagagcacggttcccattactgttgctgggacttgttttcctggcttcagtttctgtctcatttggcattgcttactgagaagccgcaaccccatctattccaacaactttggaaagttctttgagatcacccctgagaaaaacccacagcttcgggacttggatatcttcctcagttctgtggatatcaacgaaggagctcttcttctaccacacttcaattcaaaggccatagtgatactagtgattaatgaaggagatgcaaacattgaacttgttggtctgcgtagtttttttgtttggggattattagtccttttttgtgttggaagagaaacaattcagactattaaaatatttttgttgttttatttgatgttctaaatacatggatatgtttttgtttcgctcgtcataaatgtgctttttcgc

SEQ ID NO: 2595 - DNA, 602 bp, Glycine max
  misc_feature (1)..(602): Ceres Seq. ID no. 13582163
acacaaccttggttaaccgcggttcttccagcaaaccccaactaagttaaaaggtgaaaggagctgttcacagcgaatcaagtgatgattgccaggacagagatggacagacatcccctccaattttgaatgaaaccttgggggaaaccgcaccgaaaccgaggtgcgccaggcgcgtactacataagtacagtcttggttttttgagtatttagtagctatatgttggttgttattatgtttactagagcgcaggagaacagagccgggcatcctttttttcgttgcgtgtgatgaaaagcaacatctggatgccattgtacagataatccgcctctacccctgattcattgttcgaaggcgcaaaccagttcaaccccctcattcttttttggttttgatgagaatagaagatagagataatctgtctgttattctagtagtgtaagaaaggaaggcctgatcacgtcgtagaaagtgttgttgttgttgttgttgttgttgttgttgttgttatacttgtctgtacttgttcccataccatggtatattgtactactgtattattctttggagatgattcaattcttttgccccggggg

SEQ ID NO: 2596 - DNA, 1350 bp, Glycine max
  misc_feature (1)..(1350): Ceres Seq. ID no. 13594027
gatttattctatatgtaagaagaggattcaaactatggatcatttgcgtaaagtcttaagagacacaggtgcttatgtcaattggtataaataaaaaattctagtacatgtcaagtaaaatttgactgaagccatatgttaataatttctcctaacaatggatttattttgtgtgtcccgtgttatcaaggttatagagtagtaataaaaattgaccctgatattattatcaagcttagtgcaagtaattaggaaaaagagtttacaccatcgagtaatctcaatgaacatcaaaaagaaaaaaagatatacgatcataaacttacttgatcacgtatgatttggggaaccaaatgcttctcctgacttaactttgcaaacttgagatgatcaggctacaatagtcatgcagttgcggataaaagagttgttatttagttaggataaatttgtataatgaagagcaaaaggagaagaaagagaatgtagtggaaaaagataaagaaaaaggtaaacatgcagaaattatggaaaaattattgtatgaatacattattcttttcaaaaatacaatttattcaatatcatgatttcacttattaagatcctcttgttgatttctttttcttttttatttattcctttgatttcgatgaatcaatgttaattttaactcaaattactgatattattatgatattttatttggtttggatcgattaattttgactcaaattactaaagttattaagatttggttcaatatcctattttgactcaagttactacaattaaattataaattttttctcaaaatatccattattaataatttctttatcatcatcattattaatattaatttttagtcttttgcgtcgggagtgttgcactttctcaaatggtgaatatgtgaagtctggtgtagcggaactggagaaatggatagtcaatgcaacagaggagtatgcagggacatcctggcatgagctgaattatatacgacaagccatcgggttcttggtaatacatcagaagaggaataaatctttggaagagattcggctagatctttgtccggctgttatatccctgatccccagtgttcacagcacccctgctacctatatgaactcctgagtcctgatcccctgctctccctcctgttcttaacatatcagtagagtgattgactaaaaatttatttgatcgttaatagtaatacatttatttgttgaaaattttctttttaagtaagacaattatgctggtatcttcattaacagtgcctctcatgtctgaatgttctaagaatatgaaacaaacagttaatgactttccttccctgtt

SEQ ID NO: 2597 - protein, 38 aa, Glycine max
  misc_feature (1)..(38): Ceres Seq. ID no. 13594028
MLIISPNNGFILCVPCYQGYRVVIKIDPDIIIKLSASN

SEQ ID NO: 2598 - protein, 30 aa, Glycine max
  misc_feature (1)..(30): Ceres Seq. ID no. 13594029
IYSICKKRIQTMDHLRKVLRDTGAYVNWYK

SEQ ID NO: 2599 - DNA, 625 bp, Glycine max
  misc_feature (1)..(625): Ceres Seq. ID no. 13594409
  misc_feature (484)..(484): n is a, c, t, g, unknown, or other
agaacatcctaatcgaaaaaattcatttctccctctttagatttctcctcttctccaattttaaacgaaacttccatatttttcttaaatttatttgatcgttttgctcgtggctgaggagctcctccacagcgaaatggggccgggccgaaaccattttccgcatcaaatttggggtattgctatttgctaatagtaatatgcacgtgggtacactttagtcatatcccaaaattgtcccttgaaaaattgtacaacataatcatatttctattgtgcaattgaggggtgtaaaaaaaataacaatgaaaatacgtttccattgtacaaatcacgttttcattattaatttttttatcccttaattgtgcaacaaaaacacgattttgttgtatatttttttatctctagctacacaatgaaatcataattttgttctgttatttggtttcacttccaaaacagaatcataattctattgtcnaaaaaaaaaaaaaaaaaaaaaaaaaaaaaaaaaaaaaaaaaaaaaaaaaaaaaaaaaaaaaaaaaaaaaaaaaaaaaaaagtttatcaatcccgccaacctcaagggggggcccggaacccaattcccccaaaaggaagtc

SEQ ID NO: 2600 - protein, 31 aa, Glycine max
  misc_feature (1)..(31): Ceres Seq. ID no. 13594410
NILIEKIHFSLFRFLLFSNFKRNFHIFLKFI

SEQ ID NO: 2601 - DNA, 889 bp, Glycine max
  misc_feature (1)..(889): Ceres Seq. ID no. 13637616
ttttttctttttttctttccattgctaatcctttaatatcgaagatgttatatatgccttgtggagtatgaggatggagacagcatgcgagttctgccttgtcatcatgaatttcatacaacatgtgtagacaagtggctgaaggagattcacagggtgtgcccactatgtcgaggggatatctgtgtatctgattcactgccaagggagaactaaggtggccaattgttaatcaatatctccttctgagatactcatggctcctttgatcattcattgcacataagctgatgtgacaccatcagaagaagcactctcattgctgtcaatgattatttactccaatttctgaataaacatcaaaccatagtagaaatagaatgatctactagctcattctctatcaccaagtgaagcagatggcccaaaaaaggtggggtggaggtattgtttaatgaagaatttttccaacatgtttcacaaaaaaaggttctcttttgatgtatccgacaaccttttgttttgccccacttcttgtttaacacacaatttggaaaaaaagcatcattcaaatgagcacttttggtcatggaggaaactgcagattggctcaagcatctttgaccgaatcattctctttagctgtagaccagtcaactgagtggcttcaaaactataagcagtggtgcatgcgtgtgatgatatccttttcacttttcagaggaaaaagggaaaagaaacatttcaattgcagtgtaaattgtggagacaagtggtagttgtctcctaacaaacctaaaaagaccactagctacactgatttttgttgtacaatttgtctaccttgtgttcttccaatgcatgatcatgatgcaggggtggttatagg

SEQ ID NO: 2602 - protein, 68 aa, Glycine max
  misc_feature (1)..(68): Ceres Seq. ID no. 13637617
MSTFGHGGNCRLAQASLTESFSLAVDQSTEWLQNYKQWCMRVMISFSLFRGKREKKHFNCSVNCGDKW

SEQ ID NO: 2603 - protein, 68 aa, Glycine max
  misc_feature (1)..(68): Ceres Seq. ID no. 13637618
MKNFSNMFHKKRFSFDVSDNLLFCPTSCLTHNLEKKHHSNEHFWSWRKLQIGSSIFDRIILFSCRPVN

SEQ ID NO: 2604 - protein, 62 aa, Glycine max
  misc_feature (1)..(62): Ceres Seq. ID no. 13637619
MFHKKRFSFDVSDNLLFCPTSCLTHNLEKKHHSNEHFWSWRKLQIGSSIFDRIILFSCRPVN

SEQ ID NO: 2605 - DNA, 1133 bp, Glycine max
  misc_feature (1)..(1133): Ceres Seq. ID no. 13639977
agagaaatatcaacacatgcttcagaatcttgttgttaaggcacaacagagtaacaatgaaaaactgttagagaatccgtatcttcaaatgtgtggcatacttcaactggcaaatgatctggggattgacctatgatcttcaaggcgtgactttctgggagattgttatacggggtaggacatctgcatcggtttgaggaattattgctattgattctcagggaaaacttccattattcgattggctcagattgaaacgcctatccaggacatactctagtttgaatgtttcattcctgcaacaaaattgtgattgattgtcaaaattgcaaagtacaattgcgtccagagaaagagagccagtggacttgggtgaactcttgatattaattgattactttgagaagtaattaaccgaactaggaaacatactgcatgccaccaattctcattgatctcttcagtgatattactcgtttggagagccatgttgtatacttgtatcttccatatcttctacatgtatttcaactattgggggaagccagagttctgttgagggatacttttgaacgtccctgattttgactctactgctgaatgttgcttatcttggcgtgtcaccaggtagagacccctctccctctttctcttgctttgttggggagattgacacctacatagtcttgacacttcagtcgagattatcagtgcaggccaaaatagttgctgatgattgcattacattccaacctaaatgtatgcagaaactacacaagtttgtttctcttgtacaggacgtagattcccaccgagccttcttcagtttttttcattcatgaaggctgcctctatgctttcttttttacttggcatacaggacctttcatgggaaaaggaagaactcaattttgtgcgttgtcaatatcatcacaggtccaacaaaatcctgttaggggcttttgggatgtctacttttagaggcatccaagttgctctcattttctgtaaatatgttgttttatttttttccccttttgatcccacccttgttgcgaaaactgtaacatgaattgagaaattaatacgtactaatgtagattatctaaatagtactcatggttttatgatgg

SEQ ID NO: 2606 - protein, 104 aa, Glycine max
  misc_feature (1)..(104): Ceres Seq. ID no. 13639978
MYAETTQVCFSCTGRRFPPSLLQFFSFMKAASMLSFLLGIQDLSWEKEELNFVRCQYHHRSNKILLGAFGMSTFRGIQVALIFCKYVVLFFSPFDPTLVAKTVT

SEQ ID NO: 2607 - protein, 77 aa, Glycine max
  misc_feature (1)..(77): Ceres Seq. ID no. 13639979
MKAASMLSFLLGIQDLSWEKEELNFVRCQYHHRSNKILLGAFGMSTFRGIQVALIFCKYVVLFFSPFDPTLVAKTVT

SEQ ID NO: 2608 - protein, 72 aa, Glycine max
  misc_feature (1)..(72): Ceres Seq. ID no. 13639980
MLSFLLGIQDLSWEKEELNFVRCQYHHRSNKILLGAFGMSTFRGIQVALIFCKYVVLFFSPFDPTLVAKTVT

SEQ ID NO: 2609 - DNA, 1076 bp, Glycine max
  misc_feature (1)..(1076): Ceres Seq. ID no. 14303874
acaagtgtttattatttttatgatattggcgtagcttagttttctttggtgtgtcacagctgcagtcatttcttttgtagaaatcaactgtttagtaacttgaaaagtctcaaccacacaaaaaagtacagcagaagaaagtactagaatttattaagttactgaattattaagttacttggtacttgtggattacctcttagtgcatagcccctttttacgtttattaagtttctgaattattaagttaatgttagtccccatttttgttttttcattattaaggaactcttgccctcatattccctagtagttttcttatcttcattttaatgaatttatatattgaaggaccttctcatttaaaaactcttgtaattaacttcttgttgtacagattttgaaaccaggttttacaataatagctgatcacgagatgaaatgccttttgttattcattcgtggcacacatagtatcaaggatactctaacagctgttacaggaaatgtgatagcagactgaagctggtggcaggatctgctgaaggatattctggacatgttgatggaaggtttagggaggcaaggatgaatcaccccaaagggataacggaaaaataaattccaatggtggctctgattttttgggcatgccgcagtttaaagctcaagaggcagtagcaaaagcattacagaggaagtgaaccaattcttcacaattctgatgtctagagctgtctactccaattctgatgtgtacatctttgatgatcccctaagtgctctggatgcgcatgtggctagacagtgtttgatgccattgctggatctttgagttcatgctatgtggcaactggttctttctcaaggactgcagtgaatttcagtgctggatgtcaaacatcagtatcaaatattgtgatggtcgttacagtgtttgtctccctggaattgtagctattagatcataactatatgtatagcttctttgtgtcaatgatacaaattggaaatatttaattatatgtttttttttactatactgctacctattaaagcataagctaacttatttt

SEQ ID NO: 2610 - protein, 43 aa, Glycine max
  misc_feature (1)..(43): Ceres Seq. ID no. 14303875
MLCGNWFFLKDCSEFQCWMSNISIKYCDGRYSVCLPGIVAIRS

SEQ ID NO: 2611 - protein, 36 aa, Glycine max
  misc_feature (1)..(36): Ceres Seq. ID no. 14303876
MSRAVYSNSDVYIFDDPLSALDAHVARQCLMPLLDL

SEQ ID NO: 2612 - DNA, 957 bp, Glycine max
  misc_feature (1)..(957): Ceres Seq. ID no. 14304019
tgagtaacaaaacaatccttttatcaagggaatctaactagatgattgagtgagttattggagactattacctgtaaaaaaaataaaatcttttcgcggttattgtcatgattaagagtggtgtcctattcctatctatctattatctaaaaccatcactcgtcagtttgagttttgctcaacctatatattgccaaaagaaattaccactttgttgttcaaaagttgtgctaggaaaaatattttagtgaatttggtcatttcatttttttctggagaataaataataataccttccatttcctgcactgaattgtgttttcctctgcctttgtaaaaaaactgtcgtactaaagaaataagaggatcctaattgaattttggcttcccatattcacaaagtgcttcaactacctaacagcatcttttcaataacaggggcacatacaattggcctggctgaatgcaaaaatttccgagcacacatctacaatgattccaacgttgatccctcttaccgaaagttcctgcagagcaagtgccccagaagtggaaatgataaaacactcgaaccccttgaccaccaaactccaatccattttgataatctatactttcagaatttggtgagtaagaaggcccttctccattccgatcaggagctgttcaatggcagttctactgacaatctggtaagaaaatatgctaccaatgctgctgcattctttgaagactttgccaagggcatgctcaaaatgagcaacatcaagcctcttacaggaagccagggccagatcagaatcaattgtgggaaagtcaattaaacgttagcaagtgatgatgtataatatgtttttaatataaattttatttccctcctccaaagttatgtcgaataatttgatcctcgaaccgtcaagcaacctggtttatcatcaatgaactacgtagttttac

SEQ ID NO: 2613 - protein, 46 aa, Glycine max
  misc_feature (1)..(46): Ceres Seq. ID no. 14304020
MIKSGVLFLSIYYLKPSLVSLSFAQPIYCQKKLPLCCSKVVLGKIF

SEQ ID NO: 2614 - protein, 45 aa, Glycine max
  misc_feature (1)..(45): Ceres Seq. ID no. 14304021
MIPTLIPLTESSCRASAPEVEMIKHSNPLTTKLQSILIIYTFRIW

SEQ ID NO: 2615 - DNA, 1225 bp, Glycine max
  misc_feature (1)..(1225): Ceres Seq. ID no. 14304605
ttttttttaacttatcggtagagttacttttcaccctaaagaaaaacgtgtttgggatgagattgttttcgtgcttattatgtgttgtgtcatcgtttgtggttttactactatattgtgttttgcttattatgtgtttgtgcttgttaagttgggttttagtagtattgttgcagaatgaggctattcgtttggttttgtgcttctctgtctgcaatgttgaacgctatctctgtttcatataattagtgtagtaagtgtagtgtaagaactgctatttatgtaatgatttagcgttttgcagtttaggtcgtagctgtgatgtgtgtttggttttgagttgaaacaactgaatgtttgtaaatatgtgaaaaagtgaaagctatattttgttgctttgctgttaatgtgaaaatttcaatcgatttttctaacgtgaagcaaaaccaaacacactgattatgtgagaaatccatgttctagtccttgaaaatgtaagggtttagtgttggaaaacattttagccctttttcacttgagttaaacggaatgatgatttgcaaagtcatggacgaaagtgagaattttgtaaattcaaggactaaagtaagactaattacagggactaaagtagatatttacttgttttattaagatagttattatgcaatgataatatgatttttggaagggggatagattatttatgagctggtttctggagtgtctccgtgttttcctgtctttgagattcctgcttctttagttcaattctgagctgctgatagcaatcttgatcattgttggccttttcttttgtgctgagattttcctgctgtatgttttctcatttttttttcctgtcaataactaagtggaagctttcatggcattagttatagaagtaggataatttattttgtatcatggaacctttttttatcttgtctgtcattcgtgtcttttcattgttggttgtctttacaatggcatgacagaactattttgcagaatccagcaaataagaaggagatcttttgtgatgagaagctgaagaccatttttgaggggaaagataaggttgggttcacagagattgctaaattgctgtctaaccattttgtgaaatcagtctgatattttgctttgatggtactgttactgatggtaactggttctagtacattaaataggtcattttgtcttcaagtacatggtctgtgac

SEQ ID NO: 2616 - protein, 80 aa, Glycine max
  misc_feature (1)..(80): Ceres Seq. ID no. 14304606
FFNLSVELLFTLKKNVFGMRLFSCLLCVVSSFVVLLLYCVLLIMCLCLLSWVLVVLLQNEAIRLVLCFSVCNVERYLCFI

SEQ ID NO: 2617 - protein, 62 aa, Glycine max
  misc_feature (1)..(62): Ceres Seq. ID no. 14304607
MRLFSCLLCVVSSFVVLLLYCVLLIMCLCLLSWVLVVLLQNEAIRLVLCFSVCNVERYLCFI

SEQ ID NO: 2618 - DNA, 1069 bp, Glycine max
  misc_feature (1)..(1069): Ceres Seq. ID no. 14305373
agttttgacttggtgcaccccataattaaactattttttaccataacggacgtaaatgcccttcaccactatcatgaagaccagaaccaaaaccaccacacccaacaccgcaattgtccaaaaaccctcagtgcgatgatcgagtgccaacagcagcacccaaccacactcgccatcaagaaattgttgcctaagaaccactacaacaaagtggacatgccgatcatttgtgccacacgccccctcctccctctagatcattgtcataggtggggctgggttcatcgggtctcacttggtggatcgcttgattgctcaaggagacgggaaggaaagaaaacttgatgtcccattttggtaacctcgactttgagcttatccgacacgacatccattgaacattcatttgggaacttcttagcccattgaaatgtttcgaacatgtttctccacctttatagattgatgaatttgtggcattttcttatgagtattactgattgaccaatccataatgtatttgcattacaaattgaacaatctataattatatcacaaaggtggagtcgagcatggggtgtagggggcttgcgtgggcgatggcgggacatggaagcgatagtgtgcacagatctagtggtatagaggttactgcagcccgcgattgatggtggcactcacgcatggtgaaggttctcggagaaggtggcgggagagaggaagaagaatggtaaaaaggggatattagataattatgaggtgcaccaagaaaaaaatggggtgcgttaaatagtttcaggcagctcgttatgcatttttggcttaatgggtcaaaattctccaaaatgctcaaactattactagttacttttgttgacagtggcccaactagtgtggcagcccactattactactcacaactcccttcttggtacattcagccccccttctttatagattttatttggtagtttctattttcactccttaatattactaatacactcccctttattttgttttaccaaaataccctgtgttccagaaactaatacactctccttttacc

SEQ ID NO: 2619 - protein, 114 aa, Glycine max
  misc_feature (1)..(114): Ceres Seq. ID no. 14305374
SFDLVHPIIKLFFTITDVNALHHYHEDQNQNHHTQHRNCPKTLSAMIECQQQHPTTLAIKKLLPKNHYNKVDMPIICATRPLLPLDHCHRWGWVHRVSLGGSLDCSRRREGKKT

SEQ ID NO: 2620 - protein, 69 aa, Glycine max
  misc_feature (1)..(69): Ceres Seq. ID no. 14305375
MIECQQQHPTTLAIKKLLPKNHYNKVDMPIICATRPLLPLDHCHRWGWVHRVSLGGSLDCSRRREGKKT

SEQ ID NO: 2621 - DNA, 925 bp, Glycine max
  misc_feature (1)..(925): Ceres Seq. ID no. 14307229
gatcgcgtcttttagttgtctatatatgtatctgagttatgctatattatcatcaagtgtcctaaaatgaagacatacagacgcagaacaaaaaagacagtgcatctatcacaggaactgatcaatgaaatcttgttgaggttgccggtgaaatctcttgtccgcttcaaatgtgtgtgtaagtggctttcccttatctctgattagcacttttcactatcacattttgaacgtgcagccgaaggcacagagagacttgtgttctttgagccttcagctcctgaaatccgatccatagacttcaatgcatctctttacgatgattctgcttctgttgcattaaagctcaactttttgccacccaaaccttatgatgttcgaatccgaggttcctgtcggggccttgtgctcttggagtgctgtcaaagtctctgggtgtgaaatccatccacaggtttccacggacaactagcttacccacctataattgctcccagtaagaatgtcatgtttttgacatttctctatggtttttggtatgacccatcaacagatgactacttggtggttaaagtgttctgccacgcttgctcagctgttagtgctaactgatacggaagcagaggcagcaaacacaacaacaggaacagcagtcacaaagccaaaaacgaaggtgcaagtagaagaaaagcccaagagaaagatcacaaagccatcttacctcaaccactacttttgaggaaatggacaaagctagtagcgtaatctgcttgttggtgcttgtctacccacaggggacaagcctaacaaattctgttagtgtaatattcctaggcacacatcagcacaattttgttactaggaaacactataaatatagctatgtaaataacaagcaagtcaatgaaaattcacaattaccttc

SEQ ID NO: 2622 - protein, 70 aa, Glycine max
  misc_feature (1)..(70): Ceres Seq. ID no. 14307230
MVFGMTHQQMTTWWLKCSATLAQLLVLTDTEAEAANTTTGTAVTKPKTKVQVEEKPKRKITKPSYLNHYF

SEQ ID NO: 2623 - protein, 66 aa, Glycine max
  misc_feature (1)..(66): Ceres Seq. ID no. 14307231
MTHQQMTTWWLKCSATLAQLLVLTDTEAEAANTTTGTAVTKPKTKVQVEEKPKRKITKPSYLNHYF

SEQ ID NO: 2624 - protein, 61 aa, Glycine max
  misc_feature (1)..(61): Ceres Seq. ID no. 14307232
MTTWWLKCSATLAQLLVLTDTEAEAANTTTGTAVTKPKTKVQVEEKPKRKITKPSYLNHYF

SEQ ID NO: 2625 - DNA, 1171 bp, Glycine max
  misc_feature (1)..(1171): Ceres Seq. ID no. 14307284
ataaattgagtatgtattgaattgtaatatatatacatatacatacatacatatatatatatatatatatatatacatatatatatatgtgtgtgtgtgtgtgtgtgtgtgtgtgtgtgtgtgtgtgtgtgtgtgtgtgtgtgtgtgtgcattgagatgttgtgtgcactgagttgtgagctatgaatcgtacaatcacatgactataagaccctttaagggcgacgggttaatgcacgacgagtattgtgatgggaaccactgtggggacccaacgagtttaatcacaagcgtgacaagataaaattattgagaataattcaggaatcgtgtgttttgtatagttcatagatagattctgtgcgctaaaatattttatgatttggacttgaatcaggagggagaggccctaacggactcttcagagtctaggccttggggataaatacacctagtttgagtgctcctttaagtctatgtcgatcctacatggttggagcattctcacaaaacggcgtgatcctaactgatctccctataattttacctaatgagagtgatctgacttactagtgtatggtttgtattgcatgtactcctaggcgcctgacgagatttttcactgacatggtaccacattgcatatagggttgattcttagtgtatttgttgcataactcttgtgtattgattgatattgattaatttagtgatattgtattttgatcattgagtacgtgaataatgtgaaaatgaatgagagttgttgtgttgtgatgtgatgttacgcgacaaagtggtggagtgacgtgagctatctttaagtaaattgtatttcatttatatgatatgtatatttacatgttgttttgtttctctctattagttaggaatgtgataactcactctgtgtgttgtttgtgtttggatcctgtgatgatctcgaactttgtgttcgtaggagcagatgactaggcaaatttctttaaagaaccttgtgctgaaggacgttgggacacaatgttttgcaaggatgtgacattggagcatgagttttgtttaattacatgatgttttgagcaaaaaatgtttctaacaagttttatttgataatagtgaagtgaatgtaaaccttttacccttttgaaatgcttttatttaaatgtgtttt

SEQ ID NO: 2626 - protein, 41 aa, Glycine max
  misc_feature (1)..(41): Ceres Seq. ID no. 14307285
MYIYMLFCFSLLVRNVITHSVCCLCLDPVMISNFVFVGADD

SEQ ID NO: 2627 - protein, 37 aa, Glycine max
  misc_feature (1)..(37): Ceres Seq. ID no. 14307286
MLFCFSLLVRNVITHSVCCLCLDPVMISNFVFVGADD

SEQ ID NO: 2628 - protein, 34 aa, Glycine max
  misc_feature (1)..(34): Ceres Seq. ID no. 14307287
MTIRPFKGDGLMHDEYCDGNHCGDPTSLITSVTR

SEQ ID NO: 2629 - DNA, 1352 bp, Glycine max
  misc_feature (1)..(1352): Ceres Seq. ID no. 14308128
ttcaaacgcctctgtactcttcccaccagtccaatgtaataaaattttgtgcatactctaaaatctaaaacaccatgatggggattacagatatttcatgtccacacttcctttctcatggaaggcattactcttctgttttcttctcataaattgcagtgtgcttcaacactctcaaacaaactttttcaatgtaccaaatgtggagtgaaaactgatatcggttgaagcaaatatagctggatgatgaccaagctgggcagtgtcacaacaactcttaattaggaataggatgaggagcctcaatggggaatgcatgctgtatgtgagagaaaagagatggttgaagttacagaaaatttaaatttgaaaaaaaatgaaaaggcagttttatcaattaatcagttatttaactgagtatgacggatttttgtctgaaagaaaaatgaggaggatgctaacccatatgtgtgtgttcagataccgtaattttgcttcataattcattattgattcaagtgttcatgtacaagttgcatgctaattaatctgtatgttacagttttgtatgataataacaattttttacatttagttgctttgatgttggtctctgtttaacatttttttgtatgtttccgtgattagtgctcaaagcacggctaagattgaggaactgcttctagaagatcaaaatgttaagcgcagaagggatcgaatccagaaacaatcatcccttctctcgaaattgacacgccaattgagtattcatgacacccgagcagcagctgcctctggctggtcaaacggtagtgcagagagtagcccaagaagcagcagcggacctggtgatgactggagatctgcctttgatgcagctgccaatggccctgttagtcgaagtggttcatcaagatcgggatccaatggtcacagtcgacattctagtgatgctgcccaaaatggtgatgtgaactctgggtcaaactccagcagccgtcgaacgcctaatcggttgcctcctgctcctccgggttcttcaggttacaaatattaacaggtggctgactagtgattgcttgacagttactgtttgatacatttttggagggtgaggctgctcccaccccatttcatacggtcatccccaattctttgtttctgccggtatatttaggtgaggaaatgtttgtgtaaatagaagacgactatagtttattagtataagttttctgggcattcgtctcattatccggaagtttggtatcgaggtggacttgagtacatttatcatgttttgctttttttgtttacgaagcatttatcatgttttgctaaaaaaaaaaaaaaag

SEQ ID NO: 2630 - protein, 67 aa, Glycine max
  misc_feature (1)..(67): Ceres Seq. ID no. 14308129
MTPEQQLPLAGQTVVQRVAQEAAADLVMTGDLPLMQLPMALLVEVVHQDRDPMVTVDILVMLPKMVM

SEQ ID NO: 2631 - protein, 41 aa, Glycine max
  misc_feature (1)..(41): Ceres Seq. ID no. 14308130
MKRQFYQLISYLTEYDGFLSERKMRRMLTHMCVFRYRNFAS

SEQ ID NO: 2632 - protein, 40 aa, Glycine max
  misc_feature (1)..(40): Ceres Seq. ID no. 14308131
MTGDLPLMQLPMALLVEVVHQDRDPMVTVDILVMLPKMVM

SEQ ID NO: 2633 - DNA, 1382 bp, Glycine max
  misc_feature (1)..(1382): Ceres Seq. ID no. 14310600
atagggctaaaatggaagttgtagaaatttctacaagcaaaggccatgtgtagttgttgcaattgtagggaagcaaaattggactatgatatggagagtggggaccaattccagaaattccattgagaaatatctacccccatggttgttaaaatcgcgctttaactcatgaaatcgtatgattttacgattccaccaagggtcggcgagttgaatcggaagtagaatcgaaaccggagtagactcgtccgatttagcgcagactcgggcgagtttaggtagactcgcgaatctgcgacgagtccgcaagttcatgaaattttcaaaacgacatcgttttgaagcagagctactcccttactcatgagtcgtgactccgtggccgtgctgtgctgaagctgctactcaccgctgttcactcgcatcgtcatcgctggccctcagtcgcggtcctccatcgtcatcggccgtcgctgcctcgctggtcctcacttgcgctccaagctttgcttcacgtcacaatgctaaggataactatgaatttctctctaaatgcataaaagaaaatttgggattcaaaaatggtaaacctattgcagctcgtattatatacaaatgtctacttcattggcattcatttgaatctgatcgcacaaccattttcgattccataatcaaaggcacaaatgaggttctaaagggaccaaaatctccattgaagtttattggatatgatgatggtgtagcgcatgtggaggcgaaatatcctgctatactttttaagcaacaactaactgcttgtgtagagaagatttttggtcttttacgtgacaatttgaaaaaggacctttctccacttctgggatcatgtattcaggctcccaaaacaggacgaggagtgcatgggggaaaatcatctagatttcctggtgggattccccaacaatcatcaagtggtcagtggagtaacattgtcaaatttttggattcactcatgagcaaacttcggcaaaatcatgaggcacaacactactggctttaggggtgaaaaactgaagaccataccatatcatgagtcacatgattcttagtatctcgggtccatcacaccatatgacagcaaatagagaatatgtaaaccatagggttcaagtaggttgctgtatgtagaattgtagattatagattaaatttctacttcttagtaaagtgagttaggggagtgggagttgggagcacattgtgatcaattaatatactacatattgacagagtagttacaactgtttgttcagttaaagctttggtgtgacataatttgacattggtgtaaaaaaattaatttacattcaggtgggaagtgaaattgtacacttatttgt

SEQ ID NO: 2634 - protein, 32 aa, Glycine max
  misc_feature (1)..(32): Ceres Seq. ID no. 14310601
MSHMILSISGPSHHMTANREYVNHRVQVGCCM

SEQ ID NO: 2635 - protein, 31 aa, Glycine max
  misc_feature (1)..(31): Ceres Seq. ID no. 14310602
MGENHLDFLVGFPNNHQVVSGVTLSNFWIHS

SEQ ID NO: 2636 - protein, 30 aa, Glycine max
  misc_feature (1)..(30): Ceres Seq. ID no. 14310603
MVNLLQLVLYTNVYFIGIHLNLIAQPFSIP

SEQ ID NO: 2637 - DNA, 1305 bp, Glycine max
  misc_feature (1)..(1305): Ceres Seq. ID no. 14311227
aattatttatgctcctaagtttttaaaaatagggaaaatcaatcaataaatatttgagaataggaaaagacaactaattacgaataatgatgctgattctctaaatgcatcaattatgctaatacatggaattttgtaaataatggaactttaccattaattgtttaggttcttaagccagctgagtttaggtcatcttactttctttcccttcagaacttgtgttctttaatatttggcaaatagaagctggtgtataaaacaatatgccctattaattggctgtagatagtggatttggctcttgtaaagtgaggggaacactttagaaggtaaaatgtatagttatagccatctacagttgatgttgtgataaaaaatacatgcacatgtatagcaaacttgttaaatctcaactgctaattttttaattaacctttagaggatccaaatccttgtattatgtagtttgtactactgtttaatagccaaattttcaataataaacgtagaataatcaattgtgaaaaattgtggcaccatagcgctgtcgtgttgtatcaccatctctggtccctacaggcttgccgtaatattctatctttctcttgcggctgtgctgactggggttgcagccaaatagtgtttggcactgcacctaagggtgaaatacctgttgtttgactggcatgtcccctttgttatggattaatcccagcaaactgtagtttttcccgccagaaccacccttttccactaattctgagtattattgataaatgtcttaaatcagatgtactttttgagatttgagcattattgtgtattataaattacttaatattgtttcttgtatctcaggtatagtaggctctctgttctgctataacatatttggggttgtccgctgtgcactgctctttggatttgccgcctagaattaatttacatatcttgaaactatttcctaacataaaatattcaagtttctatttttacttttattgggtatgttttgttaggtctattggagatgagagcctttgcaaggaagtatttgaggagtacattgcacagctaaaagaagaggcaaaagagaatgagcggaaacgaaaagaggaaagggcaaagaaggaaaaagacagggaggaaagagaaagaaggaaagggaagcaaagaaaggaaaaagagggagggcgtgaaagagggaaagatgaggcacataagaaggataaagcagacagtgacagtatggagttaactgaaatccaaacctccaaagaaaacaaaaggtctgaagatgat

SEQ ID NO: 2638 - protein, 53 aa, Glycine max
  misc_feature (1)..(53): Ceres Seq. ID no. 14311228
MSGNEKRKGQRRKKTGRKEKEGKGSKERKKREGVKEGKMRHIRRIKQTVTVWS

SEQ ID NO: 2639 - DNA, 1141 bp, Glycine max
  misc_feature (1)..(1141): Ceres Seq. ID no. 14311902
tcttataaatatacttatcagttacaccaaaattaggaaatatccttgtatgcacggagcaatattttttcccccttctcattggctcaaaccttggatatcatgttatgtggcataataaatgttacactttttttgagtttggacttgagtcagattttgtaaaattgcaattttcatgattttgcctgcttgtgttatgtagaatttggaagagtttatttggttatggtgttactgtgttagaataagtcaaaagatttccattatgatagtagtggcatttagttattgtttatcaaataaaagttggcatacttgacttgtatattctcaaaggaggtagataagtcattggcttcagctgcaacagaagttgcaaaacaagatgtggagaaaactgatgagcaatccaacgatgatgctgttcatccagacttgtttttagagaacttcaatgaactgaagaaatgggttgatgtcaagtgcacaaaatatggaatcctcttggtgacaaacgagaggcgtaatcaaaggcttgggaccgcactgaaggtactcagtgacattattcaagatgatgccgagccttccaagaagaaattctatgaactaaagctctctttgcttgaggaaattggatggacgcattttgctgcaaatgagagagaatggatgcttgtgcgtttccccccaagcttgcccccattctaggctcttcccattgtgaagctgttgaactgcaatgcaaaggagctgtgtgcttttccttggttatttgtagctatgacaacaattcatgcaacattaaattgaccattttactccaacaagctccctgctcaattggcagttgcgtcagcctaagttggaagacttagggtatgatgttgatgttgaagtttcaattctttaccaagctacctttatcccctcattatccaggtgcttgcatacacttcctatgcaaaaaataaaagaaaacaatatggcttttctagacatcttgtcattctgttgtatatggtcctatggataaccttgctgcattcaagtgcctgataatcctcgggtgtggaacacacatcaagggatgctaatcccctttgacattagtaattacagaattaagttggttttc

SEQ ID NO: 2640 - protein, 69 aa, Glycine max
  misc_feature (1)..(69): Ceres Seq. ID no. 14311903
MDACAFPPKLAPILGSSHCEAVELQCKGAVCFSLVICSYDNNSCNIKLTILLQQAPCSIGSCVSLSWKT

SEQ ID NO: 2641 - protein, 38 aa, Glycine max
  misc_feature (1)..(38): Ceres Seq. ID no. 14311904
LINILISYTKIRKYPCMHGAIFFPPSHWLKPWISCYVA

SEQ ID NO: 2642 - DNA, 1358 bp, Glycine max
  misc_feature (1)..(1358): Ceres Seq. ID no. 14312136
aacaacgactctctcctcttccgctccttcgtctaccatttcttgtctcgcagagacgcttccaccaatgtctaccatctcaacttcaagtgccaagacaaaaaacttgatcttgccaaaaccatcgattccatcattgactatgttaccctcacaccaccaatctccgccgccattcaggttcttagcatcttggcaccaccaaacaacaccatcgtaggaaatttttctcaactctcccattgtcaatccctcaccaccctcaacctttctgacatatccactgacatcacatcctttcgtttggtttctcttcaaaaattagacctttatgattgtgttttcgagtgtgggctggaggagtttcttaatccttttaggggctgcgttaatttgactactttgtctctgtttggttgtcagtactgcggtggcaaactcaagaggttcacaatttttgcccccagcttacgaacttgaatatttcgctcatggaagttgatgaagtgtattttgactgtgccattgagctttttacgccaaagttccaatcttttacgtacagtgtttgtgacctgtatggttttttcatcaagtctaatcttccctttgtggagacagtgcatattgatgttctgggttgcaccaatgatcctaatttgcaactaaagttgattcaaatgtttgaagtgatggggagtgctgagtttgttgccttgtcaactggtatcgttgaagttctatctatgtttcctgatctactggatagtcggccttcccccttcactaaggtgcagacttttgagttaaacagggaaatacctgcttcctccgttgatatgcctgctaatgtcatggcctacttatttggcaaatctccaggatttgatttctatgaatgtcgatgggaaggtgcaaaatggtcaaaacaatctgattgaagatggtttcttgctaactttcaaggttttacatttttgggggattaaaagttgtttttcttggacctaaacaaaaaagaacccgtgctcttttgcagaggaataggggtcttgctgatacgtttgctaaatatgcaattaagaggtgttgacttattgttcatagtctgcgacatatttgctactaatggttattgactattttgtgatcttttaggctcttctgttgtgaatagcctattaaagggagcttttctgctccctaatattgaaaattgcttgttacataggcaatctcaattagctaaaaattcgcagtgagctacaaatcaatttgttaaaaaaaaaaaaaaaaaaaaaaaaaaaaaaaaaaaaaaaaaaaaaaaaaaaaaaaaaaaaaaaaaaaaaaaaaaaagg

SEQ ID NO: 2643 - protein, 159 aa, Glycine max
  misc_feature (1)..(159): Ceres Seq. ID no. 14312137
NNDSLLFRSFVYHFLSRRDASTNVYHLNFKCQDKKLDLAKTIDSIIDYVTLTPPISAAIQVLSILAPPNNTIVGNFSQLSHCQSLTTLNLSDISTDITSFRLVSLQKLDLYDCVFECGLEEFLNPFRGCVNLTTLSLFGCQYCGGKLKRFTIFAPSLRT

SEQ ID NO: 2644 - protein, 149 aa, Glycine max
  misc_feature (1)..(149): Ceres Seq. ID no. 14312138
MEVDEVYFDCAIELFTPKFQSFTYSVCDLYGFFIKSNLPFVETVHIDVLGCTNDPNLQLKLIQMFEVMGSAEFVALSTGIVEVLSMFPDLLDSRPSPFTKVQTFELNREIPASSVDMPANVMAYLFGKSPGFDFYECRWEGAKWSKQSD

SEQ ID NO: 2645 - protein, 86 aa, Glycine max
  misc_feature (1)..(86): Ceres Seq. ID no. 14312139
MFEVMGSAEFVALSTGIVEVLSMFPDLLDSRPSPFTKVQTFELNREIPASSVDMPANVMAYLFGKSPGFDFYECRWEGAKWSKQSD

SEQ ID NO: 2646 - DNA, 1220 bp, Glycine max
  misc_feature (1)..(1220): Ceres Seq. ID no. 14313939
atatttttctctcaatgatttcatttacatcattgcattatgaagtgttaatccccttcttttccctttttctgagcatcttcctttcatttttggtgagtggttacatgtatatatttatgtacacttcatctcattttttttaaccaattgattgcttgcaattaagttgatggtgcttgcatagaacaaaaacaaggaaagagttattgctgtcaacactcatggtcaacatgttctctattaggctgaagtgtatcagcactagagcttttgtttgcattttcttggacaagggactccaataggtgctactgggcaccgtgcgccactactttgctgagttgcctctctctgacattgacactcgcacttatacatctttggggctctgtatgaggagttaactagaaaagttgtcactttggtggcagagaatgaaaacctaaagagggagaaagaattggctttgaaagagtatgagtctttggagactacaaataagaacttgaagacacagatagccaagtcaataaacactgaagtggagaaaactcctgttgagcctgtgtcatctgtggctgagataacaccttcatccggtaatggtccatggttcctttataacctttttccagttccacaaatattttggccttccatccttcaatcttctaatccaattcatctacaaaatacatcatttaattccatcgccattccacctaatgctaatgtttcatgttcttctgagtctgaatcacatcacaagcaaaataaccttataaatgataatcgaactcgagtaatcactttttaaaattttattttgatctatccttttgatttttgaggttgtaagtttctttctttagcttaatcactagaagaagataagaaagcttttgaaatgactgagtcaaaagaggcaacattgcttgaagcagagaagatttcctgtcgtaaatctgaagtggatttcaagttcctgtgttttttgctggtttctcaagtcaagaattgggaagtaacacattcctgtttttgggatttattgttttttattattattattattattattattaagtcatgttttaggaaattggacgatctgatggtgcaacttctccagcagttgaggctttaaccttctctcatacttactgtttgctgctagctttaattcaatttagttgtccaccattttttcctgcatt

SEQ ID NO: 2647 - protein, 79 aa, Glycine max
  misc_feature (1)..(79): Ceres Seq. ID no. 14313940
MTESKEATLLEAEKISCRKSEVDFKFLCFLLVSQVKNWEVTHSCFWDLLFFIIIIIIIIKSCFRKLDDLMVQLLQQLRL

SEQ ID NO: 2648 - protein, 60 aa, Glycine max
  misc_feature (1)..(60): Ceres Seq. ID no. 14313941
MVHGSFITFFQFHKYFGLPSFNLLIQFIYKIHHLIPSPFHLMLMFHVLLSLNHITSKITL

SEQ ID NO: 2649 - protein, 47 aa, Glycine max
  misc_feature (1)..(47): Ceres Seq. ID no. 14313942
IFLSMISFTSLHYEVLIPFFSLFLSIFLSFLVSGYMYIFMYTSSHFF

SEQ ID NO: 2650 - DNA, 1263 bp, Glycine max
  misc_feature (1)..(1263): Ceres Seq. ID no. 14314959
atctctcaaacccaaaccagagcttagatccactctcaccggaaattgaggggatccgctaccgtgaccctatcgtgtcgccgtcgtgggattggtcgcatcttcgtcgttgcattgtggtcctttgtctgaacttggttagatgcagtggtagggcttacggcttgcacagaggacgccgccaagctctttggagaaattctccatcaaagttgaggttgaggtttgatttgaagatttgggtgtcgtcttcattatcaatctatcacatttgcatgtgcaatatgcttattctgctttccattctccacatcatcgtgaatggtccaactctctgctttgggaataagtgagtgtataaaaatcctcaattatgcaatgcattcatcttatttctttggactccccaaatcagaagtctccttgttagtaacttggttatagtgctcacctgcttgctgtggtagggttgaggacaaaattttgaaagttggagaagagctatggagagaaactttgccattacatggtggctcttgcttttatcaattacagggtctaaaaccccacacgtggtatgaagtgaagatatcatatccagcttctgtatgtataatcatgtcttccttcagttctttgcaggttatcttttcctctggaaactgacatacactaactaaaaaaatatcagatacctgctagcttttccatacaactgaagagaaacaagtcagatgtggtgctgaacaataacaggagattgctcaacaccgaaaagctaatttttaagaccaatagcaatcaggtccaatattagtatgaagtctatatgtgctcttgttatgttttgttcttggttcttacattgttgactgaaatcaggatgaattccagtcagtattagtaactgttgagccagaggggtttcctgcaaaactgcatgtagcagagaggcaatttattatcttcaatatagtgtctgatgaactattattaggcatacctcacaaagcttggtgggtagtggcactggctttactcggtctaggaattgctttcatcgtgccttcttttcttccattgtatttgctaccaaagaaacaagtcttgaggacagataattatgtttctaaaacttcttaagcctccaagaagatattattttttataggcaagtgttagttgctaattgttagtttttttatttttttatttttattttttataaacctccaagaagataaagtgattgtatacttgttc

SEQ ID NO: 2651 - protein, 116 aa, Glycine max
  misc_feature (1)..(116): Ceres Seq. ID no. 14314960
LSNPNQSLDPLSPEIEGIRYRDPIVSPSWDWSHLRRCIVVLCLNLVRCSGRAYGLHRGRRQALWRNSPSKLRLRFDLKIWVSSSLSIYHICMCNMLILLSILHIIVNGPTLCFGNK

SEQ ID NO: 2652 - DNA, 1724 bp, Glycine max
  misc_feature (1)..(1724): Ceres Seq. ID no. 15169204
tcgattgagcgtctcaactttagacaagagctcattatgcaggtttgtgcaatgtcctgaaaccgtcgctcgcggcgtgacggccgaatggcaaagcgtcgcggacaagggatgctcaatgttcgagtacagtgcctgtgttctcgctaagagagaggagctggatttcgaagagtggccgatcgtcgtctcgaactgatcacgagtatattgcaggtcggccaaaatcgaggtgtgaagttgcgtagacgccttcactgaggcaacttgtttccgtcagctattgttgaaccaaatcttgaagtgctcaaacggacatttcagtcgacgaatagtctggtcgtcttgggtatcaacaacagagtctagggctgcaaaaaagtgactggttgacacaagctgaatcccctcgtgagcgagtcgcgatgacctaggaggtggaggacccaaacggccacgggggagagaatcgctgcggagcctggcgcggagtcccgagccatcggtcttcttttcgatcccatcggtcaagccggcttctttggtagtctgcagcatggacattccgattctccaagtgtaatctgcagggtgacaggttcaacggaaacagatgtcgagatccgctaatagtcatggacgaggaagattttctcagcctgcgaaatgcagctcgacatcatcaaattgcaaggacctttccccgtaacacctgccacagatcagataaccaggcaggtggcggcaggtgcttgtcatatgacccgcgccgacaggtcaagatgcccgggcaaggcctctttacgacctccacgataaggaatagcacaagcttggcaagtcgcaaaccatgagttcgagtctacctttgatttctcagggacaaacccaatgaccattagtgcacaacatgttcgccgtccgaaacagtggaatccttcatcatcaagacgcagggaatgagcaccgtccgcgccactacttgagactaacgaatcatggatctcgcttcgtgacgtgttttacaacatgcatgccggccttagtgctattacttcgatttcggctggtatcgtagactcgatctggagatacttatctgcggatgtgaaccacatgtgagagaaagccccgtccgggcatgaagatacgggccgtctctggtatgacctgtgagaatttctgtcttcgtgcagtgcgtccccagcaagtctggatgatgtgccatcctgtggcgtgcaatatgtgaggtgtggtggttgggcacggtcccttggatgagtaaaaggctgcacgtgattcgattgcatcacgacagaaagtgtttgccgaccccggtccagatctcccgtgagcttagcaagacacaaccaccaccaaaatgctctcaagatcgttcacatcggtacgtgaagcccctcttatcctataagcattattcttcgctaacgtgcgacttcacagaccctgcttcggcaggttgcgcgccctgccgctcggactcccatccaaccgatccgagctccagctcttctccagcaagcacgtctgttgtctgaccagacccgctcagccatcgacaaggccgtcgcctcggctcccgtcgtcctcttcatgaagggaacccccgaaacaccgcagtgtggcttctcacgcgcagcgatccagatccttggtatccagggcgtgaacccggaaaagttcgccgccttcaatgtcctcga

SEQ ID NO: 2653 - protein, 93 aa, Glycine max
  misc_feature (1)..(93): Ceres Seq. ID no. 15169205
MSKRLHVIRLHHDRKCLPTPVQISRELSKTQPPPKCSQDRSHRYVKPLLSYKHYSSLTCDFTDPASAGCAPCRSDSHPTDPSSSSSPASTSVV

SEQ ID NO: 2654 - protein, 72 aa, Glycine max
  misc_feature (1)..(72): Ceres Seq. ID no. 15169206
MDEEDFLSLRNAARHHQIARTFPRNTCHRSDNQAGGGRCLSYDPRRQVKMPGQGLFTTSTIRNSTSLASRKP

SEQ ID NO: 2655 - protein, 65 aa, Glycine max
  misc_feature (1)..(65): Ceres Seq. ID no. 15169207
RLSVSTLDKSSLCRFVQCPETVARGVTAEWQSVADKGCSMFEYSACVLAKREELDFEEWPIVVSN

SEQ ID NO: 2656 - DNA, 715 bp, Glycine max
  misc_feature (1)..(715): Ceres Seq. ID no. 15169846
acaactgttccttctgcattcacactcattttgacaaagcaggttttgatggttgtttgttagattcaaaaacaaagccaaaaggaagggcaaaatggtatcttcacaaaggtttccgaccctaaattcgcccaagcaagttggatgtaacttcagccctaagcaagcaactcgcttgggcaagtggatgccttcaccattaagccacacaattcgcctaggcgagctgcagcttgccttggctaatttccctgcaagatatcttctataaatagccatgcattgttgagaagaaatatgatccaacagccttcaaatccagaaagaaacccagagaaagagtgaagaagaaggagaaagttcaggagaagttttacgagtacttggatgtgaggggagtgaataatgagcttgcagttttcttgcatgaatatatgatgaacaaggatagaattgagcttctgcggtggatggatagtctcaagtcttttatggaaagatagattggtaagctttgcatttggcaattaggaattgatgtgaacactaagttttgacattagcatttggtatcaatttatttatttgattggaatgcaccttaagaatgctgtgcattaggaggcaaggataggaaataatagaggctctgtttccttttgtggttgtatgatgaataaatgatgaacaatgatagaattaaacttctagagtc

SEQ ID NO: 2657 - protein, 58 aa, Glycine max
  misc_feature (1)..(58): Ceres Seq. ID no. 15169847
MVSSQRFPTLNSPKQVGCNFSPKQATRLGKWMPSPLSHTIRLGELQLALANFPARYLL

SEQ ID NO: 2658 - protein, 40 aa, Glycine max
  misc_feature (1)..(40): Ceres Seq. ID no. 15169848
NCSFCIHTHFDKAGFDGCLLDSKTKPKGRAKWYLHKGFRP

SEQ ID NO: 2659 - DNA, 472 bp, Glycine max
  misc_feature (1)..(472): Ceres Seq. ID no. 15170335
attttttaattaattttgttcttggtacagtggagacgcagatggaagagtgccggtgataggaacacgatattgcgttgaggctctgggattacctttaaagtctaggtggcgaacttggtaccatgataatcaggttggaggaaggatagttgaatatgaagggttgacatatgtgacagtgagaggagcaggtcacttggtgccactgaacaagcctagtgaagctctctctctaattcattctttcttaactgggcaacatcttcctactactcatggataatcatcgtaatatatgtacaattgtgccagtattttgggttggcaatttttctctcaagaatgaaaacccgtgtatgatcaatataaataaatgaataacaatgacatgtagacatcccttaactacaaaaaaaaaaaaaaaaaaaaaaaaaaaaaaaaaaaaaaaaaaaaaaaaaaaaaaaaaacg

SEQ ID NO: 2660 - protein, 33 aa, Glycine max
  misc_feature (1)..(33): Ceres Seq. ID no. 15170336
MDNHRNICTIVPVFWVGNFSLKNENPCMININK

SEQ ID NO: 2661 - DNA, 1468 bp, Glycine max
  misc_feature (1)..(1468): Ceres Seq. ID no. 15172499
tactttctctttctagaagcaaagagagagagaagaattcactacaagaattaaacaaagaatctaagttacaaaaaaaattacaagagaaagttgtgtcatttgagaggtgcagcaccggcgagttcgacctataggaaagctttgaaaccttgtcgctagcatttggagggcacgccaaagccactatgttgtgggtgtatcttaacgacctctcactactgcaaaaacacatttctactacattgtttctaagaagagccaaggaggaagaggttgaaaggaagccttgtgtgaaggctcttcctttcaaggtgaaagcgatgtcgagaggatcatcgtcgcagaaagcaaggagtggattcttctagaactcaatgtttgattgtttaatttgatgcaccgaacactatgaccctgttctggtgtctcaggaagtgtgcgttgaaatctacaaaggcgtcaccactagccagctcaatgaattggtagcggaaaccaccgcggctatgatcgccaaccaccctgactattcttctgtttttacatttttggagtagctaaatcagatgaggcaaggtggtcttttgttaattacttcaacttaggtaaacgaatctgccttggtgaatctgtcaagattgaagaatagattgcaaactacttgtcttggcaaaaaggatttaaaatgagttggaacccacacatggaggtccattacaataccattagctatccctataatacaacaggaagctttatcgaatattttgaaagtctcacctatgaacatgtcaacttcattttttatggtgaatcgcatgctcaggtactagcaaaaattttcatttatatcatgtttaagatattttatataatccttggtttgatggaaattgttcttcttatcttgttttattaatgtaaatatgtcctgtagttgtgtttcactattttatctcaaactttgttattgttgttcttttgttattaatgataggctactagaaagattcataattctaaagtaaagacataaaattccatttatatatgctggagagttcatacccttcaaagtcaagcttttacaagtttggactatctgaaccagagaatacttcacactatcgttacggtcatgattatgaggtaaatcatcacgaacctgtggtggatgagtataggagaccttctgagaactcattgacaatcaatgaaaagtctgcagcagtaagcacaaaatgggttaaaggtggaaacactaacacacgagacaattatattgaatgtaagtttgtgattttcatccaactgaaaataattacaatagtaatatctggctgttgaaatgcagtcttgggtatatatgtaatgtcctaaaaagttcatttatgctcaatttatactgttacacttgattcttttcgtaagcatcataatgtttgagaaactagttgttgtactg

SEQ ID NO: 2662 - protein, 98 aa, Glycine max
  misc_feature (1)..(98): Ceres Seq. ID no. 15172500
MLESSYPSKSSFYKFGLSEPENTSHYRYGHDYEVNHHEPVVDEYRRPSENSLTINEKSAAVSTKWVKGGNTNTRDNYIECKFVIFIQLKIITIVISGC

SEQ ID NO: 2663 - protein, 77 aa, Glycine max
  misc_feature (1)..(77): Ceres Seq. ID no. 15172501
MSWNPHMEVHYNTISYPYNTTGSFIEYFESLTYEHVNFIFYGESHAQVLAKIFIYIMFKIFYIILGLMEIVLLILFY

SEQ ID NO: 2664 - protein, 71 aa, Glycine max
  misc_feature (1)..(71): Ceres Seq. ID no. 15172502
MEVHYNTISYPYNTTGSFIEYFESLTYEHVNFIFYGESHAQVLAKIFIYIMFKIFYIILGLMEIVLLILFY

SEQ ID NO: 2665 - DNA, 854 bp, Glycine max
  misc_feature (1)..(854): Ceres Seq. ID no. 15172782
atgtgtaagctaatttgtaaaaattgttttatagtaactcctccaaaaactaatttttaactcatggagaaagtttgtttttatgcttgagaagtacttatatggagggtctagttaattattatcatttttatacatggaaaggaaatcaagaaaactagcaaaatagatgggggtagaatgcttcccagtttttatatgatatctaagtaaaaattaataataacctccacacatcattaacagataccctgatgaagtagcaggccaagtgcccatggcgtttgtggtgagacaacctcaaagttcccttggcgcagcagaagttattgattttgttgccaaacaggtgctttaatatttgataatatgtagcgatattaataatatttattcatattttttaataacatttttattaagtattaagttaaaaaatgttgttaagaatcacatactgtgttgtagtgaatttcccttgtgcttaatttcttttgcacatttagatttcagttttactccacatgacgcattgccccctcttgtttgcatgttgaattgagctagctactacatatcaatacttttattttggcatgtgttttcttggctgcaggtttcaccgtacaagaaaataaggcgtgtagcatttgttaattccatacccaagaatgctgcgggaaagatactgaggaaggacttaaaactggcgctctctaggttgtaatatgcttcattttcgttttataagtggtgtttgatttagtcttttgctccaaatgaaaaaaaaaaagaagaagcaatgcgtgtgttcagtttaagaatttatatgtaatgaaagaccttcttttgtg

SEQ ID NO: 2666 - DNA, 645 bp, Glycine max
  misc_feature (1)..(645): Ceres Seq. ID no. 15172889
taggatttattttttcttaaatggggcatatcctttggtaatgtaggttattcaccccatccatgaccagaccttctatctgactgtggagcataagaggaagcttaaggaggagtatggaattgagccctggacttttattcagaaggtaggggatgctgtttttgttccagctggttgtcctcaccaagtcagaaatctgaagtcatgtattaaggttgcattggattttgtctctccggaaaatgttggggagtgctttcgtttgacagaggaatttcgcacacttccaattagccatgcgtctagtgaggacaaattggaggtgaagaagatgacaatatatgctatgcaagatgtgatcggaaaattggaggaagcaaggtccgggaaaaccaaggttccagagtaaatattatctgtaacagatcatagccaattggaattgtaaattttttggagcaatagcttatttcaggtgtgatgatgtcgggttccatgtattttgactgtaagaatggttccatattttgttttgcaaccacacctggaaggttgtacatgtaattgtcaccacctatatacctagtgtatttttgagtttttgaatgcatagatgatgataatctaagttgcccctgttgc

SEQ ID NO: 2667 - DNA, 579 bp, Glycine max
  misc_feature (1)..(579): Ceres Seq. ID no. 15175303
gatttattcttcgtacatatgcacacgatgatgtaagcattggatcatggtttattgggcttgatgtggaacaccttgatgaaacaaagttttgctgctcctcccggtggtccccaggggcaatttgcgcagcagtatgacgactttccactaacaattaaagtgacagaaggatctatagcatacagaaacccgttacttcctccatcatcatttttatctcaggtgattttccgttatgataatttcaaccagcagttgattctgccacttgaatgcagggagctgttggttaggagctatgcctccttgacaatagatacttacatgctcctcagaatgttcaaaggtgttgagaaatttgcatcatggttgtctgattttgagaaactgttccttccccatttaaaccatcatttttaccacatggaataaatcaaagagaattttgtagcaacttaattataggcaatattttttaagttagacttgagaacggccatgttgaatccacacttgattttaggttgtcattcctggattagacaaatctaagctgtatatagcctgttgcattcg

SEQ ID NO: 2668 - protein, 123 aa, Glycine max
  misc_feature (1)..(123): Ceres Seq. ID no. 15175304
MWNTLMKQSFAAPPGGPQGQFAQQYDDFPLTIKVTEGSIAYRNPLLPPSSFLSQVIFRYDNFNQQLILPLECRELLVRSYASLTIDTYMLLRMFKGVEKFASWLSDFEKLFLPHLNHHFYHME

SEQ ID NO: 2669 - protein, 118 aa, Glycine max
  misc_feature (1)..(118): Ceres Seq. ID no. 15175305
MKQSFAAPPGGPQGQFAQQYDDFPLTIKVTEGSIAYRNPLLPPSSFLSQVIFRYDNFNQQLILPLECRELLVRSYASLTIDTYMLLRMFKGVEKFASWLSDFEKLFLPHLNHHFYHME

SEQ ID NO: 2670 - DNA, 1094 bp, Glycine max
  misc_feature (1)..(1094): Ceres Seq. ID no. 15175408
attaattaattccctccgcattgcgcccgcgccaccacagctccttccctcacctctccactgcagctccttcgacgtcgtcactacaggaagctctcgccccctccatcagtcacgctgtctatcaccgtgtatatttgcggcttgtttgggtgccctaattagggtttagaatgcttagtatttgggaacgtaccacgaatggtttatttggcattgagattctgtgagcaatgtcaacatagaccatttcgtggactttgagttgctgtacacattgctacacaccctaatgccattagggtaacttgtatgttcctgcgatgaagttttgtttaaccagattctttgaaaattgtaggagacccatgttatctggttttatctttagtttgagcatgggcatggttcacgaccagttgcggttttaatacggttgagatgcttaaatggaacaagtcatatgatttctggagatgattgcaattagaagatcactcgttagtctctaaggtactactatttaattgtgtaacaaagttaaggctctcgaagaacttcttgttgctggactgaacataaaatcatcaaattatcaccggccttactgcacccaaagtttttgttactagcacattttgagtattgtttgtgttgattacagggagaattccgcttgctgggaacaatgaacttctggcagattgggcagcagaatatgtaaggtgggggaaatccttaagacatgttgtggatccaaggcagaagtctttgcaggaagaagagattgaggaatggtctgaagtgataagaaactgtgtacaaccagatccggagagaaggcaagcatcaccactttggtgagcagaaatggcaattacatccactgattcaagttgagacattaatattataacacaaataagagttggatgataatttgtacagttactctaaatttggaattcatgcacttttgaaatatttatgtttatactaatgttttctaaactaatattttgaagccaaccgaaaaaaagaagcatgtagagaacaaataacatttgtctcattgtagaggaattgacttttgt

SEQ ID NO: 2671 - protein, 56 aa, Glycine max
  misc_feature (1)..(56): Ceres Seq. ID no. 15175409
LINSLRIAPAPPQLLPSPLHCSSFDVVTTGSSRPLHQSRCLSPCIFAACLGALIRV

SEQ ID NO: 2672 - protein, 35 aa, Glycine max
  misc_feature (1)..(35): Ceres Seq. ID no. 15175410
MKFCLTRFFENCRRPMLSGFIFSLSMGMVHDQLRF

SEQ ID NO: 2673 - DNA, 1340 bp, Glycine max
  misc_feature (1)..(1340): Ceres Seq. ID no. 15176764
aacaccctttgatatcatgaaaagaagtttgagcatggattaccttgtatcttcacgaatcatctcaccctcttataattttctgcttggtggtggtgcggatgaaaattcatcagataaaacaataactgatgggtacatagccagtgtcggcggtggtggactcacttcaacaactcatcatcaagaaaggaaaaaaggttctctccaaactttacttgcgtttgttatgatgtatggttctaataataaattttgcattacttctaagcaaggagagaaatacaagaaaagaggtaagggtatgatgagatggctaatatatgtattaaggtagataaacaaatatttataaattattgtagtaattgcgtactaaaatcaaacaaaaataaaggaattggggcttttgaattaaaaaatgtctcatgaacacttatgctagctatatatagacattgggagaggaaataaattagtaaacggtttgcaattaataatattatgggtttaattaatcaatatttatacaacataatttagtgttattaattttttggcggtaaattgacaaatttaattacatattatgtagagattaatcggaatcatgactatataatgatttgaggttatgtaacaatttttcgggagagacttatatatttttgagctctattagtatttttggttaaacaaagtactattaatatttgtttatgatcaggtgtgccatggagtgaagaggagcaccggaaatttcttgaaggactggagaagctggggaagggtgattggagaggcatttctaaaaaatttgttataacaagaacaccatctcaagtggctagtcatgcacaaaaattttttttgcgtcaaactagcttcaatcaaagaaagcgccgtcgtagcctctttgatatggaaagagatgaaaccactacacttgaacagtttaatacttgtttcaaggcaagtggtcaatttgggtccccatcagggactataattacttgtcctcagtgggtttcttgcaatcattcagtgctgaattgggcaaccacttcaacaaactacactcatcaaagtgcttccccagacctagaactcaaactagctgttcccattctaacagagccatgcggcagaacagaattataagtacgtgtggtatttgacatattgtagcttccattccaataaatgtgcttattagtttatgtaaattgggcattcagaaaaaagttaagtgcatgtattctgattattgaatctttaaaagagtaatgctgtaaaaaaagagtaataaaaagagtaagcagtttattaattaaagtgtg

SEQ ID NO: 2674 - protein, 111 aa, Glycine max
  misc_feature (1)..(111): Ceres Seq. ID no. 15176765
TPFDIMKRSLSMDYLVSSRIISPSYNFLLGGGADENSSDKTITDGYIASVGGGGLTSTTHHQERKKGSLQTLLAFVMMYGSNNKFCITSKQGEKYKKRGKGMMRWLIYVLR

SEQ ID NO: 2675 - protein, 106 aa, Glycine max
  misc_feature (1)..(106): Ceres Seq. ID no. 15176766
MKRSLSMDYLVSSRIISPSYNFLLGGGADENSSDKTITDGYIASVGGGGLTSTTHHQERKKGSLQTLLAFVMMYGSNNKFCITSKQGEKYKKRGKGMMRWLIYVLR

SEQ ID NO: 2676 - protein, 100 aa, Glycine max
  misc_feature (1)..(100): Ceres Seq. ID no. 15176767
MDYLVSSRIISPSYNFLLGGGADENSSDKTITDGYIASVGGGGLTSTTHHQERKKGSLQTLLAFVMMYGSNNKFCITSKQGEKYKKRGKGMMRWLIYVLR

SEQ ID NO: 2677 - DNA, 791 bp, Glycine max
  misc_feature (1)..(791): Ceres Seq. ID no. 15176936
gatctaaccaaaacatgtaaaagagtcatgtttcgcaaagttgaagtaggcagtagttatatgagatgtgaacgtctctaattcaagcaccttttgcatcgtactttgaagaagacaaaaacaagagaaagtatctacaatttgaaattttggttttgttgtgttatgtgtgattaacaggagctgttctatgctctcaatgcaaaggcagtggggtgaactctgttgatattttcaatggacagtttaaagccggtgactcttgttggctttgcgggtactaaataaaccattccattatagtataattttatttgtgttctatctgatacagaaaaccctactttctattctagttgcattctaaaattacaattcttgaattcataccacaaccacctagtggataaccggataagataaaaaatttgttgttatttgaattcttaatgcaacacttcttgaagcagggaattttggcaatggtgtaataaacaacctttggtttctatattggatttcatgacttatacaatcttttttgccccctctttctagaggcaggaaggagatgttatgcgggaattgcaatggagcaggctttgttggtggcttcttgagcacttatgatcagtaggaaaaaagtccttgtagccatatgcgcaataacatacacatgtatattgtgtctttaaatactttcactctgtagatttcatatttggtaattctcagttcacttgtagacatagcggtcgtttaaaaatgaataaacagatttatgtagtatc

SEQ ID NO: 2678 - DNA, 985 bp, Glycine max
  misc_feature (1)..(985): Ceres Seq. ID no. 15178363
gttggtcactctgttctgtaaggcacgcttgttctttcacgagcccaaattcggtatccttgacgagtgcaccaagtatgtatgatttgcctttgccttttccttttcagagaaattattgtttcttattcattgttaatcttgtttcatttcctaaaaaaatattgtcggcagtgcaactagtgttgatgttgaagaacacctatacgggcttgcaaaagatatgggaatcacggttgttacttcctcacaagtaagttgattatataagtatatttgaaaaagaaaaaaaaaagggacatggtaaatttagtgacttaagagtagtaattcactaattagttgttttgagcttgcctcatttccttctgagtgtacacttatttaatttctttagttctagataaaccagttattaacttgtctaaccttatggcttagacatgcatctttgccataataatgtgtgatcaaactaaatatctctgctcctgcccccagcgtcctgctttaataccatttcattccatggaattgcggctgattgatggtgaaggtaattggaagcttcgattgatcgagcaatgagttcactaaagcagtgttgctgcatggactctgtataccatttgagatgttgacgagtctatcacaagctggctgtttgcgagcataaattaggtttgccaacaaaggtccatcctatatacgtttattttgagttttccatattctccaagattcaatgtttactaggggactaacaaacagttgaaaacagccaaaattgttgataataagttcgagcacacaaccattgcataatctatgcagtgtataggtgatcaagatgaatcatgtatagttttccccctttcttcttaggtagttgatattggtttatatgttgtagccattggatgtaatgattaatatttaaattgtttaatcaataaaatagcaggaaagaagggcccttggagct

SEQ ID NO: 2679 - protein, 84 aa, Glycine max
  misc_feature (1)..(84): Ceres Seq. ID no. 15178364
WSLCSVRHACSFTSPNSVSLTSAPSMYDLPLPFPFQRNYCFLFIVNLVSFPKKILSAVQLVLMLKNTYTGLQKIWESRLLLPHK

SEQ ID NO: 2680 - protein, 59 aa, Glycine max
  misc_feature (1)..(59): Ceres Seq. ID no. 15178365
MYDLPLPFPFQRNYCFLFIVNLVSFPKKILSAVQLVLMLKNTYTGLQKIWESRLLLPHK

SEQ ID NO: 2681 - DNA, 442 bp, Glycine max
  misc_feature (1)..(442): Ceres Seq. ID no. 15225970
aagttgattaaattgttgataggtgcttagaagaaggggcacaagagtttctattgaagcctcttcagttatcggatttggataagcttcagccgtactttctgaaatcgcttgacaattcttgtgaaaaagaatctgctaacagttccatagattcaaacaatgacaatgtcatcaacaacaacagcaataacagtaacaataacaacaataataatattagcaaaaggaaggccatgtctcctgagcctcatcaggaggagagatcaagacccaaaatgaaagagttagcggtggtgtaaaaaaaaaaaaacactatatatagagagtggtcgatcgatgcatgcatacgtattatacattatagtttatgactatgatcctaattatggttatctcctcaactctcaagaacttaataaatgaattcctagtgcgtact

SEQ ID NO: 2682 - protein, 39 aa, Glycine max
  misc_feature (1)..(39): Ceres Seq. ID no. 15225971
MTMSSTTTAITVTITTIIILAKGRPCLLSLIRRRDQDPK

SEQ ID NO: 2683 - protein, 37 aa, Glycine max
  misc_feature (1)..(37): Ceres Seq. ID no. 15225972
MSSTTTAITVTITTIIILAKGRPCLLSLIRRRDQDPK

SEQ ID NO: 2684 - DNA, 1158 bp, Glycine max
  misc_feature (1)..(1158): Ceres Seq. ID no. 15226091
  misc_feature (28)..(28): n is a, c, t, g, unknown, or other
  misc_feature (29)..(29): n is a, c, t, g, unknown, or other
  misc_feature (30)..(30): n is a, c, t, g, unknown, or other
ccctccagttccaactttcttgtgtttnnnacagcgaattgggtaccggkccccccctcgagttagctacgtaggccccccccctttacacaccattctttagttcctgcattgtgattttgacacctggccttatattgtattgcctaccttatcatgtctcaggtatgactttcctaggagtatcacaaaatatattccattttatggtggtgctgagtatcatgattaccatcattacgttggaagacaaagccaaagcaattttgcttcagttttcacatactgtgattacatctatggaactgacaaggttatatcatcattctggaattagttttctgcataaatatctgcatagtctttccacatgtcatattgatttgctaagattctactttgtttgtcacaggggtataggtatcagaaaaaaatacttcagaaggtaaatttataagctgtcattgagaaatgtgattgcatgttgtggcttcagttacattaagaacattttattttgctttgattctgttgacatttctctttttgttttggacttaatttatatgtgtatacaatatgcaatgattgactttttcccccatctctgttgctgcttggtgaattgatttagttgaaggaagagttggcaaatggtgttgagcagaacggaggattatacaagactgactgagagactgaagtgtcttaggtggtttcagaatgcgttgcctgttgactctttggaaccaccaaaattcttgtagacatatatatatatatatatatctgctgtggcaaaatagatgtctttggttagcttcagggtggagattagtagaatggagctttacaatttgtggttttgtgttggaagaggaggggggcacgggaggaatttcttctgttgtcatgttctggaattcaaacattttggttttggttcatgtctgtcagaatgttccttctcctatggattgtaaattcagaatcttctattgtcatgttctggaattcaaacattttggtttgggttcatgtctgccagaatgttccttccccagtgggttgtaaactcagaaatatgtaataggcttcctcggctgggatataattcgaaaattataataaaaattggaagttcggtttggagggggg

SEQ ID NO: 2685 - protein, 116 aa, Glycine max
  misc_feature (1)..(116): Ceres Seq. ID no. 15226092
MRCLLTLWNHQNSCRHIYIYIYLLWQNRCLWLASGWRLVEWSFTICGFVLEEEGGTGGISSVVMFWNSNILVLVHVCQNVPSPMDCKFRIFYCHVLEFKHFGLGSCLPECSFPSGL

SEQ ID NO: 2686 - protein, 93 aa, Glycine max
  misc_feature (1)..(93): Ceres Seq. ID no. 15226093
MTFLGVSQNIFHFMVVLSIMITIITLEDKAKAILLQFSHTVITSMELTRLYHHSGISFLHKYLHSLSTCHIDLLRFYFVCHRGIGIRKKYFRR

SEQ ID NO: 2687 - protein, 80 aa, Glycine max
  misc_feature (1)..(80): Ceres Seq. ID no. 15226094
MVVLSIMITIITLEDKAKAILLQFSHTVITSMELTRLYHHSGISFLHKYLHSLSTCHIDLLRFYFVCHRGIGIRKKYFRR

SEQ ID NO: 2688 - DNA, 1116 bp, Glycine max
  misc_feature (1)..(1116): Ceres Seq. ID no. 15226397
  misc_feature (1071)..(1071): n is a, c, t, g, unknown, or other
  misc_feature (1073)..(1073): n is a, c, t, g, unknown, or other
  misc_feature (1074)..(1074): n is a, c, t, g, unknown, or other
  misc_feature (1075)..(1075): n is a, c, t, g, unknown, or other
  misc_feature (1076)..(1076): n is a, c, t, g, unknown, or other
tcagctacgtaggccccccccccaaagagctctatatgctgaaaatgctaggctgtgtgagcaggtgaaattactctactgttactgctgtctataatttgctttggatatgtttgttgagcacatgttttagatttggaggaatacaaacaatacactctaccattttcttttcaactcacattccactattaagtgaaattcatgtaggtttcattaaataataaatgaaactcattaaataggaggtgtaaattacatcatattacatcatttgtttagaacttaaatgaatttcacctaattggaagaaaaaaattgtgtcaaaaagagtatgttagtgttttcttaacatgttttttttaagattttagaaacctttcaactagactgaaagcctaataatatataactgaaattctcatgcagtatggtatccagccacagccagcaacaaaggatccgaaagaaattcaaccctatgcagaaagcagtccaagttcagaagtggagactgaattgttcattggactacccaggtctatctagttgaagataatttaatccttgcctagtatgaaataagaagcccaactgcaatgtataaatatcacatgtttcctaatactttgagatgaataatattatcgcttatattatataaagaactttccaattttaaaaaaaaaaaaaaaaaaaagaaaaaaaaaaaaaaaaaaaaaaaaaaaaaaaaaaaaaaaaaaaaargaaaaaaaaaaaaaaaaaaratttccggmacccgggggaamcmawaattttaaaaggggccsccmccggggggaasycccagtttttgtccccttaagggrgggwaaatttsaagttgggggaaatcaagggcaaaagkkgttcccgggggaaaattgtaacccgttcaaaattccacaaaaaaaaaaagccgaaaaaaaaaagggaaaagccgggggggccaaaggagggagcaaactcacataattggggtggggttaatggcccgttttcaaggggaaaaacctgtcgggccagttgaataaagaaatcgccaaacgcggngnnnnaaggggttttggaaatggggggtttttcggtttcctcgtt

SEQ ID NO: 2689 - protein, 41 aa, Glycine max
  misc_feature (1)..(41): Ceres Seq. ID no. 15226398
MQYGIQPQPATKDPKEIQPYAESSPSSEVETELFIGLPRSI

SEQ ID NO: 2690 - protein, 40 aa, Glycine max
  misc_feature (1)..(40): Ceres Seq. ID no. 15226399
MVSSHSQQQRIRKKFNPMQKAVQVQKWRLNCSLDYPGLSS

SEQ ID NO: 2691 - protein, 31 aa, Glycine max
  misc_feature (1)..(31): Ceres Seq. ID no. 15226400
QLRRPPPQRALYAENARLCEQVKLLYCYCCL

SEQ ID NO: 2692 - DNA, 694 bp, Glycine max
  misc_feature (1)..(694): Ceres Seq. ID no. 15226822
agtcagctacgtaggccccccccccgattattcttgaattcgaactcaagtaacatgtttgtcatggatggagataactagatgagctaagccccacaagcatggatatggatattgttataggctttattcatgacttgtaatttttttatacataatgtaatatttattgtagaggattttttttctttggtaaaacatgaacaaaaatatgattgactggttctgtattttacccctgatatttttaataacctgaaaattaaattaaaaaaaaaaaaaaaaaaaaaaaaaaaaaaaaaaawaattgctgaaaaaaaaaaaaaaaaaaaaaaaaaaaaaaaaaaaaaaaaaaaaaaaaaaaaaaaaaaaaaaaaaattcccggaccccggggaaaccaaaaatttaaaaagggcccccccccggggggaaccccaatttttttttcctttaaggagggtaaaattcaaatttggggaaaaaaagggaaaaactttttcccggggaaaaattttaaccccccaaaattcccaaaaaaaaaaaaaccgaaaaaaaaaaaggaaaaacccggggggccaaaagagggaacaaaccccaattaattgggttgggcccaatgccccttttcaaagggaaaaaacttgcgggccaatttaaaaaaaaaaacccccaaaccccgggaaaaaggggttt

SEQ ID NO: 2693 - DNA, 1542 bp, Glycine max
  misc_feature (1)..(1542): Ceres Seq. ID no. 15226846
cagctacgtaggccccccccccaggaacctaaatccttgcttgatttgatatactttgactagttagtgttatgcttttatattctaagactagtaaccaaatggttcgatactttcatggtgatagggttaagagaatgcctaaacctcttgttaccaaagtgtatgttaggcgccagcctggcagtaataggaataactaaccgaattctgttaggaataactaacagaattctgttagttaaagagtactataaataagagctttaactggttgtaaaggggtgttttttggcatattgggatttgggactaactgaattgggatttagttagagttggttagagaagttcaagtgaattgggattcagttgaacctttttcagttgtaattctctgttctgagttcttcttttataagcaataaagattcttagtgatttactctctgttcttggtgtttggctttgttttcttctattttctttatccgtgagttgccagtgttatcacatggtcatgttttgttgtgaagctaatcttataagtatgcctgaattgtattctatcatatctttttgacctttctacccatctcttaactttgtttaactttattttttcttctcatgataaatatgctaatattcattctaaattctttgtaaattacctcctcgtggattcaataaattgttgcaatgtgcagacacgactactcctttgacaattgtccggatgctgtttgacaactgggattaaggctctgtttggataattctcaagaaagcaaaatgaaaaagtttcttctgtagaaactctcgtttagtttctccaaaagtttattttaactagtgcataatctaattttaagtttataaagggaagtttaattaattttactttcttttctttttctgcaaatgcttagtgataagtttatccaaactgactttcccactgtgggggaaacacaaatttatttgttgcaactgaaattgtctgaaagcatgttttctaattgtcacttcattatagccacattgatgcagattgcttacaagttattttgacacagatttggctcttttgatcaggtatggtgtgatgttggttaccctagattggttcagaggccactagagattgctttgacagggaagatgagtaagcgttgtgcatgctttgaagattctcagttggaccaacctggcttagaggtatatgaagggtgtgattaccatgctaccaggtgcaaagtttaatcaggaatcaaacaccaacggaagaaatttttttttagctatctgtatgtatattaaaagcttaatttagtgaagctggtaattatttttgtacattgttgcttttattttgagggttgctttatgctatttttattccggaataatcactcttctttaacaattaaatttaaaattgtgctatatgccccgcactctgtaacaggaaaaaaaaaaaaaaagtcaagtatatattaatatttaatggatttttaaataaaaatagggtatttcttt

SEQ ID NO: 2694 - protein, 49 aa, Glycine max
  misc_feature (1)..(49): Ceres Seq. ID no. 15226847
MLSDKFIQTDFPTVGETQIYLLQLKLSESMFSNCHFIIATLMQIAYKLF

SEQ ID NO: 2695 - protein, 47 aa, Glycine max
  misc_feature (1)..(47): Ceres Seq. ID no. 15226848
MVIGLRECLNLLLPKCMLGASLAVIGITNRILLGITNRILLVKEYYK

SEQ ID NO: 2696 - protein, 43 aa, Glycine max
  misc_feature (1)..(43): Ceres Seq. ID no. 15226849
MLLYSKTSNQMVRYFHGDRVKRMPKPLVTKVYVRRQPGSNRNN

SEQ ID NO: 2697 - DNA, 709 bp, Glycine max
  misc_feature (1)..(709): Ceres Seq. ID no. 15226876
agtrccggsccccccctctagtcagctacgtaggccccccccccaaaataagagaaggggtgagggggcggcaccacctttccttccctcccgattgccctaggtaaaaaatgtatatagttcttttcttttgcatcaattcagcggcgacgaaaccgcaatagatctccgtttctcgccaaacaaacacaaaatagctgccttcagcggcgacgaaaccgcacctttctttggcttcctcggagccaccgctaccctcgttttttcctgtaactaactcatcaaggaggatccatctctgaaacatattttggaggagatagagactggtggtcctgctgctatgatgaggtactggaatgatgaggaggttttgcggaagttgggacaaaccatgggagtttccttaataaacgtgtaaagggattaggaacccagaacataaactgttcattgtcaactttgaaggaacccagaacataaactgtcctaaagctacttgagaaagatgcttttctgtaattgtaatgcatgatgccatgctgtcaccaacaatcaaaggggaaactgaggggaagaagagctgatagacaacttgagttcacccaactagacatggaaatgacctttactccttacgaggatatgttaacacttaatgaagaattgattagaaagaagtagtaaagttgcaggaaaaatggtgtgg

SEQ ID NO: 2698 - protein, 50 aa, Glycine max
  misc_feature (1)..(50): Ceres Seq. ID no. 15226877
MMPCCHQQSKGKLRGRRADRQLEFTQLDMEMTFTPYEDMLTLNEELIRKK

SEQ ID NO: 2699 - protein, 49 aa, Glycine max
  misc_feature (1)..(49): Ceres Seq. ID no. 15226878
MPCCHQQSKGKLRGRRADRQLEFTQLDMEMTFTPYEDMLTLNEELIRKK

SEQ ID NO: 2700 - protein, 34 aa, Glycine max
  misc_feature (1)..(34): Ceres Seq. ID no. 15226879
  misc_feature (1)..(1): Xaa is any aa, unknown or other
  misc_feature (3)..(3): Xaa is any aa, unknown or other
XRXPPLVSYVGPPPKIREGVRGRHHLSFPPDCPR

SEQ ID NO: 2701 - DNA, 734 bp, Glycine max
  misc_feature (1)..(734): Ceres Seq. ID no. 12582510
atgataagagcatctctatctccaattccttggcttataataacttctcttaaatttttctgtcctggcagtattgtttactctaaatttttaatctctaatttctctctccttaattgtgtgtagcttaactagctaggcaaaatgagcacaaggcgatggccgagacatgtaactgtaagaggaaggaaaagaagggcgaaagtgtgtttggccaataataatgctgtgaaagtgagaccttccttgcaaaagaagcttagagagcttcagggagcagttcctgggagtgagggaatggacatgcacactttgttccaaagcattgaacaatacatacttcaacttgaagctaaagtcacggtcctaaggtgtttgtccaatttgtatggagtatagaaggagacaacaacactcctaagcactcaacctatttagaaactacatctgggctctaaagaaagggtgaaggtaaggttaacaccattaccgggcttctttcattggggcgtggagggaataataaggttgtattttatttcaattctataatctataataaaagttaggattatccttttatctcttcttgttgcattttattaatttatatatacgtttttaaagagaaaaaaaaaaaaaaaaaaaaaaaaaaaaaaaaaaaaaaaaaaaaaaaaattaaaaaaaaaaaaaaaaaggtttttcgataccgccaacctcaagggggggcccgg

SEQ ID NO: 2702 - protein, 84 aa, Glycine max
  misc_feature (1)..(84): Ceres Seq. ID no. 12582511
MSTRRWPRHVTVRGRKRRAKVCLANNNAVKVRPSLQKKLRELQGAVPGSEGMDMHTLFQSIEQYILQLEAKVTVLRCLSNLYGV

SEQ ID NO: 2703 - DNA, 688 bp, Glycine max
  misc_feature (1)..(688): Ceres Seq. ID no. 12583098
gatacttaacctcagtattatggaactataaacaaggaaggagagcaactctgaaagaaggagtacaatttctgtcaaatcaatggaaagttcttaaacgcaagaggggaatgacgtgaaggtttgtttataagtatattaggttactgcatttgtcttttaaactttatagctatagctagatcatagaaagaaaaagattttaaaagctattggtatgtggcttacttaattatagataacaagaaattagtggttaattttcattattcacaacccccacctatttatatgattagtgttatcgtttcaattattgcccatgtaactaaggattgtatttctgaaaggttgatgttggtttcggggagagaattatgcatggcagcctggtgcatgcgtccatattgggagagcagcaaacctagcggttttgtttaggttaagttatttttcgataatgtcaagctatttcattacttggcacttagctcctgtgggcatgtgcccagaagcaaactgcattcataatgacaagcctttgtaatcttgtgtggcagaagacattgaagttaaacttgtatgactatatcatttggcttttaattttaacatgtttctttgagtaatgtcaaaaaaaaaaaaaaaaaaaatatcgataccgtcgacctcgagggggggcccggta

SEQ ID NO: 2704 - protein, 49 aa, Glycine max
  misc_feature (1)..(49): Ceres Seq. ID no. 12583099
MISVIVSIIAHVTKDCISERLMLVSGRELCMAAWCMRPYWESSKPSGFV

SEQ ID NO: 2705 - protein, 38 aa, Glycine max
  misc_feature (1)..(38): Ceres Seq. ID no. 12583100
YLTSVLWNYKQGRRATLKEGVQFLSNQWKVLKRKRGMT

SEQ ID NO: 2706 - protein, 32 aa, Glycine max
  misc_feature (1)..(32): Ceres Seq. ID no. 12583101
MTSLCNLVWQKTLKLNLYDYIIWLLILTCFFE

SEQ ID NO: 2707 - DNA, 1013 bp, Glycine max
  misc_feature (1)..(1013): Ceres Seq. ID no. 12609958
aatgcatgctctagtgacttcccgtgcacacggcggagctccatttgggacttgaggcagagtgagggagcgccggcggcgaggcgacattgagttcctaatgcagcccatacgtggatccactttcctggaggaggcaggagagagtatggtgccgcccgctttggcttcagcgacggagggggctgacatggtggtggagcacctggtggtggagcacctggtgctggagcaagcagtggtagagttagaacatgcagtggccagcgcggacgcacaaatcttgtcagccaaggaggcggcggcggcgccgaggggagagagttctccgccaacatcggaactgtcgattgggaagatgaatccttgggcacctggatggaacaaaaggcttaggattggggctgctgcaccaagcagaacaccttgcccaaaaccgtgtcagtgcatttgacagtctagctggtgaaatgaaggacctgcattacggaggccagcagcagtgccagcagctggagtggtgaggtgaaatgctggtgatagggtcgatgctatgctggggcatatcagagtaaggacaggtgccactgcgtgtgacaggtaatgcagatcaaatggaggggttcctacaagaaatcacatcgatgcatgtatctgctgaaggtgggggaacaactatagaagattcagagcatgaagggataggtgggcagggtggcgctgtagtcaatgccgcagctatcaagaaggaggatgatggtgtgggtacggatgaagttaagacagaacgctcaagtgtggtggacattgacaaagagcgtgtgacgcagctgcagacagagctatatgaagaatatgtgacggaggaagcatctcgtcaagcgaaacggtagatatcagtcattgcaccatcaatgattgtggacatcatggacagtgatagcaacgatgatggcgcatttgaagagtggtgagatcctgaacacgaccagctagtggagattgacaggagg

SEQ ID NO: 2708 - protein, 117 aa, Glycine max
  misc_feature (1)..(117): Ceres Seq. ID no. 12609959
MQPIRGSTFLEEAGESMVPPALASATEGADMVVEHLVVEHLVLEQAVVELEHAVASADAQILSAKEAAAAPRGESSPPTSELSIGKMNPWAPGWNKRLRIGAAAPSRTPCPKPCQCI

SEQ ID NO: 2709 - protein, 101 aa, Glycine max
  misc_feature (1)..(101): Ceres Seq. ID no. 12609960
MVPPALASATEGADMVVEHLVVEHLVLEQAVVELEHAVASADAQILSAKEAAAAPRGESSPPTSELSIGKMNPWAPGWNKRLRIGAAAPSRTPCPKPCQCI

SEQ ID NO: 2710 - protein, 92 aa, Glycine max
  misc_feature (1)..(92): Ceres Seq. ID no. 12609961
MEGFLQEITSMHVSAEGGGTTIEDSEHEGIGGQGGAVVNAAAIKKEDDGVGTDEVKTERSSVVDIDKERVTQLQTELYEEYVTEEASRQAKR

SEQ ID NO: 2711 - DNA, 517 bp, Glycine max
  misc_feature (1)..(517): Ceres Seq. ID no. 13581259
gaacttcaagggcaaaaaaagttgtgctgtgccgcctcttccgtaggcagcagcaatggcctcaaatcccaaaactttgacctttgaggaggtagctaagcacaacaacaaaaaggattgctggattattatcaatggaaaggtctgcttcttctttctctctatcttagttgatctgtttcacagttttcagtttctgggatttaacatgatgcgtgctaaatgctcatgaagatgaccgaggaattaattataggggtgtgatgcggttcagaagccacatgttaatctccaatacagtgtattaagctaatcaattttattcagagtaatgttaatgagcataataaatcatctaacttaactagttatcaaagtgaattgcttgatttgttgagaattgagattaataaccaaaatgtagaaacaaaaaattcaactctgcaatacaaagacaacgttggaacagaatgccaacagattagaatttggaaaccttatcaagcaatccagattt

SEQ ID NO: 2712 - protein, 58 aa, Glycine max
  misc_feature (1)..(58): Ceres Seq. ID no. 13581260
MASNPKTLTFEEVAKHNNKKDCWIIINGKVCFFFLSILVDLFHSFQFLGFNMMRAKCS

SEQ ID NO: 2713 - DNA, 519 bp, Glycine max
  misc_feature (1)..(519): Ceres Seq. ID no. 13581762
tcgaaaaaagatgcaaaatacaagtcttcaagaaacagatctgaataaaagaaacaaaacttgaaccaccgtgaaattcacaatgcaaatcccatgctcgtggaaccaccacaacatggtcaaagccgttcatctcccaaccacagcctgtgaaatccacggcacaaacatggtctgttccattattcagatccacagaggtttatcttctaactctgtggacaccttcaacaacgtcatcgaagctgttatgacgaagatggaggcacaactcgatcccctcctcgaccgctttcatgcgccgccgacgttcatcatctacatgtttctcttctgggccgttgccatacgcaaacagaggggtattccgatgagcgcactctggatgtggatgacaaacacatcagaaaaagatcttaggtgagagagaagatgagggtggggttgggggtttgaactgcgagagagaagagagaatcaggctgcagggaaattgggaaggaataaataaaaagaggg

SEQ ID NO: 2714 - protein, 113 aa, Glycine max
  misc_feature (1)..(113): Ceres Seq. ID no. 13581763
MQIPCSWNHHNMVKAVHLPTTACEIHGTNMVCSIIQIHRGLSSNSVDTFNNVIEAVMTKMEAQLDPLLDRFHAPPTFIIYMFLFWAVAIRKQRGIPMSALWMWMTNTSEKDLR

SEQ ID NO: 2715 - protein, 102 aa, Glycine max
  misc_feature (1)..(102): Ceres Seq. ID no. 13581764
MVKAVHLPTTACEIHGTNMVCSIIQIHRGLSSNSVDTFNNVIEAVMTKMEAQLDPLLDRFHAPPTFIIYMFLFWAVAIRKQRGIPMSALWMWMTNTSEKDLR

SEQ ID NO: 2716 - protein, 84 aa, Glycine max
  misc_feature (1)..(84): Ceres Seq. ID no. 13581765
MVCSIIQIHRGLSSNSVDTFNNVIEAVMTKMEAQLDPLLDRFHAPPTFIIYMFLFWAVAIRKQRGIPMSALWMWMTNTSEKDLR

SEQ ID NO: 2717 - DNA, 714 bp, Glycine max
  misc_feature (1)..(714): Ceres Seq. ID no. 13582277
gctctagaactagtggatcccccgggctgcaggaattcgcacgagaccattacctagaacatcctaatcgaaaagaggatgctgtaagctgtttcgagaaggctgtcaagtctgacgacttgcttgatgctgccaaatcgaacttggcaaaagcccttgcgttggctaagaaacagtagagcaagagatgatgaacggtgatgacctttcatccattgcgctggagcttcgaacaggaaggacctgtccatgcaaacctcgtatctggaatgtcaactttcaaggggccaactcagaagctatgcttggtgactctaaggctgctcccatccgtgtgcagcggatcagcccccaggctccgcagttgcgctggtaggttttctgtggccggtcactcggaaagggaagagtttgaagaaattctggagtaggatttgactgtaagtttgtaacaagcatgcgacatgaatatgaaccgactgtacctgtaccctgtacataacacctcaaagttttagctacaaacacaactcactttcactgtaagatcagttgtcacaacgccgtctctttttttttttttttggcgacaccatctccggtttgaagttgtgttaaaaaaaaaaaaaaaaaaaaaaaaaaaaaaaaaaaaaaaaaaccaaaaaaaaaaaaaaaaaagtttatcgataccgccaacctcaagggggggcccgg

SEQ ID NO: 2718 - protein, 76 aa, Glycine max
  misc_feature (1)..(76): Ceres Seq. ID no. 13582278
MTFHPLRWSFEQEGPVHANLVSGMSTFKGPTQKLCLVTLRLLPSVCSGSAPRLRSCAGRFSVAGHSEREEFEEILE

SEQ ID NO: 2719 - protein, 62 aa, Glycine max
  misc_feature (1)..(62): Ceres Seq. ID no. 13582279
MMNGDDLSSIALELRTGRTCPCKPRIWNVNFQGANSEAMLGDSKAAPIRVQRISPQAPQLRW

SEQ ID NO: 2720 - protein, 61 aa, Glycine max
  misc_feature (1)..(61): Ceres Seq. ID no. 13582280
MNGDDLSSIALELRTGRTCPCKPRIWNVNFQGANSEAMLGDSKAAPIRVQRISPQAPQLRW

SEQ ID NO: 2721 - DNA, 565 bp, Glycine max
  misc_feature (1)..(565): Ceres Seq. ID no. 13594722
ctgtacatgcttcgttcggccggtcgctctctccctcctctccgcactgctgcgccctctcctcgactcctcgtcgactcgtctcgcctgcttcgactctcctgcgccaaggtctgttgcgatgggcctcctttgctcgatgggcgcccctggttgagtttcattcgtgcgcagtttggttcgccttgccattgttgactgcgtcgagccatggatccttctatccttaccactgaggttgtacgatcttgtccgttgctgcatctcctctccgttttgctcgttgttgcatttgcgtcctgctcatcaaggattgctgctctccgctctgcctgccttcgtgttgtacttcctgtatgtgctatcatattgtcgcctgtaattgttttaatatgtatttcggatatggccggccgtcgtgtgctgttcgttcttgtgttcattatatcccgtgctcgcgtgtgagcaggatgtgtgcgtttgtttcagttattgtacctattttggaggccgtggtggctcgttgcgtctgtggtcacttttgtatttatgtgaggtcgcaaag

SEQ ID NO: 2722 - protein, 84 aa, Glycine max
  misc_feature (1)..(84): Ceres Seq. ID no. 15221413
MDPSILTTEVVRSCPLLHLLSVLLVVAFASCSSRIAALRSACLRVVLPVCAIILSPVIVLICISDMAGRRVLFVLVFIISRARV

SEQ ID NO: 2723 - protein, 77 aa, Glycine max
  misc_feature (1)..(77): Ceres Seq. ID no. 15221414
VHASFGRSLSPSSPHCCALSSTPRRLVSPASTLLRQGLLRWASFARWAPLVEFHSCAVWFALPLLTASSHGSFYPYH

SEQ ID NO: 2724 - protein, 69 aa, Glycine max
  misc_feature (1)..(69): Ceres Seq. ID no. 15221415
MCYHIVACNCFNMYFGYGRPSCAVRSCVHYIPCSRVSRMCAFVSVIVPILEAVVARCVCGHFCIYVRSQ

SEQ ID NO: 2725 - DNA, 537 bp, Glycine max
  misc_feature (1)..(537): Ceres Seq. ID no. 14306238
atagttttaccttctttagtctccttctctctccggtggctcctccgctgtcaccggcggtcagtcaccacccaccaccgccacaaacgcccccccccccggtcaccaccaactctcctccactcccctctcccccttcttccccaaatctcctttcctcctcacttgaatccgacgtgggtgtccatttccctaaagggagaatacggcaactatggcacctgagggtcagcaacatcgcctctgcgcatggtgctctgtgaaatctgcgagcaaacccgacaccaccgcgcatgtcaccgtcaaggtcgttgccgccacgctctgcctcgcctgcgaccgcgaatccaatttgccaacccctcgcctgaagcgttttattttttaaaaagtgtatgactaagagctgaatgtttggagcttttctggttcgataaggtgtttgtttgttgtgggttaattctgatctgggtatttgctaatttcatgattttctctgtgcgtcatttttttcatattcaatttcatggtttcgat

SEQ ID NO: 2726 - protein, 86 aa, Glycine max
  misc_feature (1)..(86): Ceres Seq. ID no. 14306239
SFTFFSLLLSPVAPPLSPAVSHHPPPPQTPPPPVTTNSPPLPSPPSSPNLLSSSLESDVGVHFPKGRIRQLWHLRVSNIASAHGAL

SEQ ID NO: 2727 - protein, 74 aa, Glycine max
  misc_feature (1)..(74): Ceres Seq. ID no. 14306240
IVLPSLVSFSLRWLLRCHRRSVTTHHRHKRPPPRSPPTLLHSPLPLLPQISFPPHLNPTWVSISLKGEYGNYGT

SEQ ID NO: 2728 - protein, 57 aa, Glycine max
  misc_feature (1)..(57): Ceres Seq. ID no. 14306241
MAPEGQQHRLCAWCSVKSASKPDTTAHVTVKVVAATLCLACDRESNLPTPRLKRFIF

SEQ ID NO: 2729 - DNA, 422 bp, Glycine max
  misc_feature (1)..(422): Ceres Seq. ID no. 15170593
aaagttcctgaggctttggtacatggagcagtcatctctgcctttctaaccattgctcaagccatgactgatcaaggctctatatagaggttcatattgcatagttttgaatgcatccaaatactgatgttaaccaattagcactgcttggaaatctgcattcagtgaatagtccaaatcattgctgatgctacagtattgccaaagcatatttccttgtaaaaatatgtaagaaaatttagactcagaaaagaaaaatatttgaaggacaaattttagtttcacaacagaataggcatctttattattaccaagaaaaaggagaaattgtccttggcttattaaaccctgtttgatgcttgttccaaacttgagaaatatttggatattgagatttgaaataaaagattagtgttcagttt

SEQ ID NO: 2730 - DNA, 599 bp, Glycine max
  misc_feature (1)..(599): Ceres Seq. ID no. 15170815
atcctctagctagtcgattgattgatccagaaatcaaggccggtccatggggaactttttgcccggacgtgcgtccatgaaggacgccctggacgaaaccatgcacctcgtcgacaccaagatggtctggcatcacgtcgccaacggcgggtgcctccaagagttcgtgatcgccatggacgtgtgcaaccccgattacatgaagcagcggcacccccagttttacaagaagcagcaacgcaaggccacccccgtcgacaaggacgcgtgcgtcaaggccacggcggcactgcgcgagtgcttcgccggcaaccccgtcatgttcaagcacgagtatctccaccgcatggacgagggcctcgaccaggaccgcaacccctccccggcccagatcaagaaggagtgggccagcgaatataggtggtggaccggcatgaggagaagctagtaaattttgtgcagatgcagtacgtgatgatcaatggcgctagatagatatatagatagatcggttcatcttatgatgcgatgtgtttgtttggtaagttagttttttcattaccatgcattattcgcaacgaagtgtaacaagtgatgtt

SEQ ID NO: 2731 - protein, 133 aa, Glycine max
  misc_feature (1)..(133): Ceres Seq. ID no. 15170816
MGNFLPGRASMKDALDETMHLVDTKMVWHHVANGGCLQEFVIAMDVCNPDYMKQRHPQFYKKQQRKATPVDKDACVKATAALRECFAGNPVMFKHEYLHRMDEGLDQDRNPSPAQIKKEWASEYRWWTGMRRS

SEQ ID NO: 2732 - protein, 123 aa, Glycine max
  misc_feature (1)..(123): Ceres Seq. ID no. 15170817
MKDALDETMHLVDTKMVWHHVANGGCLQEFVIAMDVCNPDYMKQRHPQFYKKQQRKATPVDKDACVKATAALRECFAGNPVMFKHEYLHRMDEGLDQDRNPSPAQIKKEWASEYRWWTGMRRS

SEQ ID NO: 2733 - protein, 115 aa, Glycine max
  misc_feature (1)..(115): Ceres Seq. ID no. 15170818
MHLVDTKMVWHHVANGGCLQEFVIAMDVCNPDYMKQRHPQFYKKQQRKATPVDKDACVKATAALRECFAGNPVMFKHEYLHRMDEGLDQDRNPSPAQIKKEWASEYRWWTGMRRS

SEQ ID NO: 2734 - DNA, 991 bp, Glycine max
  misc_feature (1)..(991): Ceres Seq. ID no. 15171422
acacaatgctttgcatatggatgtttgagattgtgatagcatgtcacctaaaaaattattctttttatcacttacctactcgaggacgagcaggagttaagcttggggatgctgatacattggaaatgtatctataatttttgatgctccatgcttgtttattgccaattactttatgttttacttgtgcttcttggtgtttttattgatttcctgccactaacatattgacaagatgccaaagtggccagttcctgttttcttctgtttttgattccagaagagctgaaaaataaatattcttaaaattgacaaaggaagctattttacgaagttttacactggaagactccagaagccagaagggggcacctgggggggcctggtgggcccacaccacccccaggggagactgggcccctgcatgcgcctgggtggggtgtggcccaccagctgctcccccggcttcgtccttccgcctatttattcaccccgacgagaaaaccctagatatagcgcaaaagttcgagaaagaagtacgtagccgccgccgtcgtcgcggggagatcagaagctcttcccggcaccctgccggaggggagatcatcaccggaggccttcttcatcaccatgcccgcctccggagtgatgtgtgagtagttcaccataggactacgggtccatggcagtagctagatggttgttctctccattttatgaatagcatgagctgcctaacatgattgagatcatcttattactgtgtgcttcatctatgaatctcatgagctgcctaacatgattgagatcatcttatatgattcttgtgagctgcctaacatgatcaagatcatctttatgtaatatcccttgtgttggtttgctgggatctgactagttattgagtacaatgttcaagttgagtataaaaaaaaaaaaaaaaaaaaaaaaaaaaaaaaaaaaaaaaaaaaaaaaaaaaaaaaaaaaaaat

SEQ ID NO: 2735 - protein, 44 aa, Glycine max
  misc_feature (1)..(44): Ceres Seq. ID no. 15171423
TMLCIWMFEIVIACHLKNYSFYHLPTRGRAGVKLGDADTLEMYL

SEQ ID NO: 2736 - protein, 43 aa, Glycine max
  misc_feature (1)..(43): Ceres Seq. ID no. 15171424
MLCIWMFEIVIACHLKNYSFYHLPTRGRAGVKLGDADTLEMYL

SEQ ID NO: 2737 - protein, 39 aa, Glycine max
  misc_feature (1)..(39): Ceres Seq. ID no. 15171425
MRLGGVWPTSCSPGFVLPPIYSPRRENPRYSAKVRERST

SEQ ID NO: 2738 - DNA, 1212 bp, Glycine max
  misc_feature (1)..(1212): Ceres Seq. ID no. 15171758
tgaaataccggatgagatcattgagaaactggtatgtattgtttattgtaatgggttgttttgtggatgtttcttatacaggcagtgcttctggtgggaaccttttgttgcttagttgagtaactaacataatatgcttttaatcctttttttcttttttaggttgatgagggaattactctcaatgttgctggggggctgataatagaacatcctttagtattgccatttgtcaaagaagtggttggttgactcctcctctttcatactttggaatgtcagtgtatcttagtagtagtcatagggggacatgctgcattgatcctgggggacaaggacaaatcaaactcatggccctgtctgcacactaatagtttagtttattccaagcaattaactgttcattagtatgaagtaacagtattccattattcagttttcaccatttagaactatatttttgttgcttttaaaaaggaatatcaaatttgcttaagttttgctggttagagatttgtgtttggagcatatctaatttagctatgaatttcttcaaccctcaaactgaagcaaactacgacaatgacaaccaagccttttcccactagttgtgattgactacatggatgaatttgcatgttgattatcctgaaatcttggtgaaacttccatgtttgcctaaattaatgtagtttaataaattaattggtataaatgtgctgatggcctgcccaagtctaatgcaggtgatgtggctagctggtctcctactgggacaagattgctggcattttactttctggttcctatcaatagtaaatgaattctaaatgaatttgtatttgcattttgcaggtagggacaaccgacagtgtgatgggactccccaaagctctgactgaaaaactgttgaaggaggccctgtagcttgagctaccgttccaccttgtaggactgctaagtgttaagtattggcttaatctgtgaatcagaatcttaacctttgttctcaacatttttcgaaactcattgctgtcttttctggtcatagttatgtgtaggctggcatgtaccgtgtggcagttacacctgaactattattgggtattctgatcctagttaatcaattgggccatattttattagtaacataagactgtattgcgactattaatcggtctattagaataagaattgcatgttgacatctcc

SEQ ID NO: 2739 - protein, 38 aa, Glycine max
  misc_feature (1)..(38): Ceres Seq. ID no. 15171759
KYRMRSLRNWYVLFIVMGCFVDVSYTGSASGGNLLLLS

SEQ ID NO: 2740 - protein, 37 aa, Glycine max
  misc_feature (1)..(37): Ceres Seq. ID no. 15171760
EIPDEIIEKLVCIVYCNGLFCGCFLYRQCFWWEPFVA

SEQ ID NO: 2741 - protein, 35 aa, Glycine max
  misc_feature (1)..(35): Ceres Seq. ID no. 15171761
MRSLRNWYVLFIVMGCFVDVSYTGSASGGNLLLLS

SEQ ID NO: 2742 - DNA, 446 bp, Glycine max
  misc_feature (1)..(446): Ceres Seq. ID no. 15176592
atgctggacggtcaaaggattcacccccacgcacgctttgctttgacttatcaatgaaaggtttaatcctaatgcatgtggatgggcatacggaatgaatttctttgatcttgatgcttggaggacaaagaagtgtactgagcagtacaaaatcaggtaactgttatagtttctcttcttcaaacgaagaagtgtactgagcagtacaaaatcaggtaaccgttatagtttctcttcttcaaaaaatttagaattcatactcttggctgataaattatagacaattgttgtttttggtaagaaaatatgcatattttaggtataagattacctctgttaatgatcagcgataacatctgaaattactattaggtgtaatatatggcttttaagtactcaaattatttgagaatgtaatatatggcttttaagtacgcaaattgttt

SEQ ID NO: 2743 - protein, 31 aa, Glycine max
  misc_feature (1)..(31): Ceres Seq. ID no. 15176593
AGRSKDSPPRTLCFDLSMKGLILMHVDGHTE

SEQ ID NO: 2744 - DNA, 1035 bp, Glycine max
  misc_feature (1)..(1035): Ceres Seq. ID no. 15225973
cagctacgtaggccccccccccgaaaaacccagattcttcttcaccgagtccctggagagaccttctagataatcccatgcagtaacgtgatttccgtgaaagcaaacggcaatggattagtaaaaccaaagcaccctgatttcaaacgcaaggatcgcaattctctctggcttggcaaggatgaaaagtgggttttgcctaaattggaaggacttcaatttgatgttccaactgctatatccaaaaaaggtgatggtggtgagccctgtaatgatttggtgcaaaactatgctaactggtgggataatagattaaataagaggaatgcaaaagctcccgatttcaagcacaaagaaaccggtaaagggttgtggcttgattcttcatcagagtgggttttggaaaaattgccgccacctctgaagcctaaacaaagtgtagatactgaaaggacactggtttcataagcaatggacagtgaagtagaaaatggagtcattctctttgttacacttccatataactttgcccgtgagaagttggctgctgagtatatttgtagagaactacgtgaggcagatgaaacaaatttgcttcaggaagaacgttgtctgattttcttttttttacttggtgaatcgaccctttttttaatacaataagaatgaaggtgctgattgtcacatgctgaaaatgaataaggctctgtttggaaaaacttctcaataagcacttatagaagaagaaaataagaagggatggcaagacccagcaacttgggccaaaactctgggaaatagttggagaacaacaggggatattgaagatacctggaattggtgagcatactcacattcgtgcttttattggacacttgacaaagatattggcagaacaaagctactatttaggttgtgtgaaagcagaaggatctacatacaacatgtgtgttgttctgcttttatttaatgtaacatcttatgtggatgcaagatctaaatttaattatatatgtgcatcattttccccttctt

SEQ ID NO: 2745 - protein, 63 aa, Glycine max
  misc_feature (1)..(63): Ceres Seq. ID no. 15225974
MDSEVENGVILFVTLPYNFAREKLAAEYICRELREADETNLLQEERCLIFFFLLGESTLFLIQ

SEQ ID NO: 2746 - protein, 44 aa, Glycine max
  misc_feature (1)..(44): Ceres Seq. ID no. 15225975
MKSGFCLNWKDFNLMFQLLYPKKVMVVSPVMIWCKTMLTGGIID

SEQ ID NO: 2747 - protein, 41 aa, Glycine max
  misc_feature (1)..(41): Ceres Seq. ID no. 15225976
MESFSLLHFHITLPVRSWLLSIFVENYVRQMKQICFRKNVV

SEQ ID NO: 2748 - DNA, 1660 bp, Glycine max
  misc_feature (1)..(1660): Ceres Seq. ID no. 15226807
cagctacgtaggccccccccccactttttttttttcaattcaaaattaacgaccctcgttaatttccacggttaaatacaacaccctggtcttacattatcttacatcaccctcgagctcgttaatgttttcatttttctcttaagcatcaaccaagcaatatatgctaagaagcttgcatccttatcaaggcatggatcatttgatgaaaattcaaagcaataaaacaaattcgatattaaagaaaaacatgaattacattcaaattgaaaaacacataattcaacgcatagaattaatcatcgccctagttataaatttttcttattgtaaaattctatattaattggtaaatagtctaacttaaagtagccaactaaattaaactccaccttaggatgttgctagctttgttagcccttttcttgctatatgtcataccattttaatcgagtttgttggtttataagtatgggagtttgttccatagaattaaatccgtacgcgtatgatttgtgattcaaaaatccaaaacagttatgttgaaatgtaattttaaaatctctaataaaacttacatagatgaagtgtaaattaaccattaccacggaaataactctgatgaaatttaataacgtctaaagataaataaattaattgaaattattataaaggagttattggaacgcaatcgttaattgttctaacgttatgctttttattcaacccataaatatagttcctttggtcacctactgccacaaacatatctcctcggagacaaaattatcattgtgtaagtgacaatggcctcactcaatagcttgtacgttgtattggcctttacactttagtttaaatttgttgattaatacatctctatcttcagaaactcctcaaccgtcctagggtccttccaattcaaagccgttgttcgcgtacaaaaaatatctgtaattgtgcaagcaagttaaagccacattgcggtgagtaaatcttctttggtgtatttgttggtaatcaaacaattaccaattgttggtgtcagaaaagcctgccacacagacgtgacaaaatatgcagtgacattgctggtgttcaagcaaaacaaaactcaaattttaaagaggaatcattctagttctccattaatcaacttgatgcaatactactcctcctcaagggcattgaatagaagactccaagaagattcagctagagatgtaggagaaggccctagggttcttatgagttttagggtagattttgggttcatgagctaagtataaacccacttatctttatacatattagattaaagtttcattattttttggccttgtatttagggctccattgtgtaaggagggtaccctagtaatatacaatttttcagctcttgtattttagggcacctagactagtttttgaattaggagtagttttgtaatttcatatgcattaagtgaaccatttgatgcatgtgtgtgttgggagataaatttaattgaattgggagaagctcaatccaaaaaaaaaaaaaaaaaaaaaaaaaaaaaaaaaaaaaaaaaaaaaaaaaaaaataaaaaaaaaaaaaaaaaagatttccggcagccggggggatccacaagttcaaaaggggccgccaccgggggggagc

SEQ ID NO: 2749 - protein, 60 aa, Glycine max
  misc_feature (1)..(60): Ceres Seq. ID no. 15226808
MLRSLHPYQGMDHLMKIQSNKTNSILKKNMNYIQIEKHIIQRIELIIALVINFSYCKILY

SEQ ID NO: 2750 - protein, 50 aa, Glycine max
  misc_feature (1)..(50): Ceres Seq. ID no. 15226809
MDHLMKIQSNKTNSILKKNMNYIQIEKHIIQRIELIIALVINFSYCKILY

SEQ ID NO: 2751 - protein, 46 aa, Glycine max
  misc_feature (1)..(46): Ceres Seq. ID no. 15226810
MKIQSNKTNSILKKNMNYIQIEKHIIQRIELIIALVINFSYCKILY

SEQ ID NO: 2752 - DNA, 421 bp, Glycine max
  misc_feature (1)..(421): Ceres Seq. ID no. 3305552
aaaatattaaattaatcagataaagcatcgccattatcaatgcaagacaacccagttactgctcaagtcttggaactcctcggcaaaaccggttccagaggtggtatcactcaagttagagtccaactcatcgaccccaacaatggtcaacaaagacaattgatcagaaacgtcctcggtcccgtcagaaagggtgatactctttcccttatggaatgcgaaagagaagccagaagacttagataaacaataaattttgccagtttcgggatatatgaattgaataaagatgcattcattatgtattaactacatgaattggtactcaaaccatttatcttttgcgagagcttcgtgcaccgtgatgtatgtcaaacattaaattcaaaacgtagatctagaatctctcctgtggtcagtt

SEQ ID NO: 2753 - protein, 68 aa, Glycine max
  misc_feature (1)..(68): Ceres Seq. ID no. 3305553
MQDNPVTAQVLELLGKTGSRGGITQVRVQLIDPNNGQQRQLIRNVLGPVRKGDTLSLMECEREARRLR

SEQ ID NO: 2754 - protein, 68 aa, Glycine max; identical to SEQ ID NO: 2753
  misc_feature (1)..(68): Ceres Seq. ID no. 16625321

SEQ ID NO: 2755 - DNA, 554 bp, Glycine max
  misc_feature (1)..(554): Ceres Seq. ID no. 4261725
  misc_feature (341)..(341): n is a, c, t, g, unknown, or other
  misc_feature (439)..(439): n is a, c, t, g, unknown, or other
  misc_feature (500)..(500): n is a, c, t, g, unknown, or other
tttcccagcgtcaacaagccctgctggcagaacgacaacatctttcagaccttttggtcaatattcttgcgataggaaaaatttactggagagaaaatggcccctaagcaacgtatgaggctagccaacgagaaggcatcgaagaatgtcaccctccgcggcaatgtgccaaaatcaacgaaaccccaggacgacaagtaccctgtaggtccatggctccttgctctcttcatttttgtcgctgtggatcagcaatcttccaaattattcaagagtatcagagcagcggcagtagtctaataacagatctatcttcatgccacaacaatctaatgaattgnattattgactgatgcttatttatagaccactgagtgggttgaattgtacatacaaacgttacatattgggcacagcaggggttttaggatttcattgnattccttctatgaccattccaatcaaagaaaagaaatgaaattatttcaatcaccatctgnatttgacaaatgaaactttttaatgaattaataaaaaatgatgatttttggttc

SEQ ID NO: 2756 - protein, 67 aa, Glycine max
  misc_feature (1)..(67): Ceres Seq. ID no. 4261726
MAPKQRMRLANEKASKNVTLRGNVPKSTKPQDDKYPVGPWLLALFIFVAVDQQSSKLFKSIRAAAVV

SEQ ID NO: 2757 - protein, 61 aa, Glycine max
  misc_feature (1)..(61): Ceres Seq. ID no. 4261727
MRLANEKASKNVTLRGNVPKSTKPQDDKYPVGPWLLALFIFVAVDQQSSKLFKSIRAAAVV

SEQ ID NO: 2758 - protein, 46 aa, Glycine max
  misc_feature (1)..(46): Ceres Seq. ID no. 4261728
  misc_feature (43)..(43): Xaa is any aa, unknown or other
MAPCSLHFCRCGSAIFQIIQEYQSSGSSLITDLSSCHNNLMNXIID

SEQ ID NO: 2759 - protein, 67 aa, Glycine max; identical to SEQ ID NO: 2756
  misc_feature (1)..(67): Ceres Seq. ID no. 16625322

SEQ ID NO: 2760 - DNA, 586 bp, Glycine max
  misc_feature (1)..(586): Ceres Seq. ID no. 11417655
  misc_feature (540)..(540): n is a, c, t, g, unknown, or other
ggctaatagaataggtttcacaccacactaaagccaattagtccctctcttctccctttccttttctctatccaataatagagctttagaagaaagaaagaaagccatgcaagcatgttcctcctcagacgctccactctccaagaggttagatggcaaagtagcactcataaccggcggagccagtggcatcggtgaagccaccgccaagcttttccttcgccacggtgccaaggtcgtcatcgccgacatccaagacaacctcggacactccctatgccaaagtctcaattcctccgacaaaaacaacaacgacgacatttcctatgttcactgcgacgtcaccaacgacaaagacgtcgaaaccgccgtcaacgctgccgtctcgcgacacggcaagctcgacatcctcttcagcaacgccggcatcacgggccgttccgactgttctaactccatcacggccatcgacagcggtgacctgaagagggtcttcgaggtgaacgtcttcggtgccttctacgccgccaaacacgccgntaaggtcatgattcccaaaaagaaagggagcattggtttcactgct

SEQ ID NO: 2761 - protein, 160 aa, Glycine max
  misc_feature (1)..(160): Ceres Seq. ID no. 11417656
  misc_feature (145)..(145): Xaa is any aa, unknown or other
MQACSSSDAPLSKRLDGKVALITGGASGIGEATAKLFLRHGAKVVIADIQDNLGHSLCQSLNSSDKNNNDDISYVHCDVTNDKDVETAVNAAVSRHGKLDILFSNAGITGRSDCSNSITAIDSGDLKRVFEVNVFGAFYAAKHAXKVMIPKKKGSIGFTA

SEQ ID NO: 2762 - DNA, 465 bp, Glycine max
  misc_feature (1)..(465): Ceres Seq. ID no. 11418504
gaaatccaactctctaaacaacacattaacctttctcattccccatctcctcaccttattcagccactgctaatttctagggttccgaaatggacgctggcggaaagatcaagaagggcgccggaggaagaaagggcggcggccctaagaagaagccggtttcaaggtccgtcaaggccggtctccaattccccgtcggaagaattggccgttatttgaagaaaggaaggtacgcccagcgtgtcggtaccggtgctcccgtttacttggccgcagttctcgagtacctagctgctgaggtgcttgagttggctgggaatgctgcacgtgacaacaagaagaacaggattattccgagacatgtgctattggctgtgaggaacgatgaggagttggggaaattgcttgctggtgtcaccattgcacatggtggtgtgcttccaaacattaaccctgttttgttgc

SEQ ID NO: 2763 - protein, 125 aa, Glycine max
  misc_feature (1)..(125): Ceres Seq. ID no. 11418505
MDAGGKIKKGAGGRKGGGPKKKPVSRSVKAGLQFPVGRIGRYLKKGRYAQRVGTGAPVYLAAVLEYLAAEVLELAGNAARDNKKNRIIPRHVLLAVRNDEELGKLLAGVTIAHGGVLPNINPVLL

SEQ ID NO: 2764 - protein, 72 aa, Glycine max
  misc_feature (1)..(72): Ceres Seq. ID no. 11418506
EIQLSKQHINLSHSPSPHLIQPLLISRVPKWTLAERSRRAPEEERAAALRRSRFQGPSRPVSNSPSEELAVI

SEQ ID NO: 2765 - DNA, 921 bp, Glycine max
  misc_feature (1)..(921): Ceres Seq. ID no. 12391015
atctgctcttaaccccttttgttttcttctcctcgtttctattcttattcctatatatgcaccccatccttagtctccattctcacacttactagtagtaagcatggagtcctcaaagatctatgcttacctcttcctctgcatgatctttctctcttccgccactcccattctcggttgtggctactgtggcaaaccccccaaaaagcacaagcctggtaaaacaccaaagacacccaaaacacccgttgttaagccaccagtcaccatccctcccattaatgttcctcccgttgttcttccaccaatagtgaagcccccaggtattctccctccaattccaattattaacccaccaaccacaccagggaagggagggaacactccatgcccaccaccaaagtctcctgcgcaggctacgtgccccattgacacgctcaaacttggtgcctgtgtggatcttcttggagggttggttcacattggtttgggtgaccctgttgcgaaccagtgctgccccgtgcttcaagggcttgttgaggttgaagctgcggtgtgtctttgcaccactcttaaactgaagcttctcaacctcaacatttatgtcccacttgcccttcagctccttgtgacttgtggcaagtctcctcctcctggttacacgtgctccctctaaactagtggaaaggattgaggaatatatggtcaaaatcgacatgagaggatgtcgagccacactatctctcttctcttctgattggaactgctgttgtttgttttgctattatttgtaaaaccatttgtttttaattgagatcgttgcatgtatggtttaatataatcttaggcaagtagcagcaaagatgcttctctgtgacatgttcaattattaatttatatgaattgcgctttaatttgttg

SEQ ID NO: 2766 - protein, 190 aa, Glycine max
  misc_feature (1)..(190): Ceres Seq. ID no. 12391016
MESSKIYAYLFLCMIFLSSATPILGCGYCGKPPKKHKPGKTPKTPKTPVVKPPVTIPPINVPPVVLPPIVKPPGILPPIPIINPPTTPGKGGNTPCPPPKSPAQATCPIDTLKLGACVDLLGGLVHIGLGDPVANQCCPVLQGLVEVEAAVCLCTTLKLKLLNLNIYVPLALQLLVTCGKSPPPGYTCSL

SEQ ID NO: 2767 - protein, 177 aa, Glycine max
  misc_feature (1)..(177): Ceres Seq. ID no. 12391017
MIFLSSATPILGCGYCGKPPKKHKPGKTPKTPKTPVVKPPVTIPPINVPPVVLPPIVKPPGILPPIPIINPPTTPGKGGNTPCPPPKSPAQATCPIDTLKLGACVDLLGGLVHIGLGDPVANQCCPVLQGLVEVEAAVCLCTTLKLKLLNLNIYVPLALQLLVTCGKSPPPGYTCSL

SEQ ID NO: 2768 - DNA, 1009 bp, Glycine max
  misc_feature (1)..(1009): Ceres Seq. ID no. 12449199
acacaaaacacacgtctcattggccatttgcagtttgcactattttacatcacaaaagataaaaacagagaaagaaagattatttaggaacaagaaggtgtgcgcgcgcgaaccatccataacagaaacaacaatggcttccatgagtatattcaccaccatttccctcgccgccgacgcccggaatccggccatctattttccccggcggcggcagcccaacacggtcattttcgccgccgcctcatcgccggaatctcctccagaaatagagctcgagttcatcgggccaaaaccgggaagtgatggatcgtacccggtggagagagtgaaagcaataagcggagagaagctgttgaggaacatcatgttggataacaagatcgagctttatgccacctatgggaagctgatgaactgcgcgggaggtggtagctgcggaacatgcatagtagagattattgaaggaaaggatcttttaaatgaaagaacaaacactgaactcagatatcttagtaagaaacccgaatcttggaggctggcttgtcaaactattgttggaaacaaagaaaactctggcaaggttgctgttcaaaggattcctcagtggaagaagtagtaaaccatggatgcttagaaagaagagctccatatgttcctcctcaatttgacacagtttgaagcaacactacaaatcattgatccatgcatcataaatttatgaaaacttttgctttggttcttaatggaatcttgcagatatctgtaatgtataatttcccttcatgttttgtaatggttgccacttggcttcaattctttaggttagggtacaaatctttggagtatacattatcaaagcaattttgaatttgtttacatcatcaatgcatgatacattatcaaagaaactctattagagtgcaaatgacacattatctttgatgtgcaattcccaaaaaaacgatgtcttctttttcttcaaacaaattgatgagtgagttccttc

SEQ ID NO: 2769 - protein, 205 aa, Glycine max
  misc_feature (1)..(205): Ceres Seq. ID no. 12449200
HKTHVSLAICSLHYFTSQKIKTEKERLFRNKKVCAREPSITETTMASMSIFTTISLAADARNPAIYFPRRRQPNTVIFAAASSPESPPEIELEFIGPKPGSDGSYPVERVKAISGEKLLRNIMLDNKIELYATYGKLMNCAGGGSCGTCIVEIIEGKDLLNERTNTELRYLSKKPESWRLACQTIVGNKENSGKVAVQRIPQWKK

SEQ ID NO: 2770 - protein, 161 aa, Glycine max
  misc_feature (1)..(161): Ceres Seq. ID no. 12449201
MASMSIFTTISLAADARNPAIYFPRRRQPNTVIFAAASSPESPPEIELEFIGPKPGSDGSYPVERVKAISGEKLLRNIMLDNKIELYATYGKLMNCAGGGSCGTCIVEIIEGKDLLNERTNTELRYLSKKPESWRLACQTIVGNKENSGKVAVQRIPQWKK

SEQ ID NO: 2771 - protein, 158 aa, Glycine max
  misc_feature (1)..(158): Ceres Seq. ID no. 12449202
MSIFTTISLAADARNPAIYFPRRRQPNTVIFAAASSPESPPEIELEFIGPKPGSDGSYPVERVKAISGEKLLRNIMLDNKIELYATYGKLMNCAGGGSCGTCIVEIIEGKDLLNERTNTELRYLSKKPESWRLACQTIVGNKENSGKVAVQRIPQWKK

SEQ ID NO: 2772 - protein, 161 aa, Glycine max; identical to SEQ ID NO: 2770
  misc_feature (1)..(161): Ceres Seq. ID no. 16611732

SEQ ID NO: 2773 - DNA, 836 bp, Glycine max
  misc_feature (1)..(836): Ceres Seq. ID no. 12563476
gaaaacaaaggcagagcagagttgttgcgattaagaagatgaagagagtggagtttatggggctggggctgttagtggtggtgatgatgggatgttgtgggtctgcgactgctgcggatgacttggcaaccaagtgttcggcggtgattcagaaggtaataccgtgtctgaacttcgcgacggggaaggaagaaatgcccaaaaaggaatgttgcgacgccgccacggccataaaggagagcaacccagagtgcttgtgctacatcattcaagagacccacaagggtagcccacaggtcaaaagcttgggcattcaagaggccaagctgcttcagctcccttctgtttgcaacgtcaaaaacgccagcatcaccaactgtcctaagcttttgggtctatctccaagttcccccgatgctgctatcttcacatcaaattcttcgaagacaacaccttcagcacctacaacaacaaactcgcaaaccacgaccccgcagagccaaaacgcttctcatggaagcatggttcaacctagtagttaccgttacctatgtgatggtgatggctttggccattgttctggttgcagttccaaccgaaactgtgagcatttatacatgatgcggcattatgcactgttgaagacagttggggttgtcgttttgtttcctgcttttgttatgccataggacttcgcagctttgaattaatgaattagtttgcatttgtggcctgtgatggtttctcgaattttgagacctcgctgtaatgtttgcctttattgtggacttgtttcttttctgcttcccacaattaatgttaacggatagttggtg

SEQ ID NO: 2774 - protein, 228 aa, Glycine max
  misc_feature (1)..(228): Ceres Seq. ID no. 12563477
KQRQSRVVAIKKMKRVEFMGLGLLVVVMMGCCGSATAADDLATKCSAVIQKVIPCLNFATGKEEMPKKECCDAATAIKESNPECLCYIIQETHKGSPQVKSLGIQEAKLLQLPSVCNVKNASITNCPKLLGLSPSSPDAAIFTSNSSKTTPSAPTTTNSQTTTPQSQNASHGSMVQPSSYRYLCDGDGFGHCSGCSSNRNCEHLYMMRHYALLKTVGVVVLFPAFVMP

SEQ ID NO: 2775 - protein, 216 aa, Glycine max
  misc_feature (1)..(216): Ceres Seq. ID no. 12563478
MKRVEFMGLGLLVVVMMGCCGSATAADDLATKCSAVIQKVIPCLNFATGKEEMPKKECCDAATAIKESNPECLCYIIQETHKGSPQVKSLGIQEAKLLQLPSVCNVKNASITNCPKLLGLSPSSPDAAIFTSNSSKTTPSAPTTTNSQTTTPQSQNASHGSMVQPSSYRYLCDGDGFGHCSGCSSNRNCEHLYMMRHYALLKTVGVVVLFPAFVMP

SEQ ID NO: 2776 - protein, 210 aa, Glycine max
  misc_feature (1)..(210): Ceres Seq. ID no. 12563479
MGLGLLVVVMMGCCGSATAADDLATKCSAVIQKVIPCLNFATGKEEMPKKECCDAATAIKESNPECLCYIIQETHKGSPQVKSLGIQEAKLLQLPSVCNVKNASITNCPKLLGLSPSSPDAAIFTSNSSKTTPSAPTTTNSQTTTPQSQNASHGSMVQPSSYRYLCDGDGFGHCSGCSSNRNCEHLYMMRHYALLKTVGVVVLFPAFVMP

SEQ ID NO: 2777 - protein, 216 aa, Glycine max; identical to SEQ ID NO: 2775
  misc_feature (1)..(216): Ceres Seq. ID no. 16625337

SEQ ID NO: 2778 - DNA, 1530 bp, Glycine max
  misc_feature (1)..(1530): Ceres Seq. ID no. 12563809
aaaagtcaccgattacgttctctaaaattcactcccaaaaaactctatttgattccaccgaaaccctaaccccctttcgacgaacgaagggcaatcagttgctcgctccttggatccattcttgaaattctcgttatcgctcttcgaactcaagctctctcgctcacgatttctgcttctgcaccaatttctgcggtttctcaagatttagaggttctaagtggttcatttctttgaagcatgccggggttaacgtgcaacgcttgcaacaccgaattcaaagatgatacagagcaaaagctccattacaaatccgagtggcatcgatacaatctcaagcgcaaggtggctggggttcctggggtgaccgaggcgttatttctggctagacaatctgtgcttgctcaagagaaaaataaactgggtgaaacccccatgctctacagctgtggtctttgtggaaaggattataaaagttctaaggctcatgctgagcaccttaaatcacgtggtcatatgatgcaggcctctgaaggaactagtcacgcagatgagaaggcaatagttaagcctcttccacaacgtgttgtgaataggcctcctcctaggagagaggtagataactctgaaaatgaggaaagtgaagatgaatgggaggaggttgatcctgaagaggatttggttgatggtgctgcaaagtccttgactgatttgaatgtgaatgagcatggtgaaaatgttgatatggaggtagatgatgattttgaggagttagacccctcttgttgctttatgtgtgatcaagagcacaaatcaatagaaaactgcatggttcacatgcacaagcatcatggattcttcattcctgatgttgagtatttgaaggatccaaaaggcctcctcacctatcttggccttaaggtcaaaagggactacatgtgtctgtactgcaatgatcgatgttatccattcagcagcttggaagcagtcaggaaacatatggaggcaaaaagtcactgtaaagtgcattatggtgatggtgatgatgacgaggaggtagaattagatgagttctatgattatagcagcagttatgtggatgatcaaggcaagcagcttgttgcgtcttgtgatgcatctaacaatgtagaacttgttggtgggtctgagctcataatcaccacgaaatctggtgaaagatcatcaaccaaaacactaggttcccgtgaatttttgcgttattatcgtcaaaaacctcggccatcactagcaaatatggctatcactgctgcgttggcttcaaggtacaggagcatgggcttgaccactatccaatcaagggagaagattgtgaggatgaaagtgctgaaggaaatgaataggtcaggtgtggacaatatgcgtactaagatggcgatgaagagtaatgtcatcaggaacctgccaaagaatgtaccatattagtcctcactggtaatagttttacatgagtggtgctgtgtattaattttttctatgaaataatttttc

SEQ ID NO: 2779 - protein, 407 aa, Glycine max
  misc_feature (1)..(407): Ceres Seq. ID no. 12563810
MPGLTCNACNTEFKDDTEQKLHYKSEWHRYNLKRKVAGVPGVTEALFLARQSVLAQEKNKLGETPMLYSCGLCGKDYKSSKAHAEHLKSRGHMMQASEGTSHADEKAIVKPLPQRVVNRPPPRREVDNSENEESEDEWEEVDPEEDLVDGAAKSLTDLNVNEHGENVDMEVDDDFEELDPSCCFMCDQEHKSIENCMVHMHKHHGFFIPDVEYLKDPKGLLTYLGLKVKRDYMCLYCNDRCYPFSSLEAVRKHMEAKSHCKVHYGDGDDDEEVELDEFYDYSSSYVDDQGKQLVASCDASNNVELVGGSELIITTKSGERSSTKTLGSREFLRYYRQKPRPSLANMAITAALASRYRSMGLTTIQSREKIVRMKVLKEMNRSGVDNMRTKMAMKSNVIRNLPKNVPY

SEQ ID NO: 2780 - protein, 342 aa, Glycine max
  misc_feature (1)..(342): Ceres Seq. ID no. 12563811
MLYSCGLCGKDYKSSKAHAEHLKSRGHMMQASEGTSHADEKAIVKPLPQRVVNRPPPRREVDNSENEESEDEWEEVDPEEDLVDGAAKSLTDLNVNEHGENVDMEVDDDFEELDPSCCFMCDQEHKSIENCMVHMHKHHGFFIPDVEYLKDPKGLLTYLGLKVKRDYMCLYCNDRCYPFSSLEAVRKHMEAKSHCKVHYGDGDDDEEVELDEFYDYSSSYVDDQGKQLVASCDASNNVELVGGSELIITTKSGERSSTKTLGSREFLRYYRQKPRPSLANMAITAALASRYRSMGLTTIQSREKIVRMKVLKEMNRSGVDNMRTKMAMKSNVIRNLPKNVPY

SEQ ID NO: 2781 - protein, 315 aa, Glycine max
  misc_feature (1)..(315): Ceres Seq. ID no. 12563812
MMQASEGTSHADEKAIVKPLPQRVVNRPPPRREVDNSENEESEDEWEEVDPEEDLVDGAAKSLTDLNVNEHGENVDMEVDDDFEELDPSCCFMCDQEHKSIENCMVHMHKHHGFFIPDVEYLKDPKGLLTYLGLKVKRDYMCLYCNDRCYPFSSLEAVRKHMEAKSHCKVHYGDGDDDEEVELDEFYDYSSSYVDDQGKQLVASCDASNNVELVGGSELIITTKSGERSSTKTLGSREFLRYYRQKPRPSLANMAITAALASRYRSMGLTTIQSREKIVRMKVLKEMNRSGVDNMRTKMAMKSNVIRNLPKNVPY

SEQ ID NO: 2782 - protein, 407 aa, Glycine max; identical to SEQ ID NO: 2779
  misc_feature (1)..(407): Ceres Seq. ID no. 16625338

SEQ ID NO: 2783 - DNA, 774 bp, Glycine max
  misc_feature (1)..(774): Ceres Seq. ID no. 12583650
gttctgccctggatcaacattaactgaaacagaaaacgtgttttttcctgtcatggatcatttgacttcgattgatttttaaatgggtattgctatgtcgttgttgaatgaatggggttgttgctagaagcagtcttccatgtgggttttgattgtcctgtactgaaagacttcataacatactgtgtgtgtgagggactcggtgctgctttaattactgctcttgtgaaggtgaactgtgaacttggttggtcagagcttgccaacaggcagaaagttgctgaagtccctcaattgtgcttccctgcctcctttcccaaagtctctgtctggtgcaatggtttatataactgagtgggacaagtttgtggagcaatccattgagctgttccgtgcagatcctgattctacaaggtatgtcatgaagtacaggcactgtgatggcaagttggtactcaaggtcactgataaccgacagtgtctaaagtataagacaggccaagcacaagaggctaagaagatggagaaactgaataatatgttctttgctttgatggctcgtggtcccgatgttgatctatcagaagtcccgggaaaagagcaaatggatgctcagcccaccaagaaaggaagaggaaggaagcaataacttacttggccttttgctagacaagatggttttatgaatccctggactaagaatttgaatagttatatttttttccctacctaatgattacttcagattcttatgatgtgagaggtttatatttg

SEQ ID NO: 2784 - protein, 103 aa, Glycine max
  misc_feature (1)..(103): Ceres Seq. ID no. 12583651
MVYITEWDKFVEQSIELFRADPDSTRYVMKYRHCDGKLVLKVTDNRQCLKYKTGQAQEAKKMEKLNNMFFALMARGPDVDLSEVPGKEQMDAQPTKKGRGRKQ

SEQ ID NO: 2785 - protein, 80 aa, Glycine max
  misc_feature (1)..(80): Ceres Seq. ID no. 12583652
MGLLLEAVFHVGFDCPVLKDFITYCVCEGLGAALITALVKVNCELGWSELANRQKVAEVPQLCFPASFPKVSVWCNGLYN

SEQ ID NO: 2786 - protein, 75 aa, Glycine max
  misc_feature (1)..(75): Ceres Seq. ID no. 12583653
MKYRHCDGKLVLKVTDNRQCLKYKTGQAQEAKKMEKLNNMFFALMARGPDVDLSEVPGKEQMDAQPTKKGRGRKQ

SEQ ID NO: 2787 - protein, 103 aa, Glycine max; identical to SEQ ID NO: 2784
  misc_feature (1)..(103): Ceres Seq. ID no. 16625341

SEQ ID NO: 2788 - DNA, 1142 bp, Glycine max
  misc_feature (1)..(1142): Ceres Seq. ID no. 12608276
gtttccaagtgtaatggattcgagttccattaacagcaacagtaaggagataaccatggagattccaagcttggttcgactttacaaggatggcaccattgaacgcctccaaaactcaccaattgtgccacccacgcttcaagatccaacttcttccaaagacgtcgtcatctctggtgaccccctcatctctgctcgtcttttccttccaaaccggattcgatcccagcaagagggtcataaagtccccatcttggtctactttcatggtggaggtttcttctttgaatctgccttcaaccaactccaccataactatttcaacaagtttgtctccgtagcagatgttttagtcgtttccgtcgagtataggttggctccagagacccttcttcctgcagcttatgatgactgctgggatgctcttaaatgggtcgccaccaacaccgaaccatggcttgtncaacacggtgatttcaacagagtcttcattggaggtgacagcgctggtgctaatatagttcataacattgccatgcgtgctggggctgaagctttacctggtggtgtcaaactcttgggtgcttttctttctcattcctacttctacggttcaaagccaattggatcggaacctgttgcagggcaccaacagagcgtgccctatttggtatgggattttgtttatccatctgcgcctggagggattgacaaccctatgatcaatccaatggttactggggcgcctagcttggctggacttgggtgttctaagattctggtttgcgttgctgaaaaggatctgataaaggatagaggggttgcgtactatgaggctgtgaagaagagtggctggcaaggtgaagcggaactgttcgaagtggagggcgaggatcatgctttccacatccacaatccacaaacccagaatgccatgaaaatgatcaaacgcctctcggattttctcctccactaaaacacataccctgaggattctgagttttaatgtctcatggatgtaatctaatgtaatgcttcaactctgcttattattattaagcaaataaaatttggaaatcagaagccagtgtagctggcctagttcgtgtgatctaaagtctaataatattctctattatgct

SEQ ID NO: 2789 - protein, 324 aa, Glycine max
  misc_feature (1)..(324): Ceres Seq. ID no. 12608277
  misc_feature (154)..(154): Xaa is any aa, unknown or other
FPSVMDSSSINSNSKEITMEIPSLVRLYKDGTIERLQNSPIVPPTLQDPTSSKDVVISGDPLISARLFLPNRIRSQQEGHKVPILVYFHGGGFFFESAFNQLHHNYFNKFVSVADVLVVSVEYRLAPETLLPAAYDDCWDALKWVATNTEPWLXQHGDFNRVFIGGDSAGANIVHNIAMRAGAEALPGGVKLLGAFLSHSYFYGSKPIGSEPVAGHQQSVPYLVWDFVYPSAPGGIDNPMINPMVTGAPSLAGLGCSKILVCVAEKDLIKDRGVAYYEAVKKSGWQGEAELFEVEGEDHAFHIHNPQTQNAMKMIKRLSDFLLH

SEQ ID NO: 2790 - protein, 320 aa, Glycine max
  misc_feature (1)..(320): Ceres Seq. ID no. 12608278
  misc_feature (150)..(150): Xaa is any aa, unknown or other
MDSSSINSNSKEITMEIPSLVRLYKDGTIERLQNSPIVPPTLQDPTSSKDVVISGDPLISARLFLPNRIRSQQEGHKVPILVYFHGGGFFFESAFNQLHHNYFNKFVSVADVLVVSVEYRLAPETLLPAAYDDCWDALKWVATNTEPWLXQHGDFNRVFIGGDSAGANIVHNIAMRAGAEALPGGVKLLGAFLSHSYFYGSKPIGSEPVAGHQQSVPYLVWDFVYPSAPGGIDNPMINPMVTGAPSLAGLGCSKILVCVAEKDLIKDRGVAYYEAVKKSGWQGEAELFEVEGEDHAFHIHNPQTQNAMKMIKRLSDFLLH

SEQ ID NO: 2791 - protein, 306 aa, Glycine max
  misc_feature (1)..(306): Ceres Seq. ID no. 12608279
  misc_feature (136)..(136): Xaa is any aa, unknown or other
MEIPSLVRLYKDGTIERLQNSPIVPPTLQDPTSSKDVVISGDPLISARLFLPNRIRSQQEGHKVPILVYFHGGGFFFESAFNQLHHNYFNKFVSVADVLVVSVEYRLAPETLLPAAYDDCWDALKWVATNTEPWLXQHGDFNRVFIGGDSAGANIVHNIAMRAGAEALPGGVKLLGAFLSHSYFYGSKPIGSEPVAGHQQSVPYLVWDFVYPSAPGGIDNPMINPMVTGAPSLAGLGCSKILVCVAEKDLIKDRGVAYYEAVKKSGWQGEAELFEVEGEDHAFHIHNPQTQNAMKMIKRLSDFLLH

SEQ ID NO: 2792 - protein, 306 aa, Glycine max; identical to SEQ ID NO: 2791
  misc_feature (1)..(306): Ceres Seq. ID no. 16625356
  misc_feature (136)..(136): Xaa is any aa, unknown or other

SEQ ID NO: 2793 - DNA, 848 bp, Glycine max
  misc_feature (1)..(848): Ceres Seq. ID no. 12608406
gtgacaatctttcttagctagatcagtgcctcatttttctttcagttttcctgcttcttctcttcttcaactggttttgagattgccattttcttatcttgtttagtttagcttgtttggttgagaggaattaattattttgtataaaacaatgaaggagagtgtaggaaaccctttgcgtcttcaatctgtgaatcatatctccctcatatgcagatcagtggaacaatcaatggatttctatcagaacgttcttggattttaccccatcaggaggcctggctctttagattttgatggggcatggctattcggctacggaattggaattcatttgctagaagcagagaaccctgaaaagttgccaaagaagaaggaaattaatccaaaggataatcatatatctttccagtgtgagagcatggttgcagtggagaagaagctgaaagaaatggaaattgactatgtgcgagcaacggtggaggaaggtggaatccaagtggatcaactgtttttccacgaccctgatgggttcatgatcgagatatgcaactgtgatagcctccctgtgattcccttagttggtgaggtggcaagatcatgttcccttgtgaatcttgagaagatgcagaatcagcagcagatacagaaaatgctccagcaactttgatgagccttttctgttatgttatgtgatcagagcatcctcacggatcacgaggacttgttgcttttttttttatgtggttgagttgtcaatgtgtcattctgttccttttgttttgttttctttaattgtgttatataataataaacaatctgccaaatagatcagcgcttttgcaacc

SEQ ID NO: 2794 - protein, 172 aa, Glycine max
  misc_feature (1)..(172): Ceres Seq. ID no. 12608407
MKESVGNPLRLQSVNHISLICRSVEQSMDFYQNVLGFYPIRRPGSLDFDGAWLFGYGIGIHLLEAENPEKLPKKKEINPKDNHISFQCESMVAVEKKLKEMEIDYVRATVEEGGIQVDQLFFHDPDGFMIEICNCDSLPVIPLVGEVARSCSLVNLEKMQNQQQIQKMLQQL

SEQ ID NO: 2795 - protein, 145 aa, Glycine max
  misc_feature (1)..(145): Ceres Seq. ID no. 12608408
MDFYQNVLGFYPIRRPGSLDFDGAWLFGYGIGIHLLEAENPEKLPKKKEINPKDNHISFQCESMVAVEKKLKEMEIDYVRATVEEGGIQVDQLFFHDPDGFMIEICNCDSLPVIPLVGEVARSCSLVNLEKMQNQQQIQKMLQQL

SEQ ID NO: 2796 - protein, 172 aa, Glycine max; identical to SEQ ID NO: 2794
  misc_feature (1)..(172): Ceres Seq. ID no. 16625357

SEQ ID NO: 2797 - DNA, 796 bp, Glycine max
  misc_feature (1)..(796): Ceres Seq. ID no. 12608513
attctctctttcccctgtaatctctatatattgtttacaattattcgagagtcatggcaacaagggtgcttttgttgatggccctcaccctctatatcttccccattgctacagcaacattccatgtcaagggttccgtttattgtgatacctgccgtgctggattcgaaaccaatgccaccttttatattcgaggtgcaagggtcggaattcagtgcaaagagaggaagaccatgaaggtagctttctactctgagggtgtgacggactccacgggaacataccacattgaggttgaaaatgaccaccgtgacaatatttgcgaatgcttgcttgttaaaagccctatcaaatggtgtagcaccccagactctgggcgtgacaaatccagcatagtactaacccactcccaaaatggcatagtcaaccatcttcactatgcaaatgctatgggttacttgagggacgaacccttgcctgaatgccacaaactgcttaaatactacttggcagactcagatgtttgatcaataaggtagaagaacgacttgttctttgtttaaatcatgtgttaatttaacgacggatctatttctatggttaagtatttgttgacatcagagtggtactatgtattagttactagcttgttactacttagttttgcttcatatgtctgtttgtaattaagtcacttaattgtggcgtcgtaatgattgatgatgtttaagtctcttatttaattttatgacaatgaagagaaaaaagggtacagacaatgctaaatgcatggttt

SEQ ID NO: 2798 - protein, 157 aa, Glycine max
  misc_feature (1)..(157): Ceres Seq. ID no. 12608514
MATRVLLLMALTLYIFPIATATFHVKGSVYCDTCRAGFETNATFYIRGARVGIQCKERKTMKVAFYSEGVTDSTGTYHIEVENDHRDNICECLLVKSPIKWCSTPDSGRDKSSIVLTHSQNGIVNHLHYANAMGYLRDEPLPECHKLLKYYLADSDV

SEQ ID NO: 2799 - protein, 149 aa, Glycine max
  misc_feature (1)..(149): Ceres Seq. ID no. 12608515
MALTLYIFPIATATFHVKGSVYCDTCRAGFETNATFYIRGARVGIQCKERKTMKVAFYSEGVTDSTGTYHIEVENDHRDNICECLLVKSPIKWCSTPDSGRDKSSIVLTHSQNGIVNHLHYANAMGYLRDEPLPECHKLLKYYLADSDV

SEQ ID NO: 2800 - protein, 97 aa, Glycine max
  misc_feature (1)..(97): Ceres Seq. ID no. 12608516
MKVAFYSEGVTDSTGTYHIEVENDHRDNICECLLVKSPIKWCSTPDSGRDKSSIVLTHSQNGIVNHLHYANAMGYLRDEPLPECHKLLKYYLADSDV

SEQ ID NO: 2801 - protein, 157 aa, Glycine max; identical to SEQ ID NO: 2798
  misc_feature (1)..(157): Ceres Seq. ID no. 16625358

SEQ ID NO: 2802 - DNA, 879 bp, Glycine max
  misc_feature (1)..(879): Ceres Seq. ID no. 12609093
cctcactgcagaaacaccacacgatctgaaaaaaccgacagaacatgtcgtcggggaagcaggagacggcggcggtgcgcgtgctgggcaggtggccgagcccgttcgtgatccgggtgctgatagctcttgggctcaagggcgtggaccacgagctcgtggaggaggcggcgggcaacaagagcgagctgctgctcgcctccaaccccgtgcacaagaagatccccgtgctcctgcaccacggcaggcccgtctccgagtccctcatcatcgtccagtacgtcgacgaggcctgggcctcccaagccccggcgctcatcccgtccgacccctacgcccgcgcggccgagcggttctgggcccagtacgtcgacgacaagtttcctacggcgatccgggtcctgaggggaaggctggacggagacaaggaagaagcggcggctcaggtgtgcgccgctctgcagcacctggaggtggccttcgtcgagtgcggccaagggaaggattacttcggcggcgacggcgtcggttacctggacattgctctcgggtcgcacctcggatgggtcagggcggtagagaggatcgctgaaatcaggctgctcgacgcggccaaggttcctaagctggcggcgtgggcggatcggttctgcgcccacccggcggtggcgaacgccatgcctaacgtggacaggttcgtggagttcagcgtcaagaatgacggcgttctgaaggcggctagtgctaattccaagtgagcgaactgttgtgggcactagacagcgctcgatggcatagccagaataagtaacctgctggctgttggtgtaaaccctcttttattatatggcaattgataaatctcgaatgtttggattt

SEQ ID NO: 2803 - protein, 237 aa, Glycine max
  misc_feature (1)..(237): Ceres Seq. ID no. 12609094
MSSGKQETAAVRVLGRWPSPFVIRVLIALGLKGVDHELVEEAAGNKSELLLASNPVHKKIPVLLHHGRPVSESLIIVQYVDEAWASQAPALIPSDPYARAAERFWAQYVDDKFPTAIRVLRGRLDGDKEEAAAQVCAALQHLEVAFVECGQGKDYFGGDGVGYLDIALGSHLGWVRAVERIAEIRLLDAAKVPKLAAWADRFCAHPAVANAMPNVDRFVEFSVKNDGVLKAASANSK

SEQ ID NO: 2804 - protein, 196 aa, Glycine max
  misc_feature (1)..(196): Ceres Seq. ID no. 12609095
LTAETPHDLKKPTEHVVGEAGDGGGARAGQVAEPVRDPGADSSWAQGRGPRARGGGGGQQERAAARLQPRAQEDPRAPAPRQARLRVPHHRPVRRRGLGLPSPGAHPVRPLRPRGRAVLGPVRRRQVSYGDPGPEGKAGRRQGRSGGSGVRRSAAPGGGLRRVRPREGLLRRRRRRLPGHCSRVAPRMGQGGREDR

SEQ ID NO: 2805 - protein, 237 aa, Glycine max; identical to SEQ ID NO: 2803
  misc_feature (1)..(237): Ceres Seq. ID no. 16625359

SEQ ID NO: 2806 - DNA, 1112 bp, Glycine max
  misc_feature (1)..(1112): Ceres Seq. ID no. 12609304
atcaagtcttgatttcatatggaagagtcctccaaggcggttgaggttgagcaggaagcaagtgaagcaaaggctcctcacgaggctttgtttcttgtcttgtcatatcttcctgtgtacgaggttgtggtcatgtctcaagtctgcacatcactaagggatgcagtgaacaatgacatattactatggttgaatgttattgttcaaaggcccctcagttggcgactcaacgatgagattctaatcaaaatcacctcaaaggccaatggtaggctcaaaactctcgctctcatcaactgcatgcacgttaccgaccacggcctccaaagggtcgttcaacaaaatcctctcattaacaagttgcatataccagcatgcactggcataacccctgaaggagttctaggagccgtgaaaacactatgccaaagaagcaattgcttaaagaccttaagtataaacggcatctacaacatacagaaggagcatcttgacatgcttatcatgaaccttggaaagaatcaaccactagaggagcagcaaaagcagcagcagcctgtctactatcatgaacgatgtagcttttcagtattcaagcaggaagaaagctggcggcttattgatttggagatatgtcccaggtgctttgaggtgaggatggtttatgattgccccaaagagcactgcacgagaagggaatggcccctagctccatgtaggggttgcaatttttgtattccaaggtgcgaaaactgtggtggatgcattgaatccggagaagtggaagagggagcttgtgaagatatcttctgccttgaatgttggttacagcttcccaagtgcagtttctgcaacaaaccatattgtaagcaacacacaaactggtggtgcacttcttcagactcttcattgatctgtaaagtttgtgatgaaaattctcacggatatacgtatactgatgttctataatgacgtgcaacttgggataagtttcaactatcatgcatcaagccatcaagtaagtttatagatgatgaatgattatattatttgcattcatgaatgtacttaaagtttgattgttctggattataaaatgaaggtttttctct

SEQ ID NO: 2807 - protein, 316 aa, Glycine max
  misc_feature (1)..(316): Ceres Seq. ID no. 12609305
MEESSKAVEVEQEASEAKAPHEALFLVLSYLPVYEVVVMSQVCTSLRDAVNNDILLWLNVIVQRPLSWRLNDEILIKITSKANGRLKTLALINCMHVTDHGLQRVVQQNPLINKLHIPACTGITPEGVLGAVKTLCQRSNCLKTLSINGIYNIQKEHLDMLIMNLGKNQPLEEQQKQQQPVYYHERCSFSVFKQEESWRLIDLEICPRCFEVRMVYDCPKEHCTRREWPLAPCRGCNFCIPRCENCGGCIESGEVEEGACEDIFCLECWLQLPKCSFCNKPYCKQHTNWWCTSSDSSLICKVCDENSHGYTYTDVL

SEQ ID NO: 2808 - protein, 278 aa, Glycine max
  misc_feature (1)..(278): Ceres Seq. ID no. 12609306
MSQVCTSLRDAVNNDILLWLNVIVQRPLSWRLNDEILIKITSKANGRLKTLALINCMHVTDHGLQRVVQQNPLINKLHIPACTGITPEGVLGAVKTLCQRSNCLKTLSINGIYNIQKEHLDMLIMNLGKNQPLEEQQKQQQPVYYHERCSFSVFKQEESWRLIDLEICPRCFEVRMVYDCPKEHCTRREWPLAPCRGCNFCIPRCENCGGCIESGEVEEGACEDIFCLECWLQLPKCSFCNKPYCKQHTNWWCTSSDSSLICKVCDENSHGYTYTDVL

SEQ ID NO: 2809 - protein, 222 aa, Glycine max
  misc_feature (1)..(222): Ceres Seq. ID no. 12609307
MHVTDHGLQRVVQQNPLINKLHIPACTGITPEGVLGAVKTLCQRSNCLKTLSINGIYNIQKEHLDMLIMNLGKNQPLEEQQKQQQPVYYHERCSFSVFKQEESWRLIDLEICPRCFEVRMVYDCPKEHCTRREWPLAPCRGCNFCIPRCENCGGCIESGEVEEGACEDIFCLECWLQLPKCSFCNKPYCKQHTNWWCTSSDSSLICKVCDENSHGYTYTDVL

SEQ ID NO: 2810 - protein, 316 aa, Glycine max; identical to SEQ ID NO: 2807
  misc_feature (1)..(316): Ceres Seq. ID no. 16625360

SEQ ID NO: 2811 - DNA, 930 bp, Glycine max
  misc_feature (1)..(930): Ceres Seq. ID no. 12609694
acacagacacatacgcctcacactctctatcagtcacgtcaggctcggtggatcacggtagcactagcttcagctagccagcctctgccactccgggcattttcttgcatccacgacggcaatggccaccgctgatgtccagaacccgacggccgcgctgacggaggaggcgcccacggtggagacgcccgtcgccgccgaggaggtcgcgaagacggaggaggcccccgcgccggccgaggccgaggtcaaggcgcctgctgcccccgtcgaggtcgaggagaccaaggaggtggcacctgccgccgctgagacggaggaggccaaggagcccgagccagcagctgcggccgagccggaggccgaggcccccaaagagacagaggcgccagccgtggtcgagacagagaccaaggaggccgtggctgaggcagagccagcggcgcccgaggaggtgaaggaggaggccgcgcctcctgccgagccagaagcaccggccgtcgccgaggaggcaccggctgcaccggaggaggcgcccgcggccgcggcagaggagccggccgccgcggtggccagcgtcagcgtgtgaggcgccggcgcgcgcggaggaggagctggccgggtcagcttccacggcggcggccgtgtgctcctacgtggcacggcgtgatgctgagtcagccagtggagtggagtggaatgatactttttactaggtgtggagtgggagtgctatgcgcggggtcgcgtgacgtgggctaaataaaagtgttgtcgggtcgggtcgacgcccagtgtcggtcagcagcgagcgacgcagtgccactctcgccggcctgcgtctgcgtctgcttagctggagccttgttacggtgtgtgtcacagtgtcagttccacctatgatcgatcggtatcctaaccggtttgcgt

SEQ ID NO: 2812 - protein, 155 aa, Glycine max
  misc_feature (1)..(155): Ceres Seq. ID no. 12609695
MATADVQNPTAALTEEAPTVETPVAAEEVAKTEEAPAPAEAEVKAPAAPVEVEETKEVAPAAAETEEAKEPEPAAAAEPEAEAPKETEAPAVVETETKEAVAEAEPAAPEEVKEEAAPPAEPEAPAVAEEAPAAPEEAPAAAAEEPAAAVASVSV

SEQ ID NO: 2813 - protein, 155 aa, Glycine max; identical to SEQ ID NO: 2812
  misc_feature (1)..(155): Ceres Seq. ID no. 16625361

SEQ ID NO: 2814 - DNA, 1404 bp, Glycine max
  misc_feature (1)..(1404): Ceres Seq. ID no. 12610323
aacaatgtcagatctgccgccggaaaaccccaatctgccgctcacttcatcgtcttcctctttgcaccattcctacagccggaagcagaaatctctgggccttctttgcaccaatttcctagctctgtacaatcgacatggaatcgaaaccattgggcttgatgacgccgcctccaaattaggagttgagagacggagaatctacgatattgttaatgttctggagagtgttggggttttaacaaaaagagcgaagaatcagtatacgtggaaaggattttctgcgattccggcagcgttgaaggagctacaagaagaaggtgctaaggacactttccaccgtttttataccaacgagaatgtcaaagtatctgatgatgaagatgatgaggaagagtcttcttctcagcctctttctagtagccagactgatacctccaaacctggctcccttgattcctctaaaatagataatcgacgagagaaatctttaggactgcttactcagaactttatcaagctctttgtttgctctgaagctaggatcatctcccttgacgaggctgcaaaattactacttggagatgcccacaatacatcaataatgagaacaaaagtgaggcggctttatgatattgcgaatgtcttgtcatcaatgaatctcattgagaagactcacaccttagattctagaaaaccagctttcaaatggttaggatacaatggtgagcctactttcacactcagcagcgatttgatgcaagccgaatcaacgaagagagtttttggaactgatctcactaacgtcagtgtcaagagaagcagaacccatgaaaatgctaccgagaggaggataaagatgaaacaacacgcaatagcagatagttcttataatcaaagctctgatgatgctcatgaatcaagacgctacaagtttggtctttttgcaccagccgctggtggtacatatccagctgctcgtttggaggacaactccaagagagcttttgatgttgagaatctagtttcggattatcgtcctacttaccaaaatcaagttttgaaagacctctttgcgcattacatggacgcttggaagtcatggtacagcgaagtcacgcagaagaatccattaccagatacatcaaaacgccattagagatattcttaatcttctcttactagtgaacatttcgttttgaccaatgtgggtttagtttctccacacaaattttaacggcaggaatccgacattttaagatgcagactgcaccatctctgtgccttcactgtaggctgtttagaaatcatcttttgcttgattccaatgccagttgtatgtaacttatatataatccccatcttttatttttaaagaatctcaaaagtgaaaacctaggttct

SEQ ID NO: 2815 - protein, 385 aa, Glycine max
  misc_feature (1)..(385): Ceres Seq. ID no. 12610324
TMSDLPPENPNLPLTSSSSSLHHSYSRKQKSLGLLCTNFLALYNRHGIETIGLDDAASKLGVERRRIYDIVNVLESVGVLTKRAKNQYTWKGFSAIPAALKELQEEGAKDTFHRFYTNENVKVSDDEDDEEESSSQPLSSSQTDTSKPGSLDSSKIDNRREKSLGLLTQNFIKLFVCSEARIISLDEAAKLLLGDAHNTSIMRTKVRRLYDIANVLSSMNLIEKTHTLDSRKPAFKWLGYNGEPTFTLSSDLMQAESTKRVFGTDLTNVSVKRSRTHENATERRIKMKQHAIADSSYNQSSDDAHESRRYKFGLFAPAAGGTYPAARLEDNSKRAFDVENLVSDYRPTYQNQVLKDLFAHYMDAWKSWYSEVTQKNPLPDTSKRH

SEQ ID NO: 2816 - protein, 384 aa, Glycine max
  misc_feature (1)..(384): Ceres Seq. ID no. 12610325
MSDLPPENPNLPLTSSSSSLHHSYSRKQKSLGLLCTNFLALYNRHGIETIGLDDAASKLGVERRRIYDIVNVLESVGVLTKRAKNQYTWKGFSAIPAALKELQEEGAKDTFHRFYTNENVKVSDDEDDEEESSSQPLSSSQTDTSKPGSLDSSKIDNRREKSLGLLTQNFIKLFVCSEARIISLDEAAKLLLGDAHNTSIMRTKVRRLYDIANVLSSMNLIEKTHTLDSRKPAFKWLGYNGEPTFTLSSDLMQAESTKRVFGTDLTNVSVKRSRTHENATERRIKMKQHAIADSSYNQSSDDAHESRRYKFGLFAPAAGGTYPAARLEDNSKRAFDVENLVSDYRPTYQNQVLKDLFAHYMDAWKSWYSEVTQKNPLPDTSKRH

SEQ ID NO: 2817 - protein, 384 aa, Glycine max; identical to SEQ ID NO: 2816
  misc_feature (1)..(384): Ceres Seq. ID no. 16625362

SEQ ID NO: 2818 - DNA, 854 bp, Glycine max
  misc_feature (1)..(854): Ceres Seq. ID no. 12610746
gctcgggcaacccaaagcagaacccacccacccccccgaaggtgcccggcacagcatccccgcctcctccctcccaaagccgaaagaagccgggagacgagagagagcatggaggtcgccgcggcgaagcccatcctccgcgtggccgccgtctgcggctccctccgcagggcctcctacaaccgcggcctcctccgcgccgcggcggaggtgtgcgaggagtccgtcccggggatgcgcgtggagcacgtcgacatctccgcgctgccgctgctcaacaccgacctcgagacgcccgacgggggcttcccgcccgccgtcgaggccttccgcgaccgcatcgccagcgccgactgcttcctcttcggctcgccagagtacaactactccatcgcgacccctctgaagaatgcacttgactgggcttctaggggaaataattgctgggcagacaaacctgctgccattgtcagtgcaggaggtggctttggaggaggtagatcgcagtaccacctccggcaagtcggggtgttcttagatcttcatttcatcaacaagccagagctgttcgtccaggcatttcagcagccacccaagtttgacaacgatggaaatctgattgacgccgagatcagagagcggattaagaaagtgctcttgtccctccaggccttcacactcagggtccaaaaggactgaagcaacacatgattgtgttaatccgtctttgttttctttggtgttttgtgctgttggtgttgtataatatatgccttatttgatgccattttcactttacattcaggtgacgtgttgtcagcagactgaaatctgtaataaatatgctgactgtt

SEQ ID NO: 2819 - protein, 232 aa, Glycine max
  misc_feature (1)..(232): Ceres Seq. ID no. 12610747
ARATQSRTHPPPRRCPAQHPRLLPPKAERSRETRESMEVAAAKPILRVAAVCGSLRRASYNRGLLRAAAEVCEESVPGMRVEHVDISALPLLNTDLETPDGGFPPAVEAFRDRIASADCFLFGSPEYNYSIATPLKNALDWASRGNNCWADKPAAIVSAGGGFGGGRSQYHLRQVGVFLDLHFINKPELFVQAFQQPPKFDNDGNLIDAEIRERIKKVLLSLQAFTLRVQKD

SEQ ID NO: 2820 - protein, 196 aa, Glycine max
  misc_feature (1)..(196): Ceres Seq. ID no. 12610748
MEVAAAKPILRVAAVCGSLRRASYNRGLLRAAAEVCEESVPGMRVEHVDISALPLLNTDLETPDGGFPPAVEAFRDRIASADCFLFGSPEYNYSIATPLKNALDWASRGNNCWADKPAAIVSAGGGFGGGRSQYHLRQVGVFLDLHFINKPELFVQAFQQPPKFDNDGNLIDAEIRERIKKVLLSLQAFTLRVQKD

SEQ ID NO: 2821 - protein, 154 aa, Glycine max
  misc_feature (1)..(154): Ceres Seq. ID no. 12610749
MRVEHVDISALPLLNTDLETPDGGFPPAVEAFRDRIASADCFLFGSPEYNYSIATPLKNALDWASRGNNCWADKPAAIVSAGGGFGGGRSQYHLRQVGVFLDLHFINKPELFVQAFQQPPKFDNDGNLIDAEIRERIKKVLLSLQAFTLRVQKD

SEQ ID NO: 2822 - protein, 196 aa, Glycine max; identical to SEQ ID NO: 2820
  misc_feature (1)..(196): Ceres Seq. ID no. 16625363

SEQ ID NO: 2823 - DNA, 594 bp, Glycine max
  misc_feature (1)..(594): Ceres Seq. ID no. 12610917
attggttggcgaggtacccaagagtttgatagagctcaagggcttcgccaccactggtcgttcattgggtatggctttcactaacatgccattgtatgtgaagcgtagcagacgaacactccaacaacaacaacccaatatcatatctgggaccaacaacaaagtccgatctggtagaaccaatgttgtatccggaaacgacaacacggttgtatctgggaataacaatactgttgctgggagcaacaataccatcacaactgggagtggcaataccgtatctggtagtaaccatgttgtttctgggaccaaacatatcgtaactgacaacaacaatgttgtttccgggatagacaataatgtatccgggagcttccacaccgtatccgggactctcaataccgtatccgggagcaacaataccgtatctgggagcaaccatgtcgtgtctgggagcaacaaagttgtgaaaggaggttaatggtttgcgagtcagtgtagctcacaaacacttggtggggccaatcgtgttatgtaacttcatggatagagcatccttttcctactttaaataaaatttccagactttatctt

SEQ ID NO: 2824 - protein, 159 aa, Glycine max
  misc_feature (1)..(159): Ceres Seq. ID no. 12610918
LVGEVPKSLIELKGFATTGRSLGMAFTNMPLYVKRSRRTLQQQQPNIISGTNNKVRSGRTNVVSGNDNTVVSGNNNTVAGSNNTITTGSGNTVSGSNHVVSGTKHIVTDNNNVVSGIDNNVSGSFHTVSGTLNTVSGSNNTVSGSNHVVSGSNKVVKGG

SEQ ID NO: 2825 - protein, 136 aa, Glycine max
  misc_feature (1)..(136): Ceres Seq. ID no. 12610919
MAFTNMPLYVKRSRRTLQQQQPNIISGTNNKVRSGRTNVVSGNDNTVVSGNNNTVAGSNNTITTGSGNTVSGSNHVVSGTKHIVTDNNNVVSGIDNNVSGSFHTVSGTLNTVSGSNNTVSGSNHVVSGSNKVVKGG

SEQ ID NO: 2826 - protein, 131 aa, Glycine max
  misc_feature (1)..(131): Ceres Seq. ID no. 12610920
MPLYVKRSRRTLQQQQPNIISGTNNKVRSGRTNVVSGNDNTVVSGNNNTVAGSNNTITTGSGNTVSGSNHVVSGTKHIVTDNNNVVSGIDNNVSGSFHTVSGTLNTVSGSNNTVSGSNHVVSGSNKVVKGG

SEQ ID NO: 2827 - protein, 136 aa, Glycine max; identical to SEQ ID NO: 2825
  misc_feature (1)..(136): Ceres Seq. ID no. 16625364

SEQ ID NO: 2828 - DNA, 478 bp, Glycine max
  misc_feature (1)..(478): Ceres Seq. ID no. 13505239
attcaatttgataaattagggtttcttcactgtcctatatatacaaagcctaacgcaaaaccctagttttgtcttgcaggcgaagagatggccaccgttccagggcagctcgtgtgggagatcgtcaagaaaaacaattccttcttggtcaagcagtttggaaggggcacccagagcgtcgaattcagcagagagagcaacaatctctacaacctcaattcgttcaagtactctggtttggcaaacaagaaaactgttactgttcancctgagggcaaagatcaggctgtgttgttggctacaaccaagacaaagaagcaaaacaagcccgctgcattgctccacaaatctgtgatgaagaaggagttcaggaggatggcaaaagctgttgaaaaccaggtggccaaaaattactacaggcctgatctcaagaaggctgcccttgcaaggttgagtgctgttcacagaagcctcaaag

SEQ ID NO: 2829 - protein, 130 aa, Glycine max
  misc_feature (1)..(130): Ceres Seq. ID no. 13505240
  misc_feature (60)..(60): Xaa is any aa, unknown or other
MATVPGQLVWEIVKKNNSFLVKQFGRGTQSVEFSRESNNLYNLNSFKYSGLANKKTVTVXPEGKDQAVLLATTKTKKQNKPAALLHKSVMKKEFRRMAKAVENQVAKNYYRPDLKKAALARLSAVHRSLK

SEQ ID NO: 2830 - DNA, 503 bp, Glycine max
  misc_feature (1)..(503): Ceres Seq. ID no. 13532960
aattttgtttttcgccttgtatctctcccaattcctcagtttccttctttcttcatctttgtgtcatggccagaggttcttcccagtctcagtcctccacttcaacagccacgcgaccaggaccagcaggcatggctccccgcggttccgccgccgcctccgccagcaccggcgttggaggcggcagcagcaacatgctgaggttctacacggacgacgccccggggctgaagatttcgccgacggtggtgctcgtgatgagcctctgcttcatcggcttcgtcaccgcgctccacgtgttcggcaaactctaccgctccaaatctggtggcgccgtttgatcttttggagatgtagttccgatccgtacccgatcgctttgttttctgtttttaattccgtaatttagttaacacttgctattttgtagttgtgaaatcaaatcgttgactatcttcttactgtggttaatggaaagtcgcttttgtttttgctttggcctt

SEQ ID NO: 2831 - protein, 135 aa, Glycine max
  misc_feature (1)..(135): Ceres Seq. ID no. 13532961
ILFFALYLSQFLSFLLSSSLCHGQRFFPVSVLHFNSHATRTSRHGSPRFRRRLRQHRRWRRQQQHAEVLHGRRPGAEDFADGGARDEPLLHRLRHRAPRVRQTLPLQIWWRRLIFWRCSSDPYPIALFSVFNSVI

SEQ ID NO: 2832 - protein, 112 aa, Glycine max
  misc_feature (1)..(112): Ceres Seq. ID no. 13532962
FCFSPCISPNSSVSFFLHLCVMARGSSQSQSSTSTATRPGPAGMAPRGSAAASASTGVGGGSSNMLRFYTDDAPGLKISPTVVLVMSLCFIGFVTALHVFGKLYRSKSGGAV

SEQ ID NO: 2833 - protein, 91 aa, Glycine max
  misc_feature (1)..(91): Ceres Seq. ID no. 13532963
MARGSSQSQSSTSTATRPGPAGMAPRGSAAASASTGVGGGSSNMLRFYTDDAPGLKISPTVVLVMSLCFIGFVTALHVFGKLYRSKSGGAV

SEQ ID NO: 2834 - protein, 91 aa, Glycine max; identical to SEQ ID NO: 2833
  misc_feature (1)..(91): Ceres Seq. ID no. 16625391

SEQ ID NO: 2835 - DNA, 1211 bp, Glycine max
  misc_feature (1)..(1211): Ceres Seq. ID no. 13594359
aaaaaaccctataaaacttaaatttcaggcataaactgagagagagataacatcgttgcagtggcgcgcccaatggctctgggaatctctaacatactgcactgccccaaattgagtttctcccacaataattttctccccaaagttccaacctctatcagcctcaggtttccccagacagcagcatggagtgatagaaagattatctgtgctgctgcatctgcggcaggaagctctaatcccgatggtgaatttaatccttatgaggtgctaggtgtaagccctattgagaaatttgacatggtcaaggcagcatatgctaaaaaaaagaaggaggctgagatgaatggcgatgaagcaactgcttcaagactggaaaaggcatatgacaaactcatgatggctcaattgtctaatcggaaaaagggtgtgacttttggatcatttaaggtttcaaaggagatcaagtatgctgacaagcttccagttataccttgggggccaaggcttactaaatcaagtcaaaatgacatgcgcatcaacttggcaatatctgctgtttttacagcttggatccttgtcaagcgcagtgctgaatataaacctttgcagtttttagcctttgcctttgtttataggctttttgagaagttaaaagcctctgaatctcctgtaacccccaaatataatgaagagggtgaagacacaggagaaggactccgcatgggaaaacgactgctccgatcactagccttggtttttggatgtgtagctatttcatctttggcatacactttcattttgaacataattgagtttgcaggtggttttattcctactcttttgtacaacagtcaggagttgataatcaccacttcatcggcactcatgctttatatcatggcatcttattatggatagtggagtgtgtcttgaagacgaagaaaccatgcatctattcaccatccctttttttttttaagtctttttcctcccttctctttcttttgttcttattgtgaactaaagtgcttttcttacaaattttgtcaaaagagatgctttttccttgttttaatatactaaattagggatagtgtcaactttcttatggtacttttttcttttcttttttgggaagggaggggggtcatttatattgattttgactattcacatcatagtggtatataagtcttgtattcttgctc

SEQ ID NO: 2836 - protein, 282 aa, Glycine max
  misc_feature (1)..(282): Ceres Seq. ID no. 13594360
MALGISNILHCPKLSFSHNNFLPKVPTSISLRFPQTAAWSDRKIICAAASAAGSSNPDGEFNPYEVLGVSPIEKFDMVKAAYAKKKKEAEMNGDEATASRLEKAYDKLMMAQLSNRKKGVTFGSFKVSKEIKYADKLPVIPWGPRLTKSSQNDMRINLAISAVFTAWILVKRSAEYKPLQFLAFAFVYRLFEKLKASESPVTPKYNEEGEDTGEGLRMGKRLLRSLALVFGCVAISSLAYTFILNIIEFAGGFIPTLLYNSQELIITTSSALMLYIMASYYG

SEQ ID NO: 2837 - protein, 206 aa, Glycine max
  misc_feature (1)..(206): Ceres Seq. ID no. 13594361
MVKAAYAKKKKEAEMNGDEATASRLEKAYDKLMMAQLSNRKKGVTFGSFKVSKEIKYADKLPVIPWGPRLTKSSQNDMRINLAISAVFTAWILVKRSAEYKPLQFLAFAFVYRLFEKLKASESPVTPKYNEEGEDTGEGLRMGKRLLRSLALVFGCVAISSLAYTFILNIIEFAGGFIPTLLYNSQELIITTSSALMLYIMASYYG

SEQ ID NO: 2838 - protein, 192 aa, Glycine max
  misc_feature (1)..(192): Ceres Seq. ID no. 13594362
MNGDEATASRLEKAYDKLMMAQLSNRKKGVTFGSFKVSKEIKYADKLPVIPWGPRLTKSSQNDMRINLAISAVFTAWILVKRSAEYKPLQFLAFAFVYRLFEKLKASESPVTPKYNEEGEDTGEGLRMGKRLLRSLALVFGCVAISSLAYTFILNIIEFAGGFIPTLLYNSQELIITTSSALMLYIMASYYG

SEQ ID NO: 2839 - protein, 282 aa, Glycine max; identical to SEQ ID NO: 2836
  misc_feature (1)..(282): Ceres Seq. ID no. 16625399

SEQ ID NO: 2840 - DNA, 1390 bp, Glycine max
  misc_feature (1)..(1390): Ceres Seq. ID no. 13594557
atattagggcttttctcagctcacagcggcagtatgaggccaatttgtgaaacatgtggaaaccaaggatggaaaggactgcttgtggcttgctctaaatgccgtatagcctgtgaacaccgttactgcatggataaagtttcatttgaggcctcagtagattttgtatgtgctgattgttcgaagaggcctgttcaaaacagattatctacagcgtccatcaaagcagcaccctctaggattgaaaagggcaaagcgagggttgaatcttcaaatccagttcccagatggaaaaagattcctgaatcatcgaaaatgaggttaatctcaccggaggaagtcagaaaactttcatccagtgggggcaataactcaactttcaaagtgccaaaacctgttccagctcgttctccaacgggtttaacaaagcttgcttgctttccaagatctaggagtctgagttctacagttgtggctcgcaaaaccaatcacatgctccttcctccacctaaaagggctgagtctcctaggcctttgcagattcgttcaggagtcatgcaacaatcttctaaacgacaagcagtagtagaagggtcaaagctgaaagttggtggtggagtcaaagatcttggttcaaaagagatatgcagatcaatcctatcagaaaagctcttgcagttacttccacatcgaccagctttgccccctatttggaagggacgtattgtagattctgctacaccatcagagtttaatggcttgttttgggctcagccagcttctgtaatccgcaagaaggcttacaatctttcaaagacgattcctgtcgtactcaaggtcgaattggtccctataggcagtctcttgaatgatttgtttgccaacagaaagccagcgctttcagatgtcgagatgtacattttcccagatgataagaacacaataaggtttaaggaggaacatgcttatctatttgagaccatgaagagacgcaatgctatgatcagaatcaacgtcaaggacaagccgttcctgatattctcttcgaaagtgctggacaagtcctctcaaattatcattgagatgcagaagaaaacaaagaacttcctttggggggtctttctcgtgacgaaaaagtcattagcactcgttcctggaacttctaatcaagctgctcaacgttttgatgctggagatgtggttgacaataccgctaaacgtcagtacaggagggagagagtttgatcgatgcatcttatctcaagaaaattggtaattactaatagctttgtttgctactgtctgaatgtgtgttcttgtttgttgtaataagaagtaataaagtcaggccttgttgttgttactttcacctcaatgatagttttaatgt

SEQ ID NO: 2841 - protein, 414 aa, Glycine max
  misc_feature (1)..(414): Ceres Seq. ID no. 15221390
ILGLFSAHSGSMRPICETCGNQGWKGLLVACSKCRIACEHRYCMDKVSFEASVDFVCADCSKRPVQNRLSTASIKAAPSRIEKGKARVESSNPVPRWKKIPESSKMRLISPEEVRKLSSSGGNNSTFKVPKPVPARSPTGLTKLACFPRSRSLSSTVVARKTNHMLLPPPKRAESPRPLQIRSGVMQQSSKRQAVVEGSKLKVGGGVKDLGSKEICRSILSEKLLQLLPHRPALPPIWKGRIVDSATPSEFNGLFWAQPASVIRKKAYNLSKTIPVVLKVELVPIGSLLNDLFANRKPALSDVEMYIFPDDKNTIRFKEEHAYLFETMKRRNAMIRINVKDKPFLIFSSKVLDKSSQIIIEMQKKTKNFLWGVFLVTKKSLALVPGTSNQAAQRFDAGDVVDNTAKRQYRRERV

SEQ ID NO: 2842 - protein, 403 aa, Glycine max
  misc_feature (1)..(403): Ceres Seq. ID no. 15221391
MRPICETCGNQGWKGLLVACSKCRIACEHRYCMDKVSFEASVDFVCADCSKRPVQNRLSTASIKAAPSRIEKGKARVESSNPVPRWKKIPESSKMRLISPEEVRKLSSSGGNNSTFKVPKPVPARSPTGLTKLACFPRSRSLSSTVVARKTNHMLLPPPKRAESPRPLQIRSGVMQQSSKRQAVVEGSKLKVGGGVKDLGSKEICRSILSEKLLQLLPHRPALPPIWKGRIVDSATPSEFNGLFWAQPASVIRKKAYNLSKTIPVVLKVELVPIGSLLNDLFANRKPALSDVEMYIFPDDKNTIRFKEEHAYLFETMKRRNAMIRINVKDKPFLIFSSKVLDKSSQIIIEMQKKTKNFLWGVFLVTKKSLALVPGTSNQAAQRFDAGDVVDNTAKRQYRRERV

SEQ ID NO: 2843 - protein, 371 aa, Glycine max
  misc_feature (1)..(371): Ceres Seq. ID no. 15221392
MDKVSFEASVDFVCADCSKRPVQNRLSTASIKAAPSRIEKGKARVESSNPVPRWKKIPESSKMRLISPEEVRKLSSSGGNNSTFKVPKPVPARSPTGLTKLACFPRSRSLSSTVVARKTNHMLLPPPKRAESPRPLQIRSGVMQQSSKRQAVVEGSKLKVGGGVKDLGSKEICRSILSEKLLQLLPHRPALPPIWKGRIVDSATPSEFNGLFWAQPASVIRKKAYNLSKTIPVVLKVELVPIGSLLNDLFANRKPALSDVEMYIFPDDKNTIRFKEEHAYLFETMKRRNAMIRINVKDKPFLIFSSKVLDKSSQIIIEMQKKTKNFLWGVFLVTKKSLALVPGTSNQAAQRFDAGDVVDNTAKRQYRRERV

SEQ ID NO: 2844 - protein, 309 aa, Glycine max
  misc_feature (1)..(309): Ceres Seq. ID no. 16625400
MRLISPEEVRKLSSSGGNNSTFKVPKPVPARSPTGLTKLACFPRSRSLSSTVVARKTNHMLLPPPKRAESPRPLQIRSGVMQQSSKRQAVVEGSKLKVGGGVKDLGSKEICRSILSEKLLQLLPHRPALPPIWKGRIVDSATPSEFNGLFWAQPASVIRKKAYNLSKTIPVVLKVELVPIGSLLNDLFANRKPALSDVEMYIFPDDKNTIRFKEEHAYLFETMKRRNAMIRINVKDKPFLIFSSKVLDKSSQIIIEMQKKTKNFLWGVFLVTKKSLALVPGTSNQAAQRFDAGDVVDNTAKRQYRRERV

SEQ ID NO: 2845 - DNA, 1089 bp, Glycine max
  misc_feature (1)..(1089): Ceres Seq. ID no. 13594896
aatccgacctctttccagcgcgcacgttccagccccacgctgcttttataacccctcgattttctctctcctctccaccccggcggccgcaactactctggtagagcaagcgagcgccgccccaagccctactccagcaatggccgatccagcggagcaccgcgaggaggaggaggaggccgcggcggccggcgaggaagaggacaccggcgcccaaatcgctcccatcgtgaagctcgaggaggtggccatcaccaccggcgaagaggacgaggatgtcctcctcgacatgaaagcgaagctctaccgatttgacaaggacgggggccagtggaaggagcggggcacgggtgccgtgaagctgctcaagcacaaggagactgccaaggtccgcctcgtcatgcgacaggccaagactctcaagatctgcgccaatcacctcgttgtggcgacgacgaagatgcaggagcacgctgggagcgacaagtcgtgcgtgtggcacgctctggattttgccgactgtgagctcaaggaggagatgttcgccatccgctttggatccgtggagagctgcaaaaaattcaaggatcttgtggacgacattgctgagcagcaaggaaagaatgaggagaaagaaagtgaggaagtctcctctgctgccgagttggtagagaagttaactgtgacggagggcaaaaaggaggaacaaacagagaaagtggagactcctgcagtagatgataagaaggatgctgaagagtgaaaacaaggtccggctatttcatcctatgctctaggagcattgctatactcgagctagtgaattgtcaaatgagtgtcattcgattcattttatggtcaaagttcatcttcctttcacaaattttcattgtgttattctgtgggatggatgtttgtgttgggcaaagtttggtttgtgtcagtcatgggtttcttggttgatagtctgtcatttgtttttctggatggtgtgcctggggtcagcatgtttgtacaattatttgggaattgcttttggaatggatacggtttgagttgtccaaaatccctggatgatgctgtcttgcc

SEQ ID NO: 2846 - protein, 253 aa, Glycine max
  misc_feature (1)..(253): Ceres Seq. ID no. 13594897
IRPLSSAHVPAPRCFYNPSIFSLLSTPAAATTLVEQASAAPSPTPAMADPAEHREEEEEAAAAGEEEDTGAQIAPIVKLEEVAITTGEEDEDVLLDMKAKLYRFDKDGGQWKERGTGAVKLLKHKETAKVRLVMRQAKTLKICANHLVVATTKMQEHAGSDKSCVWHALDFADCELKEEMFAIRFGSVESCKKFKDLVDDIAEQQGKNEEKESEEVSSAAELVEKLTVTEGKKEEQTEKVETPAVDDKKDAEE

SEQ ID NO: 2847 - protein, 207 aa, Glycine max
  misc_feature (1)..(207): Ceres Seq. ID no. 13594898
MADPAEHREEEEEAAAAGEEEDTGAQIAPIVKLEEVAITTGEEDEDVLLDMKAKLYRFDKDGGQWKERGTGAVKLLKHKETAKVRLVMRQAKTLKICANHLVVATTKMQEHAGSDKSCVWHALDFADCELKEEMFAIRFGSVESCKKFKDLVDDIAEQQGKNEEKESEEVSSAAELVEKLTVTEGKKEEQTEKVETPAVDDKKDAEE

SEQ ID NO: 2848 - protein, 157 aa, Glycine max
  misc_feature (1)..(157): Ceres Seq. ID no. 13594899
MKAKLYRFDKDGGQWKERGTGAVKLLKHKETAKVRLVMRQAKTLKICANHLVVATTKMQEHAGSDKSCVWHALDFADCELKEEMFAIRFGSVESCKKFKDLVDDIAEQQGKNEEKESEEVSSAAELVEKLTVTEGKKEEQTEKVETPAVDDKKDAEE

SEQ ID NO: 2849 - protein, 207 aa, Glycine max; identical to SEQ ID NO: 2847
  misc_feature (1)..(207): Ceres Seq. ID no. 16611876

SEQ ID NO: 2850 - DNA, 1462 bp, Glycine max
  misc_feature (1)..(1462): Ceres Seq. ID no. 13638899
ctattctattctatcagtctatctcctttgcactataccccactgcgtacttggaaaatggcttcttcttcttccctcctctcggccggcgtctccatcctcctgatccaagccgtggcggtgagcgtcggcgtggccaccgcgggagacgcgccggcgcagctgccgcggtcggagctggcggcgatcttcagggtgatggccgacctcctcggcgacccgacgtggccgcagctccacccgcggccctgcacagacacgccctggccgggcctccagtgcgagctcgcccccgacgacagcacccgcctccgcgccacccgcctccatttcggccccgacgtctccaccccgccgtgcaggcccggcgccaggctcgccgcccccgcgatccttggcctgccccacctcaggaccctctccctcttcggctgcttcgtcgacgccggccccgtcgagctgccgacggcgctcttcaccaacgcctcctccctcgagcagctcgttctcaagtccaacccgggcctgaccggccggataccggcaaccttgaccaacctgaagagcctgcaagtgcttagcctgtcccagaacggcttccacggtgagatccccagggagctcggcggcctcaccgcgttgcagcagctcgacctcagctacaacaacatcaccggcgagataccggatgagattggaggcatggcgagcctgtccatcctggacctgagctggaacggcatcggcggcggcgtgccggcggcattgggtggcctgaagatgctgcagaaggcggacctgagctacaactggctcgccggcgtggtgccaccggaggtcgggtccctgaaggagctggtgttcctggacctgagccacaacgggctcgcgggcccgctgccagcttcccttgccgggctggcgaagctgcagtacctgctcctgcaggacaaccccatcggcacggcggtgccggcggtggtcgggtcgctgcggcggctgcaggtgctgggcctgtcggggtgcaacctgacggggccgatcccgcggggcgcgttcgcggcgctggggagcctgatggcgctgtcgctggaccggaaccggctggacgggccgatcccggcgagcctcggcgcgctgccgcacctggggcagctcaacctgagccagaaccggctcgccggggagatcgcgctgccggtcgagttcgtggcgcggctcggcaggcggctcgacgtgcgcggcaacgaggagctgtgcgtcggtcagggaaggtacggcgggctgcaggccagctacctcagggcgccgccgtgcgtgggacgggggagcaccaacgggacggccgcgctggacgagggcgccgcgggggtttacggaccagtcgttgggctggtgtgccaccttcttgtgttgttggcactcaagctgtgacgtctctgatcaaatatttgagcgggcg

SEQ ID NO: 2851 - protein, 477 aa, Glycine max
  misc_feature (1)..(477): Ceres Seq. ID no. 13638900
LFYSISLSPLHYTPLRTWKMASSSSLLSAGVSILLIQAVAVSVGVATAGDAPAQLPRSELAAIFRVMADLLGDPTWPQLHPRPCTDTPWPGLQCELAPDDSTRLRATRLHFGPDVSTPPCRPGARLAAPAILGLPHLRTLSLFGCFVDAGPVELPTALFTNASSLEQLVLKSNPGLTGRIPATLTNLKSLQVLSLSQNGFHGEIPRELGGLTALQQLDLSYNNITGEIPDEIGGMASLSILDLSWNGIGGGVPAALGGLKMLQKADLSYNWLAGVVPPEVGSLKELVFLDLSHNGLAGPLPASLAGLAKLQYLLLQDNPIGTAVPAVVGSLRRLQVLGLSGCNLTGPIPRGAFAALGSLMALSLDRNRLDGPIPASLGALPHLGQLNLSQNRLAGEIALPVEFVARLGRRLDVRGNEELCVGQGRYGGLQASYLRAPPCVGRGSTNGTAALDEGAAGVYGPVVGLVCHLLVLLALKL

SEQ ID NO: 2852 - protein, 458 aa, Glycine max
  misc_feature (1)..(458): Ceres Seq. ID no. 13638901
MASSSSLLSAGVSILLIQAVAVSVGVATAGDAPAQLPRSELAAIFRVMADLLGDPTWPQLHPRPCTDTPWPGLQCELAPDDSTRLRATRLHFGPDVSTPPCRPGARLAAPAILGLPHLRTLSLFGCFVDAGPVELPTALFTNASSLEQLVLKSNPGLTGRIPATLTNLKSLQVLSLSQNGFHGEIPRELGGLTALQQLDLSYNNITGEIPDEIGGMASLSILDLSWNGIGGGVPAALGGLKMLQKADLSYNWLAGVVPPEVGSLKELVFLDLSHNGLAGPLPASLAGLAKLQYLLLQDNPIGTAVPAVVGSLRRLQVLGLSGCNLTGPIPRGAFAALGSLMALSLDRNRLDGPIPASLGALPHLGQLNLSQNRLAGEIALPVEFVARLGRRLDVRGNEELCVGQGRYGGLQASYLRAPPCVGRGSTNGTAALDEGAAGVYGPVVGLVCHLLVLLALKL

SEQ ID NO: 2853 - protein, 411 aa, Glycine max
  misc_feature (1)..(411): Ceres Seq. ID no. 13638902
MADLLGDPTWPQLHPRPCTDTPWPGLQCELAPDDSTRLRATRLHFGPDVSTPPCRPGARLAAPAILGLPHLRTLSLFGCFVDAGPVELPTALFTNASSLEQLVLKSNPGLTGRIPATLTNLKSLQVLSLSQNGFHGEIPRELGGLTALQQLDLSYNNITGEIPDEIGGMASLSILDLSWNGIGGGVPAALGGLKMLQKADLSYNWLAGVVPPEVGSLKELVFLDLSHNGLAGPLPASLAGLAKLQYLLLQDNPIGTAVPAVVGSLRRLQVLGLSGCNLTGPIPRGAFAALGSLMALSLDRNRLDGPIPASLGALPHLGQLNLSQNRLAGEIALPVEFVARLGRRLDVRGNEELCVGQGRYGGLQASYLRAPPCVGRGSTNGTAALDEGAAGVYGPVVGLVCHLLVLLALKL

SEQ ID NO: 2854 - protein, 458 aa, Glycine max; identical to SEQ ID NO: 2852
  misc_feature (1)..(458): Ceres Seq. ID no. 16625409

SEQ ID NO: 2855 - DNA, 1194 bp, Glycine max
  misc_feature (1)..(1194): Ceres Seq. ID no. 13644494
ggcagtgagaagaagagggggtcagagtgagaaagagaaagagagaattcgtaaaccctaatttcggaaagatcggcgatgactgcctccaaggatcgcgagaacttcgtctacatcgccaaactcgccgagcaggccgagcgttacgaagagatggtggaatcaatgaagaacgttgcgaatctcgacgttgaactgacggtggaggagcggaatttgctttctgttgggtacaagaatgtgattggtgctcgcagagcgtcctggaggatcctgtcttccattgagcagaaggaagaaacaaaagggaacgagttgaatgcgaagcggattaaggagtacagacagaaggttgaattggagctatcgaacatctgtaatgatgttatgagagtgattgatgagcaccttatcccttcggctgcagctggtgaatccactgtgttttactataagatgaaaggagattattatcgttatcttgctgaatttaagtcaggcaatgagaagaaggaagctgctgatcagtctatgaaagcatatgagtctgctaccgctgcagcagaggctgatttacctcccacacatcccatccgattgggtctagctttaaatttctctgttttctattatgagatcttgaactcccctgaaagagcctgtcatcttgcgaagcaagcttttgatgaagctatttctgagcttgacaccttgaatgaggagtcatacaaagatagcaccttaatcatgcaacttctcagggacaacctaactttgtggacttctgacatcccagaagatggagaagatgcccagaaagtgaatggcactgccaagcttggtggaggtgaggatgcagagtgagtccgatggatgatggaatcttccataggattcgatgcatgcgtttgggaatgaaacatgagggccgattacttatctgtgtattagctagagacagggattctattgtttcctctttgtttcctgttggattgcccaatacttcccgataggggcaaagagatactccatttgtgctatatttatggtatgtttttatttgtgtggtgtctggaaatggcctatttcattcccttaccgtttcctccagtctctgggggatttgattgatgagaattgcttatggtgggtgtatttccttttccaatgaaatgctacaacatttactgc

SEQ ID NO: 2856 - protein, 261 aa, Glycine max
  misc_feature (1)..(261): Ceres Seq. ID no. 13644495
MTASKDRENFVYIAKLAEQAERYEEMVESMKNVANLDVELTVEERNLLSVGYKNVIGARRASWRILSSIEQKEETKGNELNAKRIKEYRQKVELELSNICNDVMRVIDEHLIPSAAAGESTVFYYKMKGDYYRYLAEFKSGNEKKEAADQSMKAYESATAAAEADLPPTHPIRLGLALNFSVFYYEILNSPERACHLAKQAFDEAISELDTLNEESYKDSTLIMQLLRDNLTLWTSDIPEDGEDAQKVNGTAKLGGGEDAE

SEQ ID NO: 2857 - protein, 236 aa, Glycine max
  misc_feature (1)..(236): Ceres Seq. ID no. 13644496
MVESMKNVANLDVELTVEERNLLSVGYKNVIGARRASWRILSSIEQKEETKGNELNAKRIKEYRQKVELELSNICNDVMRVIDEHLIPSAAAGESTVFYYKMKGDYYRYLAEFKSGNEKKEAADQSMKAYESATAAAEADLPPTHPIRLGLALNFSVFYYEILNSPERACHLAKQAFDEAISELDTLNEESYKDSTLIMQLLRDNLTLWTSDIPEDGEDAQKVNGTAKLGGGEDAE

SEQ ID NO: 2858 - protein, 232 aa, Glycine max
  misc_feature (1)..(232): Ceres Seq. ID no. 13644497
MKNVANLDVELTVEERNLLSVGYKNVIGARRASWRILSSIEQKEETKGNELNAKRIKEYRQKVELELSNICNDVMRVIDEHLIPSAAAGESTVFYYKMKGDYYRYLAEFKSGNEKKEAADQSMKAYESATAAAEADLPPTHPIRLGLALNFSVFYYEILNSPERACHLAKQAFDEAISELDTLNEESYKDSTLIMQLLRDNLTLWTSDIPEDGEDAQKVNGTAKLGGGEDAE

SEQ ID NO: 2859 - DNA, 1102 bp, Glycine max
  misc_feature (1)..(1102): Ceres Seq. ID no. 14303970
acctaagattcagaatgtctggtcgtcactccgattccgattccaagcgatgccattctagattcgattcagaccccaacaagagatatagaagggatgaatatggaaaagaagacagagagagagtgtcaagtagcactgatgttcaaaatgaagctcttttcgctaagcacaacaaaccaaatgatcctatccaacttccaacatctctctcttattttcagcacaatgaacaaggtggcactgggcaggttggccgaagctctggtcaaaggaaggagcgtggacggtggaaggacacaaagaaacggtttaatattaatgaaagggaagagaaaaatcatggtagagagcagagaaatgagaaatcacaagctaaactggatgataatactttccagagaagagatggttttaccggaaggtcgagaaaaagagcttcatttagagagaagaagattgtagcggattcaggtgatgctaatgtggctgcagtaaagtcaggccagaaggaggaaagaaacagcaatccacagcatttggatagacctgagaagcattttgcagatgacaagggtgaagctaggaggggaagaaggtatggaggcaatgacagttacaagggaagagataaatttaatggaagacaaggctatcgtcctgagaagtggaaacatgatttgtatcaagaggtaaataaggatcccattccagagaatgaggatggccagattgcgaagctggaagcactcttggcttcataatatcatacgtgtgtatgtgtcaagctatcaccatcttcaactgtcaattttagaagatgcaaactagattcaattgaggcaggcaggttttaaaattggaatggagcacagagcaatttgcaatttggaattgtaataaagcatttttgcttgttttagacaatttctagttcgcaaagtatctacatgtctatgatttttattttggtcaatttatgtacacaccactattacggtggtttagctgaattggaaaagagtgtctcaattgcatgatcgccggttatggacatcacatatgtgaaagtagattttttaactttaaggtgaatttaatt

SEQ ID NO: 2860 - protein, 253 aa, Glycine max
  misc_feature (1)..(253): Ceres Seq. ID no. 14303971
LRFRMSGRHSDSDSKRCHSRFDSDPNKRYRRDEYGKEDRERVSSSTDVQNEALFAKHNKPNDPIQLPTSLSYFQHNEQGGTGQVGRSSGQRKERGRWKDTKKRFNINEREEKNHGREQRNEKSQAKLDDNTFQRRDGFTGRSRKRASFREKKIVADSGDANVAAVKSGQKEERNSNPQHLDRPEKHFADDKGEARRGRRYGGNDSYKGRDKFNGRQGYRPEKWKHDLYQEVNKDPIPENEDGQIAKLEALLAS

SEQ ID NO: 2861 - protein, 249 aa, Glycine max
  misc_feature (1)..(249): Ceres Seq. ID no. 14303972
MSGRHSDSDSKRCHSRFDSDPNKRYRRDEYGKEDRERVSSSTDVQNEALFAKHNKPNDPIQLPTSLSYFQHNEQGGTGQVGRSSGQRKERGRWKDTKKRFNINEREEKNHGREQRNEKSQAKLDDNTFQRRDGFTGRSRKRASFREKKIVADSGDANVAAVKSGQKEERNSNPQHLDRPEKHFADDKGEARRGRRYGGNDSYKGRDKFNGRQGYRPEKWKHDLYQEVNKDPIPENEDGQIAKLEALLAS

SEQ ID NO: 2862 - protein, 253 aa, Glycine max; identical to SEQ ID NO: 2860
  misc_feature (1)..(253): Ceres Seq. ID no. 16625442

SEQ ID NO: 2863 - DNA, 1745 bp, Glycine max
  misc_feature (1)..(1745): Ceres Seq. ID no. 14304573
aaaaataaaataaaaaggaaacgtatagaaaaagcttttccaagaattggcaaaaagagaagaagggagagagattcatgttcatattttccccttcgtgcccgtcaagtttctgattctctttttcaattcctttctctttcaggtgattttttctccacgataaagttgcgatttcgccggtgtcgttttgccgcaagatggtgtcgttttcgggaatataaaatcagggttgaagttctttcttcagcattgaatctttggttacataggttggtttctttagaactcgattcaatttcaaataattggtcctccctttttgtggaactcaattctattaggttagtggaaagagaaaaaaaaaacatggttgaatcaattgctgcaacttcactccttggccaccgtccaatttgtggtggaaatttaaccagggatgtatctgttaaacgcaaatctttgaatactgttcggttcccaacaactgagtttcttggtggtggaaggattgtggtttctctggctttgcctaaatctgataagcaagataggtttgtgttttcatcaattaaggccttggctgtggagttaacaagagaagcacatgcttatagggaagagaaattgcccaacagggataccaagattgatcgtggatttgatcaaaggcctgattcgtggcctcctgcgaatagggcagataaaccgtcgcttcggaatccactactccgtcatgagaggatgggatgtggttggttgggtgctatatttgagtgggagggtgttctaattgaagacaaccctgatttagagaagcaggcttggctggcactctctcaggaagaaggcaaaccctctcctcctgcttttatcctcaagagaatagagggcatgaagaatgaacaggcgatttcagaagtgctgtgttggtctagggatccggcacagttgagaagaatggctaatagaaaggaagaaatctaccaatctttgcagggtgggatatataggttcttgtctggatccaaggagtttgttagtgttttgatgcattataagataccaatggcattggtttccacgcggcctaggaaggctcttgagtctgctataggggagattgggattgaggacactttcagtgttattgtagcagcagaggatgttcataggggaaagcctgatccagaaatgtttgtgtatgctgcacagcttttgaacttcatacctgagaggtgcattgtgtttggtaactccaatctaacagtggaggctgcacatgaagcgcggatgaagtgtgtggctgttgctagcaagcatcctgtatatgagcttggggctgcagacttggttgtcaggcgcctagatgagctttcagtggttgatttgaagaatcttgcagacattgaaatgactgaatttgggtctgtggagcctgagatggagctggaggtggaaaaagattatggctcatcatcagttgatgacaatttctggtaaatcctataatgtacagttgattgaacctcatctgattgttgatgatattagttacaggttagttacttgtgtatatggtaatcagaataaatggggggaaaaaatgataagtggtatgcattgaacattgatgttactactaatgcattttctgttcatatacattcacgaatttttagatttgatttactggtgtttccatccataaaatagaatacaaattacctcatgaagtttaggtc

SEQ ID NO: 2864 - protein, 500 aa, Glycine max
  misc_feature (1)..(500): Ceres Seq. ID no. 14304574
KNKIKRKRIEKAFPRIGKKRRRERDSCSYFPLRARQVSDSLFQFLSLSGDFFSTIKLRFRRCRFAARWCRFREYKIRVEVLSSALNLWLHRLVSLELDSISNNWSSLFVELNSIRLVEREKKNMVESIAATSLLGHRPICGGNLTRDVSVKRKSLNTVRFPTTEFLGGGRIVVSLALPKSDKQDRFVFSSIKALAVELTREAHAYREEKLPNRDTKIDRGFDQRPDSWPPANRADKPSLRNPLLRHERMGCGWLGAIFEWEGVLIEDNPDLEKQAWLALSQEEGKPSPPAFILKRIEGMKNEQAISEVLCWSRDPAQLRRMANRKEEIYQSLQGGIYRFLSGSKEFVSVLMHYKIPMALVSTRPRKALESAIGEIGIEDTFSVIVAAEDVHRGKPDPEMFVYAAQLLNFIPERCIVFGNSNLTVEAAHEARMKCVAVASKHPVYELGAADLVVRRLDELSVVDLKNLADIEMTEFGSVEPEMELEVEKDYGSSSVDDNFW

SEQ ID NO: 2865 - protein, 377 aa, Glycine max
  misc_feature (1)..(377): Ceres Seq. ID no. 14304575
MVESIAATSLLGHRPICGGNLTRDVSVKRKSLNTVRFPTTEFLGGGRIVVSLALPKSDKQDRFVFSSIKALAVELTREAHAYREEKLPNRDTKIDRGFDQRPDSWPPANRADKPSLRNPLLRHERMGCGWLGAIFEWEGVLIEDNPDLEKQAWLALSQEEGKPSPPAFILKRIEGMKNEQAISEVLCWSRDPAQLRRMANRKEEIYQSLQGGIYRFLSGSKEFVSVLMHYKIPMALVSTRPRKALESAIGEIGIEDTFSVIVAAEDVHRGKPDPEMFVYAAQLLNFIPERCIVFGNSNLTVEAAHEARMKCVAVASKHPVYELGAADLVVRRLDELSVVDLKNLADIEMTEFGSVEPEMELEVEKDYGSSSVDDNFW

SEQ ID NO: 2866 - protein, 252 aa, Glycine max
  misc_feature (1)..(252): Ceres Seq. ID no. 14304576
MGCGWLGAIFEWEGVLIEDNPDLEKQAWLALSQEEGKPSPPAFILKRIEGMKNEQAISEVLCWSRDPAQLRRMANRKEEIYQSLQGGIYRFLSGSKEFVSVLMHYKIPMALVSTRPRKALESAIGEIGIEDTFSVIVAAEDVHRGKPDPEMFVYAAQLLNFIPERCIVFGNSNLTVEAAHEARMKCVAVASKHPVYELGAADLVVRRLDELSVVDLKNLADIEMTEFGSVEPEMELEVEKDYGSSSVDDNFW

SEQ ID NO: 2867 - protein, 377 aa, Glycine max; identical to SEQ ID NO: 2865
  misc_feature (1)..(377): Ceres Seq. ID no. 16625444

SEQ ID NO: 2868 - DNA, 1240 bp, Glycine max
  misc_feature (1)..(1240): Ceres Seq. ID no. 14304650
aaaggtggaacccccatggctgttacagcctctagctttggaactacatggtgtcttagaagagcagctcaggcttttgctatctctcattctcatattctccgcaacaatgttaaactctctttgcagaggaacttttgctctcatcttctctccgtttctacttctttagcttcaggtgtaagccagacagtacaagctctaaagggagaagttgacttgttactcaaaggagtaggagaaagaagtgtaacgaaagaagtaaaacatattcttgagatggctagacgagcatcattaaagcgagagattctccatacagattttctaacccctccagtgttaaaggaatctatgcaagttttggaaaaactagcagacgtgaaagcaattgctcaaggaggttaccctcaggctgaacgttgtcggatttctgttggacatccagaagaactgaccagtgatccagatattatttcagcattaagcattacaggaaacttccagtttgaaccttgctcgcatggtgacttccttggctcaattcttggtacaggaattgtcagggagaaacttggagacattatattgcagggggaacagggtgctcagataattgttgtacctgaactcgttgaatttctcatgtcaacactggttaaggttcgtaatgttcctgtatcttgcactaagattccattaatttctcttgattatgaaccaccaagaacaaaatcattcaaaactatagaagcatcactaagagttgatgcactagctagtgctggatttaaagtttcacgttcaaagctagttgacatgatcagcaatggtgatgtgcgtatcaactggatccctgttactaccaaaggaaccacactcaagagtggagatattgtatcaattagtggcaagggaagattaaagataggagaaataaactccacaaagaaaggaaagtttgcagtggagctcattcggtatttgtagaagtttagagagttcagaagtactttcactctcaaagtaacaactttttctttcttcatttgtgtattggatttcacaaacatacttttcaaactttaaaccaacacagccgtagcctgtctaaaacgacatgcttttattttttgtggaaagatttgcttagcctcgcataacagttatgaagatagaaaaaaattgtacagacagaaccttgatgatgaaaccttaatatgaatcaaatttcagcatc

SEQ ID NO: 2869 - protein, 329 aa, Glycine max
  misc_feature (1)..(329): Ceres Seq. ID no. 14304651
KGGTPMAVTASSFGTTWCLRRAAQAFAISHSHILRNNVKLSLQRNFCSHLLSVSTSLASGVSQTVQALKGEVDLLLKGVGERSVTKEVKHILEMARRASLKREILHTDFLTPPVLKESMQVLEKLADVKAIAQGGYPQAERCRISVGHPEELTSDPDIISALSITGNFQFEPCSHGDFLGSILGTGIVREKLGDIILQGEQGAQIIVVPELVEFLMSTLVKVRNVPVSCTKIPLISLDYEPPRTKSFKTIEASLRVDALASAGFKVSRSKLVDMISNGDVRINWIPVTTKGTTLKSGDIVSISGKGRLKIGEINSTKKGKFAVELIRYL

SEQ ID NO: 2870 - protein, 324 aa, Glycine max
  misc_feature (1)..(324): Ceres Seq. ID no. 14304652
MAVTASSFGTTWCLRRAAQAFAISHSHILRNNVKLSLQRNFCSHLLSVSTSLASGVSQTVQALKGEVDLLLKGVGERSVTKEVKHILEMARRASLKREILHTDFLTPPVLKESMQVLEKLADVKAIAQGGYPQAERCRISVGHPEELTSDPDIISALSITGNFQFEPCSHGDFLGSILGTGIVREKLGDIILQGEQGAQIIVVPELVEFLMSTLVKVRNVPVSCTKIPLISLDYEPPRTKSFKTIEASLRVDALASAGFKVSRSKLVDMISNGDVRINWIPVTTKGTTLKSGDIVSISGKGRLKIGEINSTKKGKFAVELIRYL

SEQ ID NO: 2871 - protein, 236 aa, Glycine max
  misc_feature (1)..(236): Ceres Seq. ID no. 14304653
MARRASLKREILHTDFLTPPVLKESMQVLEKLADVKAIAQGGYPQAERCRISVGHPEELTSDPDIISALSITGNFQFEPCSHGDFLGSILGTGIVREKLGDIILQGEQGAQIIVVPELVEFLMSTLVKVRNVPVSCTKIPLISLDYEPPRTKSFKTIEASLRVDALASAGFKVSRSKLVDMISNGDVRINWIPVTTKGTTLKSGDIVSISGKGRLKIGEINSTKKGKFAVELIRYL

SEQ ID NO: 2872 - protein, 324 aa, Glycine max; identical to SEQ ID NO: 2870
  misc_feature (1)..(324): Ceres Seq. ID no. 16625445

SEQ ID NO: 2873 - DNA, 1383 bp, Glycine max
  misc_feature (1)..(1383): Ceres Seq. ID no. 14304771
agtggttactggtccacctttgatggaaacaactttggcaacagcaataggaaaagaagcaggaacaattattataacaggaactgtaacatttacaatgacaaccggacaaaatttggggaccatggttgcaactttaatttttacacagctgatcatgctaattatgttagatatgatgctgttccatcatctttgaaaaggagaaaatattcagtgcctgcttggcaagaaagccagcaatactatgttccacccatggtccatgacaatatcccttcatcctataatttccaaggtcctcctacaagatctgatggtgatgcctctacatcagctagctgcaagcgtgattgctctatttttgaagatgataagcctgtcttcatgtctagggacgaaattgatagacactctccatcaagaaaagatggtattgatgtacatcatgagacacacttgcggtactcctattgtgccttccttcagaatcttggaatgcgtcttgagctgcctcaaaacatcattgggacagctatggttctgtgccaccgtttctttgttcgacaatcacatgcttgccatgatagatttttgattgctactgctgctctttttcttactgcaaagtcagaggaagctccacgtcctttgaataacatattgagaacatccagtgaaattttacataaacaagattttgctttgttgtcctaccggtttcctgttgattggtttgaacagtatcgggagcgggtgcttgaggctgaacaactgatacttactactctaaattttgaactcaatgtgcaacatccatatgtacctcttacatctgttcttaacaaattaggtctatcaaagactgttttggtgaatctggcattaaacttggtcagtgaagggcttcggagttctctgtggcttcaatttaaaccccatcatattgctgctggagctgcatatcttgctgccaagtttctgaacatggatctcgcagcttatcagaacatctggcaagagttccagacaacaccatccatacttcaagctgtctcgcagcaattaatggagctcttttaaaagtatggaagaactggattacagcatccttcttagtggagtagattttgagtatatataattcaaaatgtcacatactttggagggagagattaggaactacgacataggattttagtgggtgtgacctacggatttttatgttttaccaacttctctgaattctctgctaaaatgtcgagcatgctttgcgttcatttttgttgatgctttgtgatctactgtcagtgtcataatatcaatcatggtcgtgtttagtgaatgaagagcctatccttgaaagcacacagatttgtaacg

SEQ ID NO: 2874 - protein, 360 aa, Glycine max
  misc_feature (1)..(360): Ceres Seq. ID no. 14304772
SGYWSTFDGNNFGNSNRKRSRNNYYNRNCNIYNDNRTKFGDHGCNFNFYTADHANYVRYDAVPSSLKRRKYSVPAWQESQQYYVPPMVHDNIPSSYNFQGPPTRSDGDASTSASCKRDCSIFEDDKPVFMSRDEIDRHSPSRKDGIDVHHETHLRYSYCAFLQNLGMRLELPQNIIGTAMVLCHRFFVRQSHACHDRFLIATAALFLTAKSEEAPRPLNNILRTSSEILHKQDFALLSYRFPVDWFEQYRERVLEAEQLILTTLNFELNVQHPYVPLTSVLNKLGLSKTVLVNLALNLVSEGLRSSLWLQFKPHHIAAGAAYLAAKFLNMDLAAYQNIWQEFQTTPSILQAVSQQLMELF

SEQ ID NO: 2875 - protein, 274 aa, Glycine max
  misc_feature (1)..(274): Ceres Seq. ID no. 14304773
MVHDNIPSSYNFQGPPTRSDGDASTSASCKRDCSIFEDDKPVFMSRDEIDRHSPSRKDGIDVHHETHLRYSYCAFLQNLGMRLELPQNIIGTAMVLCHRFFVRQSHACHDRFLIATAALFLTAKSEEAPRPLNNILRTSSEILHKQDFALLSYRFPVDWFEQYRERVLEAEQLILTTLNFELNVQHPYVPLTSVLNKLGLSKTVLVNLALNLVSEGLRSSLWLQFKPHHIAAGAAYLAAKFLNMDLAAYQNIWQEFQTTPSILQAVSQQLMELF

SEQ ID NO: 2876 - protein, 231 aa, Glycine max
  misc_feature (1)..(231): Ceres Seq. ID no. 14304774
MSRDEIDRHSPSRKDGIDVHHETHLRYSYCAFLQNLGMRLELPQNIIGTAMVLCHRFFVRQSHACHDRFLIATAALFLTAKSEEAPRPLNNILRTSSEILHKQDFALLSYRFPVDWFEQYRERVLEAEQLILTTLNFELNVQHPYVPLTSVLNKLGLSKTVLVNLALNLVSEGLRSSLWLQFKPHHIAAGAAYLAAKFLNMDLAAYQNIWQEFQTTPSILQAVSQQLMELF

SEQ ID NO: 2877 - protein, 274 aa, Glycine max; identical to SEQ ID NO: 2875
  misc_feature (1)..(274): Ceres Seq. ID no. 16625447

SEQ ID NO: 2878 - DNA, 1602 bp, Glycine max
  misc_feature (1)..(1602): Ceres Seq. ID no. 14304823
accaaacctggttcatgtttaagacacggacatgtcacgtaaaccaagccaactattactcgcagatgagacaagaaacaattaaaaaaatcaattaaaatataaaaccagtgaagttgccacataactctttgattcccattactcatttccaccatttcaccttctcaatctgtttctctgctttactaatttgtcccaaatcagaaccagattgagcttctgcacaaccagaccagagattcaacgcagaaactatgcttatccctggtccataggatctgatttggttcataagagagtagtacacgtttcattgctcgaaatagagttgaaaaatctggagtttccatgtctgagaaaccatcttcatcgttgacatctaccgtagctgctcgagaagttgatcccttgttgcaggatttgaatgaaaaaaagcagagctttaggcgcaacgtggtgtcgttagcggtggagttgaaggagctacgtagtcgcctagcttcgcaggaacaatcgtatgctaaggaaactcaaaccagacaggaagcagagacaaatgccaagaacatggaattgcaaattggaaggttgcagaagaatttggaagaaagaaatgagcagcttcaggcgtcagcctcctctgctgagaagtatctgaaggagttggatgatcttagaacacagcttgtaacaacaagagcaactgctgatgcaagtgctgcatcagctcaatcagctcagctccaatgtttagaacttgtaaaagaattaaatgagaaaaatggttcactaagagagcatgaggatcgtgtcctgaggctaggggagcaactagacaatttacagaaggatcttcaggcaagggaatcttcacagaaacaattgaaagatgaagttttgaggattgagcacgatattatggaggctcttgcaaaagccggagagaacaagaattgtgaactgcggaaaatattggatgaggtttctcctaaaaattttgagaagatgaataagattctaggtgttaaggatgatgaaatagcaaaacttaaggatgaaattaagatcatgtctgctcactggaagctcaagactaaggaattagagtcacagttggagaaacagcggcgtgctgatcaagagctgaagaagaaagtgttgaagttagaattctgtctgcaggaagctcgttctcagacacgaaaactgcaaaggatgggtgaacgacgggacaaagctatcaaagaactgagagatcaattagctgcaaagcaacaaagagaagttgcagccgcagataagctaaaccagaatttctgggacacttctggattcaaaatggtggtctcgatgtccatgttgatcttggtggtattttcaaggcggtgaaaccattcctatatccaaaacaattcttgtatatagacccatatataccttcaaattctaggagtctagacaagttgtagaagccattttgcgcggcagtttttatagataatctactagctttagcttgtgcaaaatgtacgcgtagcaccaggatcagaaggcatttttgcggtgatctataaaattacattgcgtagttgcatttac

SEQ ID NO: 2879 - protein, 346 aa, Glycine max
  misc_feature (1)..(346): Ceres Seq. ID no. 14304824
MSEKPSSSLTSTVAAREVDPLLQDLNEKKQSFRRNVVSLAVELKELRSRLASQEQSYAKETQTRQEAETNAKNMELQIGRLQKNLEERNEQLQASASSAEKYLKELDDLRTQLVTTRATADASAASAQSAQLQCLELVKELNEKNGSLREHEDRVLRLGEQLDNLQKDLQARESSQKQLKDEVLRIEHDIMEALAKAGENKNCELRKILDEVSPKNFEKMNKILGVKDDEIAKLKDEIKIMSAHWKLKTKELESQLEKQRRADQELKKKVLKLEFCLQEARSQTRKLQRMGERRDKAIKELRDQLAAKQQREVAAADKLNQNFWDTSGFKMVVSMSMLILVVFSRR

SEQ ID NO: 2880 - protein, 273 aa, Glycine max
  misc_feature (1)..(273): Ceres Seq. ID no. 14304825
MELQIGRLQKNLEERNEQLQASASSAEKYLKELDDLRTQLVTTRATADASAASAQSAQLQCLELVKELNEKNGSLREHEDRVLRLGEQLDNLQKDLQARESSQKQLKDEVLRIEHDIMEALAKAGENKNCELRKILDEVSPKNFEKMNKILGVKDDEIAKLKDEIKIMSAHWKLKTKELESQLEKQRRADQELKKKVLKLEFCLQEARSQTRKLQRMGERRDKAIKELRDQLAAKQQREVAAADKLNQNFWDTSGFKMVVSMSMLILVVFSRR

SEQ ID NO: 2881 - protein, 346 aa, Glycine max; identical to SEQ ID NO: 2879
  misc_feature (1)..(346): Ceres Seq. ID no. 16625448

SEQ ID NO: 2882 - DNA, 977 bp, Glycine max
  misc_feature (1)..(977): Ceres Seq. ID no. 14305854
actcaaaattaaccacaagcataagcacaagcacaagcacaagcacttctctaattccctttcacactctattacagatttcacaagtgcttacacttcaaatggctttggaagctcttcaatcacccaccacagccactccatcgtttagtccctttgaagaaaccagtctcagttacttagagacaccgtggacgaaaggaaagcgttctaagcgtagccgcacggagcaacaactgcaacacccttcatgcaccgaggaagagtacctcgctctttgtctcatcatgctcgctcgcggcggcgccggcagtgtctccaccgccaaacccgctgtctccgacaacaattctgcgccgctatccgccgccaaactgagctacaaatgttcggtttgcaacaaagccttctcctcttaccaagcactcggaggacacaaggccagccaccggaagctcgccggagaaaaccacccgacctcctccgccgtgacgacgagttcggcgtcgaacggtggtggtaggacccacgagtgctccatctgccacaagacgttttcgacaggacaggccttgggaggacacaaacgttgtcactacgaaggcggtaacagcgccgtaaccgcctctgagggagtggggtccactcacacaggaagccaccgcgatttcgatctcaacctcccggcttttccggacttctcagcaaggttcttcgtcgatgacgaggttaccagtcctcatccatccaagaagtcccgtttcaatttgaccatacccaagattgaaatccctcaatactgatccatagatccaaaaaaattattcagtgtttttttatatatttttttaagttatttgggattaatttgttcttgtacatatatagtacttgggccttattcgctagttttagcttttagattgtagtatacttttgacagtggtgattcaattcaattcatttatttttatttt

SEQ ID NO: 2883 - protein, 266 aa, Glycine max
  misc_feature (1)..(266): Ceres Seq. ID no. 14305855
SKLTTSISTSTSTSTSLIPFHTLLQISQVLTLQMALEALQSPTTATPSFSPFEETSLSYLETPWTKGKRSKRSRTEQQLQHPSCTEEEYLALCLIMLARGGAGSVSTAKPAVSDNNSAPLSAAKLSYKCSVCNKAFSSYQALGGHKASHRKLAGENHPTSSAVTTSSASNGGGRTHECSICHKTFSTGQALGGHKRCHYEGGNSAVTASEGVGSTHTGSHRDFDLNLPAFPDFSARFFVDDEVTSPHPSKKSRFNLTIPKIEIPQY

SEQ ID NO: 2884 - protein, 233 aa, Glycine max
  misc_feature (1)..(233): Ceres Seq. ID no. 14305856
MALEALQSPTTATPSFSPFEETSLSYLETPWTKGKRSKRSRTEQQLQHPSCTEEEYLALCLIMLARGGAGSVSTAKPAVSDNNSAPLSAAKLSYKCSVCNKAFSSYQALGGHKASHRKLAGENHPTSSAVTTSSASNGGGRTHECSICHKTFSTGQALGGHKRCHYEGGNSAVTASEGVGSTHTGSHRDFDLNLPAFPDFSARFFVDDEVTSPHPSKKSRFNLTIPKIEIPQY

SEQ ID NO: 2885 - protein, 171 aa, Glycine max
  misc_feature (1)..(171): Ceres Seq. ID no. 14305857
MLARGGAGSVSTAKPAVSDNNSAPLSAAKLSYKCSVCNKAFSSYQALGGHKASHRKLAGENHPTSSAVTTSSASNGGGRTHECSICHKTFSTGQALGGHKRCHYEGGNSAVTASEGVGSTHTGSHRDFDLNLPAFPDFSARFFVDDEVTSPHPSKKSRFNLTIPKIEIPQY

SEQ ID NO: 2886 - protein, 233 aa, Glycine max; identical to SEQ ID NO: 2884
  misc_feature (1)..(233): Ceres Seq. ID no. 16625456

SEQ ID NO: 2887 - DNA, 949 bp, Glycine max
  misc_feature (1)..(949): Ceres Seq. ID no. 14305889
ctttgcgtgcccatcaccttctccactcttcactaccctcaaaacccttttcctcttaccacttctcatgtggccaccgtggctcaactcaccgagcgggttccgcaacactccaccgccctcaccctctccgtcgtcatcgccatcgcattctcgaactcgctccttcagcttctcctgctcctccttcaaagatatccagagcctcttccaagacaaccccgaatccgaacccgccgctcccaaatctccgtctctcttccgccgcgtccggatctccaccgccgtgctccgcgcctggggggcctcacgcgccaccgttcccgccgcactcccgcccggcctcgaccaaggcgtcgtcgtctactttacctccctccgtgttgttcgccgcacattcgacgactgccgcgccgtccgatccatcctgcgcggcctccgcgtcgccgtcgacgagcgcgacgtctccatcgacgaccgcttccgcgacgagctccacgccgtcctcggctgccgcagcaacctcgccctgccgcgcgtattcgtcggtggcatctacgttggcggagctgacgacgtccgccagctccacgagagcggcgagctccaccggctcatcgaacgcctcccgcgctccaaccagaacaacgcctgcgattcttgcggaggcttcagattcgtagtgtgcgatgagtgcaacggaagccacaaagtcttcacagagaaaaacggatttagaagctgttcttcttgcaatgccaacggcttgattcgttgccctgcatgcttcttcgtgctcccgcgccacaccagatagctaccctacccctcagttagttacagctcacagacaactcaatgatgaaatttaatcaatcatatttatgttgataaataaacacttcctcactttcatttcgtttaggttactacattacatatattaatt

SEQ ID NO: 2888 - protein, 271 aa, Glycine max
  misc_feature (1)..(271): Ceres Seq. ID no. 14305890
FACPSPSPLFTTLKTLFLLPLLMWPPWLNSPSGFRNTPPPSPSPSSSPSHSRTRSFSFSCSSFKDIQSLFQDNPESEPAAPKSPSLFRRVRISTAVLRAWGASRATVPAALPPGLDQGVVVYFTSLRVVRRTFDDCRAVRSILRGLRVAVDERDVSIDDRFRDELHAVLGCRSNLALPRVFVGGIYVGGADDVRQLHESGELHRLIERLPRSNQNNACDSCGGFRFVVCDECNGSHKVFTEKNGFRSCSSCNANGLIRCPACFFVLPRHTR

SEQ ID NO: 2889 - protein, 249 aa, Glycine max
  misc_feature (1)..(249): Ceres Seq. ID no. 14305891
MWPPWLNSPSGFRNTPPPSPSPSSSPSHSRTRSFSFSCSSFKDIQSLFQDNPESEPAAPKSPSLFRRVRISTAVLRAWGASRATVPAALPPGLDQGVVVYFTSLRVVRRTFDDCRAVRSILRGLRVAVDERDVSIDDRFRDELHAVLGCRSNLALPRVFVGGIYVGGADDVRQLHESGELHRLIERLPRSNQNNACDSCGGFRFVVCDECNGSHKVFTEKNGFRSCSSCNANGLIRCPACFFVLPRHTR

SEQ ID NO: 2890 - protein, 226 aa, Glycine max
  misc_feature (1)..(226): Ceres Seq. ID no. 14305892
LRAHHLLHSSLPSKPFSSYHFSCGHRGSTHRAGSATLHRPHPLRRHRHRILELAPSASPAPPSKISRASSKTTPNPNPPLPNLRLSSAASGSPPPCSAPGGPHAPPFPPHSRPASTKASSSTLPPSVLFAAHSTTAAPSDPSCAASASPSTSATSPSTTASATSSTPSSAAAATSPCRAYSSVASTLAELTTSASSTRAASSTGSSNASRAPTRTTPAILAEASDS

SEQ ID NO: 2891 - protein, 249 aa, Glycine max; identical to SEQ ID NO: 2889
  misc_feature (1)..(249): Ceres Seq. ID no. 16625458

SEQ ID NO: 2892 - DNA, 1357 bp, Glycine max
  misc_feature (1)..(1357): Ceres Seq. ID no. 14306773
tcagcgctacgtaggcccccccccccaagaacgataacaaaattgaaatcgaattgggtgcgaagtgaaatgttgcaaaccctaggaggcgtaatccctcgcttcgtgagtcgctcatggctccgaaacctgacggtgcgtgcaatggcattctcttcctcctcctccgattatggagaccagtcacgtggtggccttccccgcttctactccgaaactcttcctccttccaagggtagtgttatacgcgtgcaaggtgatgaattctggcatatgacaaaagttttgaggttaaccaccaatgatagggtacagctcttcaatgggaaaggaagtctggtagaaggatgcatacagagcattgatcgaactggacttgattttgttgcattgaatgatttgatatcaatccctccacaaaatacacaattgcatgtatttgctggttttggtactctgaagggtggccgtgctgactggcttgtagagaaatgcacagaatttggagccaatagtgttactcctctattgactgaacattctccgtcaatctcagaaaatcgggtggacagattgaaacgtgtcattttagcagcatccaaacaaagtcaacgactgcatgaaatggtcttgaaacatcctatagagattgatgaccttttgcaccttattgcgcaatcaaagctatctcttgttgcaactgcgaaggcaactcctgttcttagtgcattggcatcgttggaaaaggaaactagtggcttaatcataattggaccagaaggagatttcactgagaaagaagtgagtatgatgatggaagcaggtgctacagctgttagtcttggacctcatcgtcttcgggttgaaactgccacgatagcacttttggcaactgtcatgttatggtctgactcacagcaaatttcagtctgttgattcctcagtgtagctgagagagtacgtggatgacacagaggagtgggaggactacataatcattgccctggattgagaaacaaaaccgtctcctgcaagtgggagtgaagctttgcacagcaagtgtgcttttgaatgccttaatttgtgtgactggtgtatttgccatgaatattcatattaagctatttgatacagggatgcctcagttcctcgggactatttttggaggcattgctgcttgcatattcttgtatttggttaccgttttttggtatatggtggactagctgcccaccaaattgtgttccaaatataaatgtaatttgatttgaaagttagttttctatgtaggtgctagaaattttttcactacaagacaactacgggaagtcagtaacaatttctttctaatatattc

SEQ ID NO: 2893 - protein, 311 aa, Glycine max
  misc_feature (1)..(311): Ceres Seq. ID no. 14306774
SALRRPPPPRTITKLKSNWVRSEMLQTLGGVIPRFVSRSWLRNLTVRAMAFSSSSSDYGDQSRGGLPRFYSETLPPSKGSVIRVQGDEFWHMTKVLRLTTNDRVQLFNGKGSLVEGCIQSIDRTGLDFVALNDLISIPPQNTQLHVFAGFGTLKGGRADWLVEKCTEFGANSVTPLLTEHSPSISENRVDRLKRVILAASKQSQRLHEMVLKHPIEIDDLLHLIAQSKLSLVATAKATPVLSALASLEKETSGLIIIGPEGDFTEKEVSMMMEAGATAVSLGPHRLRVETATIALLATVMLWSDSQQISVC

SEQ ID NO: 2894 - protein, 288 aa, Glycine max
  misc_feature (1)..(288): Ceres Seq. ID no. 14306775
MLQTLGGVIPRFVSRSWLRNLTVRAMAFSSSSSDYGDQSRGGLPRFYSETLPPSKGSVIRVQGDEFWHMTKVLRLTTNDRVQLFNGKGSLVEGCIQSIDRTGLDFVALNDLISIPPQNTQLHVFAGFGTLKGGRADWLVEKCTEFGANSVTPLLTEHSPSISENRVDRLKRVILAASKQSQRLHEMVLKHPIEIDDLLHLIAQSKLSLVATAKATPVLSALASLEKETSGLIIIGPEGDFTEKEVSMMMEAGATAVSLGPHRLRVETATIALLATVMLWSDSQQISVC

SEQ ID NO: 2895 - protein, 263 aa, Glycine max
  misc_feature (1)..(263): Ceres Seq. ID no. 14306776
MAFSSSSSDYGDQSRGGLPRFYSETLPPSKGSVIRVQGDEFWHMTKVLRLTTNDRVQLFNGKGSLVEGCIQSIDRTGLDFVALNDLISIPPQNTQLHVFAGFGTLKGGRADWLVEKCTEFGANSVTPLLTEHSPSISENRVDRLKRVILAASKQSQRLHEMVLKHPIEIDDLLHLIAQSKLSLVATAKATPVLSALASLEKETSGLIIIGPEGDFTEKEVSMMMEAGATAVSLGPHRLRVETATIALLATVMLWSDSQQISVC

SEQ ID NO: 2896 - protein, 288 aa, Glycine max; identical to SEQ ID NO: 2894
  misc_feature (1)..(288): Ceres Seq. ID no. 16611955

SEQ ID NO: 2897 - DNA, 1395 bp, Glycine max
  misc_feature (1)..(1395): Ceres Seq. ID no. 14306777
atcaacacggatcaacaattgtggacgctcacaattgtactacttgcaaccaattcaatactgacactcaaggtgttggtcttttcggcaacagcactggtatgacatcaaaccacacacacgagtccgtcactacaaacaacaaccaacatctcggcgcgacctcagccagagctgacaaccacaacaacacgcacctcggagccacatcagcacgagacgaggagacactttctgcaggatcaacagcccgagctgagtccaacgcttacaggatgagtgccaacaacggagaccttgagaaggacttctctaacaggaacggacccaacggatatgggtatggtggcgcaaacaatcaccagcacctccacgagggcatggatgaggatctggccttgaagcacatccggaccgccggtagcatctccatctctcctgagctgttcgagaagctttacctttcgccaaagaacgaggtcaagggtgaacttcgtaagactttcggtaaccccactcctcttgctcttattggtttcctgttgtctctcaccccgcttagttggaccttgatgggatggcgcggagctggaggcagtggctcagcaagcattggatggtacttttttgctggaggccttctgatggtgctcggtggacttggtgaatggattctcggcaacaccttccccttcgtggtattcacgtcttttggtgccttctggcttggctacgccgctacccttgttcctacctacggagcgtacgagaactaccgcaacccgaacgagcaaggtagcactggtttggagtccgttggcttcaacgtcggcattgcctatttcatgatctgcatgggcatactctgtctcgtgtacctcgtctgctcgatgcgaaccaacctggtcttcttcctcatcttcttcactctcgtcccagctttcggcctccttgccggtacgtttatccacaccgcgcagggcaacgcaggaatcgcatccaagtgtcaagaagcagccggcgcattcacgttcgtcacgtgcatacttggatggtacatcttctttgcaatcatgcttgcgagcgtcgacttccccttctccctacctattgttgatctgtctggtatgatcaagggcgcaagcgagaagcagaaggtcgaccacgtcgagtaactttcaggttacgcacataccaggcgttggtaggagatgaaaaggataatcagtgggaagggaaattgcttgctagcgacggcgttgctgtctgctgaagcagctggttagcactcttgaacaatcttttcgatctgttgatgtgcgctgctacgtggtatgcgtggtgcgagatcacaatgttggaccgactaaagttttaatgaaaccttgtacttac

SEQ ID NO: 2898 - protein, 390 aa, Glycine max
  misc_feature (1)..(390): Ceres Seq. ID no. 14306778
QHGSTIVDAHNCTTCNQFNTDTQGVGLFGNSTGMTSNHTHESVTTNNNQHLGATSARADNHNNTHLGATSARDEETLSAGSTARAESNAYRMSANNGDLEKDFSNRNGPNGYGYGGANNHQHLHEGMDEDLALKHIRTAGSISISPELFEKLYLSPKNEVKGELRKTFGNPTPLALIGFLLSLTPLSWTLMGWRGAGGSGSASIGWYFFAGGLLMVLGGLGEWILGNTFPFVVFTSFGAFWLGYAATLVPTYGAYENYRNPNEQGSTGLESVGFNVGIAYFMICMGILCLVYLVCSMRTNLVFFLIFFTLVPAFGLLAGTFIHTAQGNAGIASKCQEAAGAFTFVTCILGWYIFFAIMLASVDFPFSLPIVDLSGMIKGASEKQKVDHVE

SEQ ID NO: 2899 - protein, 357 aa, Glycine max
  misc_feature (1)..(357): Ceres Seq. ID no. 14306779
MTSNHTHESVTTNNNQHLGATSARADNHNNTHLGATSARDEETLSAGSTARAESNAYRMSANNGDLEKDFSNRNGPNGYGYGGANNHQHLHEGMDEDLALKHIRTAGSISISPELFEKLYLSPKNEVKGELRKTFGNPTPLALIGFLLSLTPLSWTLMGWRGAGGSGSASIGWYFFAGGLLMVLGGLGEWILGNTFPFVVFTSFGAFWLGYAATLVPTYGAYENYRNPNEQGSTGLESVGFNVGIAYFMICMGILCLVYLVCSMRTNLVFFLIFFTLVPAFGLLAGTFIHTAQGNAGIASKCQEAAGAFTFVTCILGWYIFFAIMLASVDFPFSLPIVDLSGMIKGASEKQKVDHVE

SEQ ID NO: 2900 - protein, 299 aa, Glycine max
  misc_feature (1)..(299): Ceres Seq. ID no. 14306780
MSANNGDLEKDFSNRNGPNGYGYGGANNHQHLHEGMDEDLALKHIRTAGSISISPELFEKLYLSPKNEVKGELRKTFGNPTPLALIGFLLSLTPLSWTLMGWRGAGGSGSASIGWYFFAGGLLMVLGGLGEWILGNTFPFVVFTSFGAFWLGYAATLVPTYGAYENYRNPNEQGSTGLESVGFNVGIAYFMICMGILCLVYLVCSMRTNLVFFLIFFTLVPAFGLLAGTFIHTAQGNAGIASKCQEAAGAFTFVTCILGWYIFFAIMLASVDFPFSLPIVDLSGMIKGASEKQKVDHVE

SEQ ID NO: 2901 - protein, 357 aa, Glycine max; identical to SEQ ID NO: 2899
  misc_feature (1)..(357): Ceres Seq. ID no. 16625464

SEQ ID NO: 2902 - DNA, 894 bp, Glycine max
  misc_feature (1)..(894): Ceres Seq. ID no. 14306835
aatacgatcagttttggttcgtcttctcttcgagaggaagctttgatttgatcgtaatcgatagattgttattgttgattaagagagttgagtttttttgtgatcggaggtgatggattggggaagtgtgacggctgaagatctcgtcgatgctctccgagaggttgattggtcgtcgccgccgcgtccgctgtctgagttcttctcaaggttcaccgttcctaaatctctcgctaaatgggacagccgcctcaagtgcaatctctactattaccgaacgaactacttcatcatgatcgtctttatacttggattgggatttcttacaaggcctctcgccattctctctgcctttttgactgcagtaactgtggcatttcttaatgacagctttgcaggttcctttagtgagaaggccacacgaaccatcagaagtttctccccacagttagctgctaaaatgagacctccattggcgcctgtcattcgtggacgcccatcagcaaagagagcaatctatatctgtggccaaccccgttgggtctttgtcttgatatcctcacttgtgagttttgccctttggtatatttcatgtggtttgttcaccgtctctttggcactactcattgggcttcttgctacaattcttcatgcaaccttgagaacacccaacttgaaggcacgtcttaacaccttcagggaggaatttcgagcagtgtggcgtaactacagtgagatctagagtaatgtaagctcgagcagagtattgctgttgctgtaagctttgatttttttagctccatgactcggattatctgttacttgatttggtttctgctttctgtagccatattggcaacaagaaacaactcatttcaatgacttttctgtatc

SEQ ID NO: 2903 - protein, 209 aa, Glycine max
  misc_feature (1)..(209): Ceres Seq. ID no. 14306836
MDWGSVTAEDLVDALREVDWSSPPRPLSEFFSRFTVPKSLAKWDSRLKCNLYYYRTNYFIMIVFILGLGFLTRPLAILSAFLTAVTVAFLNDSFAGSFSEKATRTIRSFSPQLAAKMRPPLAPVIRGRPSAKRAIYICGQPRWVFVLISSLVSFALWYISCGLFTVSLALLIGLLATILHATLRTPNLKARLNTFREEFRAVWRNYSEI

SEQ ID NO: 2904 - protein, 149 aa, Glycine max
  misc_feature (1)..(149): Ceres Seq. ID no. 14306837
MIVFILGLGFLTRPLAILSAFLTAVTVAFLNDSFAGSFSEKATRTIRSFSPQLAAKMRPPLAPVIRGRPSAKRAIYICGQPRWVFVLISSLVSFALWYISCGLFTVSLALLIGLLATILHATLRTPNLKARLNTFREEFRAVWRNYSEI

SEQ ID NO: 2905 - protein, 209 aa, Glycine max; identical to SEQ ID NO: 2903
  misc_feature (1)..(209): Ceres Seq. ID no. 16625465

SEQ ID NO: 2906 - DNA, 1740 bp, Glycine max
  misc_feature (1)..(1740): Ceres Seq. ID no. 14306957
ataaaatgatttctgcgatttcgtgggtgcccaaaggggtttcgaagtcggaacctgtcgtggctgatcctcctcccgaagaggaaatccaagaaatcatcgccagccacactaccaaaagtggagacagtgacaatgaagtcgccaacaacgatgaagttgtggcacaagcattaaacgtagctgatgcagttggcaaagcctccaccggaagctgtgacgaaataacccttgcgttgaaggaccttgacatggaccgttatgacgacgaagatgaaggaattgaggtgttcagttctggaattggtgatctttattatcccagtaacgacatggatccatatatcaaagataaaaacgatgatgattctgatgaactcgaagacatgatcatcaacccaactgattctgtcattgtttatgcatgtactgaggatgaagtcagttatcttgaggttttggttatcgaggatgccgattctagcgaaatgaacgtgtatcctcaccataatatcattattccagcatttccactctgcacagcttggctcgattgcccccttaaaggaggagaaagagggaacttcatagctgttggttcaatggaaccttccatagaaatttgggaccttgatgttattgatgaggtgcagccatgtgtggttttgggtggatttgaagagaaaaagaaaaaggggaaaaagaaaccaatcaaatacaaagatgacagtcacactgactcagtacttggtcttgcttggaacaaggagtacaggaatatactagcaagtgccggtgctgacaagcgagtgaagatttgggatgtggttgccgggaagtgtgatattacaatggagcatcactcggacaaggttcaagcagttgcttggaatcatcatgcaccacaggttcttcttagtggttcatttgatcatactgttgtcttgaaggatggaaggatgccatcacattctggctataagtggtcagtcacagctgatgtagagagcttggcatgggatctacatactgagcactcgtttgtggtgagtcttgaagatggtattgtcaagggttttgatattcggactgccaactctgattcctcatcagatctgagttctacatttacacttcatgcacatgacaaagctgttacctcagtatcctataatccatcggcacccaatctccttgccactggatccatggacaaaacggtaaaactttgggatttgtcgaacaaccaaccctcttgtgtagcatctaaatctccgagagcaggggttatctttaaaatttctttctcagaggacaaccccttcttgttggctataggaggctcaaagggaaaattgcaagtttgggataccttatctgatgctggcatttctcgaagatatgggaattacaagaatagatcgcaatctgggtcttgaagttgtagtcttccttcccgtactgctcaagttgtgttgcataaatcaaaattttgggattcactgcaaaaatatgttcttgatttattctttttttgcatcctaataacctttatttgaaatagcataaatttgaattggttgaacgtaaattgttgtgattccaatttccaacactttatagtttagtttggacatcttttgggggggcaaggcccaatgaaaactacaaagacatgctccctctgttttatgttatttgccgtttaagataatgtatatatccatggtcttaacactt

SEQ ID NO: 2907 - protein, 478 aa, Glycine max
  misc_feature (1)..(478): Ceres Seq. ID no. 14306958
KMISAISWVPKGVSKSEPVVADPPPEEEIQEIIASHTTKSGDSDNEVANNDEVVAQALNVADAVGKASTGSCDEITLALKDLDMDRYDDEDEGIEVFSSGIGDLYYPSNDMDPYIKDKNDDDSDELEDMIINPTDSVIVYACTEDEVSYLEVLVIEDADSSEMNVYPHHNIIIPAFPLCTAWLDCPLKGGERGNFIAVGSMEPSIEIWDLDVIDEVQPCVVLGGFEEKKKKGKKKPIKYKDDSHTDSVLGLAWNKEYRNILASAGADKRVKIWDVVAGKCDITMEHHSDKVQAVAWNHHAPQVLLSGSFDHTVVLKDGRMPSHSGYKWSVTADVESLAWDLHTEHSFVVSLEDGIVKGFDIRTANSDSSSDLSSTFTLHAHDKAVTSVSYNPSAPNLLATGSMDKTVKLWDLSNNQPSCVASKSPRAGVIFKISFSEDNPFLLAIGGSKGKLQVWDTLSDAGISRRYGNYKNRSQSGS

SEQ ID NO: 2908 - protein, 477 aa, Glycine max
  misc_feature (1)..(477): Ceres Seq. ID no. 14306959
MISAISWVPKGVSKSEPVVADPPPEEEIQEIIASHTTKSGDSDNEVANNDEVVAQALNVADAVGKASTGSCDEITLALKDLDMDRYDDEDEGIEVFSSGIGDLYYPSNDMDPYIKDKNDDDSDELEDMIINPTDSVIVYACTEDEVSYLEVLVIEDADSSEMNVYPHHNIIIPAFPLCTAWLDCPLKGGERGNFIAVGSMEPSIEIWDLDVIDEVQPCVVLGGFEEKKKKGKKKPIKYKDDSHTDSVLGLAWNKEYRNILASAGADKRVKIWDVVAGKCDITMEHHSDKVQAVAWNHHAPQVLLSGSFDHTVVLKDGRMPSHSGYKWSVTADVESLAWDLHTEHSFVVSLEDGIVKGFDIRTANSDSSSDLSSTFTLHAHDKAVTSVSYNPSAPNLLATGSMDKTVKLWDLSNNQPSCVASKSPRAGVIFKISFSEDNPFLLAIGGSKGKLQVWDTLSDAGISRRYGNYKNRSQSGS

SEQ ID NO: 2909 - protein, 395 aa, Glycine max
  misc_feature (1)..(395): Ceres Seq. ID no. 14306960
MDRYDDEDEGIEVFSSGIGDLYYPSNDMDPYIKDKNDDDSDELEDMIINPTDSVIVYACTEDEVSYLEVLVIEDADSSEMNVYPHHNIIIPAFPLCTAWLDCPLKGGERGNFIAVGSMEPSIEIWDLDVIDEVQPCVVLGGFEEKKKKGKKKPIKYKDDSHTDSVLGLAWNKEYRNILASAGADKRVKIWDVVAGKCDITMEHHSDKVQAVAWNHHAPQVLLSGSFDHTVVLKDGRMPSHSGYKWSVTADVESLAWDLHTEHSFVVSLEDGIVKGFDIRTANSDSSSDLSSTFTLHAHDKAVTSVSYNPSAPNLLATGSMDKTVKLWDLSNNQPSCVASKSPRAGVIFKISFSEDNPFLLAIGGSKGKLQVWDTLSDAGISRRYGNYKNRSQSGS

SEQ ID NO: 2910 - protein, 477 aa, Glycine max; identical to SEQ ID NO: 2908
  misc_feature (1)..(477): Ceres Seq. ID no. 16625466

SEQ ID NO: 2911 - DNA, 1470 bp, Glycine max
  misc_feature (1)..(1470): Ceres Seq. ID no. 14308107
aaaaaagttctattccttcgtctgcaaccctagctttccgttgtttgcaaatctatggctggtgaatctgataaacccgaaaacaccctctcttgtgctaactgtggcaaacctgcgaatcttcagtgtccaaaatgtatggaattgaagcttcctcgagaaggtgctgccttctgctctcaggattgtttcaagtcttcatggagctcgcacaaatcagtgcatctgaaggcaaaactatccccacctggcacacaaaattcagactcacttgatgaaggttggttatattgtttgaagagagggcaggctcgaacgccaaagcttcctcactttgattggacaggaccactgcagccatatcccatttctagtaaacggattgtcccagatcaaattgataaacctgattgggctggtgatggaacacccaaaattgagcccaatagtagtctacagcataccattgaggtcaaaactccagatcaaatagagagaatgagggaaacttgtcggattgcaagggaggtgttggatgcagctgctcggattattcagcctggtgtgacgactgatgagattgacagagttgttcatgaggcaactattgctgcaggaggatatccatcgcctctcaattaccatttcttccctaaatcttgctgcacgtcagttaatgaagtaatctgtcatggaattcctgatgcaaggaagcttgaggatggtgacattgtaaatgttgatgtcactgtgtactataaaggtgttcatggtgatctcaatgaaacatactttgtgggaaatgttgatgaagagtctctccaactagtaaaatgcacatatgagtgcctggagaaggcaatatccattgttaaacctgggatacgattccgtgagattggtgaagtcattaatcgtcatgcttcaatgtctggattctcggtggtaaaatcttattgtggtcatggaattggagagctcttccattgtgcaccaaacattcctcattattcaagaaataaagcagttggtgtgatgaaggctggacagacctttacaattgaaccaatgatcaatgccggtgtctggcgtgatcgaatgtggcctgatggatggactgctgttacagcggatggtaaacgaagtgctcaatttgagcacactcttttggtgacagagactggtgttgaagttttaacagggcggttgcagacatcacccaatgtttttccttggctaggttcataattgggtgaatcatggagacagatgctggcagtgtctaaataccatacaattattagacgacatttctttgatctatttctctgattgcctcctttgggtatcatgtttgtaagttatacaaaaaacagaagcaaattcaattgagtttaggtgaaaagtatgcttaatgatatgtttgtgtaattgaagaaaatttaattttagaattttgtcttgctttcc

SEQ ID NO: 2912 - protein, 397 aa, Glycine max
  misc_feature (1)..(397): Ceres Seq. ID no. 14308108
MAGESDKPENTLSCANCGKPANLQCPKCMELKLPREGAAFCSQDCFKSSWSSHKSVHLKAKLSPPGTQNSDSLDEGWLYCLKRGQARTPKLPHFDWTGPLQPYPISSKRIVPDQIDKPDWAGDGTPKIEPNSSLQHTIEVKTPDQIERMRETCRIAREVLDAAARIIQPGVTTDEIDRVVHEATIAAGGYPSPLNYHFFPKSCCTSVNEVICHGIPDARKLEDGDIVNVDVTVYYKGVHGDLNETYFVGNVDEESLQLVKCTYECLEKAISIVKPGIRFREIGEVINRHASMSGFSVVKSYCGHGIGELFHCAPNIPHYSRNKAVGVMKAGQTFTIEPMINAGVWRDRMWPDGWTAVTADGKRSAQFEHTLLVTETGVEVLTGRLQTSPNVFPWLGS

SEQ ID NO: 2913 - protein, 369 aa, Glycine max
  misc_feature (1)..(369): Ceres Seq. ID no. 14308109
MELKLPREGAAFCSQDCFKSSWSSHKSVHLKAKLSPPGTQNSDSLDEGWLYCLKRGQARTPKLPHFDWTGPLQPYPISSKRIVPDQIDKPDWAGDGTPKIEPNSSLQHTIEVKTPDQIERMRETCRIAREVLDAAARIIQPGVTTDEIDRVVHEATIAAGGYPSPLNYHFFPKSCCTSVNEVICHGIPDARKLEDGDIVNVDVTVYYKGVHGDLNETYFVGNVDEESLQLVKCTYECLEKAISIVKPGIRFREIGEVINRHASMSGFSVVKSYCGHGIGELFHCAPNIPHYSRNKAVGVMKAGQTFTIEPMINAGVWRDRMWPDGWTAVTADGKRSAQFEHTLLVTETGVEVLTGRLQTSPNVFPWLGS

SEQ ID NO: 2914 - protein, 249 aa, Glycine max
  misc_feature (1)..(249): Ceres Seq. ID no. 14308110
MRETCRIAREVLDAAARIIQPGVTTDEIDRVVHEATIAAGGYPSPLNYHFFPKSCCTSVNEVICHGIPDARKLEDGDIVNVDVTVYYKGVHGDLNETYFVGNVDEESLQLVKCTYECLEKAISIVKPGIRFREIGEVINRHASMSGFSVVKSYCGHGIGELFHCAPNIPHYSRNKAVGVMKAGQTFTIEPMINAGVWRDRMWPDGWTAVTADGKRSAQFEHTLLVTETGVEVLTGRLQTSPNVFPWLGS

SEQ ID NO: 2915 - protein, 397 aa, Glycine max; identical to SEQ ID NO: 2912
  misc_feature (1)..(397): Ceres Seq. ID no. 16625477

SEQ ID NO: 2916 - DNA, 1295 bp, Glycine max
  misc_feature (1)..(1295): Ceres Seq. ID no. 14308401
atgtgtggcaggctccttccactgcgcaccatttggtggcatgatatagataacagctagtaattaggaagttggcgttacaagaacaagaacaaaaccccactcactcaatgcacataataatacaataatttcttagggagtgaatggcgaacttgccccaatccatctccacaagcggcgcgacgtcgtttggagcttcttctgccaccgccaaggatcgcagcaggatagcgtctgtggaacacctcgttctccaactcaacaaccccgatctccgagaaaacgctctccatgaactctccaagaagagagagttatttcaggatcttgctccattattgtggaattcttttggtaccatgtcagcacttttacaggaaatagtttcaatattccctgttatttcacctccaaaccttactccagcacaatcaactcgagtgtgcaatgctcttgctctttttcagtgtgtggcatctcaccttgatacaaggatgcaattcctccatgctcatatacctctatatctgtatcccttccttaatacaaccagtaagtccagaccatttgagtatttgaggcttaccagtcttggagtcattggtgccttagtgaaggttgatgatacaaaagttataagtttccttctttcaacagagattattccgttgtgcctgcgcagtatggaaatgggcagtgaattgtcaaaaactgttgcaacctttatagttcaaaaaattctgttggacgaaattggtttgaaatatatttgtactacagcagagcgcttttatgcagtagctcaagttttgggaaacatggtggaaactcttgttgagcaaccttcaagtcgtcttttgaagcacattattcgttgttatcttcgtctgtcagataatcagagtgcttgcaaggcattaagaacctgtcttccagacatgttaagagatgctacattcagtaattgccttcgtgaagacccaacagctaggatgtggctacagcagttgcttcataatattggagacaatcgggttcctgcactacaaggtggaggaggattcgatcgtatgatggggtcgtgagaacaaagacttgctactttgtgaaaattatcaactagctacatacataaaataggattttcagttgggcatgtattgagaatgaagaattgaatgggaagggaactatctttccgtaagatgttaagagtgaagtatacatgagaatagtgacctcttaattgaatacaaatattaaaatcataatgagccatatattttaaactg

SEQ ID NO: 2917 - protein, 313 aa, Glycine max
  misc_feature (1)..(313): Ceres Seq. ID no. 14308402
MANLPQSISTSGATSFGASSATAKDRSRIASVEHLVLQLNNPDLRENALHELSKKRELFQDLAPLLWNSFGTMSALLQEIVSIFPVISPPNLTPAQSTRVCNALALFQCVASHLDTRMQFLHAHIPLYLYPFLNTTSKSRPFEYLRLTSLGVIGALVKVDDTKVISFLLSTEIIPLCLRSMEMGSELSKTVATFIVQKILLDEIGLKYICTTAERFYAVAQVLGNMVETLVEQPSSRLLKHIIRCYLRLSDNQSACKALRTCLPDMLRDATFSNCLREDPTARMWLQQLLHNIGDNRVPALQGGGGFDRMMGS

SEQ ID NO: 2918 - protein, 241 aa, Glycine max
  misc_feature (1)..(241): Ceres Seq. ID no. 14308403
MSALLQEIVSIFPVISPPNLTPAQSTRVCNALALFQCVASHLDTRMQFLHAHIPLYLYPFLNTTSKSRPFEYLRLTSLGVIGALVKVDDTKVISFLLSTEIIPLCLRSMEMGSELSKTVATFIVQKILLDEIGLKYICTTAERFYAVAQVLGNMVETLVEQPSSRLLKHIIRCYLRLSDNQSACKALRTCLPDMLRDATFSNCLREDPTARMWLQQLLHNIGDNRVPALQGGGGFDRMMGS

SEQ ID NO: 2919 - protein, 196 aa, Glycine max
  misc_feature (1)..(196): Ceres Seq. ID no. 14308404
MQFLHAHIPLYLYPFLNTTSKSRPFEYLRLTSLGVIGALVKVDDTKVISFLLSTEIIPLCLRSMEMGSELSKTVATFIVQKILLDEIGLKYICTTAERFYAVAQVLGNMVETLVEQPSSRLLKHIIRCYLRLSDNQSACKALRTCLPDMLRDATFSNCLREDPTARMWLQQLLHNIGDNRVPALQGGGGFDRMMGS

SEQ ID NO: 2920 - protein, 313 aa, Glycine max; identical to SEQ ID NO: 2917
  misc_feature (1)..(313): Ceres Seq. ID no. 16625478

SEQ ID NO: 2921 - DNA, 1019 bp, Glycine max
  misc_feature (1)..(1019): Ceres Seq. ID no. 14309484
ctccaatcttcttctcttcttttctcgttctctttctcttgtgctgcgtgccaagccagacccatacatacacccacccagcccaccaatcactgccagcagcgacggagtgagggaagcaagcaaggaaggaagggacgctcggatggcgatgggagcggctgtgcgggaggcggcggcggacggcgtcgtgaccttcctctgggtgctctgcgtctccacgctcggcgcctccacggccgccgtcaccacctacctcagcctgcacgaggggatccactacgccctcctcgtcaccgtctccatcctcgccctcctcctcttcgccttcaacctcctctgcgacgccctcggcggcgccagcttcaaccccaccggcgtcgccgccttctacgccgccggcctcaccagcccctcgctcttctccatcgcgctccgcctaccagcgcaggccgccggagccgtgggcggagctctggccatctccgagctgatgccggagcagtacaagcacatgctcggcgggccctcgctcaaggtggatccccacaccggcgccgtcgccgaaggtgtgctcaccttcgtcatcacctttgccgtcctctgcatcatcgtcaagggaccccgcaaccccatcgtcaagacagcgatgctctccgtcaccaccgtcagcctcgtcctcaccggcgccgcatacaccggcccctccatgaaccctgccaacgcctttggttgggcgtatgttaacaatctgcacaacacctgggagcagctgtacgtgtactggatatgccccttcatcggtgccattctcgctgcgtggaccttcagggccgtgttcccgccaccggcccctaagcccaagaccaagaaagcatgatgaactcaagcacaaactttgacttagcaatttggggacctgaagaagcgaacatggtttgctagggaataatttgaaattgtatttaatcacctcaatgttacaccgatgtttaacttaaaagtgatcatttatcagt

SEQ ID NO: 2922 - protein, 292 aa, Glycine max
  misc_feature (1)..(292): Ceres Seq. ID no. 14309485
SNLLLFFSRSLSLVLRAKPDPYIHPPSPPITASSDGVREASKEGRDARMAMGAAVREAAADGVVTFLWVLCVSTLGASTAAVTTYLSLHEGIHYALLVTVSILALLLFAFNLLCDALGGASFNPTGVAAFYAAGLTSPSLFSIALRLPAQAAGAVGGALAISELMPEQYKHMLGGPSLKVDPHTGAVAEGVLTFVITFAVLCIIVKGPRNPIVKTAMLSVTTVSLVLTGAAYTGPSMNPANAFGWAYVNNLHNTWEQLYVYWICPFIGAILAAWTFRAVFPPPAPKPKTKKA

SEQ ID NO: 2923 - protein, 248 aa, Glycine max
  misc_feature (1)..(248): Ceres Seq. ID no. 14309486
LQSSSLLFSFSFSCAACQARPIHTPTQPTNHCQQRRSEGSKQGRKGRSDGDGSGCAGGGGGRRRDLPLGALRLHARRLHGRRHHLPQPARGDPLRPPRHRLHPRPPPLRLQPPLRRPRRRQLQPHRRRRLLRRRPHQPLALLHRAPPTSAGRRSRGRSSGHLRADAGAVQAHARRALAQGGSPHRRRRRRCAHLRHHLCRPLHHRQGTPQPHRQDSDALRHHRQPRPHRRRIHRPLHEPCQRLWLGVC

SEQ ID NO: 2924 - protein, 244 aa, Glycine max
  misc_feature (1)..(244): Ceres Seq. ID no. 14309487
MAMGAAVREAAADGVVTFLWVLCVSTLGASTAAVTTYLSLHEGIHYALLVTVSILALLLFAFNLLCDALGGASFNPTGVAAFYAAGLTSPSLFSIALRLPAQAAGAVGGALAISELMPEQYKHMLGGPSLKVDPHTGAVAEGVLTFVITFAVLCIIVKGPRNPIVKTAMLSVTTVSLVLTGAAYTGPSMNPANAFGWAYVNNLHNTWEQLYVYWICPFIGAILAAWTFRAVFPPPAPKPKTKKA

SEQ ID NO: 2925 - protein, 244 aa, Glycine max; identical to SEQ ID NO: 2924
  misc_feature (1)..(244): Ceres Seq. ID no. 16625484

SEQ ID NO: 2926 - DNA, 1092 bp, Glycine max
  misc_feature (1)..(1092): Ceres Seq. ID no. 14309511
atacactcgatcgaaccaactcattcctcctaccacctcggcaccaccagcccaagcagagccatggcgcccaacggagacaacaccgtggccaacgtccacagcggcatcgacagcaccaacaagacgctgctcaagagcgacgccctctacacctacatcctcgacaccaccgtcttcccccgtgagcacgagtgcatgcgcgacctgcgcctcatcaccgacaagcacccatggggctacatgcagtcgtcgtcggacgaggcacagctgctggggatgctgatcaagatggcgggcgccaagaagacgatcgaggtgggcgtgttcacgggctactcgctgctggccaccgcgctggcgctcccggaggacggcaaggtggtggccatcgacaccgaccgcgagtgctacgaggtgggccgccccttcatcgagaaggccggcatggcgcacaaggtggacttccgcgagggcaccggcctggcgcgcctggacgagctgctcgtcaaggacgagggcgcggccagctacgacttcgcgttcgtggacgcggacaagcccaactacgtgcgctaccacgagcagctgctgaagctggtccgcgtcggcggcaccatcatctacgacaacacgctgtggggcggcacggtggcgctgccggcgggcacgcccatgtccgacctcgacacccgcttctccgccgccctcagggacctcaacgccaagctcgccgccgacccgcgcatcgaggtctgccagctcgccatcgccgacggcgtcaccatctgccgccgcctcgtctaggcgggcgggcgtccggcccggcccgtcccggcgtgatcgtgatccgccgcgcgcctgccggcctgcgtgcgtgcctggagtccatttccttaccagccgcttatcctaatcaattgtattatttttccctgccagcgctggtttagcgtgaagcatccgatggtttcgaattttcaataacttttttggcttttcaactttgagaggagtggctgtacttactgtactatatatggtgttccgatatgcgatgacgttgtcgtgcatgtggatgtccttgtcgcc

SEQ ID NO: 2927 - protein, 268 aa, Glycine max
  misc_feature (1)..(268): Ceres Seq. ID no. 14309512
IHSIEPTHSSYHLGTTSPSRAMAPNGDNTVANVHSGIDSTNKTLLKSDALYTYILDTTVFPREHECMRDLRLITDKHPWGYMQSSSDEAQLLGMLIKMAGAKKTIEVGVFTGYSLLATALALPEDGKVVAIDTDRECYEVGRPFIEKAGMAHKVDFREGTGLARLDELLVKDEGAASYDFAFVDADKPNYVRYHEQLLKLVRVGGTIIYDNTLWGGTVALPAGTPMSDLDTRFSAALRDLNAKLAADPRIEVCQLAIADGVTICRRLV

SEQ ID NO: 2928 - protein, 247 aa, Glycine max
  misc_feature (1)..(247): Ceres Seq. ID no. 14309513
MAPNGDNTVANVHSGIDSTNKTLLKSDALYTYILDTTVFPREHECMRDLRLITDKHPWGYMQSSSDEAQLLGMLIKMAGAKKTIEVGVFTGYSLLATALALPEDGKVVAIDTDRECYEVGRPFIEKAGMAHKVDFREGTGLARLDELLVKDEGAASYDFAFVDADKPNYVRYHEQLLKLVRVGGTIIYDNTLWGGTVALPAGTPMSDLDTRFSAALRDLNAKLAADPRIEVCQLAIADGVTICRRLV

SEQ ID NO: 2929 - protein, 239 aa, Glycine max
  misc_feature (1)..(239): Ceres Seq. ID no. 14309514
MGLHAVVVGRGTAAGDADQDGGRQEDDRGGRVHGLLAAGHRAGAPGGRQGGGHRHRPRVLRGGPPLHREGRHGAQGGLPRGHRPGAPGRAARQGRGRGQLRLRVRGRGQAQLRALPRAAAEAGPRRRHHHLRQHAVGRHGGAAGGHAHVRPRHPLLRRPQGPQRQARRRPAHRGLPARHRRRRHHLPPPRLGGRASGPARPGVIVIRRAPAGLRACLESISLPAAYPNQLYYFSLPALV

SEQ ID NO: 2930 - protein, 247 aa, Glycine max; identical to SEQ ID NO: 2928
  misc_feature (1)..(247): Ceres Seq. ID no. 16625485

SEQ ID NO: 2931 - DNA, 1435 bp, Glycine max
  misc_feature (1)..(1435): Ceres Seq. ID no. 14309678
aaaacgaatctgaaaaagatggatctgaaaccgaaaccctaaaaccaatcatggatccatttccctttccacatttagctaccacgaaacgtaattttaatttctctctcaagagtcattttccgatgaaacgcaccgttcggcccctcttcgcgctcctcctcctcctcgtcttcgctgccaccctcacctcacgcgccgtcctccgccgcggcatcctctccatcgagctcgaatcccgcgtccggatccgccgccctccgccgcagctcaactccacgctcctccaccacgccgccgtcgaaatcggcgaggagaagttcaagcaagagattcagagcctcctcgacggcaacttcggcagccaagcgcgccaccgcaccttcgtctcctggcgccgcttcatccaccatgaccgcggcggcgccgaaggcgccgtggccaacctcccggggacgctccgctcgccgctcttctatcgctactggctcgacttccggaaggtcctccacgactggttccggaagcgacgattccaacccggtatcatgtccgagttgactcggtcaattaagcttccaattgattcacacaacaacaacaaactacaaaccaataacaaaaataaaaacaaatactcttcttgtgccgtagttggaaacagtggaattttgctgaatagaaactacggtagtgaaattgattcccatgaggttgtgataaggttaaacaatgctagggttgatcactttgaaaccaaggttgggaaaaaaactagcatttcattcatgaatagtaacatcttgcatttgtgtgctagaaggggagggtgcttttgccacccttatggtgataacgttccaattgtaatgtacatttgtcaagccgtgcatttcttggactacactgtgtgcaatgcttctcacaaggctcctttgttggtcactgatcctaggtttgatgtgttgtgtgcgaggattgtgaagtactattcgttgaagaggtttgtggaggagagtgggaagggtttggagaagtggggtgaggctcatgatggttctctttttcactactcttcagggatgcaggctgtgatactggctttggggatttgtgatagggttagcatttttgggtttgggaaattggcttctgctaagcaccattaccacactaaccagaaggctgagcttcacttgcatgattatgaggctgagtatgcgttttatagggaccttgtggatgggaatagggctataccgtttcttgaggacaggtttaaggttcctcctgttgttatgtatcagtgataggtgctgaactgctactgctgcaagtggtggtggtggagggcatctgtgacttgttgttctgttattgtaatacttgtgaaatgcacagatagtggaaaaagcaaaaaatactgattcaagac

SEQ ID NO: 2932 - protein, 435 aa, Glycine max
  misc_feature (1)..(435): Ceres Seq. ID no. 14309679
NESEKDGSETETLKPIMDPFPFPHLATTKRNFNFSLKSHFPMKRTVRPLFALLLLLVFAATLTSRAVLRRGILSIELESRVRIRRPPPQLNSTLLHHAAVEIGEEKFKQEIQSLLDGNFGSQARHRTFVSWRRFIHHDRGGAEGAVANLPGTLRSPLFYRYWLDFRKVLHDWFRKRRFQPGIMSELTRSIKLPIDSHNNNKLQTNNKNKNKYSSCAVVGNSGILLNRNYGSEIDSHEVVIRLNNARVDHFETKVGKKTSISFMNSNILHLCARRGGCFCHPYGDNVPIVMYICQAVHFLDYTVCNASHKAPLLVTDPRFDVLCARIVKYYSLKRFVEESGKGLEKWGEAHDGSLFHYSSGMQAVILALGICDRVSIFGFGKLASAKHHYHTNQKAELHLHDYEAEYAFYRDLVDGNRAIPFLEDRFKVPPVVMYQ

SEQ ID NO: 2933 - protein, 419 aa, Glycine max
  misc_feature (1)..(419): Ceres Seq. ID no. 14309680
MDPFPFPHLATTKRNFNFSLKSHFPMKRTVRPLFALLLLLVFAATLTSRAVLRRGILSIELESRVRIRRPPPQLNSTLLHHAAVEIGEEKFKQEIQSLLDGNFGSQARHRTFVSWRRFIHHDRGGAEGAVANLPGTLRSPLFYRYWLDFRKVLHDWFRKRRFQPGIMSELTRSIKLPIDSHNNNKLQTNNKNKNKYSSCAVVGNSGILLNRNYGSEIDSHEVVIRLNNARVDHFETKVGKKTSISFMNSNILHLCARRGGCFCHPYGDNVPIVMYICQAVHFLDYTVCNASHKAPLLVTDPRFDVLCARIVKYYSLKRFVEESGKGLEKWGEAHDGSLFHYSSGMQAVILALGICDRVSIFGFGKLASAKHHYHTNQKAELHLHDYEAEYAFYRDLVDGNRAIPFLEDRFKVPPVVMYQ

SEQ ID NO: 2934 - protein, 394 aa, Glycine max
  misc_feature (1)..(394): Ceres Seq. ID no. 14309681
MKRTVRPLFALLLLLVFAATLTSRAVLRRGILSIELESRVRIRRPPPQLNSTLLHHAAVEIGEEKFKQEIQSLLDGNFGSQARHRTFVSWRRFIHHDRGGAEGAVANLPGTLRSPLFYRYWLDFRKVLHDWFRKRRFQPGIMSELTRSIKLPIDSHNNNKLQTNNKNKNKYSSCAVVGNSGILLNRNYGSEIDSHEVVIRLNNARVDHFETKVGKKTSISFMNSNILHLCARRGGCFCHPYGDNVPIVMYICQAVHFLDYTVCNASHKAPLLVTDPRFDVLCARIVKYYSLKRFVEESGKGLEKWGEAHDGSLFHYSSGMQAVILALGICDRVSIFGFGKLASAKHHYHTNQKAELHLHDYEAEYAFYRDLVDGNRAIPFLEDRFKVPPVVMYQ

SEQ ID NO: 2935 - protein, 394 aa, Glycine max; identical to SEQ ID NO: 2934
  misc_feature (1)..(394): Ceres Seq. ID no. 16625486

SEQ ID NO: 2936 - DNA, 1472 bp, Glycine max
  misc_feature (1)..(1472): Ceres Seq. ID no. 14310423
aaactcatcctctttgcctttggaaagggtcccttatcctccaatcctcccctctctttgcctcacttcgtccccatcgcatgcctccccatcaaattcgaacatgacccaaaacaccaaatcccccaaaagaaacacaaatctcccttcagttatgcttcaacctcaatggttattatattggctgctttaattcctctctacgggaaaaaagagtattttcacccaaagtttgtatttttcttgtacggcctccacatgtacatagggttagagttcattttcgccacggtctccgcagcaacgagaaaactcatcggggttcagctggaaccacagttcaaggagccatacctatgcacttcgttacaagatttctgggggagaaggtggaacatcatggtcaaccgtgttcttcaccccaccgtgtacgatcccgtgaagaatctctctgcacgagtccttgggagaaagtgggccccacttcctgcaattctcgcttcctttgccgtgtccgggatgatgcacgagctcgtgttttactacatcaagcgggaaaagcgcacgtgggaggtatgggagccctcgtgggacgccacgtgtttctttctcattcacggggtgtgtgtggccatggaggttggaatcaagaagagtctcagagggaaaaaacagtggcaggtgcccagggtgctgtcgtggatgctaacgttgctgtttgtgctctacacagcgatggccttctttctgcccgcgctagcgcggtgtcgcgtttatgagaaggcaaccagagagttgaccgctttgacccagtttctcatggatgtttacggtctttattcactccaaggatcacataaatgaacattgttgctttggtttcattcctttctttttcatttgtttcaaatttgtaattgacacctaagactcatatatttcaattccaaattctctttcattctcaagattgggatattttgatcctcccgtttcatgccatatagccttcactgcataaattgagaaaaatccctctaagcaacagcggtcctagctagattcacgcataattacgtaagccaccattaccaaccatgttttacaccttaaactttcgtcatttttcactaatgaaaagacaaatacaaacttatacaatacaatccatttaattatgggtttaaccgaaccactacaaatcacgtcaaaattgctcgcattacgtaaacaaggctcatcattattgcataggcttgatcaattttactttcatgtcattgtctcatatcatgacattatcatttcagcaacacgagtaccaaatccaaaaaaaagaaaaatactatctagcaggaatattgcatcctgttatattaaatttttacatgacatataaatattcacaaatattaataaagtaaccaatttataaaaagataattataaaatatttttcacaataaaataac

SEQ ID NO: 2937 - protein, 287 aa, Glycine max
  misc_feature (1)..(287): Ceres Seq. ID no. 14310424
KLILFAFGKGPLSSNPPLSLPHFVPIACLPIKFEHDPKHQIPQKKHKSPFSYASTSMVIILAALIPLYGKKEYFHPKFVFFLYGLHMYIGLEFIFATVSAATRKLIGVQLEPQFKEPYLCTSLQDFWGRRWNIMVNRVLHPTVYDPVKNLSARVLGRKWAPLPAILASFAVSGMMHELVFYYIKREKRTWEVWEPSWDATCFFLIHGVCVAMEVGIKKSLRGKKQWQVPRVLSWMLTLLFVLYTAMAFFLPALARCRVYEKATRELTALTQFLMDVYGLYSLQGSHK

SEQ ID NO: 2938 - protein, 231 aa, Glycine max
  misc_feature (1)..(231): Ceres Seq. ID no. 14310425
MVIILAALIPLYGKKEYFHPKFVFFLYGLHMYIGLEFIFATVSAATRKLIGVQLEPQFKEPYLCTSLQDFWGRRWNIMVNRVLHPTVYDPVKNLSARVLGRKWAPLPAILASFAVSGMMHELVFYYIKREKRTWEVWEPSWDATCFFLIHGVCVAMEVGIKKSLRGKKQWQVPRVLSWMLTLLFVLYTAMAFFLPALARCRVYEKATRELTALTQFLMDVYGLYSLQGSHK

SEQ ID NO: 2939 - protein, 201 aa, Glycine max
  misc_feature (1)..(201): Ceres Seq. ID no. 14310426
MYIGLEFIFATVSAATRKLIGVQLEPQFKEPYLCTSLQDFWGRRWNIMVNRVLHPTVYDPVKNLSARVLGRKWAPLPAILASFAVSGMMHELVFYYIKREKRTWEVWEPSWDATCFFLIHGVCVAMEVGIKKSLRGKKQWQVPRVLSWMLTLLFVLYTAMAFFLPALARCRVYEKATRELTALTQFLMDVYGLYSLQGSHK

SEQ ID NO: 2940 - DNA, 1613 bp, Glycine max
  misc_feature (1)..(1613): Ceres Seq. ID no. 14310713
gtgttctcttcgaaagcggaatcaatcaatccctcatctcattgctgagatctgcaagctggctatggactacgaaccctacgacagtagcggaactgatgatgaccttccaccaacccatcaaaatagaatttccaggggaggaggaggacgtctcgctgggaatgggagatctgctgttggttcaattccttacccaaggatgtatggtgaaattgatatggagacccaaattcatcagcttgagcaagaagcatacagttcagttctaagagcctttaaagctcaagccgatgccattacttgggagaaagaaagtttgattacagagctgagaaaagaactgagattgtcaaatgaggagcacagagaacttctaggtcgagttaatgctgatgatgtgatacggaggataagggaatggagacaggcaggtggccatcagcctggtgtacttagcactggtcaaggacttcatgattcaattcccagtcccacagtctctgcttctcgcaaaaagcagaagattacaccatctgtaccaccatcacgatctttttgcggaccttctcctccatttcacccccaaacactgactgcgccccaccaaccatcttctgcagcaaaacgtggatctgctcgtgggtcaaagggaaagaagcacaaacctggtcaaatattacctggtgtatcttcaatgaagcagtatccttcgtcaggaccaggtggaaggaatcaggtacctaatagagctgccatgggtgagcatgccgagggagcatcatttgattcgttggttggtaggagagtgcggacaaagtggcctgacgacaataacttctatgaagctgttatcacgaactacaatccagctgatggacgacataatctggtctatgacatggggagtgcaaatgaaacatgggaatgggttaatctatcagagatatctcctgaagatattcagtgggtaggtgaggatcctggaatcaatcatcgtgggggttttgggggccctggtcatgggatgaataggtctgttggacgagatggtgttccaggagctggaagaggtagaggagcagcaaaggggcaatccagaaaagattttttgtcatcacagaatggcataggaaagaaggcgcctgatgatatacaaatacttcacacagacacactaatcaaggaggtggagaaggtattcagtgcaaatcaccctgatccccttgaagttgagaaagcaaagaaagtattgaaggatcatgagcaagctcttattgatgcaattgcaagacttaatgatctttctgatggtgaaagtgatggggctggggctgcccaccatttctcacatgctcaatcaatggatcgagagtgatgagcacctgttaatttgtacaatgagcagaggaggcattaagatagcataattctggaaaagggtgtatttctattgtattatcacataaagattattaccctctaacagtttatagctgtaggcatggttcttgtggattaggcattatgtaggatggcaaatattgtagtttggtaataattatttatttcagtttgaaagttgacctaggaccagctgatgatacttgtac

SEQ ID NO: 2941 - protein, 458 aa, Glycine max
  misc_feature (1)..(458): Ceres Seq. ID no. 14310714
CSLRKRNQSIPHLIAEICKLAMDYEPYDSSGTDDDLPPTHQNRISRGGGGRLAGNGRSAVGSIPYPRMYGEIDMETQIHQLEQEAYSSVLRAFKAQADAITWEKESLITELRKELRLSNEEHRELLGRVNADDVIRRIREWRQAGGHQPGVLSTGQGLHDSIPSPTVSASRKKQKITPSVPPSRSFCGPSPPFHPQTLTAPHQPSSAAKRGSARGSKGKKHKPGQILPGVSSMKQYPSSGPGGRNQVPNRAAMGEHAEGASFDSLVGRRVRTKWPDDNNFYEAVITNYNPADGRHNLVYDMGSANETWEWVNLSEISPEDIQWVGEDPGINHRGGFGGPGHGMNRSVGRDGVPGAGRGRGAAKGQSRKDFLSSQNGIGKKAPDDIQILHTDTLIKEVEKVFSANHPDPLEVEKAKKVLKDHEQALIDAIARLNDLSDGESDGAGAAHHFSHAQSMDRE

SEQ ID NO: 2942 - protein, 437 aa, Glycine max
  misc_feature (1)..(437): Ceres Seq. ID no. 14310715
MDYEPYDSSGTDDDLPPTHQNRISRGGGGRLAGNGRSAVGSIPYPRMYGEIDMETQIHQLEQEAYSSVLRAFKAQADAITWEKESLITELRKELRLSNEEHRELLGRVNADDVIRRIREWRQAGGHQPGVLSTGQGLHDSIPSPTVSASRKKQKITPSVPPSRSFCGPSPPFHPQTLTAPHQPSSAAKRGSARGSKGKKHKPGQILPGVSSMKQYPSSGPGGRNQVPNRAAMGEHAEGASFDSLVGRRVRTKWPDDNNFYEAVITNYNPADGRHNLVYDMGSANETWEWVNLSEISPEDIQWVGEDPGINHRGGFGGPGHGMNRSVGRDGVPGAGRGRGAAKGQSRKDFLSSQNGIGKKAPDDIQILHTDTLIKEVEKVFSANHPDPLEVEKAKKVLKDHEQALIDAIARLNDLSDGESDGAGAAHHFSHAQSMDRE

SEQ ID NO: 2943 - protein, 391 aa, Glycine max
  misc_feature (1)..(391): Ceres Seq. ID no. 14310716
MYGEIDMETQIHQLEQEAYSSVLRAFKAQADAITWEKESLITELRKELRLSNEEHRELLGRVNADDVIRRIREWRQAGGHQPGVLSTGQGLHDSIPSPTVSASRKKQKITPSVPPSRSFCGPSPPFHPQTLTAPHQPSSAAKRGSARGSKGKKHKPGQILPGVSSMKQYPSSGPGGRNQVPNRAAMGEHAEGASFDSLVGRRVRTKWPDDNNFYEAVITNYNPADGRHNLVYDMGSANETWEWVNLSEISPEDIQWVGEDPGINHRGGFGGPGHGMNRSVGRDGVPGAGRGRGAAKGQSRKDFLSSQNGIGKKAPDDIQILHTDTLIKEVEKVFSANHPDPLEVEKAKKVLKDHEQALIDAIARLNDLSDGESDGAGAAHHFSHAQSMDRE

SEQ ID NO: 2944 - protein, 385 aa, Glycine max
  misc_feature (1)..(385): Ceres Seq. ID no. 16625489
METQIHQLEQEAYSSVLRAFKAQADAITWEKESLITELRKELRLSNEEHRELLGRVNADDVIRRIREWRQAGGHQPGVLSTGQGLHDSIPSPTVSASRKKQKITPSVPPSRSFCGPSPPFHPQTLTAPHQPSSAAKRGSARGSKGKKHKPGQILPGVSSMKQYPSSGPGGRNQVPNRAAMGEHAEGASFDSLVGRRVRTKWPDDNNFYEAVITNYNPADGRHNLVYDMGSANETWEWVNLSEISPEDIQWVGEDPGINHRGGFGGPGHGMNRSVGRDGVPGAGRGRGAAKGQSRKDFLSSQNGIGKKAPDDIQILHTDTLIKEVEKVFSANHPDPLEVEKAKKVLKDHEQALIDAIARLNDLSDGESDGAGAAHHFSHAQSMDRE

SEQ ID NO: 2945 - DNA, 726 bp, Glycine max
  misc_feature (1)..(726): Ceres Seq. ID no. 14310788
actttcactttcatagtttctttccttctctctctctggagctagcgcgagtgaccggagcggcgaagatagagtcagatcggaagcggaagaaggcgtcgacctcggcggcggagaaggagaaccggaataagcataagaagtcgaagatgtcgtcgtcgtcgtcgaagggtggtggcggtattgaggttagggcttcgcacatattgataaagcacgaaggttctagaaggaaggcctcgtggaaggatcctgaaggtcgcatcatcaagagcacaaccagagaaaacgcggtttctcagctcaaggccctccgcgacgacatcgtttcgggcaaggcctccttcgaggacatcgcctctcgcttctccgattgcagctccgccaagcgcgggggtgatctcggtccttttggtcgtggccagatgcagaagccttttgaagaagcaacttttgctcttaaagttggtgaaattagtgacattgtggatactgacagtggagtccacattattaagagaacaaaatgagattattacacggagtaatctcctaataaggagagacattaacatctgtagaatatttccaggattcttgctactcaagatctgttgatatatgttttagacatggcggtgtcttgtttttggatgatatattgtttttgtgacaattaaaaacatatgcttgtaattttgaaagacaattataaggtttggattc

SEQ ID NO: 2946 - protein, 175 aa, Glycine max
  misc_feature (1)..(175): Ceres Seq. ID no. 14310789
FHFHSFFPSLSLELARVTGAAKIESDRKRKKASTSAAEKENRNKHKKSKMSSSSSKGGGGIEVRASHILIKHEGSRRKASWKDPEGRIIKSTTRENAVSQLKALRDDIVSGKASFEDIASRFSDCSSAKRGGDLGPFGRGQMQKPFEEATFALKVGEISDIVDTDSGVHIIKRTK

SEQ ID NO: 2947 - protein, 126 aa, Glycine max
  misc_feature (1)..(126): Ceres Seq. ID no. 14310790
MSSSSSKGGGGIEVRASHILIKHEGSRRKASWKDPEGRIIKSTTRENAVSQLKALRDDIVSGKASFEDIASRFSDCSSAKRGGDLGPFGRGQMQKPFEEATFALKVGEISDIVDTDSGVHIIKRTK

SEQ ID NO: 2948 - protein, 126 aa, Glycine max; identical to SEQ ID NO: 2947
  misc_feature (1)..(126): Ceres Seq. ID no. 16625490

SEQ ID NO: 2949 - DNA, 1191 bp, Glycine max
  misc_feature (1)..(1191): Ceres Seq. ID no. 14310819
gaactcattcttcttcaactcaacagagcaagggttcgcactcgcagattcttgagcaagaataatggggaagaaaagaaaacacagtgagactactcaagctgtagcacaacccaaaaaggaagaggctgctccagagagaccggctaggacccttttggggtggaaggataagaatcaagttgaggatgattcaccaatatttaggaacaaagagaagctattggtcacttgctctaggcgcatcaattacaggtaccggcatttgatgttgaatttggtcacacttttgcctcattgtaagaaggataacaaagttgaatcaaaggaaactaaaggagccaccctcaacgagcttgttgagctaaaaaattgttcctcttgtttattttttgagtgcaggaagcataaagatctttatctctggatggcaaaatgccccaatggcccatctgtaaagtttctagttagtgccgttcacacaatggaggaattgaagctaacgggaaatcacctacaaggttcgcgtccaattttgacattttcagcaaattttgaaaaagatgcacattggaaactattaaaggagatgttgttacagatatttgaaacaccaaaggaccacagaaaggccaagcctttccatgatcacgtttttgttttctcaatagttgatgaccatatatggttccggaattatcagatctctgctcatcataatgagtcggacaaattacctagaggtggccttgataaaatgacattgattgaggttggtccgcgattctgcttgaacccaattaaaatatttggtggcagttttggaggcccaactttatatgagaatccgctctatgtgtcaccaaatcagattggagctttggagaaaaagaagaagtctggaaagtttgcaaagaaggtcaaagcaaagacaaggaggaaaatgcacgagatgtccaatcctctggagcctgatgagtttgcagatatgtggaaagattgattttaaatacaaccgcagctaccacataaaagaaaaacccatatttctcctatattatcctcgcattatattccataacattaaagggagacttttgtgattctataatgttattttcagtaatttcaggtggggtcgggttattctcttttatcagacattggccctagtggaaattaaattttgac

SEQ ID NO: 2950 - protein, 312 aa, Glycine max
  misc_feature (1)..(312): Ceres Seq. ID no. 14310820
MGKKRKHSETTQAVAQPKKEEAAPERPARTLLGWKDKNQVEDDSPIFRNKEKLLVTCSRRINYRYRHLMLNLVTLLPHCKKDNKVESKETKGATLNELVELKNCSSCLFFECRKHKDLYLWMAKCPNGPSVKFLVSAVHTMEELKLTGNHLQGSRPILTFSANFEKDAHWKLLKEMLLQIFETPKDHRKAKPFHDHVFVFSIVDDHIWFRNYQISAHHNESDKLPRGGLDKMTLIEVGPRFCLNPIKIFGGSFGGPTLYENPLYVSPNQIGALEKKKKSGKFAKKVKAKTRRKMHEMSNPLEPDEFADMWKD

SEQ ID NO: 2951 - protein, 244 aa, Glycine max
  misc_feature (1)..(244): Ceres Seq. ID no. 14310821
MLNLVTLLPHCKKDNKVESKETKGATLNELVELKNCSSCLFFECRKHKDLYLWMAKCPNGPSVKFLVSAVHTMEELKLTGNHLQGSRPILTFSANFEKDAHWKLLKEMLLQIFETPKDHRKAKPFHDHVFVFSIVDDHIWFRNYQISAHHNESDKLPRGGLDKMTLIEVGPRFCLNPIKIFGGSFGGPTLYENPLYVSPNQIGALEKKKKSGKFAKKVKAKTRRKMHEMSNPLEPDEFADMWKD

SEQ ID NO: 2952 - protein, 191 aa, Glycine max
  misc_feature (1)..(191): Ceres Seq. ID no. 14310822
MAKCPNGPSVKFLVSAVHTMEELKLTGNHLQGSRPILTFSANFEKDAHWKLLKEMLLQIFETPKDHRKAKPFHDHVFVFSIVDDHIWFRNYQISAHHNESDKLPRGGLDKMTLIEVGPRFCLNPIKIFGGSFGGPTLYENPLYVSPNQIGALEKKKKSGKFAKKVKAKTRRKMHEMSNPLEPDEFADMWKD

SEQ ID NO: 2953 - protein, 312 aa, Glycine max; identical to SEQ ID NO: 2950
  misc_feature (1)..(312): Ceres Seq. ID no. 16625491

SEQ ID NO: 2954 - DNA, 1633 bp, Glycine max
  misc_feature (1)..(1633): Ceres Seq. ID no. 14310834
gggagaggtgaattcgcagacgaacattccgctcccatcgcatctgtaacaatggaagcgcgccatgcaactcttggtcgacgaacgttggaggaaattcggcaaaagagggccgcggagagattgagtaaaacctcttcgggaccagatctcacgcaggttcccagcacctccgagattgcgggaatgagcaagtccgagagcgcaaataagctctctgagacagatcttagtgctctattgtctcaattgaaaggactgcaaaagaagaacacggagttggaggaagaaaacacaaaaattagtttaaagcttcaaacgatggaaattgataatgagacaatgcacaagcaattaaatgatgtggaacaaaatacagtgccatctctaaggaaagctctgagggatgtcgcaatggagaaagatgctgcagttgttgcacgggaggacctttcagcacagcttcgtaccctgaagaaacgtcttaaggaagcagaagatgagcaatatcgtgccgaggaagatgcagcagcgttgagagcagaattgaactcaattcagcaacaagcaatgactaatacagttagcacaatttcatcatttggtaatccacccgatcattttcaaattcaaagattacaaaaggagctagatgatttaaaactggaactgcagcgagaatcacttttgaggcaccaggagcaggaacaattagcaaaagagcaagcctgcattgcctcactgatatctgaaaagcaggagttggaagagaaactcatgtccatatctagagagcctgcagaagcctcagataaagctgctcacaaagcattttctttggaagacaagcagaaacttgataggcagttgtatgatatggctatagccattgagaggttggaaagcagtaggcagaaacttctaatggagattgactcacaatctacagaaatagagaggctttttgaggaaaattctagtctctcaaattcataccaagaggcaattggagcagcagcgagatgggaaaaccaggtgatggattgtcttaagcaaaatgaagagcttcgtgggattctagataatttgagaatggaacaggctaggggtttgccagactcttctaaaaatggggcacatgagattgcttccttggcatctatgaagggccaacttgtgacagaacagagcagagcagaggcgctatctgcagaagtcatgcagctttctgctcaacttgaacaagtcaaacaagcatatgatggtcttgcacgcttctataggccagtgctgcgcaacattgaaagcaatctcataaaaatgaagcaagacaactcgttggctgtacgatgatggtaatgagcagtttcatgatgatattccggttgtaattgtgaagcccttctttgaagacatttccaatgcccacagaattgtttttaaccatttgatgttattagtttggtaaaagtggaacgagatggctcagtaactggtggtaatggttcttcattcttgagctgttttgttttgtggtaatactctgcataagaagcccttgttatacccaaacgtgaatttgtaaaacttgtcattctttatactaatattaatttgtaaacaagcacaaccg

SEQ ID NO: 2955 - protein, 450 aa, Glycine max
  misc_feature (1)..(450): Ceres Seq. ID no. 14310835
GRGEFADEHSAPIASVTMEARHATLGRRTLEEIRQKRAAERLSKTSSGPDLTQVPSTSEIAGMSKSESANKLSETDLSALLSQLKGLQKKNTELEEENTKISLKLQTMEIDNETMHKQLNDVEQNTVPSLRKALRDVAMEKDAAVVAREDLSAQLRTLKKRLKEAEDEQYRAEEDAAALRAELNSIQQQAMTNTVSTISSFGNPPDHFQIQRLQKELDDLKLELQRESLLRHQEQEQLAKEQACIASLISEKQELEEKLMSISREPAEASDKAAHKAFSLEDKQKLDRQLYDMAIAIERLESSRQKLLMEIDSQSTEIERLFEENSSLSNSYQEAIGAAARWENQVMDCLKQNEELRGILDNLRMEQARGLPDSSKNGAHEIASLASMKGQLVTEQSRAEALSAEVMQLSAQLEQVKQAYDGLARFYRPVLRNIESNLIKMKQDNSLAVR

SEQ ID NO: 2956 - protein, 433 aa, Glycine max
  misc_feature (1)..(433): Ceres Seq. ID no. 14310836
MEARHATLGRRTLEEIRQKRAAERLSKTSSGPDLTQVPSTSEIAGMSKSESANKLSETDLSALLSQLKGLQKKNTELEEENTKISLKLQTMEIDNETMHKQLNDVEQNTVPSLRKALRDVAMEKDAAVVAREDLSAQLRTLKKRLKEAEDEQYRAEEDAAALRAELNSIQQQAMTNTVSTISSFGNPPDHFQIQRLQKELDDLKLELQRESLLRHQEQEQLAKEQACIASLISEKQELEEKLMSISREPAEASDKAAHKAFSLEDKQKLDRQLYDMAIAIERLESSRQKLLMEIDSQSTEIERLFEENSSLSNSYQEAIGAAARWENQVMDCLKQNEELRGILDNLRMEQARGLPDSSKNGAHEIASLASMKGQLVTEQSRAEALSAEVMQLSAQLEQVKQAYDGLARFYRPVLRNIESNLIKMKQDNSLAVR

SEQ ID NO: 2957 - protein, 388 aa, Glycine max
  misc_feature (1)..(388): Ceres Seq. ID no. 14310837
MSKSESANKLSETDLSALLSQLKGLQKKNTELEEENTKISLKLQTMEIDNETMHKQLNDVEQNTVPSLRKALRDVAMEKDAAVVAREDLSAQLRTLKKRLKEAEDEQYRAEEDAAALRAELNSIQQQAMTNTVSTISSFGNPPDHFQIQRLQKELDDLKLELQRESLLRHQEQEQLAKEQACIASLISEKQELEEKLMSISREPAEASDKAAHKAFSLEDKQKLDRQLYDMAIAIERLESSRQKLLMEIDSQSTEIERLFEENSSLSNSYQEAIGAAARWENQVMDCLKQNEELRGILDNLRMEQARGLPDSSKNGAHEIASLASMKGQLVTEQSRAEALSAEVMQLSAQLEQVKQAYDGLARFYRPVLRNIESNLIKMKQDNSLAVR

SEQ ID NO: 2958 - protein, 433 aa, Glycine max; identical to SEQ ID NO: 2956
  misc_feature (1)..(433): Ceres Seq. ID no. 16625492

SEQ ID NO: 2959 - DNA, 1409 bp, Glycine max
  misc_feature (1)..(1409): Ceres Seq. ID no. 14311025
gctttgccccttgttttcgttctgctatggcacccgatgccgccgccgccgtcgccgccaacggcaaaaagagaagacgctatcttcctcacaataaggcagtgaagaagaagggttcgtaccctctgcggcctggcgtgcaaggctttttcatcacttgcgatggcggcagagaacaccaagcctctcgtgaagctctcaatattctcgattccttttatgaagagctagttgatggggaaaaggagttacccagcaaacctttaaataaaaaaatcacgtttgctgattctgactcttctagtagtgatggtgaggaagaggaggaggaggaggaggaggaggaggaggaggaggaggaggccgtgcatgatggggatgaggaaaagggggacaaaaagccaaaattggatacttctagtgacgacaatgccagtcatgacgatggagcaggtgaaaaatcagatcctcataacgttgatgaaccgcacactcaggaagaaaataaaacttgtgataataaagggaataatggcaatcttaagactacaaaagggacagcagatgatctaccagctgtgaaacagtgctgcaaaacaaacgtgcctgcatgtaattttagtgacaaagtggaacacaagtctattgataagttaattgaagaagaattcaaagaattgggagacaagaataagaggcgctttgtcaagcttgattctggttgtaatggtgtagtatttgttcaaatgcggaagaaagatggagaccgaagccccaaggatatagttcaccggatagtgacatcagcagcatcaacagggaaacatatgtcaaggtttattttgagaattttgccaattgaagtctcatgttatgcttcaaaggaggaaatttcaagaacaatcaagcctcttgtggaacagtactttcctgtggaaactcaaaatccactcaagtttgctgtactgtatgaggcacgggcaaatactggtgttgacaggatggaaatcatcgatgctgtggcaaagtcagttcctggaccccataaagttgatctcaaaaatcctgataaaactatagtagttgaaattgccaggactgtgtgcttgatcggggtcattgagaaatataaggagctttccaagtacaatctgaggcagttaacatcacgtaaagactaagccttcttgcagcattatagtacctttcccttttgcttcatgttgatactctggtctgtgactgttgttgtcatttggttaagtgttagattagatgactcttgcagctagtctcctttgactgagtgtagttagtaagttctcacaaatcaaacgagaaacccttacatggaagtagagttatatacgctcaatccatttaaatatcatagttggatttacaataag

SEQ ID NO: 2960 - protein, 392 aa, Glycine max
  misc_feature (1)..(392): Ceres Seq. ID no. 14311026
FAPCFRSAMAPDAAAAVAANGKKRRRYLPHNKAVKKKGSYPLRPGVQGFFITCDGGREHQASREALNILDSFYEELVDGEKELPSKPLNKKITFADSDSSSSDGEEEEEEEEEEEEEEEEAVHDGDEEKGDKKPKLDTSSDDNASHDDGAGEKSDPHNVDEPHTQEENKTCDNKGNNGNLKTTKGTADDLPAVKQCCKTNVPACNFSDKVEHKSIDKLIEEEFKELGDKNKRRFVKLDSGCNGVVFVQMRKKDGDRSPKDIVHRIVTSAASTGKHMSRFILRILPIEVSCYASKEEISRTIKPLVEQYFPVETQNPLKFAVLYEARANTGVDRMEIIDAVAKSVPGPHKVDLKNPDKTIVVEIARTVCLIGVIEKYKELSKYNLRQLTSRKD

SEQ ID NO: 2961 - protein, 384 aa, Glycine max
  misc_feature (1)..(384): Ceres Seq. ID no. 14311027
MAPDAAAAVAANGKKRRRYLPHNKAVKKKGSYPLRPGVQGFFITCDGGREHQASREALNILDSFYEELVDGEKELPSKPLNKKITFADSDSSSSDGEEEEEEEEEEEEEEEEAVHDGDEEKGDKKPKLDTSSDDNASHDDGAGEKSDPHNVDEPHTQEENKTCDNKGNNGNLKTTKGTADDLPAVKQCCKTNVPACNFSDKVEHKSIDKLIEEEFKELGDKNKRRFVKLDSGCNGVVFVQMRKKDGDRSPKDIVHRIVTSAASTGKHMSRFILRILPIEVSCYASKEEISRTIKPLVEQYFPVETQNPLKFAVLYEARANTGVDRMEIIDAVAKSVPGPHKVDLKNPDKTIVVEIARTVCLIGVIEKYKELSKYNLRQLTSRKD

SEQ ID NO: 2962 - protein, 384 aa, Glycine max; identical to SEQ ID NO: 2961
  misc_feature (1)..(384): Ceres Seq. ID no. 16625496

SEQ ID NO: 2963 - DNA, 1033 bp, Glycine max
  misc_feature (1)..(1033): Ceres Seq. ID no. 14311392
aaaaatcattcattcattgaatcccccaaaccgccatttcctttgggtttatggagtgagcgtggaagaggaaagagcaagcagcaacagctcgtggcggttccgattatttattaagatcaatgttgcatgcagtatctgcccctagcttttgtttaagctatcccgggaaccttcattatcctccttcttcatttcaaaaaacatgtttttctgttcgttgttcggtttcacagacaaaaaatggagctaaagtggaatatactccttggctcattgttggcttgggcaatcctggtaacaaataccatggcaccaggcacaatgttggatttgaaataattgatagcctttctcgagcagaagggattcagatgaacacaatacagtcaaaggccctcattggaataggttctattggtgaagtaccgattttgctggcaaagccccaaacatacatgaatttcagtggggaatcggttgggccacttgctgcatattatcaagtacccttgcgtcatattctactagtttttgatgagacaagccttccaaatggtgttttaaggcttcaacctaaaggcggacatggacatcacaatggattgaaaaatgtaatgggccatttggatggttgcagtgcttttcctcgacttgcagtcggaattggaaatcctcctggaactatggatttaagagcttatcttctacaaaaattcagtgtagaggaacgaaagcagattgacgcttcattggagcaagcagttgcagcagtaaggaccgtagtactcaatggttttgaccagcatgtcaatagattcaatttaggacaaaaatacaagtaccataaagtttaaaatgaaccgccaagatgaaattggtggttacattgttgtgtatgttagcagatagcagttatacttcacaaacttgtcatgactagtgcatttttttgtaaagcacaccagtggtcatattctagctctggcagatagttgtttcattgtgagaaatactagttgttgaattgttg

SEQ ID NO: 2964 - protein, 244 aa, Glycine max
  misc_feature (1)..(244): Ceres Seq. ID no. 14311393
MLHAVSAPSFCLSYPGNLHYPPSSFQKTCFSVRCSVSQTKNGAKVEYTPWLIVGLGNPGNKYHGTRHNVGFEIIDSLSRAEGIQMNTIQSKALIGIGSIGEVPILLAKPQTYMNFSGESVGPLAAYYQVPLRHILLVFDETSLPNGVLRLQPKGGHGHHNGLKNVMGHLDGCSAFPRLAVGIGNPPGTMDLRAYLLQKFSVEERKQIDASLEQAVAAVRTVVLNGFDQHVNRFNLGQKYKYHKV

SEQ ID NO: 2965 - protein, 160 aa, Glycine max
  misc_feature (1)..(160): Ceres Seq. ID no. 14311394
MNTIQSKALIGIGSIGEVPILLAKPQTYMNFSGESVGPLAAYYQVPLRHILLVFDETSLPNGVLRLQPKGGHGHHNGLKNVMGHLDGCSAFPRLAVGIGNPPGTMDLRAYLLQKFSVEERKQIDASLEQAVAAVRTVVLNGFDQHVNRFNLGQKYKYHKV

SEQ ID NO: 2966 - protein, 132 aa, Glycine max
  misc_feature (1)..(132): Ceres Seq. ID no. 14311395
MNFSGESVGPLAAYYQVPLRHILLVFDETSLPNGVLRLQPKGGHGHHNGLKNVMGHLDGCSAFPRLAVGIGNPPGTMDLRAYLLQKFSVEERKQIDASLEQAVAAVRTVVLNGFDQHVNRFNLGQKYKYHKV

SEQ ID NO: 2967 - protein, 244 aa, Glycine max; identical to SEQ ID NO: 2964
  misc_feature (1)..(244): Ceres Seq. ID no. 16625499

SEQ ID NO: 2968 - DNA, 910 bp, Glycine max
  misc_feature (1)..(910): Ceres Seq. ID no. 14311473
ctttgctctagcttccctaatcgtccttccctgtacgcgctcgatcttgccgaccgaggcgatggcggcggtacccgcggtgaggttcccgttgttcggcctcgtacggctgcttggcgtggccgcggcagcggtcatcctcgtctgggccgtccacttccgcggcggtatggcgctctccgccgagaaagacaagctcctcatcttcaacgtacaccctgtgctaatgctgattggattggtagtcctgaatgctgaagctcttttggcgtacaagacagtgccaggaaccaagaaactgaagaagttagtacacattacgttgcagttccttgccatgtttttgagtctagttggcctctgggctgtctggaagttccacgatgaaaaagaaattgaccacttgtacacactccactcctggttgggcctttcttgcatcatcatcttcagcttgcagtgggctgctggatttttgaccttctggtaccctggaggatctagaagcgacagagcgtccctgctcccctggcatgtgttcttgggtgtatttctctatgttcttgccatcgccacaagcgtgactggacttctggagaagtcaatcttcatgcagagtgcaaaaatgatcgggcgcttctccacagaagcgatgctgatgaactcactggggatgatgctgatactactaggagctcttgttattcttgctatttttaaccctggagctggcaagatcaacacgtaccgaggttcttcagagtgagagggattggaagggatatgtgagtatgttgtttggctgcagctagtcataaactacacctttcttgcttcaacctaggaaattttatatgtatgtgtcattgccctctgggctgttattttttaatctgcgaattgaacggtc

SEQ ID NO: 2969 - protein, 254 aa, Glycine max
  misc_feature (1)..(254): Ceres Seq. ID no. 14311474
FALASLIVLPCTRSILPTEAMAAVPAVRFPLFGLVRLLGVAAAAVILVWAVHFRGGMALSAEKDKLLIFNVHPVLMLIGLVVLNAEALLAYKTVPGTKKLKKLVHITLQFLAMFLSLVGLWAVWKFHDEKEIDHLYTLHSWLGLSCIIIFSLQWAAGFLTFWYPGGSRSDRASLLPWHVFLGVFLYVLAIATSVTGLLEKSIFMQSAKMIGRFSTEAMLMNSLGMMLILLGALVILAIFNPGAGKINTYRGSSE

SEQ ID NO: 2970 - protein, 234 aa, Glycine max
  misc_feature (1)..(234): Ceres Seq. ID no. 14311475
MAAVPAVRFPLFGLVRLLGVAAAAVILVWAVHFRGGMALSAEKDKLLIFNVHPVLMLIGLVVLNAEALLAYKTVPGTKKLKKLVHITLQFLAMFLSLVGLWAVWKFHDEKEIDHLYTLHSWLGLSCIIIFSLQWAAGFLTFWYPGGSRSDRASLLPWHVFLGVFLYVLAIATSVTGLLEKSIFMQSAKMIGRFSTEAMLMNSLGMMLILLGALVILAIFNPGAGKINTYRGSSE

SEQ ID NO: 2971 - protein, 198 aa, Glycine max
  misc_feature (1)..(198): Ceres Seq. ID no. 14311476
MALSAEKDKLLIFNVHPVLMLIGLVVLNAEALLAYKTVPGTKKLKKLVHITLQFLAMFLSLVGLWAVWKFHDEKEIDHLYTLHSWLGLSCIIIFSLQWAAGFLTFWYPGGSRSDRASLLPWHVFLGVFLYVLAIATSVTGLLEKSIFMQSAKMIGRFSTEAMLMNSLGMMLILLGALVILAIFNPGAGKINTYRGSSE

SEQ ID NO: 2972 - protein, 234 aa, Glycine max; identical to SEQ ID NO: 2970
  misc_feature (1)..(234): Ceres Seq. ID no. 16625501

SEQ ID NO: 2973 - DNA, 1282 bp, Glycine max
  misc_feature (1)..(1282): Ceres Seq. ID no. 14311515
acaataaactatctattttccaacttcaatattcactgttgttgagtattctaattctaatgaggaacaggggtgtgtgggaagatgcaagcacagcaacagtgcttgtacttgtgctatgttcatcgtatggaattgcagaagtaaagtcacagtcacagaaggtatctggtttgtttgtttttggagattcattggttgaagtaggcaacaataacttcctaaacaccatagcaagggcaaattactttccttacggcatcgacttcggcaggggttccactggccgattttctaatggcaaatccctcattgacttcattggagacttgctgggcattccttctcctccaccttttgcagatccctccactgttggaaccagaatactttatggtgtcaattatgcatcagcttctgccggcattctggatgagtcagggagacactatggtgatcggtatagcctgagccagcaagtcctgaactttgagaacacactgaatcagtataggacaatgatgaatggaagtgcattgaatcagttcttagccaagtctatagcagttgtggtaactggaagcaatgactacatcaacaactacctcctgcctggcttatatggctccagtcgaaattatactgcccaagactttggcaatctacttgttaatagctatgtgcgacaaattttggcactacatagcgtaggattaaggaagttcttcctagcaggaattgggccactgggttgcatccctagtcttcgagccgctgctttagccccaacaggaagatgcgtggacttggttaatcagatggttggaacttttaatgaagggcttagatcaatggtggaccaactcaacagaaaccatcctaatgctatctttgtatacggtaacacttaccgtgtctttggtgatatcctaaataaccccgcggccttcgcgtttaatgttgtggatagagcatgttgtggaataggaaggaaccgaggtcaactaacatgcctcccattacaatttccatgcacaagcagaaaccagtatgtgttttgggatgccttccacccaacagaatctgcaacttatgtcttcgcatggagagttgttaatggagcgcccgatgatagttatccaattaatatgcaacaaatggctaccatttaatccactctatcttcctgtattctcctttcatttataaaccaaaaaagtgtaccaaaagtgaagccaaattctacatctattgttgggtataaaataattacttttgggct

SEQ ID NO: 2974 - protein, 389 aa, Glycine max
  misc_feature (1)..(389): Ceres Seq. ID no. 14311516
NKLSIFQLQYSLLLSILILMRNRGVWEDASTATVLVLVLCSSYGIAEVKSQSQKVSGLFVFGDSLVEVGNNNFLNTIARANYFPYGIDFGRGSTGRFSNGKSLIDFIGDLLGIPSPPPFADPSTVGTRILYGVNYASASAGILDESGRHYGDRYSLSQQVLNFENTLNQYRTMMNGSALNQFLAKSIAVVVTGSNDYINNYLLPGLYGSSRNYTAQDFGNLLVNSYVRQILALHSVGLRKFFLAGIGPLGCIPSLRAAALAPTGRCVDLVNQMVGTFNEGLRSMVDQLNRNHPNAIFVYGNTYRVFGDILNNPAAFAFNVVDRACCGIGRNRGQLTCLPLQFPCTSRNQYVFWDAFHPTESATYVFAWRVVNGAPDDSYPINMQQMATI

SEQ ID NO: 2975 - protein, 370 aa, Glycine max
  misc_feature (1)..(370): Ceres Seq. ID no. 14311517
MRNRGVWEDASTATVLVLVLCSSYGIAEVKSQSQKVSGLFVFGDSLVEVGNNNFLNTIARANYFPYGIDFGRGSTGRFSNGKSLIDFIGDLLGIPSPPPFADPSTVGTRILYGVNYASASAGILDESGRHYGDRYSLSQQVLNFENTLNQYRTMMNGSALNQFLAKSIAVVVTGSNDYINNYLLPGLYGSSRNYTAQDFGNLLVNSYVRQILALHSVGLRKFFLAGIGPLGCIPSLRAAALAPTGRCVDLVNQMVGTFNEGLRSMVDQLNRNHPNAIFVYGNTYRVFGDILNNPAAFAFNVVDRACCGIGRNRGQLTCLPLQFPCTSRNQYVFWDAFHPTESATYVFAWRVVNGAPDDSYPINMQQMATI

SEQ ID NO: 2976 - protein, 217 aa, Glycine max
  misc_feature (1)..(217): Ceres Seq. ID no. 14311518
MMNGSALNQFLAKSIAVVVTGSNDYINNYLLPGLYGSSRNYTAQDFGNLLVNSYVRQILALHSVGLRKFFLAGIGPLGCIPSLRAAALAPTGRCVDLVNQMVGTFNEGLRSMVDQLNRNHPNAIFVYGNTYRVFGDILNNPAAFAFNVVDRACCGIGRNRGQLTCLPLQFPCTSRNQYVFWDAFHPTESATYVFAWRVVNGAPDDSYPINMQQMATI

SEQ ID NO: 2977 - protein, 370 aa, Glycine max; identical to SEQ ID NO: 2975
  misc_feature (1)..(370): Ceres Seq. ID no. 16625502

SEQ ID NO: 2978 - DNA, 684 bp, Glycine max
  misc_feature (1)..(684): Ceres Seq. ID no. 14311600
agtcagagtcctcgcaccgcacgcaacaagtacgcaggcagcgcagcctcgagccgtcgccatggcgagcaagcacctcgtcctcgccgcatgcctcctcctcctgcccaccgcctcggtcgccaccgacgtcgactactgcagtaagaaggactacccggtgaaggtgagcggggtgcagatcgtgcccgatccggtcgaacccggcaagcccgccactttcaagatctccgcttctactgataaaaccatcgagaaggggaagctggttatcgacgtcaagtatttcttcttctacgtgcactcggagacccgcgacatctgcggagagacttcctgcccagcgaccggcgacttcgtgctgtcccaccagcagacgctgccaggcttcactccgccgggctcctacacgatctacatgaagattgtcggggacgacaacgaggagctgagctgcatctcgttcgggttcagcatcggcttcgtcgcgtccagctgaacgcgtccgagcctgggcacgagaggcagccagcccatggatgtaaattacgtggagcacactctgtatcctatgactttcaagtatctaggtccatgtaagctttttgtgggtgtctgtgttcaactgagacgtttttatccggagttgaacatcacaataaagcaaagtcactgataccatgc

SEQ ID NO: 2979 - protein, 165 aa, Glycine max
  misc_feature (1)..(165): Ceres Seq. ID no. 14311601
VRVLAPHATSTQAAQPRAVAMASKHLVLAACLLLLPTASVATDVDYCSKKDYPVKVSGVQIVPDPVEPGKPATFKISASTDKTIEKGKLVIDVKYFFFYVHSETRDICGETSCPATGDFVLSHQQTLPGFTPPGSYTIYMKIVGDDNEELSCISFGFSIGFVASS

SEQ ID NO: 2980 - protein, 145 aa, Glycine max
  misc_feature (1)..(145): Ceres Seq. ID no. 14311602
MASKHLVLAACLLLLPTASVATDVDYCSKKDYPVKVSGVQIVPDPVEPGKPATFKISASTDKTIEKGKLVIDVKYFFFYVHSETRDICGETSCPATGDFVLSHQQTLPGFTPPGSYTIYMKIVGDDNEELSCISFGFSIGFVASS

SEQ ID NO: 2981 - protein, 145 aa, Glycine max; identical to SEQ ID NO: 2980
  misc_feature (1)..(145): Ceres Seq. ID no. 16625503

SEQ ID NO: 2982 - DNA, 1480 bp, Glycine max
  misc_feature (1)..(1480): Ceres Seq. ID no. 14311735
atgaaatcagaatctggatgaagaaacatccatgcagtgcagatgtagttacaaaatagctgattttccaactctgcgttgactggtctcccacaaacagcttccaggaaatgacaatgagactttccctcccattttgttttctactccactctacccttccttaatcattccactctctctaaattcaatcaatcaattatctctctaaacccatggaacacgccttcctagccatcgtcgccgccaccgccagcttcttcgtggtcatgctcctccttgccgccgccatcctcctctgccagcaccaccgcaactccaccaaagccccaacccgcagcacctcccagatccgaacccgctccgccccccaccgtgacgcctcctcccgctccgtcctggaaaactggtcctccgaccccaacctgatcaagatctcctgggaggagctcgcccgcgccaccgacaacttctcccctcacctcatcgtcggcgatggcagcttcggcctcgtctacaaggcccgtctctccaacggcgccaccgtcgccgtcaaaaaactctcccccgacgccttccagggcttccgcgagttcaccgccgagatggagaccctaagccgcctccgccacccaaacatcgtcaaaatcctcggctactgggcctcaggcccggaacgcctcctcgtctacgagttcatcgaaaagggaaacctcgaccagtggctccacgaacccgatctctctcgctcccctctcccctggcccacacgcgtcaacatcatccgcggcgtggcccatgggctttcctacctccacggcctcgacaagcccgtcatccaccgcgacataaaggccagcaacatcttactggactctaacttccaggcccatatcgctgactttgggctggcccgtaggatcgacaacactcggacccacgtgtccacgcagttcgcgggaacaatgggctacatgccgccggagtacatagaagggtccaatgtggccaacacgaaggtggatgtgtatagttttgggattttgatgattgagaccgcgtcgagccacaggcccaatttgcccatgaaattgggcacggacgacattgggatggtccagtgggccaggaagatgaaggagaataatgcggagatggagatggtggatgtgaatattgggttgaggggggaggaggagagtgttaaggagtacgtgcgcatcgcttgtgagtgcacccgtgagatgcagaaggaaaggcccgaaatgccccaagttgttcaatggttggactcaatgtcactttcaaccaaaccttttcatctcgtgtaaatacctttacttctatatatatatataagtctataataacattaattagtttacatgttcttaataaatgtgatcaaatcatcgcattttgtttttgctgccaattcagttgtgtaatgaactccgatataagggttttacaaggttct

SEQ ID NO: 2983 - protein, 371 aa, Glycine max
  misc_feature (1)..(371): Ceres Seq. ID no. 14311736
MEHAFLAIVAATASFFVVMLLLAAAILLCQHHRNSTKAPTRSTSQIRTRSAPHRDASSRSVLENWSSDPNLIKISWEELARATDNFSPHLIVGDGSFGLVYKARLSNGATVAVKKLSPDAFQGFREFTAEMETLSRLRHPNIVKILGYWASGPERLLVYEFIEKGNLDQWLHEPDLSRSPLPWPTRVNIIRGVAHGLSYLHGLDKPVIHRDIKASNILLDSNFQAHIADFGLARRIDNTRTHVSTQFAGTMGYMPPEYIEGSNVANTKVDVYSFGILMIETASSHRPNLPMKLGTDDIGMVQWARKMKENNAEMEMVDVNIGLRGEEESVKEYVRIACECTREMQKERPEMPQVVQWLDSMSLSTKPFHLV

SEQ ID NO: 2984 - protein, 353 aa, Glycine max
  misc_feature (1)..(353): Ceres Seq. ID no. 14311737
MLLLAAAILLCQHHRNSTKAPTRSTSQIRTRSAPHRDASSRSVLENWSSDPNLIKISWEELARATDNFSPHLIVGDGSFGLVYKARLSNGATVAVKKLSPDAFQGFREFTAEMETLSRLRHPNIVKILGYWASGPERLLVYEFIEKGNLDQWLHEPDLSRSPLPWPTRVNIIRGVAHGLSYLHGLDKPVIHRDIKASNILLDSNFQAHIADFGLARRIDNTRTHVSTQFAGTMGYMPPEYIEGSNVANTKVDVYSFGILMIETASSHRPNLPMKLGTDDIGMVQWARKMKENNAEMEMVDVNIGLRGEEESVKEYVRIACECTREMQKERPEMPQVVQWLDSMSLSTKPFHLV

SEQ ID NO: 2985 - protein, 241 aa, Glycine max
  misc_feature (1)..(241): Ceres Seq. ID no. 14311738
METLSRLRHPNIVKILGYWASGPERLLVYEFIEKGNLDQWLHEPDLSRSPLPWPTRVNIIRGVAHGLSYLHGLDKPVIHRDIKASNILLDSNFQAHIADFGLARRIDNTRTHVSTQFAGTMGYMPPEYIEGSNVANTKVDVYSFGILMIETASSHRPNLPMKLGTDDIGMVQWARKMKENNAEMEMVDVNIGLRGEEESVKEYVRIACECTREMQKERPEMPQVVQWLDSMSLSTKPFHLV

SEQ ID NO: 2986 - protein, 371 aa, Glycine max; identical to SEQ ID NO: 2983
  misc_feature (1)..(371): Ceres Seq. ID no. 16611994

SEQ ID NO: 2987 - DNA, 1336 bp, Glycine max
  misc_feature (1)..(1336): Ceres Seq. ID no. 14311985
aaaaaagtgaatgttgatataattgtcaacgtggaggatgagaataattcggatatggagtcaaaggtgaatgtgaaggaaattaaatctaagaaatcactgttaacaagaacaaaaaatcaaaatgaaatgtcagataggttagaaaaagcagaggagagcgatttaaataaaagcgagagcgttggacaagcaacagagcaatacatgaatatttgtataaataatgaggttgatagtgatggtggcgaaggttttagttttttctatgttaacaagaacgtgtataacaagaccaagcactattttgagacaaaaacagacctgaatgaagtctgctcgtgtgttggagggtgtactgatcctgcgatttgtccttgtgcgaggtacaactttgagaattgcgggaagactgcttgctatatttatgatcctaaacacgagaaaaagaagatattaaaccaattgttgagcaaagacatgcatatttatgaatgcacccctcaatgtgcttgtgcaaagagtctatgtttgaattcttgtataaatgaaggagacgcaaacaaagcaaaagttgaggaatttattgtcgagagatatcataaagagtataaaggaaatgagccgaaagctcaaggtatctctgccaagatgtggggattgaagtcaaaggagtttatccctgctaacacttttattattgagtattgtggcgagattattactcgaaaagaaggcgataaaagaggtgaaaagtacgattcggtgaactgtaactacctctttgatctgaataaacatgccgaggttgaggagattgatgaatcaacaaatacaataatcctgaatatcgatggagtttgcgagactcgtaagatgaaaaaattaaaggatattgctgcaaattttcctcttgtgatcgatgcatttttttatgggaaccattcaagatttgttaatcacagctgttggccaaatatggttgctttagctgttcacacagagaatagggatatgctgctcccacgaatcatcttttttgctctgagagatattcagcctggcgaagagttaacaattgactacaactgtgctcctctaaaagatttaaagaatacagatgttcttgtctgtctctgtggagctgtgaattgtcggggctacgtttatgaggaagctcgtgagaatgattaaattctattgtatctctattagggaaaaacaaagtatttacaaacaaaatttcttatcgattccttaataaataataaataaataaatacaatgttaaagcaagtataaatataccatattatggattcaaagcaaaaaatgg

SEQ ID NO: 2988 - protein, 397 aa, Glycine max
  misc_feature (1)..(397): Ceres Seq. ID no. 14311986
KKVNVDIIVNVEDENNSDMESKVNVKEIKSKKSLLTRTKNQNEMSDRLEKAEESDLNKSESVGQATEQYMNICINNEVDSDGGEGFSFFYVNKNVYNKTKHYFETKTDLNEVCSCVGGCTDPAICPCARYNFENCGKTACYIYDPKHEKKKILNQLLSKDMHIYECTPQCACAKSLCLNSCINEGDANKAKVEEFIVERYHKEYKGNEPKAQGISAKMWGLKSKEFIPANTFIIEYCGEIITRKEGDKRGEKYDSVNCNYLFDLNKHAEVEEIDESTNTIILNIDGVCETRKMKKLKDIAANFPLVIDAFFYGNHSRFVNHSCWPNMVALAVHTENRDMLLPRIIFFALRDIQPGEELTIDYNCAPLKDLKNTDVLVCLCGAVNCRGYVYEEAREND

SEQ ID NO: 2989 - protein, 379 aa, Glycine max
  misc_feature (1)..(379): Ceres Seq. ID no. 14311987
MESKVNVKEIKSKKSLLTRTKNQNEMSDRLEKAEESDLNKSESVGQATEQYMNICINNEVDSDGGEGFSFFYVNKNVYNKTKHYFETKTDLNEVCSCVGGCTDPAICPCARYNFENCGKTACYIYDPKHEKKKILNQLLSKDMHIYECTPQCACAKSLCLNSCINEGDANKAKVEEFIVERYHKEYKGNEPKAQGISAKMWGLKSKEFIPANTFIIEYCGEIITRKEGDKRGEKYDSVNCNYLFDLNKHAEVEEIDESTNTIILNIDGVCETRKMKKLKDIAANFPLVIDAFFYGNHSRFVNHSCWPNMVALAVHTENRDMLLPRIIFFALRDIQPGEELTIDYNCAPLKDLKNTDVLVCLCGAVNCRGYVYEEAREND

SEQ ID NO: 2990 - protein, 354 aa, Glycine max
  misc_feature (1)..(354): Ceres Seq. ID no. 14311988
MSDRLEKAEESDLNKSESVGQATEQYMNICINNEVDSDGGEGFSFFYVNKNVYNKTKHYFETKTDLNEVCSCVGGCTDPAICPCARYNFENCGKTACYIYDPKHEKKKILNQLLSKDMHIYECTPQCACAKSLCLNSCINEGDANKAKVEEFIVERYHKEYKGNEPKAQGISAKMWGLKSKEFIPANTFIIEYCGEIITRKEGDKRGEKYDSVNCNYLFDLNKHAEVEEIDESTNTIILNIDGVCETRKMKKLKDIAANFPLVIDAFFYGNHSRFVNHSCWPNMVALAVHTENRDMLLPRIIFFALRDIQPGEELTIDYNCAPLKDLKNTDVLVCLCGAVNCRGYVYEEAREND

SEQ ID NO: 2991 - protein, 379 aa, Glycine max; identical to SEQ ID NO: 2989
  misc_feature (1)..(379): Ceres Seq. ID no. 16625506

SEQ ID NO: 2992 - DNA, 1751 bp, Glycine max
  misc_feature (1)..(1751): Ceres Seq. ID no. 14313084
acaaacaccagagttgagtgctccaataataccatggaagctcaagcgtcgttcttgtttattagcttgtttttctctctggtgttgcatttgcttgcaaagcattattacaagccaaaaaccaccctttctcacaaactacccccgggaccaaagaagctacctctgatagggaacctgcatcaactagcaatggctggttcacttccacatcgtactctccgagaccttgcccttaaatacggacctctcatgcatctccaacttggtgaaatttcttccgtggttgtatcctcccccaacatggccaaggagataatgaaaacccatgatcttgcttttgtgcagaggccacaatttcttcctgctcaaattttgacctatgggcaaaatgatattgtttttgctccatatggggattattggagacaaatgaagaaaatatgtgtctcggagcttctaagtgccaagagagttcagtctttctctcatattagagaagacgagacatccaaatttatagaatcaattcgaatatcagaaggttcaccaatcaatcttactagtaaaatttactccttggtaagttcttctgtttccagggtagcatttggcgacaaatctaaggaccaggaagagtttttgtgtgtgcttgaaaaaatgatattagcggggggaggatttgaacctgacgatttgtttccttcgatgaaacttcatctcataaatggaaggaaggccaaattggagaagatgcatgagcaggttgacaagatcgcagacaacattctcagagagcatcaagaaaagcgccaaagggcactacgagaaggcaaggttgacctagaggaggaggatcttgttgatgttcttttgagaatccaacaaagtgacaacctcgagatcaaaattagtaccacaaacatcaaagctgttatattggacgtatttactgctggaacggatacttcagcatcaacacttgaatgggctatggcagaaatgatgagaaacccaagagtgaggaagaaagcacaggctgaagtaagacaagcatttagggaattgaaaataatccatgaaacagatgtagggaaacttacatacttaaagttggtgatcaaagagacattaaggttacacgctccttctcctttattggtccctagagaatgctctgaactaaccatcattgatggatatgaaatacctgtcaagactaaagtcatgataaacgtgtgggcaattggaagagatccccaatattggactgatgctgagaggtttgtcccagagagattcgatggtagttctatcgatttcaaagggaataactttgagtatcttccttttggggcaggaaggagaatgtgcccaggaatgacatttggtttagccaacattatgcttccactcgctctattactctatcacttcaattgggaacttccaaatgagatgaaacctgaggatatggatatgtctgaaaactttggattgacagttacaaggaaaagcgagttgtgtttgattcccattgttaatgatctttgacactgcacgattgatatggttggaggaatcaagtttcttttactaaggaaataaatgtgttttaaaatcgcgtctagcaatatgcatgtctttattgttttaaaagctaggttatctaactagccatccgagctatatttttatactagtgtataataatctttgctgaattttatggtttactctttccaatcttt

SEQ ID NO: 2993 - protein, 517 aa, Glycine max
  misc_feature (1)..(517): Ceres Seq. ID no. 14313085
TNTRVECSNNTMEAQASFLFISLFFSLVLHLLAKHYYKPKTTLSHKLPPGPKKLPLIGNLHQLAMAGSLPHRTLRDLALKYGPLMHLQLGEISSVVVSSPNMAKEIMKTHDLAFVQRPQFLPAQILTYGQNDIVFAPYGDYWRQMKKICVSELLSAKRVQSFSHIREDETSKFIESIRISEGSPINLTSKIYSLVSSSVSRVAFGDKSKDQEEFLCVLEKMILAGGGFEPDDLFPSMKLHLINGRKAKLEKMHEQVDKIADNILREHQEKRQRALREGKVDLEEEDLVDVLLRIQQSDNLEIKISTTNIKAVILDVFTAGTDTSASTLEWAMAEMMRNPRVRKKAQAEVRQAFRELKIIHETDVGKLTYLKLVIKETLRLHAPSPLLVPRECSELTIIDGYEIPVKTKVMINVWAIGRDPQYWTDAERFVPERFDGSSIDFKGNNFEYLPFGAGRRMCPGMTFGLANIMLPLALLLYHFNWELPNEMKPEDMDMSENFGLTVTRKSELCLIPIVNDL

SEQ ID NO: 2994 - protein, 506 aa, Glycine max
  misc_feature (1)..(506): Ceres Seq. ID no. 14313086
MEAQASFLFISLFFSLVLHLLAKHYYKPKTTLSHKLPPGPKKLPLIGNLHQLAMAGSLPHRTLRDLALKYGPLMHLQLGEISSVVVSSPNMAKEIMKTHDLAFVQRPQFLPAQILTYGQNDIVFAPYGDYWRQMKKICVSELLSAKRVQSFSHIREDETSKFIESIRISEGSPINLTSKIYSLVSSSVSRVAFGDKSKDQEEFLCVLEKMILAGGGFEPDDLFPSMKLHLINGRKAKLEKMHEQVDKIADNILREHQEKRQRALREGKVDLEEEDLVDVLLRIQQSDNLEIKISTTNIKAVILDVFTAGTDTSASTLEWAMAEMMRNPRVRKKAQAEVRQAFRELKIIHETDVGKLTYLKLVIKETLRLHAPSPLLVPRECSELTIIDGYEIPVKTKVMINVWAIGRDPQYWTDAERFVPERFDGSSIDFKGNNFEYLPFGAGRRMCPGMTFGLANIMLPLALLLYHFNWELPNEMKPEDMDMSENFGLTVTRKSELCLIPIVNDL

SEQ ID NO: 2995 - protein, 453 aa, Glycine max
  misc_feature (1)..(453): Ceres Seq. ID no. 14313087
MAGSLPHRTLRDLALKYGPLMHLQLGEISSVVVSSPNMAKEIMKTHDLAFVQRPQFLPAQILTYGQNDIVFAPYGDYWRQMKKICVSELLSAKRVQSFSHIREDETSKFIESIRISEGSPINLTSKIYSLVSSSVSRVAFGDKSKDQEEFLCVLEKMILAGGGFEPDDLFPSMKLHLINGRKAKLEKMHEQVDKIADNILREHQEKRQRALREGKVDLEEEDLVDVLLRIQQSDNLEIKISTTNIKAVILDVFTAGTDTSASTLEWAMAEMMRNPRVRKKAQAEVRQAFRELKIIHETDVGKLTYLKLVIKETLRLHAPSPLLVPRECSELTIIDGYEIPVKTKVMINVWAIGRDPQYWTDAERFVPERFDGSSIDFKGNNFEYLPFGAGRRMCPGMTFGLANIMLPLALLLYHFNWELPNEMKPEDMDMSENFGLTVTRKSELCLIPIVNDL

SEQ ID NO: 2996 - protein, 506 aa, Glycine max; identical to SEQ ID NO: 2994
  misc_feature (1)..(506): Ceres Seq. ID no. 16625515

SEQ ID NO: 2997 - DNA, 1085 bp, Glycine max
  misc_feature (1)..(1085): Ceres Seq. ID no. 14314909
aagtcttttttccttcgtaacatcttttttctctttttcttcccatagcattctgactcatacccaaattatttattgtttgtctacgaaagcagtgaaaaaaaatgacagtggagcttatggggttccccaaaatggaggaacagaaggcaattcaagaagctgcctccgaaggcctcaaggccatggaacacctcctccgtctcctatcctatcaaccctctcacctccacgctcaccacaccgacgccaccgtttccaacttcaaaaaactcatctccttactcagccgccgcaccggccacgcccgtttccgtcgcgcacctctcccttccccgccaccggctaacccggtcaccctccaccaacctccctccaccttcgtcccttcgcactcccagtctctaaccctcgatttcacaaaacctagcattttcgcctccaacgccaaatccatggacctccaattctctaaagaaaccttcagcgtctcctccaactcctccttcatgtcctccgccatcaccggcgacgccagtgtctcttacggcaaactaggatcctccctcttcctcactcctccgccagtctcagccggaaaacctcctctctcctccgctccgatcaagaagaggtgtcacgaccaccgcgaacactccgacgagatctccgggaaactctccggctccagcaagtgccactgcactaagagaaggaagaatcgagtgaagaaaacggtaagagttccggtgatcagttcgaagatcgccgatattccgccggacgagtactcgtggaggaagtacgggcagaagccgatcaagggatcgccgtacccgagggggtattacaagtgcagtagcgttatagggtgtccggcgaggaaacacgtggagcgtgctccggacgatccgacgatgttgattgtgacatatgaaggggagcaccggcactcgatgcaggagaacatttccgggggagtgggtttgggattcgagtcaacgtgagggtggttgcaatgtaaatctgacattattaaaagaaaagattatattacaggggaatcttaatcttctcccgaaaag

SEQ ID NO: 2998 - protein, 300 aa, Glycine max
  misc_feature (1)..(300): Ceres Seq. ID no. 14314910
MTVELMGFPKMEEQKAIQEAASEGLKAMEHLLRLLSYQPSHLHAHHTDATVSNFKKLISLLSRRTGHARFRRAPLPSPPPANPVTLHQPPSTFVPSHSQSLTLDFTKPSIFASNAKSMDLQFSKETFSVSSNSSFMSSAITGDASVSYGKLGSSLFLTPPPVSAGKPPLSSAPIKKRCHDHREHSDEISGKLSGSSKCHCTKRRKNRVKKTVRVPVISSKIADIPPDEYSWRKYGQKPIKGSPYPRGYYKCSSVIGCPARKHVERAPDDPTMLIVTYEGEHRHSMQENISGGVGLGFEST

SEQ ID NO: 2999 - protein, 295 aa, Glycine max
  misc_feature (1)..(295): Ceres Seq. ID no. 14314911
MGFPKMEEQKAIQEAASEGLKAMEHLLRLLSYQPSHLHAHHTDATVSNFKKLISLLSRRTGHARFRRAPLPSPPPANPVTLHQPPSTFVPSHSQSLTLDFTKPSIFASNAKSMDLQFSKETFSVSSNSSFMSSAITGDASVSYGKLGSSLFLTPPPVSAGKPPLSSAPIKKRCHDHREHSDEISGKLSGSSKCHCTKRRKNRVKKTVRVPVISSKIADIPPDEYSWRKYGQKPIKGSPYPRGYYKCSSVIGCPARKHVERAPDDPTMLIVTYEGEHRHSMQENISGGVGLGFEST

SEQ ID NO: 3000 - protein, 290 aa, Glycine max
  misc_feature (1)..(290): Ceres Seq. ID no. 14314912
MEEQKAIQEAASEGLKAMEHLLRLLSYQPSHLHAHHTDATVSNFKKLISLLSRRTGHARFRRAPLPSPPPANPVTLHQPPSTFVPSHSQSLTLDFTKPSIFASNAKSMDLQFSKETFSVSSNSSFMSSAITGDASVSYGKLGSSLFLTPPPVSAGKPPLSSAPIKKRCHDHREHSDEISGKLSGSSKCHCTKRRKNRVKKTVRVPVISSKIADIPPDEYSWRKYGQKPIKGSPYPRGYYKCSSVIGCPARKHVERAPDDPTMLIVTYEGEHRHSMQENISGGVGLGFEST

SEQ ID NO: 3001 - protein, 300 aa, Glycine max; identical to SEQ ID NO: 2998
  misc_feature (1)..(300): Ceres Seq. ID no. 16625520

SEQ ID NO: 3002 - DNA, 1810 bp, Glycine max
  misc_feature (1)..(1810): Ceres Seq. ID no. 14315275
attacagattcaattgcttaattaaatactattttcccctccttctataataccctccaaaatctttttccttcttcattctccctttctctatgttttggcaaaccactttaggtaaccagattactactactattgcttcatatacaaagatgctatcgtaaaaaagagagaaacttgggaagtgggaacacattcaaaatccttgtttttctttttggtctaatttttcatctcaaaacacacccattgagtatttttcatttttttgttcttttgggacaaaaaaggtgggtgttgttggcattattgaagatagaggcccccaaaatgaagaggtctccagcatcttcttgttcatcatctacttcctctgttgggtttgaagctcccattgaaaaaagaaggcctaagcatccaaggaggaataatttgaagtcacaaaaatgcaagcagaaccaaaccaccactggtggcagaagaagctctatctatagaggagttacaaggcataggtggacagggaggtttgaagctcacctatgggataagagctcttggaacaacattcagagcaagaagggtcgacaaggggcatatgatactgaagaatctgcagcccgtacctatgaccttgcagcccttaaatactggggaaaagatgcaaccctgaatttcccgatagaaacttataccaaggagctcgaggaaatggacaaggtttcaagagaagaatatttggcttctttgcggcgccaaagcagtggcttttctagaggcctgtctaagtaccgtggggttgctaggcatcatcataatggtcgctgggaagcacgaattggaagagtatgcggaaacaagtacctctacttggggacatataaaactcaagaggaggcagcagtggcatatgacatggcagcaatagagtaccgtggagtcaatgcagtgaccaattttgacataagcaactacatggacaaaataaagaagaaaaatgaccaaacccaacaacaacaaacagaagcacaaacggaaacagttcctaactcctctgactctgaagaagtagaagtagaacaacagacaacaacaataaccacaccacccccatctgaaaatctgcacatgccaccacagcagcaccaagttcaatacaccccccatgtctctccaagggaagaagaatcatcatcactgatcacaattatgaaccatgtgcttgagcaggatctgccatggagcttcatgtacactggcttgtctcagtttcaagatccaaacttggctttctgcaaaggtgatgatgacttggtgggcatgtttgatagtgcagggtttgaggaagacattgattttctgttcagcactcaacctggtgatgagactgagagtgatgtcaacaatatgagcgcagttttggatagtgttgagtgtggagacacaaatggggctggtggaagcatgatgcatgtggataacaagcagaagatagtatcatttgcttcttcaccatcatctacaactacagtttcttgtgactatgctctagatctatgatctcttcagaagggtgatggatgacctacatggaatggaaccttgtgtagattattattgggtttgttatgcatgttgttggggtttgttgtgataggttggtggatgggtgtgacttgtgaaaatgttcattggttttaggattttcctttcatccatactccgttatcgaaagaagaaaatgttcattttagacttggattttagtataaaaaaaaaggagaaaaaaccaaaaatgtgatttgggtgc

SEQ ID NO: 3003 - protein, 409 aa, Glycine max
  misc_feature (1)..(409): Ceres Seq. ID no. 14315276
MKRSPASSCSSSTSSVGFEAPIEKRRPKHPRRNNLKSQKCKQNQTTTGGRRSSIYRGVTRHRWTGRFEAHLWDKSSWNNIQSKKGRQGAYDTEESAARTYDLAALKYWGKDATLNFPIETYTKELEEMDKVSREEYLASLRRQSSGFSRGLSKYRGVARHHHNGRWEARIGRVCGNKYLYLGTYKTQEEAAVAYDMAAIEYRGVNAVTNFDISNYMDKIKKKNDQTQQQQTEAQTETVPNSSDSEEVEVEQQTTTITTPPPSENLHMPPQQHQVQYTPHVSPREEESSSLITIMNHVLEQDLPWSFMYTGLSQFQDPNLAFCKGDDDLVGMFDSAGFEEDIDFLFSTQPGDETESDVNNMSAVLDSVECGDTNGAGGSMMHVDNKQKIVSFASSPSSTTTVSCDYALDL

SEQ ID NO: 3004 - protein, 282 aa, Glycine max
  misc_feature (1)..(282): Ceres Seq. ID no. 14315277
MDKVSREEYLASLRRQSSGFSRGLSKYRGVARHHHNGRWEARIGRVCGNKYLYLGTYKTQEEAAVAYDMAAIEYRGVNAVTNFDISNYMDKIKKKNDQTQQQQTEAQTETVPNSSDSEEVEVEQQTTTITTPPPSENLHMPPQQHQVQYTPHVSPREEESSSLITIMNHVLEQDLPWSFMYTGLSQFQDPNLAFCKGDDDLVGMFDSAGFEEDIDFLFSTQPGDETESDVNNMSAVLDSVECGDTNGAGGSMMHVDNKQKIVSFASSPSSTTTVSCDYALDL

SEQ ID NO: 3005 - protein, 214 aa, Glycine max
  misc_feature (1)..(214): Ceres Seq. ID no. 14315278
MAAIEYRGVNAVTNFDISNYMDKIKKKNDQTQQQQTEAQTETVPNSSDSEEVEVEQQTTTITTPPPSENLHMPPQQHQVQYTPHVSPREEESSSLITIMNHVLEQDLPWSFMYTGLSQFQDPNLAFCKGDDDLVGMFDSAGFEEDIDFLFSTQPGDETESDVNNMSAVLDSVECGDTNGAGGSMMHVDNKQKIVSFASSPSSTTTVSCDYALDL

SEQ ID NO: 3006 - protein, 409 aa, Glycine max; identical to SEQ ID NO: 3003
  misc_feature (1)..(409): Ceres Seq. ID no. 16625522

SEQ ID NO: 3007 - DNA, 1484 bp, Glycine max
  misc_feature (1)..(1484): Ceres Seq. ID no. 14315399
ataatatagttcaggcattatggagagagttgtatactccagggaaacaacctgagaaagtgtgcacctcggtcaaaaaacctgccggcactcgtatctgtgacaccgtgttcaattcggatccaaaaatctgatttatcgggtctcttcccaactcccccacctccaaccaacttccaccagtagtaaacagaaatacaagcataagcaaaagaagacccgcgacacatcgcaacatcgtatcatgtctgcaacaaacgtccccaaagtgctgttacaactacaaccaccctccaaatcgaacccactctgcgtgccggtgataggactcggcaccgccgcggtccacaacgacggtgacacggtgaaggctgcagtcatagaggctatcaaactcggttacagacacttcgacaccgcggcacagtacggatcggagcaggctcttggagaagccattgccgaagcacttcgggttggtctcatagcctcaagagacgagcttttcatcacttccaagttatggtgttgtgataatcatccccatcttgttcttcctgctctacaaaattcgcttcggtctcttaaattagattatttggacctatatttaattcattggccaattactgcaaagcctggaatgtgggagatgccttattctgaagagagccttgttccatttgacttaaagagtgtgtgggcagcaatggaagaatgtcacaaacttggccttaccaaatcaattggagttagcaacttctcttgcaagaaacttgaaaatcttctctcttttgctacaattcctccttctgtcaatcaagtggagatgaatattgcctggcagcaaaagaatcttagagcatactgcaaggcaaagggtataattgtgactgcctactctcctttgggagccaaagggagcaaatgggatatcaatcaaattttggacaatgaattgaccaagcagattgcacaggctcatggcaaaactgcagctcaggtatgtcttagatggttatttgagcaaggtgtgactttcataccaaagagctacaataaagagagattaaaggaaaatttagagatatttgattggtcactcaccaaagatgaccatgaaaagattaatcaagtcaaacaggagcgtatgttcaagtacggaacagcagcattcccgcttcctgatctatttgatggggaaacttagtaatacattatcagcttcaatattccattttccttgggatttaggtttctcgtgtctgtgacacaataaaaggatgaagtgtaatctgtctttagaatacccttaaagaaactcaaaattgaaatcactggtttcactttttgtgggaagtttgtttacagcaatgttatgcttttcttccatgtaattttatgtgctacactgttttatctgttgaaatgtaattgtaattcaagctacaggcatccaataaaaactagactgtttatagttt

SEQ ID NO: 3008 - protein, 321 aa, Glycine max
  misc_feature (1)..(321): Ceres Seq. ID no. 14315400
MSATNVPKVLLQLQPPSKSNPLCVPVIGLGTAAVHNDGDTVKAAVIEAIKLGYRHFDTAAQYGSEQALGEAIAEALRVGLIASRDELFITSKLWCCDNHPHLVLPALQNSLRSLKLDYLDLYLIHWPITAKPGMWEMPYSEESLVPFDLKSVWAAMEECHKLGLTKSIGVSNFSCKKLENLLSFATIPPSVNQVEMNIAWQQKNLRAYCKAKGIIVTAYSPLGAKGSKWDINQILDNELTKQIAQAHGKTAAQVCLRWLFEQGVTFIPKSYNKERLKENLEIFDWSLTKDDHEKINQVKQERMFKYGTAAFPLPDLFDGET

SEQ ID NO: 3009 - protein, 188 aa, Glycine max
  misc_feature (1)..(188): Ceres Seq. ID no. 14315401
MWEMPYSEESLVPFDLKSVWAAMEECHKLGLTKSIGVSNFSCKKLENLLSFATIPPSVNQVEMNIAWQQKNLRAYCKAKGIIVTAYSPLGAKGSKWDINQILDNELTKQIAQAHGKTAAQVCLRWLFEQGVTFIPKSYNKERLKENLEIFDWSLTKDDHEKINQVKQERMFKYGTAAFPLPDLFDGET

SEQ ID NO: 3010 - protein, 185 aa, Glycine max
  misc_feature (1)..(185): Ceres Seq. ID no. 14315402
MPYSEESLVPFDLKSVWAAMEECHKLGLTKSIGVSNFSCKKLENLLSFATIPPSVNQVEMNIAWQQKNLRAYCKAKGIIVTAYSPLGAKGSKWDINQILDNELTKQIAQAHGKTAAQVCLRWLFEQGVTFIPKSYNKERLKENLEIFDWSLTKDDHEKINQVKQERMFKYGTAAFPLPDLFDGET

SEQ ID NO: 3011 - protein, 321 aa, Glycine max; identical to SEQ ID NO: 3008
  misc_feature (1)..(321): Ceres Seq. ID no. 16625523

SEQ ID NO: 3012 - DNA, 583 bp, Glycine max
  misc_feature (1)..(583): Ceres Seq. ID no. 15168458
gatcccctgtagatcgatcaacattttctgctttcgcgattgattgtctaattttgtttatcggtggcattccccccccccccccccccccaacatatttcatgtcctttaattttctgcagctggcaacccacaaaaatgcaattggagtagcagttggggccactataggacacaccatctgtacctctctggctgtggtgggaggaagcatgctggcatctaagatttcccaacgctcagtagccactgttggtggcttgctcttcatcggcttttccatatcttcatacttctatccgcctctatgataattacaagtgcagagtaatctgattcgtaatggcttgtggcctctctgtcctgttttttttcccccctacataattgtctttattgtagatttgtgttgtacttgttccctaggaaagctcgatactaactggaacatgagattttgaatcccattctttttttgtaaaatatgttaagttttcgtctcctccacactagcacgtagacagacattgttatttatcattatttttggaaggtaaaagtatcatcttcttttcatggttag

SEQ ID NO: 3013 - protein, 102 aa, Glycine max
  misc_feature (1)..(102): Ceres Seq. ID no. 15168459
SPVDRSTFSAFAIDCLILFIGGIPPPPPPPTYFMSFNFLQLATHKNAIGVAVGATIGHTICTSLAVVGGSMLASKISQRSVATVGGLLFIGFSISSYFYPPL

SEQ ID NO: 3014 - protein, 69 aa, Glycine max
  misc_feature (1)..(69): Ceres Seq. ID no. 15168460
MSFNFLQLATHKNAIGVAVGATIGHTICTSLAVVGGSMLASKISQRSVATVGGLLFIGFSISSYFYPPL

SEQ ID NO: 3015 - protein, 69 aa, Glycine max; identical to SEQ ID NO: 3014
  misc_feature (1)..(69): Ceres Seq. ID no. 16625524

SEQ ID NO: 3016 - DNA, 1624 bp, Glycine max
  misc_feature (1)..(1624): Ceres Seq. ID no. 15169199
gaagaaaaaataattaaaaatagaaaagatggtggaaagataatgtggatctgattcaaaccacacgattccacgaccttattttggagccgcggtggcggtagcggtggccggcgattgtagcggcgtaggagcaagaaatggttttatgttgtgaggaagattgttaagctgtgggaatatgtcattgagaagcatagtccgtgaactcaaggagatgagagatggaataggaagcacatcaaagcggggtgcagaaagcaagcatcggctcagtcggacaaagtcacatgtagctccagatgttcttgcaactccatttgaacctattcaacagggacaatgggcaaatctaccatcagaattgcttttggacataatccagagggtcgaagagagtgagacatcttggcctgcccgtgctgttgttgtcttttgtgcttcagtatgtaaatcatggaggtccattacaagagagattgtcaagactcctgaacaatgtggaaggatcacatttcccatttcattgaagcagccgggtccgcgtgattctccaatacagtgctttatcaggaggaacaaagaaacttctacatatctattgtactttggtctggttccatcagagaatgacagtaataagttgttattagctgccaaaaggataagaagggcaacaggctccggttttgtcatatccttggctgctgatgatttttctcgagccagcaacaaatatgttggtaaactaaggtctaactttttgggtaccaagttcaccgtatatgacagtcaagctccacatgattctgcaattcaatcaaattgtcaatctagtaggagatttcattctaagcaggtgtcaccaagagttccagcatgtagctatcttgtcagcactgtttcctacgagctgaatgtcctttgcactagagggccaagaagaatgcattgtgtcatgaactctatacctgtctcagctattcaggaaggaggcaacgccccaactccaacatctttccctcaaatatttgatgaacctttttctccatcaccagcactgaaagaaaaagctcaagtcacagatttaaactctgcaagcttatcagagccaccagtattgagccaaggctcaaccgagcaattagcactgaaaaacaaggctcccagatggcatgagcagctacagtgctggtgtctaaacttcaagggtcgcgtttcagtggcttctgttaagaactttcaacttgtagctgctgttgatccatctcataatatttctgccgaggagcaagaaaaggtaatcttgcagtttggaaagattggaaaagacatatttaccatggattactgttatccactctctactttccaagccttcgccatctgcttgagcagctttgacactaaacctgcctgtgaatgagaggtgttgcattactacattgtaatcgtcatctgctgagttgttgattgccaatcctggtggcatacagctgaaatcatagctgtgctgccgttggaatcccccccttataaattggttgttgattctggaatttattctgtcttttgttttgtggtcctgtaaaattaaattaaatgaagtttagtgaattctatg

SEQ ID NO: 3017 - protein, 414 aa, Glycine max
  misc_feature (1)..(414): Ceres Seq. ID no. 15169200
MSLRSIVRELKEMRDGIGSTSKRGAESKHRLSRTKSHVAPDVLATPFEPIQQGQWANLPSELLLDIIQRVEESETSWPARAVVVFCASVCKSWRSITREIVKTPEQCGRITFPISLKQPGPRDSPIQCFIRRNKETSTYLLYFGLVPSENDSNKLLLAAKRIRRATGSGFVISLAADDFSRASNKYVGKLRSNFLGTKFTVYDSQAPHDSAIQSNCQSSRRFHSKQVSPRVPACSYLVSTVSYELNVLCTRGPRRMHCVMNSIPVSAIQEGGNAPTPTSFPQIFDEPFSPSPALKEKAQVTDLNSASLSEPPVLSQGSTEQLALKNKAPRWHEQLQCWCLNFKGRVSVASVKNFQLVAAVDPSHNISAEEQEKVILQFGKIGKDIFTMDYCYPLSTFQAFAICLSSFDTKPACE

SEQ ID NO: 3018 - protein, 402 aa, Glycine max
  misc_feature (1)..(402): Ceres Seq. ID no. 15169201
MRDGIGSTSKRGAESKHRLSRTKSHVAPDVLATPFEPIQQGQWANLPSELLLDIIQRVEESETSWPARAVVVFCASVCKSWRSITREIVKTPEQCGRITFPISLKQPGPRDSPIQCFIRRNKETSTYLLYFGLVPSENDSNKLLLAAKRIRRATGSGFVISLAADDFSRASNKYVGKLRSNFLGTKFTVYDSQAPHDSAIQSNCQSSRRFHSKQVSPRVPACSYLVSTVSYELNVLCTRGPRRMHCVMNSIPVSAIQEGGNAPTPTSFPQIFDEPFSPSPALKEKAQVTDLNSASLSEPPVLSQGSTEQLALKNKAPRWHEQLQCWCLNFKGRVSVASVKNFQLVAAVDPSHNISAEEQEKVILQFGKIGKDIFTMDYCYPLSTFQAFAICLSSFDTKPACE

SEQ ID NO: 3019 - protein, 414 aa, Glycine max; identical to SEQ ID NO: 3017
  misc_feature (1)..(414): Ceres Seq. ID no. 16625527

SEQ ID NO: 3020 - DNA, 1010 bp, Glycine max
  misc_feature (1)..(1010): Ceres Seq. ID no. 15169404
tacgtaggccccccccccaaatctcgcagtaccaacaatactgccacccctaaagcactgacaactcttcttcttcacacttctctttcagatctacacaacacacaccaaaaaataaataaaatgcaactccaactcacactctccagtctcttcctctcccttttgttaacaataacattaacatctccaaccttggcagcacaaagcaagccgcaggatctggtccggtcctcgtgcgtgcacgcgcggtacccgcgtctgtgcctgcacaccctctccaactatccgggctccgccaacacgccattagacgtggcccggacagcgctgaaggtgagcctagcgcacacacgccgggcctccaagttcctgcacgcgctttctcatgacgattcaatcatcatgagaaagcgtgagcgctccgcgctgcgagactgcacggagcagatctcggactctattgatcagcttcggcggagtctcgacgagctgcagcatctccgctcggagacattccggtggcagatgagcaacgccctgacgtgggtcagcgccgccctcaccgatggcgacacctgcctcgaaggcttcggagggaatgccaggcccgacgtcaaacggagagtcacggatgttgcgagggtcactagcaatgctttgtatatgattaatcggctgggtcaaagtaggaccggaaagcccaagtacaagcccaggcccaggactcagcctggctctgcctcaagtactgaaaaattgaattagatggtcgctgcgggcttggaaggatgagcgtgggaactgggaagtgaagctacttggtcaagaatagtacgtgaaactgtgatgtcttgttaattaattaggtaacaaccaccgtctgttgttagtacctagtacaccgtgaccacttttgcatttgtgtttcttgctacaaataaaatgatgtatattattactatgtgttataattataattataataatgctaaatccttattcagtgt

SEQ ID NO: 3021 - protein, 255 aa, Glycine max
  misc_feature (1)..(255): Ceres Seq. ID no. 15169405
YVGPPPKSRSTNNTATPKALTTLLLHTSLSDLHNTHQKINKMQLQLTLSSLFLSLLLTITLTSPTLAAQSKPQDLVRSSCVHARYPRLCLHTLSNYPGSANTPLDVARTALKVSLAHTRRASKFLHALSHDDSIIMRKRERSALRDCTEQISDSIDQLRRSLDELQHLRSETFRWQMSNALTWVSAALTDGDTCLEGFGGNARPDVKRRVTDVARVTSNALYMINRLGQSRTGKPKYKPRPRTQPGSASSTEKLN

SEQ ID NO: 3022 - protein, 214 aa, Glycine max
  misc_feature (1)..(214): Ceres Seq. ID no. 15169406
MQLQLTLSSLFLSLLLTITLTSPTLAAQSKPQDLVRSSCVHARYPRLCLHTLSNYPGSANTPLDVARTALKVSLAHTRRASKFLHALSHDDSIIMRKRERSALRDCTEQISDSIDQLRRSLDELQHLRSETFRWQMSNALTWVSAALTDGDTCLEGFGGNARPDVKRRVTDVARVTSNALYMINRLGQSRTGKPKYKPRPRTQPGSASSTEKLN

SEQ ID NO: 3023 - protein, 214 aa, Glycine max; identical to SEQ ID NO: 3022
  misc_feature (1)..(214): Ceres Seq. ID no. 16625528

SEQ ID NO: 3024 - DNA, 1587 bp, Glycine max
  misc_feature (1)..(1587): Ceres Seq. ID no. 15169415
atgaatatgatcatgaaagtattgctgctgatatttctgagctactctgtagcatactcctcatctgcgtttgagtctacaatgcacactaataattgggctgttttggtctgcacgtctcgcttctggtttaattatcggcatatggccaataccctgtcattgtataggacagttaaacggctaggaataccggatgagaggattatactcatgctagcagatgacatggcatgtaatgctagaaacaagtaccctgcccaagtttttaataatgaaaaccatatacttaatctgtatggggataatgttgaggtagactatcgtggctatgaagtgacagtggaaaactttttacgggtacttactggacgtcatgagacatctgttccaaggtccaaacgacttcttagtgatgagggaagtcatattcttctgtatatgacagggcatggaggtgatgagtttttgaagtttcaggattcagaagagcttcaaagtcacgatttagctgatgctgtgaagcaaatgaaagagaagcgcaggtttaaggagcttctgataatggtggacacctgccaagcctctactcttttttcccagcttcattcaccaggtgttttggcaattggaagtagtatgaaaggagaaaattcatattcacatcatttggattcagatgttggcgtttcagttgttgatcgttttacattttacactcttgctttctttgagaggctgaatatgtatgacaatgcttcgttgagcagccttttcaattcatataatccaaatttgttgatgtcgactgcatattacagaatggatatataccaacgctatttaaaggaggtacctgtgacaaacttctttggttctgtaatgaaaacgatacatactgattcagcctacagatcccggtcaaataaaaaaattgaggaagctaaaagcaatatgtctttggatgaatcaatctctgacagtgactcggatgacgaggatcaatttaataatttaactgctgagaaatatctctggtatagtgttggaccactatggagtgctattctcagcaatgccaatacttctgaaagcatcgatactttggtgtgctatggactgcttttaatgcttcctttgctgatattttccacatggctgtcaaagtaaagattggggaaatattccgtaagtttgttagcagagcagacacatttctttgatgctgctagatggcaccgttgcttgaaatgcaatttcacccgaaaaagcagattatttggctgcataatatgtgggacgcaaactactggtagagcagcttcatagttgttgcctatcagctgtattctgttagctattgcttttgccttggtgcagtttattctggtagccattggtgatgttggcttgctgctgctgtcatgtttcgccttgtattttgatgatgattatgattatgattgcaaactgtaaaatttttgtaaaacctcgctctatttttagatattatgttgatttccaacattagaacactgctcttttaagaactcggaaatgaaaatgcttgatcattttatctacttg

SEQ ID NO: 3025 - protein, 389 aa, Glycine max
  misc_feature (1)..(389): Ceres Seq. ID no. 15169416
MNMIMKVLLLIFLSYSVAYSSSAFESTMHTNNWAVLVCTSRFWFNYRHMANTLSLYRTVKRLGIPDERIILMLADDMACNARNKYPAQVFNNENHILNLYGDNVEVDYRGYEVTVENFLRVLTGRHETSVPRSKRLLSDEGSHILLYMTGHGGDEFLKFQDSEELQSHDLADAVKQMKEKRRFKELLIMVDTCQASTLFSQLHSPGVLAIGSSMKGENSYSHHLDSDVGVSVVDRFTFYTLAFFERLNMYDNASLSSLFNSYNPNLLMSTAYYRMDIYQRYLKEVPVTNFFGSVMKTIHTDSAYRSRSNKKIEEAKSNMSLDESISDSDSDDEDQFNNLTAEKYLWYSVGPLWSAILSNANTSESIDTLVCYGLLLMLPLLIFSTWLSK

SEQ ID NO: 3026 - protein, 387 aa, Glycine max
  misc_feature (1)..(387): Ceres Seq. ID no. 15169417
MIMKVLLLIFLSYSVAYSSSAFESTMHTNNWAVLVCTSRFWFNYRHMANTLSLYRTVKRLGIPDERIILMLADDMACNARNKYPAQVFNNENHILNLYGDNVEVDYRGYEVTVENFLRVLTGRHETSVPRSKRLLSDEGSHILLYMTGHGGDEFLKFQDSEELQSHDLADAVKQMKEKRRFKELLIMVDTCQASTLFSQLHSPGVLAIGSSMKGENSYSHHLDSDVGVSVVDRFTFYTLAFFERLNMYDNASLSSLFNSYNPNLLMSTAYYRMDIYQRYLKEVPVTNFFGSVMKTIHTDSAYRSRSNKKIEEAKSNMSLDESISDSDSDDEDQFNNLTAEKYLWYSVGPLWSAILSNANTSESIDTLVCYGLLLMLPLLIFSTWLSK

SEQ ID NO: 3027 - protein, 385 aa, Glycine max
  misc_feature (1)..(385): Ceres Seq. ID no. 15169418
MKVLLLIFLSYSVAYSSSAFESTMHTNNWAVLVCTSRFWFNYRHMANTLSLYRTVKRLGIPDERIILMLADDMACNARNKYPAQVFNNENHILNLYGDNVEVDYRGYEVTVENFLRVLTGRHETSVPRSKRLLSDEGSHILLYMTGHGGDEFLKFQDSEELQSHDLADAVKQMKEKRRFKELLIMVDTCQASTLFSQLHSPGVLAIGSSMKGENSYSHHLDSDVGVSVVDRFTFYTLAFFERLNMYDNASLSSLFNSYNPNLLMSTAYYRMDIYQRYLKEVPVTNFFGSVMKTIHTDSAYRSRSNKKIEEAKSNMSLDESISDSDSDDEDQFNNLTAEKYLWYSVGPLWSAILSNANTSESIDTLVCYGLLLMLPLLIFSTWLSK

SEQ ID NO: 3028 - protein, 389 aa, Glycine max; identical to SEQ ID NO: 3025
  misc_feature (1)..(389): Ceres Seq. ID no. 16625529

SEQ ID NO: 3029 - DNA, 1164 bp, Glycine max
  misc_feature (1)..(1164): Ceres Seq. ID no. 15169703
ataaattaagaaccctcttttgggaggtgtccttctttttcatgcccatctttcccctaatgctggtggtgggttcagttttttggtgaggaaggataataaagaaggaagctttttttgtgtgagagaaggaagaggagaaaagaaggcatggggagagggaagattgagattaagaagattgagaatttgaacagcagacaagttaccttctccaagaggagaaatgggttgttgaagaaggccaaagagttgtctgttctctgtgatgcagaggttgctgtcatcatattctccagcactggcaagctttatgagttctcaaacacaagcatggagcataccctttcgaggtacagtaaaggcgcagaatcagattctgcagagcaacctattgatgtgcccccaacagatgttatggctgtggagcctgatactaaccttttgatggaggaaataacaaagcttcgatcagcatacttaaggatgatgggtaaggagcttgatggattgagccttaaagaactgcaacaactagaaaatcaactaagtgaagggatgcaatctgtcaaagacaagaaggaacaagtacttgtggaacagcttaggaagtccaggatacaggagcaaaaggccatgctggaaaatgaagttctgcgcaaacagcttgaggaaatacaaaataaaacaaagtcacagttccttgaattcagctctttggataggacattttccaagaatggttcaaaatcccttttcaattgtgcttcagaggaaaatgacctttcagatacttccttgcagttagggttgtcaacagattatggtcgccagaggaaagcattgaagatggaaccttgcaacgactcagggagtcaagtggcttcacattgacattttagtactgaaagcttacctttagaacatgggaaacatggcctagttctttatctggtcacattaagtttagcttatagaaatagtttaggctaaatttaataaatttatatttagttcacaaatttttggctttcaccagcgtttgattgctaaattaggtgtaagtttacatgctaaatgactcaccctattgaaatactttagtcatttagttcaaccaaacggttttcaggttattaagatggttgattagataaaaaggtc

SEQ ID NO: 3030 - protein, 247 aa, Glycine max
  misc_feature (1)..(247): Ceres Seq. ID no. 15169704
MGRGKIEIKKIENLNSRQVTFSKRRNGLLKKAKELSVLCDAEVAVIIFSSTGKLYEFSNTSMEHTLSRYSKGAESDSAEQPIDVPPTDVMAVEPDTNLLMEEITKLRSAYLRMMGKELDGLSLKELQQLENQLSEGMQSVKDKKEQVLVEQLRKSRIQEQKAMLENEVLRKQLEEIQNKTKSQFLEFSSLDRTFSKNGSKSLFNCASEENDLSDTSLQLGLSTDYGRQRKALKMEPCNDSGSQVASH

SEQ ID NO: 3031 - protein, 186 aa, Glycine max
  misc_feature (1)..(186): Ceres Seq. ID no. 15169705
MEHTLSRYSKGAESDSAEQPIDVPPTDVMAVEPDTNLLMEEITKLRSAYLRMMGKELDGLSLKELQQLENQLSEGMQSVKDKKEQVLVEQLRKSRIQEQKAMLENEVLRKQLEEIQNKTKSQFLEFSSLDRTFSKNGSKSLFNCASEENDLSDTSLQLGLSTDYGRQRKALKMEPCNDSGSQVASH

SEQ ID NO: 3032 - protein, 158 aa, Glycine max
  misc_feature (1)..(158): Ceres Seq. ID no. 15169706
MAVEPDTNLLMEEITKLRSAYLRMMGKELDGLSLKELQQLENQLSEGMQSVKDKKEQVLVEQLRKSRIQEQKAMLENEVLRKQLEEIQNKTKSQFLEFSSLDRTFSKNGSKSLFNCASEENDLSDTSLQLGLSTDYGRQRKALKMEPCNDSGSQVASH

SEQ ID NO: 3033 - protein, 247 aa, Glycine max; identical to SEQ ID NO: 3030
  misc_feature (1)..(247): Ceres Seq. ID no. 16625533

SEQ ID NO: 3034 - DNA, 1081 bp, Glycine max
  misc_feature (1)..(1081): Ceres Seq. ID no. 15169849
gagagagaggtatataagaggttagggtttggggttttttgggtgccattgttgctgtcatcatccgcagctgctgttattcgcaccgcaaacaaacagtgagccatggccgtcggaaagaacaagcgcatctccaaagggaaaaagggtggcaagaagaaggcagctgatccctttgccaagaaggattggtatgacattaaggccccttctctttttcaagtgaaaaatgttggcaaaaccctcgtctctcgtacgcagggtaccaagattgcttctgaaggacttaaacatagagtgtttgaggtctccttggctgatcttcaaggggatgaggatcatgcattcaagaagattaggttgagagctgaagatgtgcaagggaagaatgtcctgacaaatttctggggaatggatttcacaactgacaagctgaggtcattggtgcgaaaatggcaaactctaattgaagcccatgtggatgtgaagacaactgataactacacattgaggatgttttgcattggatttaccaagagaagagctaaccaagtgaagagaacctgctatgcacaatcaagccagattagacagattcgtaggaagatgagggagatcatgaccacccaggcaacatcctgtgatttgaaggagttggtccgcaagtttattcttgagattattggaaaagagattgagaaggcgacatctagtatttaccctctgcagaaagtgtttgttcgtaaagtcaagatcctgaaagcccctaagtttgatcttgggaaactgatggaggttcatggagattactcagaggatgttggtgccaaggtagacagacctgctgatgaaatagtggcagaggaacccactgaaattgttggagcttgatttcatgatgcattcagtttgttttaggttttctttttcttacgttatcattgaaaattaagttacaaacttctgtccaatgtttctgtgtaagccgagtgacacagttttgtttagacaatcagaagacatttttggcgcgtaatatatctgggttttgttcagaacccaaaatcagatttgcttgctt

SEQ ID NO: 3035 - protein, 261 aa, Glycine max
  misc_feature (1)..(261): Ceres Seq. ID no. 15169850
MAVGKNKRISKGKKGGKKKAADPFAKKDWYDIKAPSLFQVKNVGKTLVSRTQGTKIASEGLKHRVFEVSLADLQGDEDHAFKKIRLRAEDVQGKNVLTNFWGMDFTTDKLRSLVRKWQTLIEAHVDVKTTDNYTLRMFCIGFTKRRANQVKRTCYAQSSQIRQIRRKMREIMTTQATSCDLKELVRKFILEIIGKEIEKATSSIYPLQKVFVRKVKILKAPKFDLGKLMEVHGDYSEDVGAKVDRPADEIVAEEPTEIVGA

SEQ ID NO: 3036 - protein, 159 aa, Glycine max
  misc_feature (1)..(159): Ceres Seq. ID no. 15169851
MDFTTDKLRSLVRKWQTLIEAHVDVKTTDNYTLRMFCIGFTKRRANQVKRTCYAQSSQIRQIRRKMREIMTTQATSCDLKELVRKFILEIIGKEIEKATSSIYPLQKVFVRKVKILKAPKFDLGKLMEVHGDYSEDVGAKVDRPADEIVAEEPTEIVGA

SEQ ID NO: 3037 - protein, 261 aa, Glycine max; identical to SEQ ID NO: 3035
  misc_feature (1)..(261): Ceres Seq. ID no. 16625534

SEQ ID NO: 3038 - DNA, 1241 bp, Glycine max
  misc_feature (1)..(1241): Ceres Seq. ID no. 15171001
ggtgtgagcatgaatgtgggtgtgtgtgagatgcattctgtaatctgcagcaccgtcgtttcactttcaccatacgactcttgtcgccggaaccctaaccgattgcgcgccaaatcctctctgctcgttcagaaacaggacgcccaactctccgactccgactccgactccgtctccgtctcgcgccgcctcattctccttcgccatgctaagagttcctgggataatcgctctctccgcgaccatgaccggccactgagcaagtctgggaaagaggatgctgtgagagtttcccgcaggctccaacagttgggttggattcctgaacttatcttgtccagtgatgcagcgcggactaaggagacgcttaagataatgcaggagcaagtgcaggagctggtggaagccgaggttcattttgtttctagtttctattcgattgcagctatggatgggcaaacggcagagcaccttcaaaagattatttgtaaatattcaagggatgagatacttactataatgtgcatgggacacaatagggggtgggaagaagcagcatcaatgttttctggggcctctgtggaattaaagacttgcaatgctgcactgcttgagtctgctggaaaatcctgggatgaggcatttgccactgcaggatttggtggctggaagcttcagggtataataaaaccaagtagctagctagttgagattttccgtactgggtaaacttaaaaatagatatgcaagaggttggaagcatcattacttattcaaggaacccaaaacgcctcagttaaggctacagagctgatgacttcggaaagtatatacttgaggaaagatgaatatgatggcaaaagcttcagttagatgtgtttaatttagcagctatgaattgtttacatggtgattcaagatgaaacgttgctgtggataatgtgcaggatctcaatgcttcatatatgctgcttggtgttgagcatttgttcattgaagtgaactcatgctgctcagtggttgttaatacatgcacaactacaggtttccaaaggaaaaaaatattgcttctgtaaatcatatgctgtggcaaaaaaaagaggcatttcctgttactttacttcccttttaccccttctcttctaccttgataataaagattggaaatctatttcgaaataccaaaatggtattggttaatgattatcatcaacctagacaagaagtcttggcttaaatgc

SEQ ID NO: 3039 - protein, 233 aa, Glycine max
  misc_feature (1)..(233): Ceres Seq. ID no. 15171002
GVSMNVGVCEMHSVICSTVVSLSPYDSCRRNPNRLRAKSSLLVQKQDAQLSDSDSDSVSVSRRLILLRHAKSSWDNRSLRDHDRPLSKSGKEDAVRVSRRLQQLGWIPELILSSDAARTKETLKIMQEQVQELVEAEVHFVSSFYSIAAMDGQTAEHLQKIICKYSRDEILTIMCMGHNRGWEEAASMFSGASVELKTCNAALLESAGKSWDEAFATAGFGGWKLQGIIKPSS

SEQ ID NO: 3040 - protein, 230 aa, Glycine max
  misc_feature (1)..(230): Ceres Seq. ID no. 15171003
MNVGVCEMHSVICSTVVSLSPYDSCRRNPNRLRAKSSLLVQKQDAQLSDSDSDSVSVSRRLILLRHAKSSWDNRSLRDHDRPLSKSGKEDAVRVSRRLQQLGWIPELILSSDAARTKETLKIMQEQVQELVEAEVHFVSSFYSIAAMDGQTAEHLQKIICKYSRDEILTIMCMGHNRGWEEAASMFSGASVELKTCNAALLESAGKSWDEAFATAGFGGWKLQGIIKPSS

SEQ ID NO: 3041 - protein, 223 aa, Glycine max
  misc_feature (1)..(223): Ceres Seq. ID no. 15171004
MHSVICSTVVSLSPYDSCRRNPNRLRAKSSLLVQKQDAQLSDSDSDSVSVSRRLILLRHAKSSWDNRSLRDHDRPLSKSGKEDAVRVSRRLQQLGWIPELILSSDAARTKETLKIMQEQVQELVEAEVHFVSSFYSIAAMDGQTAEHLQKIICKYSRDEILTIMCMGHNRGWEEAASMFSGASVELKTCNAALLESAGKSWDEAFATAGFGGWKLQGIIKPSS

SEQ ID NO: 3042 - protein, 230 aa, Glycine max; identical to SEQ ID NO: 3040
  misc_feature (1)..(230): Ceres Seq. ID no. 16625540

SEQ ID NO: 3043 - DNA, 1689 bp, Glycine max
  misc_feature (1)..(1689): Ceres Seq. ID no. 15171418
aaattactctcttcttctgcactttactttttttcttcactcctcttccgttttctctcactaacctcatttctccgtcggcaaaccctaaagcccattcattttgttcgccggcgactaatttaccggcccggcccggcccgaaatattcgacccgaaccgcgcgtggttactgttttctctggagagagagagagaagggggtggtggtggaaatgtacaagaaccagcttcaagagctggcccagcggagctgcttcaacctgccttcgtacgcgtgcattcgagaaggtcccgatcacgcgccgaggttcaaggccaccgtcaactttaacggcgagatcttcgagagccctcactactgctccactctccgtcaggccgaacactccgctgccgaagtcgctctcaattccctctcccaccgtggcccctcccactccctcgccgccaagatcctcgatgagactggagtgtacaagaaccttctacaggaaatcgcgcaaagggtaggagctccattgcctcattacacaacgtacaggtcaggcttaggacatttacctgtttttaccgggatagtagaactggctggaatcacgtttactggtgaacctgccaagaataagaaacaagctgagaaaaatgcagctatggcagcttggtccgctttaaaacaattggcgaaagagactgcaagctcctcaactgaaccagagaacaatgacgaactggaacagattacaatagcgcgggctttactgaactaccgtttgaaggaaaagatggctatgtctaatccaaatgctcccgtttcatttcataaaaggtttcagattcaaaatccaaggccaatcagttctcaaccgccaccagccacttcatcaaagatccttcccctaatttgccagaagacagcacctcgaagtaagccttcattggcaacaacggcaaatgaaagtcctcgaagcaggcatccacaggcagcaatgaccagtgacaattccaccctgccaccacaatcttgttctctagaaagccgagcaactcgtccactgaaattccgtgcagcaggagcagcaccttatgttcccattcgacaaatgagaccatcttgccagcggattgcacctccggtaactataaggacagttgtacctgcatttgccacaccaccttgtccaccacctgcctcagtgccccatcctgctatacgggctcctccagtacgagttgctcctccagtcactattcggcaagctgttcctgtatatgctgctccaccttcaaaaaagaatgaacctgctgctgtacaacaaaaagatctaccaactgctggtgcctctggccagcaagacaaactgcccgttaaaattcaggagatggacaaggctgagaacattccaccagaatcagagactatgcgtagtttggagcagctgagaatttgaaatttattggagtaggtctaatccatggtaacgctgtcatgtttttgtacttgatcctatgatgagtgatgttaaatcatcgattcctttttctttaccccattttgtcctgttaaatgtgtgacagttggcgcaggttgattagcatcagcagttcaatatatgtgaaattcaagagcagtttgtcattcgatttactcatgtttttactttatttatatgcataccaaatcttgtt

SEQ ID NO: 3044 - protein, 482 aa, Glycine max
  misc_feature (1)..(482): Ceres Seq. ID no. 15171419
ITLFFCTLLFFFTPLPFSLTNLISPSANPKAHSFCSPATNLPARPGPKYSTRTARGYCFLWREREKGVVVEMYKNQLQELAQRSCFNLPSYACIREGPDHAPRFKATVNFNGEIFESPHYCSTLRQAEHSAAEVALNSLSHRGPSHSLAAKILDETGVYKNLLQEIAQRVGAPLPHYTTYRSGLGHLPVFTGIVELAGITFTGEPAKNKKQAEKNAAMAAWSALKQLAKETASSSTEPENNDELEQITIARALLNYRLKEKMAMSNPNAPVSFHKRFQIQNPRPISSQPPPATSSKILPLICQKTAPRSKPSLATTANESPRSRHPQAAMTSDNSTLPPQSCSLESRATRPLKFRAAGAAPYVPIRQMRPSCQRIAPPVTIRTVVPAFATPPCPPPASVPHPAIRAPPVRVAPPVTIRQAVPVYAAPPSKKNEPAAVQQKDLPTAGASGQQDKLPVKIQEMDKAENIPPESETMRSLEQLRI

SEQ ID NO: 3045 - protein, 411 aa, Glycine max
  misc_feature (1)..(411): Ceres Seq. ID no. 15171420
MYKNQLQELAQRSCFNLPSYACIREGPDHAPRFKATVNFNGEIFESPHYCSTLRQAEHSAAEVALNSLSHRGPSHSLAAKILDETGVYKNLLQEIAQRVGAPLPHYTTYRSGLGHLPVFTGIVELAGITFTGEPAKNKKQAEKNAAMAAWSALKQLAKETASSSTEPENNDELEQITIARALLNYRLKEKMAMSNPNAPVSFHKRFQIQNPRPISSQPPPATSSKILPLICQKTAPRSKPSLATTANESPRSRHPQAAMTSDNSTLPPQSCSLESRATRPLKFRAAGAAPYVPIRQMRPSCQRIAPPVTIRTVVPAFATPPCPPPASVPHPAIRAPPVRVAPPVTIRQAVPVYAAPPSKKNEPAAVQQKDLPTAGASGQQDKLPVKIQEMDKAENIPPESETMRSLEQLRI

SEQ ID NO: 3046 - protein, 265 aa, Glycine max
  misc_feature (1)..(265): Ceres Seq. ID no. 15171421
MAAWSALKQLAKETASSSTEPENNDELEQITIARALLNYRLKEKMAMSNPNAPVSFHKRFQIQNPRPISSQPPPATSSKILPLICQKTAPRSKPSLATTANESPRSRHPQAAMTSDNSTLPPQSCSLESRATRPLKFRAAGAAPYVPIRQMRPSCQRIAPPVTIRTVVPAFATPPCPPPASVPHPAIRAPPVRVAPPVTIRQAVPVYAAPPSKKNEPAAVQQKDLPTAGASGQQDKLPVKIQEMDKAENIPPESETMRSLEQLRI

SEQ ID NO: 3047 - protein, 411 aa, Glycine max; identical to SEQ ID NO: 3045
  misc_feature (1)..(411): Ceres Seq. ID no. 16625545

SEQ ID NO: 3048 - DNA, 1235 bp, Glycine max
  misc_feature (1)..(1235): Ceres Seq. ID no. 15171539
ttttttctcttccattcgccatggccgtggatcttccctcgcatctcttctcgcgccgaaacctgcacttccattcaacgccgctctacgacctcgccgtttacctcaaaacgacgggcatgttagaggattttctagctcgaatttagattggaggaggcttattgtgaaccagaatgtgaatgcagatgcaaatgctcatccagattctatgcaggatatagagaaaagaaactccgaaaagtggaataatatgagacagaatatgaatccagatgcaaatgctcctccaaattttgtgcagaatagagggaacataaactccagaagctggaataatatgcgacagaatgtaaatgctcctccaaattttatggggaatagagacaacataaactccagaagccagaataatatggaccagaatgtggatgcaaatgcagatgctcttccagattttatgcaagataaagagaacataaacatcggaaacaagaattatgctgagactggctggaactctaggcctatggactttgtaagaggaattatagatgaagataattttgggaggggttctccatatcatcagtatcaatatgagcaggatgctgattttgttcatataaagatgttgcgtaataatacctttgttactgtaacagattctaaaggaaatataaaactcagtggctctgccggtccattgaaagacctgaaatcagggcaaaagctttctaggtatgctgccgaggcaaccgcggaagttgttggccgaaaggctaggggcttgggattgaaatctgttgtcatgaaagtgaatggatttacacattttaggagaaaaaggaatgcaataatgagctggaaggagggctttactgctggttctagaggggatagaaatccaattgtatacattgaagataccactagaaaaccccataatggctgcagactcccaaagaaacgacgaatttaggtgttatgatactgaggtggttgaagaaagcattatttaacttggatgaagaaacaatttaggtgctttttttaggcacatgatgatatttttatttagcacatttcattatgcttctagttgttactacttgtagactgtccgtttgctgcctctttacagttgtacaatttcaaagattcaataaccagaattttctgtaacagtatgtattgaatcactattctcaattgaatggggctcatactttttg

SEQ ID NO: 3049 - protein, 326 aa, Glycine max
  misc_feature (1)..(326): Ceres Seq. ID no. 15171540
FFSSIRHGRGSSLASLLAPKPALPFNAALRPRRLPQNDGHVRGFSSSNLDWRRLIVNQNVNADANAHPDSMQDIEKRNSEKWNNMRQNMNPDANAPPNFVQNRGNINSRSWNNMRQNVNAPPNFMGNRDNINSRSQNNMDQNVDANADALPDFMQDKENINIGNKNYAETGWNSRPMDFVRGIIDEDNFGRGSPYHQYQYEQDADFVHIKMLRNNTFVTVTDSKGNIKLSGSAGPLKDLKSGQKLSRYAAEATAEVVGRKARGLGLKSVVMKVNGFTHFRRKRNAIMSWKEGFTAGSRGDRNPIVYIEDTTRKPHNGCRLPKKRRI

SEQ ID NO: 3050 - protein, 256 aa, Glycine max
  misc_feature (1)..(256): Ceres Seq. ID no. 15171541
MQDIEKRNSEKWNNMRQNMNPDANAPPNFVQNRGNINSRSWNNMRQNVNAPPNFMGNRDNINSRSQNNMDQNVDANADALPDFMQDKENINIGNKNYAETGWNSRPMDFVRGIIDEDNFGRGSPYHQYQYEQDADFVHIKMLRNNTFVTVTDSKGNIKLSGSAGPLKDLKSGQKLSRYAAEATAEVVGRKARGLGLKSVVMKVNGFTHFRRKRNAIMSWKEGFTAGSRGDRNPIVYIEDTTRKPHNGCRLPKKRRI

SEQ ID NO: 3051 - protein, 242 aa, Glycine max
  misc_feature (1)..(242): Ceres Seq. ID no. 15171542
MRQNMNPDANAPPNFVQNRGNINSRSWNNMRQNVNAPPNFMGNRDNINSRSQNNMDQNVDANADALPDFMQDKENINIGNKNYAETGWNSRPMDFVRGIIDEDNFGRGSPYHQYQYEQDADFVHIKMLRNNTFVTVTDSKGNIKLSGSAGPLKDLKSGQKLSRYAAEATAEVVGRKARGLGLKSVVMKVNGFTHFRRKRNAIMSWKEGFTAGSRGDRNPIVYIEDTTRKPHNGCRLPKKRRI

SEQ ID NO: 3052 - protein, 256 aa, Glycine max; identical to SEQ ID NO: 3050
  misc_feature (1)..(256): Ceres Seq. ID no. 16625547

SEQ ID NO: 3053 - DNA, 1110 bp, Glycine max
  misc_feature (1)..(1110): Ceres Seq. ID no. 15171797
attcttattgtctccccgcatcgtacgccgccgacacagcttcgaatcgctgccaagtgctaacaaacgcctctgagtctctgacaccaacgcaactctctctgctcacatttttgaaggagatggtgaacgtgatggagtggcagaagcagcgttggcaaccgaatgggaacgcggaaatgatgtacgtgaaagtgatgaccgacgaacagctcgagactctgcgcaaacagattgcagtttacgcaaccatctgtgaacaactcatcgaaatgcacaaaaacatctcctcgcaccaagatcttgcagggattaggctggggaatatgtattgtgatccattgttggggtctggtgggcacaaaatagcttcaaggcagcggtggactccgtccgctatgcagcttcagattcttgagcgaatatttgatcaaggggctggaacccccaccaaggaaaagatcaaggagatcactaatgagctcagccagcatggccagatttctgagaccaatgtgtataattggttccagaacaggcgtgctcgctccaaaagaaagcagcagaatgtggcacctagtgctaatgctgaatcggaagtggagactgaggttgattctaaggataagaagacaaagccggacgaatttcagtcccctcctagcgtttctgctgtgcctgctgatgataatttaggcttccagaaccatggcagtttgcagtacttgaatccagagtccaacaaaccagattctgtgttcccatctgatgcaagtttaagatctacaagaaatttcaatcatgtgcctgtttttgatgggctgctatcgaactcaacgagtgactatcttactggaaaaatggaagcacctgagaactacgacttataccagccagcaggcgacttcaacatggcaggttgacgtccaatgtaatttctgaagactgtgattagctgtaaagaattgctggtgtggttttgggcttgtgttgatgtgaaaagttgaaccaattgaagcatgaaacttatagtttatagtatatagataaaatgatcttttataatggtaggcggacattttacttgataattgaatataattatgagtt

SEQ ID NO: 3054 - protein, 306 aa, Glycine max
  misc_feature (1)..(306): Ceres Seq. ID no. 15171798
SYCLPASYAADTASNRCQVLTNASESLTPTQLSLLTFLKEMVNVMEWQKQRWQPNGNAEMMYVKVMTDEQLETLRKQIAVYATICEQLIEMHKNISSHQDLAGIRLGNMYCDPLLGSGGHKIASRQRWTPSAMQLQILERIFDQGAGTPTKEKIKEITNELSQHGQISETNVYNWFQNRRARSKRKQQNVAPSANAESEVETEVDSKDKKTKPDEFQSPPSVSAVPADDNLGFQNHGSLQYLNPESNKPDSVFPSDASLRSTRNFNHVPVFDGLLSNSTSDYLTGKMEAPENYDLYQPAGDFNMAG

SEQ ID NO: 3055 - protein, 266 aa, Glycine max
  misc_feature (1)..(266): Ceres Seq. ID no. 15171799
MVNVMEWQKQRWQPNGNAEMMYVKVMTDEQLETLRKQIAVYATICEQLIEMHKNISSHQDLAGIRLGNMYCDPLLGSGGHKIASRQRWTPSAMQLQILERIFDQGAGTPTKEKIKEITNELSQHGQISETNVYNWFQNRRARSKRKQQNVAPSANAESEVETEVDSKDKKTKPDEFQSPPSVSAVPADDNLGFQNHGSLQYLNPESNKPDSVFPSDASLRSTRNFNHVPVFDGLLSNSTSDYLTGKMEAPENYDLYQPAGDFNMAG

SEQ ID NO: 3056 - protein, 262 aa, Glycine max
  misc_feature (1)..(262): Ceres Seq. ID no. 15171800
MEWQKQRWQPNGNAEMMYVKVMTDEQLETLRKQIAVYATICEQLIEMHKNISSHQDLAGIRLGNMYCDPLLGSGGHKIASRQRWTPSAMQLQILERIFDQGAGTPTKEKIKEITNELSQHGQISETNVYNWFQNRRARSKRKQQNVAPSANAESEVETEVDSKDKKTKPDEFQSPPSVSAVPADDNLGFQNHGSLQYLNPESNKPDSVFPSDASLRSTRNFNHVPVFDGLLSNSTSDYLTGKMEAPENYDLYQPAGDFNMAG

SEQ ID NO: 3057 - protein, 262 aa, Glycine max; identical to SEQ ID NO: 3056
  misc_feature (1)..(262): Ceres Seq. ID no. 16625548

SEQ ID NO: 3058 - DNA, 1617 bp, Glycine max
  misc_feature (1)..(1617): Ceres Seq. ID no. 15172112
aagaggggcttccccacgccatcctctctcccaacaagagagcgaacgagcccattcctgtttctccaccaccgaacacacacacgccctttgcttccttcctcacctcgcgctaacctgcaccccccttcttatcctgcgcaccccttctttatccaattctttcctcagattcggagcaccgcgcgcgccaccattgggaaaagaggttccggtgctgggggcctagggttagggtttctgagagatgtgggatgctccatgcattgatgagccttatcgcgcgctgttggaagccgttcgggcacggtgacgatgccggtaatgccgccgccggaagagaatgcaaggacggcctcctctggttccgcgacatcggaaagtttgcagccggcgatttctccatggccgtcgtccaggccaaccaggtcatcgaggaccagagccagatcgagtccggcgccttcggcaccttcgtcggcgtctacgacggccacggcggccccgattgctcccgctacgtttgcgataacttgttccgcaatctccaagcgatattggccgagtcacagagtgttgtgacatctgaggccattcatcaggcgttccggcggacagaggaggggtttacggcgcttgtttcggagctgtggagctctcggccgcagattgcgactactgggacgtgttgtttggttggggttatttgtcggcagacactctttgtggcaagtcttggagattcccgtgctgtgttgggtaggagagttggcaacaccggtgggatggccgcgattcagttgtctacggagcacaatgcgaattttgaggctgtcaggcaggagcttaaggaattgcacccgaatgacccccagattgttgtcctcaaacatggagtgtggagagtaaagggcattattcaggtttctagatctataggtgacgtatatatgaaacatgcgcagtttaaccgagaacccattaatgcaaaattcagactccccgaaccaatgaacatgcctttcttgtctgctaatccaactattctttctcatcctctccaaccaaatgattccttccttatatttgcatcagatggtttatgggagcacctgagtaatgatcaagcagtggatattgttcacagcagtccatgcgcgggtagtgcgaagaaacttgtcaaggctgccctacaagaagcagcaagaaaacgtgaaatgcgatattcagacctttacaagattgacaagaaggttcgtcgccattttcacgacgatataactgttattgttttattcttaaaccacaaccttatatccaggggtgcagttctaaatacaccacttacaattcgtagtgctctcgatcactgacgcttcatgatttgtaaacatgcttctcttatacgggtgttctggcaactgtgccaataccagaaaatacaccattggtacgttgctagaatataccattcatagtgctgccacgtatggttactgataccgagacaacttattgatgacgcacgaacttgtaacacttgttagaagtttatccatgaaaatgaaaaagagaaaaagaaaaaaaaaaatatcagaaaagtaacttttgattagt

SEQ ID NO: 3059 - protein, 372 aa, Glycine max
  misc_feature (1)..(372): Ceres Seq. ID no. 15172113
MLHALMSLIARCWKPFGHGDDAGNAAAGRECKDGLLWFRDIGKFAAGDFSMAVVQANQVIEDQSQIESGAFGTFVGVYDGHGGPDCSRYVCDNLFRNLQAILAESQSVVTSEAIHQAFRRTEEGFTALVSELWSSRPQIATTGTCCLVGVICRQTLFVASLGDSRAVLGRRVGNTGGMAAIQLSTEHNANFEAVRQELKELHPNDPQIVVLKHGVWRVKGIIQVSRSIGDVYMKHAQFNREPINAKFRLPEPMNMPFLSANPTILSHPLQPNDSFLIFASDGLWEHLSNDQAVDIVHSSPCAGSAKKLVKAALQEAARKREMRYSDLYKIDKKVRRHFHDDITVIVLFLNHNLISRGAVLNTPLTIRSALDH

SEQ ID NO: 3060 - protein, 367 aa, Glycine max
  misc_feature (1)..(367): Ceres Seq. ID no. 15172114
MSLIARCWKPFGHGDDAGNAAAGRECKDGLLWFRDIGKFAAGDFSMAVVQANQVIEDQSQIESGAFGTFVGVYDGHGGPDCSRYVCDNLFRNLQAILAESQSVVTSEAIHQAFRRTEEGFTALVSELWSSRPQIATTGTCCLVGVICRQTLFVASLGDSRAVLGRRVGNTGGMAAIQLSTEHNANFEAVRQELKELHPNDPQIVVLKHGVWRVKGIIQVSRSIGDVYMKHAQFNREPINAKFRLPEPMNMPFLSANPTILSHPLQPNDSFLIFASDGLWEHLSNDQAVDIVHSSPCAGSAKKLVKAALQEAARKREMRYSDLYKIDKKVRRHFHDDITVIVLFLNHNLISRGAVLNTPLTIRSALDH

SEQ ID NO: 3061 - protein, 322 aa, Glycine max
  misc_feature (1)..(322): Ceres Seq. ID no. 15172115
MAVVQANQVIEDQSQIESGAFGTFVGVYDGHGGPDCSRYVCDNLFRNLQAILAESQSVVTSEAIHQAFRRTEEGFTALVSELWSSRPQIATTGTCCLVGVICRQTLFVASLGDSRAVLGRRVGNTGGMAAIQLSTEHNANFEAVRQELKELHPNDPQIVVLKHGVWRVKGIIQVSRSIGDVYMKHAQFNREPINAKFRLPEPMNMPFLSANPTILSHPLQPNDSFLIFASDGLWEHLSNDQAVDIVHSSPCAGSAKKLVKAALQEAARKREMRYSDLYKIDKKVRRHFHDDITVIVLFLNHNLISRGAVLNTPLTIRSALDH

SEQ ID NO: 3062 - protein, 372 aa, Glycine max; identical to SEQ ID NO: 3059
  misc_feature (1)..(372): Ceres Seq. ID no. 16612048

SEQ ID NO: 3063 - DNA, 2073 bp, Glycine max
  misc_feature (1)..(2073): Ceres Seq. ID no. 15172410
acgctcccttaacgccctctcttttcttgcaaacccttttcccctctctctttctctctctaaaccccacattttctctctctaaaaccctacaccactctccccttccttccgatccttctcccgtttccctccaatttccccccaataccgctgggccccatctcctccccttttcccgcctcctcatgtccagcgccgccggagctcccgatcgccgcgcctctccgccgcgggtggctgccggcgcccccacccgcccgccgctcaagcgccacctcgccttcatcacgaaaccgcccttcgccccgcctgacgagtaccacagcttctccagtattggctcccgccgcgccgccgatgaagccgtcgtcgttagatctccgtacatcatgaagcggaagagtggaatgaatgacagtgaaggggagtcactagcacaaaagtggagtaacagtcctggatacactaatgttagcaatgtaacaaataatagtccctttaaaactcctgtgtctgcaaaagggggaaggacacagaaggcaaaggcttccaaaggcagatcatgtcctccgacacccatctcaaatgctggttccccttctcctcttactcctgctagcagctgtcgttatgacagttccttaggtctcttgacaaaaaagttcatcaatttggtcaaacatgcagagggtggtattcttgacctaaataaagcagcagaaactttggaggtgcaaaagaggagaatatatgacataactaatgttttggaaggcattggtctcattgaaaagaagctcaagaacagaatacattggaagggaattgaatctgctacatctggtgatgtggatggtgatatctctttgcttaaggcagaagttgagaaactttctttggaggagcagggaatagatgatcaaataagggaaatgcaagaaaggctgaggaatttgagtgaaaatgaaaacaaccagaagtgcctttttgtgactgaagaagatattaaggacctaccttgcttccagaatgaaactctaatagcaattaaagctccgcatggaaccaccctggaagtccccgatcctgaggaagctgtagactatccacagagaagatatagaatcattcttagaagcacaatgggtcccattgatgtctatcttatcagtcaatttgaagagaaatttgaagaagttaatggtgctgagctcccaatgatcccacttgcttccagttctggttccaatgagcaactaatgacagaaattgttactgctgaatgcagcggaaaagaacttgaacctcaaactcagctctcttctcatgcattctctgatgcttcacaagagtttgctggtggcatgatgaagattgtcccttcagatgttgataatgatgcagactattggcttctatcagatgctgacattagtataacagatatgtggagaacagattctagtgtcgattggaatggtgtagacatgcttcatcctgactttggagtcatttcaaggcctcaaactccatcatctgggtttgctgaagtgccatcaacagcagcaaactctattcagaagtgatttcgatttgcctattcagaaagtatggatggccttcatcctttgcacaaagagactctacttcaatagagtgattgttagccttgaggatgtcaagaggtgttgaatgtcaagctgagagtggttgctttacttaagttaaatcattgactctgacaaataaacttagttacagtagacatagtatgctcttagaggatttaacttggaagatacagcagttgcgttaagtttttattacagaaaatgttacagctgtatgaaatgtaaacaaggcagtctcaatcagtatatattgtcatatgattagcctggaaccgtggtttcagtttttttgagtttctgcatatatgctgactggaaacaaacatggctgcactggataatgttaggacagaaccacctcattattgagttatcattcatgttgcttgtaaacaatttcataatcattaatcagtctaatgataaaatcatgtcaatt

SEQ ID NO: 3064 - protein, 528 aa, Glycine max
  misc_feature (1)..(528): Ceres Seq. ID no. 15172411
APLTPSLFLQTLFPSLFLSLNPTFSLSKTLHHSPLPSDPSPVSLQFPPNTAGPHLLPFSRLLMSSAAGAPDRRASPPRVAAGAPTRPPLKRHLAFITKPPFAPPDEYHSFSSIGSRRAADEAVVVRSPYIMKRKSGMNDSEGESLAQKWSNSPGYTNVSNVTNNSPFKTPVSAKGGRTQKAKASKGRSCPPTPISNAGSPSPLTPASSCRYDSSLGLLTKKFINLVKHAEGGILDLNKAAETLEVQKRRIYDITNVLEGIGLIEKKLKNRIHWKGIESATSGDVDGDISLLKAEVEKLSLEEQGIDDQIREMQERLRNLSENENNQKCLFVTEEDIKDLPCFQNETLIAIKAPHGTTLEVPDPEEAVDYPQRRYRIILRSTMGPIDVYLISQFEEKFEEVNGAELPMIPLASSSGSNEQLMTEIVTAECSGKELEPQTQLSSHAFSDASQEFAGGMMKIVPSDVDNDADYWLLSDADISITDMWRTDSSVDWNGVDMLHPDFGVISRPQTPSSGFAEVPSTAANSIQK

SEQ ID NO: 3065 - protein, 466 aa, Glycine max
  misc_feature (1)..(466): Ceres Seq. ID no. 15172412
MSSAAGAPDRRASPPRVAAGAPTRPPLKRHLAFITKPPFAPPDEYHSFSSIGSRRAADEAVVVRSPYIMKRKSGMNDSEGESLAQKWSNSPGYTNVSNVTNNSPFKTPVSAKGGRTQKAKASKGRSCPPTPISNAGSPSPLTPASSCRYDSSLGLLTKKFINLVKHAEGGILDLNKAAETLEVQKRRIYDITNVLEGIGLIEKKLKNRIHWKGIESATSGDVDGDISLLKAEVEKLSLEEQGIDDQIREMQERLRNLSENENNQKCLFVTEEDIKDLPCFQNETLIAIKAPHGTTLEVPDPEEAVDYPQRRYRIILRSTMGPIDVYLISQFEEKFEEVNGAELPMIPLASSSGSNEQLMTEIVTAECSGKELEPQTQLSSHAFSDASQEFAGGMMKIVPSDVDNDADYWLLSDADISITDMWRTDSSVDWNGVDMLHPDFGVISRPQTPSSGFAEVPSTAANSIQK

SEQ ID NO: 3066 - protein, 398 aa, Glycine max
  misc_feature (1)..(398): Ceres Seq. ID no. 15172413
MKRKSGMNDSEGESLAQKWSNSPGYTNVSNVTNNSPFKTPVSAKGGRTQKAKASKGRSCPPTPISNAGSPSPLTPASSCRYDSSLGLLTKKFINLVKHAEGGILDLNKAAETLEVQKRRIYDITNVLEGIGLIEKKLKNRIHWKGIESATSGDVDGDISLLKAEVEKLSLEEQGIDDQIREMQERLRNLSENENNQKCLFVTEEDIKDLPCFQNETLIAIKAPHGTTLEVPDPEEAVDYPQRRYRIILRSTMGPIDVYLISQFEEKFEEVNGAELPMIPLASSSGSNEQLMTEIVTAECSGKELEPQTQLSSHAFSDASQEFAGGMMKIVPSDVDNDADYWLLSDADISITDMWRTDSSVDWNGVDMLHPDFGVISRPQTPSSGFAEVPSTAANSIQK

SEQ ID NO: 3067 - protein, 466 aa, Glycine max; identical to SEQ ID NO: 3065
  misc_feature (1)..(466): Ceres Seq. ID no. 16625551

SEQ ID NO: 3068 - DNA, 1532 bp, Glycine max
  misc_feature (1)..(1532): Ceres Seq. ID no. 15172484
aaatctcctactggggttgaaactcctgtaaaaaacttagttgctgaggatatgtctattgggaaaattgatagtgaagagggcaaagataaagaaataaatagttctgaagataaacctcaaaacaagccaaatccaacagtaaatgcagttgtgagtgatccttctgtgaaaacaacaaagaagaagaaaattattaagcgggtacctaaaaagaaggtggtgggtgaggcttctaaatctcttgtatctgaacctaaaaaggatgagaatcaaggacaagatagtacccagagctctggaaagcagactgcagatgcaaataccatagtgaccgaggagaagaaacctgggaaggtagttccgaagaaaaagataaaaacacctgtctctaagaagaaagatgaaactgctgattccaataaaacagaaacactgtctgacaaaaaggatgaagggaacgttgtggcggttcaagcacaagatgacacacagagcactggcaagcagactgccaatgcagataccacagtgacaccagaggtgaagaaaactgggaaggttgtccctaaaaaacaatcaaagacccccacgtctgaaaagcgagacaatacagctgattccagtaaaacagaaacaaagtctgacaaagatgacaaaaaggaagaaagagttactggtgaaaaaagtggggcaaagacagacaagctgaaagcctctgataaagatgttaccaatgtaaaggggaaagtgaaagatggggacaagtcaaaagatgagaaagtaacccaagagagggatggaaaggacgagtccaaaagcaaatctagtaaggaagtgaaagacaagaggaagtctaatgaacctcctcgacaccctggatttattcttcaaacaaaatggaccaaagattctaaaatacgttctttgtcattgtcactggattcattgctggattatacagataaagatgttgaagaatcaaatcttgagctttcattgtttgctgaatcattttatgaaatgcttcagtttcaaatgggttctagaattttgacatttcttcagaaactgcgcataaaatttgtgatcaaaagaaatcagaaaaagaggcagagggaagatgagcaagagatggatgatgtaaaaaaatctcctgttaagcgtcaaaagggaaatgatccttcagtgaagaatgagcccacaaatatggacacgttaaatccaaccctactagatgatgagaaagctgttgctaggaatgataactctagtaataaggaggatgatgtgaagatggaagatggatcagacgaggaagaagatccagaagaggatcctgaagagtacgaggaaatggaaaatggtagtccccagcatgaggcatccaatgataaaaatgctgagcaagaggcgaatgcagatactaaatctgaaaatattactaccaatgataaaacagcagatgaaacttctaaagaggagattaaggttaaagatgaggtgcaagaatccaaggccgatctacaggt

SEQ ID NO: 3069 - protein, 510 aa, Glycine max
  misc_feature (1)..(510): Ceres Seq. ID no. 15172485
KSPTGVETPVKNLVAEDMSIGKIDSEEGKDKEINSSEDKPQNKPNPTVNAVVSDPSVKTTKKKKIIKRVPKKKVVGEASKSLVSEPKKDENQGQDSTQSSGKQTADANTIVTEEKKPGKVVPKKKIKTPVSKKKDETADSNKTETLSDKKDEGNVVAVQAQDDTQSTGKQTANADTTVTPEVKKTGKVVPKKQSKTPTSEKRDNTADSSKTETKSDKDDKKEERVTGEKSGAKTDKLKASDKDVTNVKGKVKDGDKSKDEKVTQERDGKDESKSKSSKEVKDKRKSNEPPRHPGFILQTKWTKDSKIRSLSLSLDSLLDYTDKDVEESNLELSLFAESFYEMLQFQMGSRILTFLQKLRIKFVIKRNQKKRQREDEQEMDDVKKSPVKRQKGNDPSVKNEPTNMDTLNPTLLDDEKAVARNDNSSNKEDDVKMEDGSDEEEDPEEDPEEYEEMENGSPQHEASNDKNAEQEANADTKSENITTNDKTADETSKEEIKVKDEVQESKADLQ

SEQ ID NO: 3070 - protein, 493 aa, Glycine max
  misc_feature (1)..(493): Ceres Seq. ID no. 15172486
MSIGKIDSEEGKDKEINSSEDKPQNKPNPTVNAVVSDPSVKTTKKKKIIKRVPKKKVVGEASKSLVSEPKKDENQGQDSTQSSGKQTADANTIVTEEKKPGKVVPKKKIKTPVSKKKDETADSNKTETLSDKKDEGNVVAVQAQDDTQSTGKQTANADTTVTPEVKKTGKVVPKKQSKTPTSEKRDNTADSSKTETKSDKDDKKEERVTGEKSGAKTDKLKASDKDVTNVKGKVKDGDKSKDEKVTQERDGKDESKSKSSKEVKDKRKSNEPPRHPGFILQTKWTKDSKIRSLSLSLDSLLDYTDKDVEESNLELSLFAESFYEMLQFQMGSRILTFLQKLRIKFVIKRNQKKRQREDEQEMDDVKKSPVKRQKGNDPSVKNEPTNMDTLNPTLLDDEKAVARNDNSSNKEDDVKMEDGSDEEEDPEEDPEEYEEMENGSPQHEASNDKNAEQEANADTKSENITTNDKTADETSKEEIKVKDEVQESKADLQ

SEQ ID NO: 3071 - protein, 493 aa, Glycine max; identical to SEQ ID NO: 3070
  misc_feature (1)..(493): Ceres Seq. ID no. 16625552

SEQ ID NO: 3072 - DNA, 999 bp, Glycine max
  misc_feature (1)..(999): Ceres Seq. ID no. 15173624
acaaattccatacaacactctatccctcgttctttctctctctctctctctctctctctctagccagctttggttagacaacatagttctgaccaacatggtgcaatcaaggaaattcagaggtgtgaggcaacgccattggggctcttgggtttctgagattcgtcacccattattgaaaaggagggtgtggcttgggacattcgagacagctgaggaagcagcaagagcatatgatgaggcagccattttgatgagtggaagaaatgcaaaaacaaacttcccagttggtgaaaaccaaatagtgggaaatcacagttcaaacacttcctcttcctccactacaacattgtctgcagttctgagtgcgaagctgagaaagtgttgcaagtccccttcaccttccctcacttgcctgaggcttgacactgagaattcccacattggtgtgtggcagaagcgagcggggcctcgttccgactcaaactggatcatgatggttgagttggaaaataagaacaacgacaacgagggtgatcatcatcagggtccttcttcttctgatgattcagaatttcctgttgttgttgttgatgttgatgcccaagagaaggtaaagcctgaagaagaaagcactggcttagatgaggaacagaaaatggccctacagatgatagaggaacttctcaataggaattgaattggattagccctatcatcccaacatgcttttactttcacgtggtgcatgcaaggagtttcaagttcaagttctccctctctagcacttcgttttatttctttgtttgtccaaaataggataggagagtgggagtgagagtgctactatattattattcatttcgtgaggaatgaggatgtttagtgtctgtggctgtgaatgtttccccctctgtgtgtaactacctacctacattcactatatatgtggttaaacttcatttcttctgtaaaaaaactattccttgatgcttttcg

SEQ ID NO: 3073 - protein, 232 aa, Glycine max
  misc_feature (1)..(232): Ceres Seq. ID no. 15173625
QIPYNTLSLVLSLSLSLSLSSQLWLDNIVLTNMVQSRKFRGVRQRHWGSWVSEIRHPLLKRRVWLGTFETAEEAARAYDEAAILMSGRNAKTNFPVGENQIVGNHSSNTSSSSTTTLSAVLSAKLRKCCKSPSPSLTCLRLDTENSHIGVWQKRAGPRSDSNWIMMVELENKNNDNEGDHHQGPSSSDDSEFPVVVVDVDAQEKVKPEEESTGLDEEQKMALQMIEELLNRN

SEQ ID NO: 3074 - protein, 200 aa, Glycine max
  misc_feature (1)..(200): Ceres Seq. ID no. 15173626
MVQSRKFRGVRQRHWGSWVSEIRHPLLKRRVWLGTFETAEEAARAYDEAAILMSGRNAKTNFPVGENQIVGNHSSNTSSSSTTTLSAVLSAKLRKCCKSPSPSLTCLRLDTENSHIGVWQKRAGPRSDSNWIMMVELENKNNDNEGDHHQGPSSSDDSEFPVVVVDVDAQEKVKPEEESTGLDEEQKMALQMIEELLNRN

SEQ ID NO: 3075 - protein, 148 aa, Glycine max
  misc_feature (1)..(148): Ceres Seq. ID no. 15173627
MSGRNAKTNFPVGENQIVGNHSSNTSSSSTTTLSAVLSAKLRKCCKSPSPSLTCLRLDTENSHIGVWQKRAGPRSDSNWIMMVELENKNNDNEGDHHQGPSSSDDSEFPVVVVDVDAQEKVKPEEESTGLDEEQKMALQMIEELLNRN

SEQ ID NO: 3076 - protein, 200 aa, Glycine max; identical to SEQ ID NO: 3074
  misc_feature (1)..(200): Ceres Seq. ID no. 16625559

SEQ ID NO: 3077 - DNA, 1037 bp, Glycine max
  misc_feature (1)..(1037): Ceres Seq. ID no. 15174986
aagtttccaccgttgatgctttcaagccaatgaaccaagaattttccttggatcagcagagtctgaattctgttgttacaagcactgatggatcattatctggtggtaatttcccagttgtttcagcctcctacggttacccttcaacattgatacaaagcttatatgagcatcaaccacaaccacagaattcacttttcaccaacccctccatgtcctatgggacatgttccaatgaactgtcaccaacttggtccaaagtctcttcctttctcaaaccctcaatgccaaagcaacagctccgtggattgcacttttccaacaacactactcctttctggaattcttcagccgaagcgcttaatgacataagagcaggtgtttttgcttcatcacaggcccaatatcaaactccaaaatttgaagagaaacccaactgcccccatactctattaaagaagctcaagagagaagaatcaccagacgcagcgaagaaaaattctcctgagcctgccgcattcaagaggcaaagaattgagactccatctccattaccaacttttaaggttaggaaagaaaagctgggggaccgcatcactgctcttcagcaattggtttcacctttcggaaagacggacacggcatccgttcttcacgaagccatcgagtacatcaagttccttcatgaccaagtcagtgtattgaggactccatatatgaaaaacaatggagctcccattcaacaccagcaggattgtgataatctgaaggactcagaagggccaaagcaagatttgagaagccgagggctgtgtttggtgccggtttcaagcacattcccggtcgctaatgagaccattgttgacttctggacgcctacatttggaggcgcactcattggcaagtagagacaagtggagaactcgtgaccataataactatatatttatatatatatgtgtaaactaaaaggaagaagaagaagaaggcacgattggcaaagagaaaattaaattaaagctgaagagaacaaaagt

SEQ ID NO: 3078 - protein, 301 aa, Glycine max
  misc_feature (1)..(301): Ceres Seq. ID no. 15174987
VSTVDAFKPMNQEFSLDQQSLNSVVTSTDGSLSGGNFPVVSASYGYPSTLIQSLYEHQPQPQNSLFTNPSMSYGTCSNELSPTWSKVSSFLKPSMPKQQLRGLHFSNNTTPFWNSSAEALNDIRAGVFASSQAQYQTPKFEEKPNCPHTLLKKLKREESPDAAKKNSPEPAAFKRQRIETPSPLPTFKVRKEKLGDRITALQQLVSPFGKTDTASVLHEAIEYIKFLHDQVSVLRTPYMKNNGAPIQHQQDCDNLKDSEGPKQDLRSRGLCLVPVSSTFPVANETIVDFWTPTFGGALIGK

SEQ ID NO: 3079 - protein, 292 aa, Glycine max
  misc_feature (1)..(292): Ceres Seq. ID no. 15174988
MNQEFSLDQQSLNSVVTSTDGSLSGGNFPVVSASYGYPSTLIQSLYEHQPQPQNSLFTNPSMSYGTCSNELSPTWSKVSSFLKPSMPKQQLRGLHFSNNTTPFWNSSAEALNDIRAGVFASSQAQYQTPKFEEKPNCPHTLLKKLKREESPDAAKKNSPEPAAFKRQRIETPSPLPTFKVRKEKLGDRITALQQLVSPFGKTDTASVLHEAIEYIKFLHDQVSVLRTPYMKNNGAPIQHQQDCDNLKDSEGPKQDLRSRGLCLVPVSSTFPVANETIVDFWTPTFGGALIGK

SEQ ID NO: 3080 - protein, 231 aa, Glycine max
  misc_feature (1)..(231): Ceres Seq. ID no. 15174989
MSYGTCSNELSPTWSKVSSFLKPSMPKQQLRGLHFSNNTTPFWNSSAEALNDIRAGVFASSQAQYQTPKFEEKPNCPHTLLKKLKREESPDAAKKNSPEPAAFKRQRIETPSPLPTFKVRKEKLGDRITALQQLVSPFGKTDTASVLHEAIEYIKFLHDQVSVLRTPYMKNNGAPIQHQQDCDNLKDSEGPKQDLRSRGLCLVPVSSTFPVANETIVDFWTPTFGGALIGK

SEQ ID NO: 3081 - protein, 301 aa, Glycine max; identical to SEQ ID NO: 3078
  misc_feature (1)..(301): Ceres Seq. ID no. 16625577

SEQ ID NO: 3082 - DNA, 1248 bp, Glycine max
  misc_feature (1)..(1248): Ceres Seq. ID no. 15175949
aaaaacaccatcagcatcttcactcaccacgaaggttccgttctctgtggatctatatctctagggcacgttacgtggaaggaagctcttcaccgacttcaatcgaagaagatggattacagtgctggttcgagtctgtttccgttgcaccgttgcaaaaccattcacctggtgaggcacgcgcaggggattcacaatgtggagggtgacaaaaactacaaagcctacatgaaccccgattacttcgatgctcatctcactcccttgggatggcaacaggttgacaatttgcgtaagcatgttcgcgactctggccttatcaacaccattgatctagtcattgcatcttctctgatgaggactctacaaacatctgttggcgtatttggaggtgagggctacacagataaaacagacgtccttcctcttatggttgcaaatgcaggaaatagctaccgtgctgcaatttcaagtctaaattccccaccaattgttactgttgaactttgtcgtgaacatttgggagttcatccctgtgacagaagaagaagtgttagcgagtatcaatttctttttcccgctgttgatttttcactgttagatagtgatgaggatacctggtggaaggccaatgttagagagacaaaggaagaacttgcagctagggggatgaagttccttaactggttgtggacacgaaaagagaaggagatagcaattgtgacacatagtggattcttgtttcatactctgaatgcctttggaagtgattgccaccccttggtaaagaaagaaatatccaagcactttgctaattgtgaacttcgctccatggtcattgtggatagaggtatgataggattggaacaatcaaccactaactatccaggcaagataccttcagggctggacctccctagtgatgttgcagatgagaagtctgagaaataatggatttggcttcttctacttgtttgtatgtgttcaggaccattcaagcattggttcttctatttgaagttcactattacaaaatctaacatgattatgtcagattatacaaactgtgctgattctgtcttgaaatttatcaattattgtctgcagaaaatatttgttaacaattataaccttgttggaaatcagatgacccatgtgtggcaacacagtcacaaaacacttctgtttgttgatggaacagtttcggaagaggattggttgcctcactcgtgtcacaaattcattgtt

SEQ ID NO: 3083 - protein, 316 aa, Glycine max
  misc_feature (1)..(316): Ceres Seq. ID no. 15175950
KNTISIFTHHEGSVLCGSISLGHVTWKEALHRLQSKKMDYSAGSSLFPLHRCKTIHLVRHAQGIHNVEGDKNYKAYMNPDYFDAHLTPLGWQQVDNLRKHVRDSGLINTIDLVIASSLMRTLQTSVGVFGGEGYTDKTDVLPLMVANAGNSYRAAISSLNSPPIVTVELCREHLGVHPCDRRRSVSEYQFLFPAVDFSLLDSDEDTWWKANVRETKEELAARGMKFLNWLWTRKEKEIAIVTHSGFLFHTLNAFGSDCHPLVKKEISKHFANCELRSMVIVDRGMIGLEQSTTNYPGKIPSGLDLPSDVADEKSEK

SEQ ID NO: 3084 - protein, 279 aa, Glycine max
  misc_feature (1)..(279): Ceres Seq. ID no. 15175951
MDYSAGSSLFPLHRCKTIHLVRHAQGIHNVEGDKNYKAYMNPDYFDAHLTPLGWQQVDNLRKHVRDSGLINTIDLVIASSLMRTLQTSVGVFGGEGYTDKTDVLPLMVANAGNSYRAAISSLNSPPIVTVELCREHLGVHPCDRRRSVSEYQFLFPAVDFSLLDSDEDTWWKANVRETKEELAARGMKFLNWLWTRKEKEIAIVTHSGFLFHTLNAFGSDCHPLVKKEISKHFANCELRSMVIVDRGMIGLEQSTTNYPGKIPSGLDLPSDVADEKSEK

SEQ ID NO: 3085 - protein, 240 aa, Glycine max
  misc_feature (1)..(240): Ceres Seq. ID no. 15175952
MNPDYFDAHLTPLGWQQVDNLRKHVRDSGLINTIDLVIASSLMRTLQTSVGVFGGEGYTDKTDVLPLMVANAGNSYRAAISSLNSPPIVTVELCREHLGVHPCDRRRSVSEYQFLFPAVDFSLLDSDEDTWWKANVRETKEELAARGMKFLNWLWTRKEKEIAIVTHSGFLFHTLNAFGSDCHPLVKKEISKHFANCELRSMVIVDRGMIGLEQSTTNYPGKIPSGLDLPSDVADEKSEK

SEQ ID NO: 3086 - protein, 279 aa, Glycine max; identical to SEQ ID NO: 3084
  misc_feature (1)..(279): Ceres Seq. ID no. 16625588

SEQ ID NO: 3087 - DNA, 1396 bp, Glycine max
  misc_feature (1)..(1396): Ceres Seq. ID no. 15176057
gctttcttaccttccattctttcattctctctcttgcattacagcgacactgttcaaatctcttttctttctaaaaattaaaagcaaagaatttacgtaagagactgagattgagtgagtgaatggagtttagtaacctcactctggagatcttctccaaactggagcaaaaatggctctcacattgtaaagccaccaacaaaactcgcattctcagcattgacggcggaggaaccaccgccattgtcgccggcgaagctctcatctacctcgaggatcagatccgtgttcacacctccgatcctcacgctcaggtagccgatttcttcgacatcgtcgccggcaccggcattggcgccatccttgccgccatgatcaccgccggcgacgcctttggtaggccgctctacaccgccagggaagccgtccgtctcgtctcggaaagaaactctgaactctacaagctcaaatccggcggaatcttccgccggcgccggagattctcctccaggagcatggacaacgcgttgaagcaagtgttccagagaaaggaggaggacggacggttgttgaccttgaaggacacgtgtaaaccgctccttattccttgcttcgacctcaagagttccgcgccgttcgtgttttcgcgcgccgacgcgtccgagtctccgagcttcgacttcgagctctggaaggtgtgccgtgccacgtcagcgacgccgagccacttcaagccgttcgacttcgcttccgtcgacggcaagacctcgtgctccgccgtcgacggcggcctagtcatgaacaaccctactgcagcggccgtcacgcacgtcctccataacaagcgcgatttcccgtcggtgaacggcgtggaggatctgctcgtcctttccttggggaacggatcgtcgaacgcaaaagcgtgcgagactcgcacgtgctcaacgccgtcggtggttgacattgtgctcgacggtgtttccgagaccattgaccagatgttagggaacgccttctgctggaaccgtacggactacgtcagaatccaggctttcggtttggaaagtgaagcaatgaagaaggaagaggttctcaaagagaggggactcgagtcgttaccgtttggcgggaagcggttactgacagagactaacggaaacagaatagatagcttcgtgcaacgtcttgttgctaccggaaaaccaagcccgccgtcaagtccctgcaaggattccgccgtcaaccctctcgctaacggtcgctagtttttttattttacttaatattttagcttcttttttttttttttagattttaacggtgtaaagtgtaactagtgtttttacctagttatgccagctgtcgtagttaatagcatttaataatttaccactgc

SEQ ID NO: 3088 - protein, 380 aa, Glycine max
  misc_feature (1)..(380): Ceres Seq. ID no. 15176058
MEFSNLTLEIFSKLEQKWLSHCKATNKTRILSIDGGGTTAIVAGEALIYLEDQIRVHTSDPHAQVADFFDIVAGTGIGAILAAMITAGDAFGRPLYTAREAVRLVSERNSELYKLKSGGIFRRRRRFSSRSMDNALKQVFQRKEEDGRLLTLKDTCKPLLIPCFDLKSSAPFVFSRADASESPSFDFELWKVCRATSATPSHFKPFDFASVDGKTSCSAVDGGLVMNNPTAAAVTHVLHNKRDFPSVNGVEDLLVLSLGNGSSNAKACETRTCSTPSVVDIVLDGVSETIDQMLGNAFCWNRTDYVRIQAFGLESEAMKKEEVLKERGLESLPFGGKRLLTETNGNRIDSFVQRLVATGKPSPPSSPCKDSAVNPLANGR

SEQ ID NO: 3089 - protein, 297 aa, Glycine max
  misc_feature (1)..(297): Ceres Seq. ID no. 15176059
MITAGDAFGRPLYTAREAVRLVSERNSELYKLKSGGIFRRRRRFSSRSMDNALKQVFQRKEEDGRLLTLKDTCKPLLIPCFDLKSSAPFVFSRADASESPSFDFELWKVCRATSATPSHFKPFDFASVDGKTSCSAVDGGLVMNNPTAAAVTHVLHNKRDFPSVNGVEDLLVLSLGNGSSNAKACETRTCSTPSVVDIVLDGVSETIDQMLGNAFCWNRTDYVRIQAFGLESEAMKKEEVLKERGLESLPFGGKRLLTETNGNRIDSFVQRLVATGKPSPPSSPCKDSAVNPLANGR

SEQ ID NO: 3090 - protein, 249 aa, Glycine max
  misc_feature (1)..(249): Ceres Seq. ID no. 15176060
MDNALKQVFQRKEEDGRLLTLKDTCKPLLIPCFDLKSSAPFVFSRADASESPSFDFELWKVCRATSATPSHFKPFDFASVDGKTSCSAVDGGLVMNNPTAAAVTHVLHNKRDFPSVNGVEDLLVLSLGNGSSNAKACETRTCSTPSVVDIVLDGVSETIDQMLGNAFCWNRTDYVRIQAFGLESEAMKKEEVLKERGLESLPFGGKRLLTETNGNRIDSFVQRLVATGKPSPPSSPCKDSAVNPLANGR

SEQ ID NO: 3091 - protein, 380 aa, Glycine max; identical to SEQ ID NO: 3088
  misc_feature (1)..(380): Ceres Seq. ID no. 16625589

SEQ ID NO: 3092 - DNA, 1854 bp, Glycine max
  misc_feature (1)..(1854): Ceres Seq. ID no. 15176647
atgatgaaccttcaaattctggagacgatgatggcgtttcatatgatttagaccccagtgttactgaaactgctgcaactgtagctctaaatgggaacttcgataatttccatcagtcagatagtgctgcatctgataactcatttgtggcagaaatcaaagaatcaaatgacaacattgatggcactaatatgaccattcctaaggaagaggaagttaaaatatcagatcaaacaaagcaatcaagagcaccaaagggtcttgtcaagaacaagaatgcaaaggctccaagttccagtggtgttcatgcaagtttggtgaataagagcaaaattggaaaagataaagaagcatcttcatctgtttcaaatggtacttcagctttagactctcgcccaagacagtctactaaaagcagcagatctttcaatgaccggcagacacaattgtctaagcccaagcacccttcgaagtctgatgcaacatcttctgaagtatcagtggagaagacaaaaccaaaatcatcgagaaaagaacccattgataaagttcaaggagaagcagaatcttccttaagttccaacacagaagatgccaaacctcaaagggtgggaacacttccaaattatggattcagttttaagtgtggtgaacgagctgagagaaggagagagttctacaataagcttgaggagaggattcaggcaaaggaggtggagaagagtaacttgcaagcaaaatccaaggaaacccaagaagccgagattaagatgcttaggaagagtctgaattttaaagcaactccaatgccaagtttttaccaggagcctgctcctgctaaggcggagttaaagaagataccaactacaagagcaaaatcacccaagctcggtcgtaagaagagttcagcaaattcagagtcagatggaaacaacagcagcagttcacgactagctcgtttaagtctggatgagaaagtgtcagagagtaacctcactaagggacctactcctcctgtccatcaaaagaagccacaacgaagatctcttcctgctcggctggcccctgaaaggaacagtgtatcaaattcaaggactgcaccaacttcatccaaggctatcaaagatgaaaagtcctccttgtctagtgctgctaaaaaacataccaacttatccaatgctacaggagaggagaaagccaagacgattgcagcaaatgaagagaaaagtaccttgtccagtgaaacaagtgatgctgtgctgctgaatgtggttcttccttcagataagccaagtgaagaagtgtctcatgtgaatggtgacatagcagttgaagagaatcctcagctctccttggcaaaagaacctatcatggcagcgcattgaacaaaatagcaggttactttccgagaatttgattcatcatctggtgagatattatagaagcatatgactcattatttgacaatgaagaaggcttgcagatttgcattacaatttgtgttgtcaattgtcatcatgatgtccaagcaacattgtttctttgtgtttacccactctcaatcttgctggtccagtcctcattctctttcgcgcttgcaacaatgtgtacttaacaatttgccaggttattctagttgatgttattttggtatatgtgcagcacttgtctgtttagtggacatttatttggagcaaaattttgagaaagtttgccatctggtgatggttcaagtgcttcttgttcaggcctttgctttgttaaacaaatttgacattgtctcatgtacaagctgtttgtgttgtggacacccttctagctgaatcatatggatcaaattctgctttgtcgtac

SEQ ID NO: 3093 - protein, 460 aa, Glycine max
  misc_feature (1)..(460): Ceres Seq. ID no. 15176648
DEPSNSGDDDGVSYDLDPSVTETAATVALNGNFDNFHQSDSAASDNSFVAEIKESNDNIDGTNMTIPKEEEVKISDQTKQSRAPKGLVKNKNAKAPSSSGVHASLVNKSKIGKDKEASSSVSNGTSALDSRPRQSTKSSRSFNDRQTQLSKPKHPSKSDATSSEVSVEKTKPKSSRKEPIDKVQGEAESSLSSNTEDAKPQRVGTLPNYGFSFKCGERAERRREFYNKLEERIQAKEVEKSNLQAKSKETQEAEIKMLRKSLNFKATPMPSFYQEPAPAKAELKKIPTTRAKSPKLGRKKSSANSESDGNNSSSSRLARLSLDEKVSESNLTKGPTPPVHQKKPQRRSLPARLAPERNSVSNSRTAPTSSKAIKDEKSSLSSAAKKHTNLSNATGEEKAKTIAANEEKSTLSSETSDAVLLNVVLPSDKPSEEVSHVNGDIAVEENPQLSLAKEPIMAAH

SEQ ID NO: 3094 - protein, 397 aa, Glycine max
  misc_feature (1)..(397): Ceres Seq. ID no. 15176649
MTIPKEEEVKISDQTKQSRAPKGLVKNKNAKAPSSSGVHASLVNKSKIGKDKEASSSVSNGTSALDSRPRQSTKSSRSFNDRQTQLSKPKHPSKSDATSSEVSVEKTKPKSSRKEPIDKVQGEAESSLSSNTEDAKPQRVGTLPNYGFSFKCGERAERRREFYNKLEERIQAKEVEKSNLQAKSKETQEAEIKMLRKSLNFKATPMPSFYQEPAPAKAELKKIPTTRAKSPKLGRKKSSANSESDGNNSSSSRLARLSLDEKVSESNLTKGPTPPVHQKKPQRRSLPARLAPERNSVSNSRTAPTSSKAIKDEKSSLSSAAKKHTNLSNATGEEKAKTIAANEEKSTLSSETSDAVLLNVVLPSDKPSEEVSHVNGDIAVEENPQLSLAKEPIMAAH

SEQ ID NO: 3095 - protein, 397 aa, Glycine max; identical to SEQ ID NO: 3094
  misc_feature (1)..(397): Ceres Seq. ID no. 16612097

SEQ ID NO: 3096 - DNA, 1629 bp, Glycine max
  misc_feature (1)..(1629): Ceres Seq. ID no. 15176791
atcaggtgatcagatttgttcaaaaggaaccatttgtgagaatttagattggcaaggctctactgctcatgtggaagcaagagatttggaatcatctttcagtaccagggttgaaagaggagatggcactggaggaaatgttgatatgatgccaactgaaaatccttctaatgactgtagtcaactaagcttgcaaattgaagatacagagcatgacaatatgcatgagtttagtgaggtacatactgagcaatctcagcggggtgatataaataatgatgaaagcaatttttcaaatcatgatgatcgtgtatacagcaatattgttgatgatgtagatttgattgaatctattgctctggaaggggagcaacaggaagaagttattattgaaaatgacggaagtgactggcatcaaagtgtggatgatattcagctcagtagcacaacaaatgaatggccccaaaacatattgggaagtgaagatggagaaaattctcgtatgcaggagcaagaagtccctgaagtgtggcaagaggatggtggctttcaagaggctgtggaaatttggttaggaggaccttctgataatgaagtagctccagttggtagaattcatggattttattttcctgaagatgacaatgtatacagtgttgaactcagggaattgctaagtaggagaagtgtctcaaacctccttcgcagcagttttcgtgaaagtcttgatcaattaatacaatcatatgttgaaaggcaaggtcatgctcacgttgaatgggagctgcaagagacaaccccttcttctcccttggcagaacaagtatcggggcaacggagtaggggtccaattgttggtcctcaggctactgttaatagctcacttaacagacccttgccaccaacgcctccgcctcagcctttatgggatcggcactcacgtcatgacaattggtcccagagtgacataaataatcagcgcttaggaattgagtgggatattgttaatgacttgagaattgacatggttaggctacaacaaaggatgaataatatgcagagaatgctggaggcctgtatggatatgcagcttgagttgcaacgctcaataagacaagaagtctctgcagccctaaatcgctcaactggttcatcaggaatacaaaaccgtgtttcaccagacgataaatctaaatgggaatgtgtgaggaaaggactttgttgtatatgctgcgaaagcaatattaattctttgttgtacagatgtgggcacatgtgcacatgttcaaaatgtgccaatgatttgctccaaagtagaagaaagtgtccaatgtgtcaagcaccagtggtggaagtgatacgagcttattctatacaatagttttgacattaaagggtcacacatataacagaatacaggatcctaacaagttctatctcctggacgtttccagcgtattgtgtgtaggtttcttgatgaagaaataagcagaatttacgttacaagtgatggctcagttcacgcttgggttatgtaatatctagaaaaacaattttttcccacaactatttggcattattttgtatagaattgacattttttccccacatatagtatttcttacaaag

SEQ ID NO: 3097 - protein, 459 aa, Glycine max
  misc_feature (1)..(459): Ceres Seq. ID no. 15176792
SGDQICSKGTICENLDWQGSTAHVEARDLESSFSTRVERGDGTGGNVDMMPTENPSNDCSQLSLQIEDTEHDNMHEFSEVHTEQSQRGDINNDESNFSNHDDRVYSNIVDDVDLIESIALEGEQQEEVIIENDGSDWHQSVDDIQLSSTTNEWPQNILGSEDGENSRMQEQEVPEVWQEDGGFQEAVEIWLGGPSDNEVAPVGRIHGFYFPEDDNVYSVELRELLSRRSVSNLLRSSFRESLDQLIQSYVERQGHAHVEWELQETTPSSPLAEQVSGQRSRGPIVGPQATVNSSLNRPLPPTPPPQPLWDRHSRHDNWSQSDINNQRLGIEWDIVNDLRIDMVRLQQRMNNMQRMLEACMDMQLELQRSIRQEVSAALNRSTGSSGIQNRVSPDDKSKWECVRKGLCCICCESNINSLLYRCGHMCTCSKCANDLLQSRRKCPMCQAPVVEVIRAYSIQ

SEQ ID NO: 3098 - protein, 411 aa, Glycine max
  misc_feature (1)..(411): Ceres Seq. ID no. 15176793
MMPTENPSNDCSQLSLQIEDTEHDNMHEFSEVHTEQSQRGDINNDESNFSNHDDRVYSNIVDDVDLIESIALEGEQQEEVIIENDGSDWHQSVDDIQLSSTTNEWPQNILGSEDGENSRMQEQEVPEVWQEDGGFQEAVEIWLGGPSDNEVAPVGRIHGFYFPEDDNVYSVELRELLSRRSVSNLLRSSFRESLDQLIQSYVERQGHAHVEWELQETTPSSPLAEQVSGQRSRGPIVGPQATVNSSLNRPLPPTPPPQPLWDRHSRHDNWSQSDINNQRLGIEWDIVNDLRIDMVRLQQRMNNMQRMLEACMDMQLELQRSIRQEVSAALNRSTGSSGIQNRVSPDDKSKWECVRKGLCCICCESNINSLLYRCGHMCTCSKCANDLLQSRRKCPMCQAPVVEVIRAYSIQ

SEQ ID NO: 3099 - protein, 410 aa, Glycine max
  misc_feature (1)..(410): Ceres Seq. ID no. 15176794
MPTENPSNDCSQLSLQIEDTEHDNMHEFSEVHTEQSQRGDINNDESNFSNHDDRVYSNIVDDVDLIESIALEGEQQEEVIIENDGSDWHQSVDDIQLSSTTNEWPQNILGSEDGENSRMQEQEVPEVWQEDGGFQEAVEIWLGGPSDNEVAPVGRIHGFYFPEDDNVYSVELRELLSRRSVSNLLRSSFRESLDQLIQSYVERQGHAHVEWELQETTPSSPLAEQVSGQRSRGPIVGPQATVNSSLNRPLPPTPPPQPLWDRHSRHDNWSQSDINNQRLGIEWDIVNDLRIDMVRLQQRMNNMQRMLEACMDMQLELQRSIRQEVSAALNRSTGSSGIQNRVSPDDKSKWECVRKGLCCICCESNINSLLYRCGHMCTCSKCANDLLQSRRKCPMCQAPVVEVIRAYSIQ

SEQ ID NO: 3100 - protein, 411 aa, Glycine max; identical to SEQ ID NO: 3098
  misc_feature (1)..(411): Ceres Seq. ID no. 16625594

SEQ ID NO: 3101 - DNA, 1640 bp, Glycine max
  misc_feature (1)..(1640): Ceres Seq. ID no. 15177008
aaactcccttgtgtacagtgatcgatctcaagaagaaagactcaaaaaatggaggggaatctagagaagaagttgctgagcaaagaggaagtgtcagaagaagataatttatcattggtgaagagggtgtgggaagagagcaaagagatgtggatagtggcagcaccagccatattcacaaggtttacgacctttggcatcaatgttataagccaagcttttattggtcatattggttcaagagaactcgctgcctatgctcttgtattcactgtcatcatacgtttcgccaatggtattctgttaggaatgtcaagtgcgttatcaacactttgtggacaagcatacggtgcaaaagaatatgacatgatgggagtgtatcttcaaagatcatcgatagttttgttcttaactgcactctgtcttcttcctgtgttcatcttcacaagcccaatattgatgctcttaggccaagatgagaacatagcacaagtggcaggaaccatttctctttggtcaattcctatcttatttgcttatattgtctcattcaattgccagacattccttcaatctcaaagcaagaatgtcgtaattgcattcttggcagctttatcaataatcattcatgtgtttctttcttggctattgactatacaattcaagtttgggattcctggtgcaatgatttcaacaattttggcattctggattcctaatattggtcaattaatatttattacgtgtggttggtgcgatgaaacatggaaaggtttctcatttttagcattcaaagatcttgggcctgttgtcaagctttccctttcatctggtgccatgttatgtcttgagctctggtacaacacggtattgattcttttgactggtaacatgaaaaatgctgaggttgaaatcaatgctctctctatatgtattaacatcaatggatgggaaatgatgatagcacttggtttcatggctgcagcaagtgttagagtggcaaatgaacttggaagaggaagctcacaagctgcaaagttttctatagttgtatcagtgcttacatcatttgtaattgggtttatcttatttgttctttttttatttttaagagaaaaaatagcttatctttttacttcaaacgaagatgtggttactgctgtgggggatttgtcacctttgttagcgctttctttgttactaaatagtattcaacctgtactctcaggggtggctgttggagcagggtggcagagcactgtagcgtatgtgaacatagggtgttattacctcataggtattccagttggaatagtacttggtaacattattcacttggaagtcaagggtatttggattggaatgttgtttgggacactagttcaaactatagtcctaactataatcacctacaaaactaattgggatgagcaggtaactatagcccgtaatcgtattagtaagtggtataaggtggaacttgatcatgaaacaagtacatcagataattagtttcagactcctatttatcaatatcatcattgtttgtttggctattgtacgttatacattcaggggattgcttgatagttattatactatagtaccatcctatcagtatattctctctcaaatatttc

SEQ ID NO: 3102 - protein, 487 aa, Glycine max
  misc_feature (1)..(487): Ceres Seq. ID no. 15177009
MEGNLEKKLLSKEEVSEEDNLSLVKRVWEESKEMWIVAAPAIFTRFTTFGINVISQAFIGHIGSRELAAYALVFTVIIRFANGILLGMSSALSTLCGQAYGAKEYDMMGVYLQRSSIVLFLTALCLLPVFIFTSPILMLLGQDENIAQVAGTISLWSIPILFAYIVSFNCQTFLQSQSKNVVIAFLAALSIIIHVFLSWLLTIQFKFGIPGAMISTILAFWIPNIGQLIFITCGWCDETWKGFSFLAFKDLGPVVKLSLSSGAMLCLELWYNTVLILLTGNMKNAEVEINALSICININGWEMMIALGFMAAASVRVANELGRGSSQAAKFSIVVSVLTSFVIGFILFVLFLFLREKIAYLFTSNEDVVTAVGDLSPLLALSLLLNSIQPVLSGVAVGAGWQSTVAYVNIGCYYLIGIPVGIVLGNIIHLEVKGIWIGMLFGTLVQTIVLTIITYKTNWDEQVTIARNRISKWYKVELDHETSTSDN

SEQ ID NO: 3103 - protein, 454 aa, Glycine max
  misc_feature (1)..(454): Ceres Seq. ID no. 15177010
MWIVAAPAIFTRFTTFGINVISQAFIGHIGSRELAAYALVFTVIIRFANGILLGMSSALSTLCGQAYGAKEYDMMGVYLQRSSIVLFLTALCLLPVFIFTSPILMLLGQDENIAQVAGTISLWSIPILFAYIVSFNCQTFLQSQSKNVVIAFLAALSIIIHVFLSWLLTIQFKFGIPGAMISTILAFWIPNIGQLIFITCGWCDETWKGFSFLAFKDLGPVVKLSLSSGAMLCLELWYNTVLILLTGNMKNAEVEINALSICININGWEMMIALGFMAAASVRVANELGRGSSQAAKFSIVVSVLTSFVIGFILFVLFLFLREKIAYLFTSNEDVVTAVGDLSPLLALSLLLNSIQPVLSGVAVGAGWQSTVAYVNIGCYYLIGIPVGIVLGNIIHLEVKGIWIGMLFGTLVQTIVLTIITYKTNWDEQVTIARNRISKWYKVELDHETSTSDN

SEQ ID NO: 3104 - protein, 400 aa, Glycine max
  misc_feature (1)..(400): Ceres Seq. ID no. 15177011
MSSALSTLCGQAYGAKEYDMMGVYLQRSSIVLFLTALCLLPVFIFTSPILMLLGQDENIAQVAGTISLWSIPILFAYIVSFNCQTFLQSQSKNVVIAFLAALSIIIHVFLSWLLTIQFKFGIPGAMISTILAFWIPNIGQLIFITCGWCDETWKGFSFLAFKDLGPVVKLSLSSGAMLCLELWYNTVLILLTGNMKNAEVEINALSICININGWEMMIALGFMAAASVRVANELGRGSSQAAKFSIVVSVLTSFVIGFILFVLFLFLREKIAYLFTSNEDVVTAVGDLSPLLALSLLLNSIQPVLSGVAVGAGWQSTVAYVNIGCYYLIGIPVGIVLGNIIHLEVKGIWIGMLFGTLVQTIVLTIITYKTNWDEQVTIARNRISKWYKVELDHETSTSDN

SEQ ID NO: 3105 - protein, 487 aa, Glycine max; identical to SEQ ID NO: 3102
  misc_feature (1)..(487): Ceres Seq. ID no. 16612102

SEQ ID NO: 3106 - DNA, 1240 bp, Glycine max
  misc_feature (1)..(1240): Ceres Seq. ID no. 15177057
actccatttagattctgcttgctcaccaatagaagtgtggtatagccggtggaaatgcagctcctaccgacactctgcttcttgttcttgcagctgctgccgagaggagacgcatccacctctcactctaatcgccacagatcagccccacattggctccccgccacggccacctggtacggaagtcctgagggcgatggcagcagcggaggagcatgcgggtatgggtcgctggtggacgtgaagccgttcaaggctcgcgttggagcagtgagtccgttgctgttcaagagcggcgaaggctgcggtgcttgctacaaggtcaggtgtctggacaagaccatctgctcaaagagagcagtcacaataattgtcacagaccagtcaccgtcaggaccatctgctcgagcaaagcacattcactttgaccttagtggcgccgcatttggccatttggctatccccggccattccggcatcatccgcaaccgcggcctcatctccctcctctatcgccggacggcatgcaaatacagagagaagaacatagcattccatgtgaacgcaggatcaacagcttattggttatctcttctcattgagtatgaagacggagaaggtgacattggctctatgcacattcgtcaagcggggtcgaaggagtggatagcaatgaagcacatatggggagcaaactggtgcatcgtcggaggaccactaaagggaccactctccgttaagctcaccactttgtcaaacaacaaaacgctctccgcagctgacgtcatccccaaaaaatgggttcccaaagctacttacacctcccgcctcaacttctcccctgtcctctaactaaactgaagctccccacccccatttctctgtcctcacttcttttttgttgggagagagaatcggtgaggatactgagtgagtgagagtgagaggatgctctcctccctcttccctcgtttttctttttctgttttgtttggggttgtgtttatgtgtgttggtgaaggaagccatcagagcttgattctgtgactacttactatagtacttactacttactaatgttggacctactctttatgtaatcctttttttaatattttttcttatttgcttctaaaccttgtaaaaggcgataggagtaaagtactgtattatcatcatatttagtgtcatttgtgggacattattatataatgagacagcctacaaatgcataaataat

SEQ ID NO: 3107 - protein, 265 aa, Glycine max
  misc_feature (1)..(265): Ceres Seq. ID no. 15177058
MQLLPTLCFLFLQLLPRGDASTSHSNRHRSAPHWLPATATWYGSPEGDGSSGGACGYGSLVDVKPFKARVGAVSPLLFKSGEGCGACYKVRCLDKTICSKRAVTIIVTDQSPSGPSARAKHIHFDLSGAAFGHLAIPGHSGIIRNRGLISLLYRRTACKYREKNIAFHVNAGSTAYWLSLLIEYEDGEGDIGSMHIRQAGSKEWIAMKHIWGANWCIVGGPLKGPLSVKLTTLSNNKTLSAADVIPKKWVPKATYTSRLNFSPVL

SEQ ID NO: 3108 - protein, 265 aa, Glycine max; identical to SEQ ID NO: 3107
  misc_feature (1)..(265): Ceres Seq. ID no. 16625595

SEQ ID NO: 3109 - DNA, 1234 bp, Glycine max
  misc_feature (1)..(1234): Ceres Seq. ID no. 15177588
gaaagggatgataattgggctagtggagtgacagagagaaaccggagcagagcagagaagagaaacaaaaggtggggtcagtggaaattatcatcatacaatttcacttaacccttcaagctcaagacagcacagcaatcacatcgcatgtcccttatatatatacttattcattgcctctgaaccttatcaaaacacttctcaatctctctctctccaatggccaaagacctcgaaacggagattcaaagtgggttgcctcacaaggactaccacgacccaccccccgccccattctacgaccccgccgagctccgaaagtggtccttcttccgagccctcatcgccgagttcgtcgccaccctcctcttcctctacgtcaccatcctcaccgtcatcggctacaaccaccagacagccaccgccgccgagccctgcagcggcgtcggcgtcctcggcatcgcttgggcctttggaggcatgatttttgtcctcgtctattgcaccgccggcatatcagggggacacataaacccggcggtgacgttcgggttgtttttggcgaggaaggtgtcgctgacaagagctgttgggtacatggtggctcaggtgttgggggccataagtggggtggggcttgtgaaggctttgcagaagagctactacaacaggtacaaaggtggcgtgaacatgctcgctgatggttacagcaaaggaaccggtttgggcgctgagattattggcacctttattcttgtctacaccgtcttctctgctaccgatcccaagagagtagcaagagactcccatgttcccgtgttggcaccacttccaattgggtttgcggtgttcatggttcacttggccaccatccctatcaccggcactggcatcaacccagctagaagccttgggcctgctgtcatattcaacaacgagaaggcttgggatgaccagtggatcttctgggttggacccttcatcggtgctgctcttgctgcattctaccaccagtccgtgttgatggcccaagcagcaaaggctctagggtctttcaggagctcctcaaacctgtaattctggccaagctatttgagctacgagagacatgcttcatttaattgtgttcttaattaatttgcttatacatggtggattggaataatctgtatatcctcgtcactatgtttatttaatttatgtttactatatttgtggtgacgtccatctcaac

SEQ ID NO: 3110 - protein, 285 aa, Glycine max
  misc_feature (1)..(285): Ceres Seq. ID no. 15177589
MAKDLETEIQSGLPHKDYHDPPPAPFYDPAELRKWSFFRALIAEFVATLLFLYVTILTVIGYNHQTATAAEPCSGVGVLGIAWAFGGMIFVLVYCTAGISGGHINPAVTFGLFLARKVSLTRAVGYMVAQVLGAISGVGLVKALQKSYYNRYKGGVNMLADGYSKGTGLGAEIIGTFILVYTVFSATDPKRVARDSHVPVLAPLPIGFAVFMVHLATIPITGTGINPARSLGPAVIFNNEKAWDDQWIFWVGPFIGAALAAFYHQSVLMAQAAKALGSFRSSSNL

SEQ ID NO: 3111 - protein, 198 aa, Glycine max
  misc_feature (1)..(198): Ceres Seq. ID no. 15177590
MIFVLVYCTAGISGGHINPAVTFGLFLARKVSLTRAVGYMVAQVLGAISGVGLVKALQKSYYNRYKGGVNMLADGYSKGTGLGAEIIGTFILVYTVFSATDPKRVARDSHVPVLAPLPIGFAVFMVHLATIPITGTGINPARSLGPAVIFNNEKAWDDQWIFWVGPFIGAALAAFYHQSVLMAQAAKALGSFRSSSNL

SEQ ID NO: 3112 - protein, 159 aa, Glycine max
  misc_feature (1)..(159): Ceres Seq. ID no. 15177591
MVAQVLGAISGVGLVKALQKSYYNRYKGGVNMLADGYSKGTGLGAEIIGTFILVYTVFSATDPKRVARDSHVPVLAPLPIGFAVFMVHLATIPITGTGINPARSLGPAVIFNNEKAWDDQWIFWVGPFIGAALAAFYHQSVLMAQAAKALGSFRSSSNL

SEQ ID NO: 3113 - protein, 285 aa, Glycine max; identical to SEQ ID NO: 3110
  misc_feature (1)..(285): Ceres Seq. ID no. 16625206

SEQ ID NO: 3114 - DNA, 1663 bp, Glycine max
  misc_feature (1)..(1663): Ceres Seq. ID no. 15177648
tcatacgatatggatagggtgttctcagtggacgatatctccgatcacttctggcagccgcctatccctgtctccgccgcccaaacttcctcccagatgagccgcagcgcctccgagtgggccttccaacgcttcctccaggaagcttccgcctccgcaccctctcctccgtcttcttcctccgccgccgacgtcgtattcgtcgagatcgaagatcaacctaaacccgcccctccccctccgtcaaacggcgccgttctccccaatgcccctggtcccgtcccccttgactccgacgaataccaggccttcctcaagagcaagcttaacctcgcatgcgccgccgtcgccatgactaggggatctttggctaaatctcaagacccgtcccctttttctgaaggtggatcacagccgactaatccttctctagttgaatctcagactacttctaaaggatctattccttctgaaaatgatccatctaagttacaagataaagataccaatgtaccagttgggattccttccatacctgccatgcaaaagaaacctgctgttgcaattaggccatctacaagtggatcatcaagagaacagtcagatgatgaggacattgagggagagacatctatgattgacaacacggaccctgctgatgtaaaacgagtaaggaggatgctatccaatagggagtcagcccgacgctgtagaagaagaaagcaggctcatttaactgacctagaaacacaggtttctcaattaagaggtgaaaattctaccttgttaaagcgccttactgatgttagtcagaaatacagcgactctgctgttgacaacagagttttaaaagctgatgttgaaacattaagaacaaaggtaaagctctactttatacttaaacctactggctctttctaacaagttccataggtttggctgacaagatggaggatggtgtccaatgagggtcatcttttacagtgaagaaaagctaaattagaattaatgttgcttcatctgtttggacaaagtttatctgacatgtgtgtttgtcatttcctaccatgttattctcatttttaggtgaagatggccgaagagaccgtcaaaagaattactggattgaacccattgcttcatgccatgtctgatatatcatcactgggcctgccatcatttgatggaagaagcccttcagacacttcagctgatgcagctgttcctgtgcaagatgatccacatcatcacttctatcaacccacatctactaatcctattcccagtcatgatccgatagtcaacaatggattggggggcatttcttcaattgaaaatgtgcagcagaatgctgcagtagtgctaggtgggaacaagatgggtcaaacagcatccctgcagcgggtggctagcttggaacatctacaggagcggattcgtggtggacctccatctaatggggagcagtgactaattagccaaatctcctggatgctttgccaggaaattattctaaaacagttatttctgttggttataactagaggcctattcttctggaatacattgtaattcaattgatggggcacatgatgttggattcaattagtgcaccccgtatttttttaaaaaataatataaaatgaactttactttctagttc

SEQ ID NO: 3115 - protein, 306 aa, Glycine max
  misc_feature (1)..(306): Ceres Seq. ID no. 15177649
SYDMDRVFSVDDISDHFWQPPIPVSAAQTSSQMSRSASEWAFQRFLQEASASAPSPPSSSSAADVVFVEIEDQPKPAPPPPSNGAVLPNAPGPVPLDSDEYQAFLKSKLNLACAAVAMTRGSLAKSQDPSPFSEGGSQPTNPSLVESQTTSKGSIPSENDPSKLQDKDTNVPVGIPSIPAMQKKPAVAIRPSTSGSSREQSDDEDIEGETSMIDNTDPADVKRVRRMLSNRESARRCRRRKQAHLTDLETQVSQLRGENSTLLKRLTDVSQKYSDSAVDNRVLKADVETLRTKVKLYFILKPTGSF

SEQ ID NO: 3116 - protein, 303 aa, Glycine max
  misc_feature (1)..(303): Ceres Seq. ID no. 15177650
MDRVFSVDDISDHFWQPPIPVSAAQTSSQMSRSASEWAFQRFLQEASASAPSPPSSSSAADVVFVEIEDQPKPAPPPPSNGAVLPNAPGPVPLDSDEYQAFLKSKLNLACAAVAMTRGSLAKSQDPSPFSEGGSQPTNPSLVESQTTSKGSIPSENDPSKLQDKDTNVPVGIPSIPAMQKKPAVAIRPSTSGSSREQSDDEDIEGETSMIDNTDPADVKRVRRMLSNRESARRCRRRKQAHLTDLETQVSQLRGENSTLLKRLTDVSQKYSDSAVDNRVLKADVETLRTKVKLYFILKPTGSF

SEQ ID NO: 3117 - protein, 274 aa, Glycine max
  misc_feature (1)..(274): Ceres Seq. ID no. 15177651
MSRSASEWAFQRFLQEASASAPSPPSSSSAADVVFVEIEDQPKPAPPPPSNGAVLPNAPGPVPLDSDEYQAFLKSKLNLACAAVAMTRGSLAKSQDPSPFSEGGSQPTNPSLVESQTTSKGSIPSENDPSKLQDKDTNVPVGIPSIPAMQKKPAVAIRPSTSGSSREQSDDEDIEGETSMIDNTDPADVKRVRRMLSNRESARRCRRRKQAHLTDLETQVSQLRGENSTLLKRLTDVSQKYSDSAVDNRVLKADVETLRTKVKLYFILKPTGSF

SEQ ID NO: 3118 - protein, 303 aa, Glycine max; identical to SEQ ID NO: 3116
  misc_feature (1)..(303): Ceres Seq. ID no. 16625598

SEQ ID NO: 3119 - DNA, 1470 bp, Glycine max
  misc_feature (1)..(1470): Ceres Seq. ID no. 15177854
cacagacataaagagcagagttcagaagcaagtaacagagcataccatcgtactgtacgtatttgcgctgcacaatctgcatccagtgcacacaagatagtagcgagcaagatggtggccaaggaggcgatcccgctgctgacgccgcacaagatgggccagttcgagctctcccaccgggtggtgctcgcgccgctcacgcgctgccgctcctacgccaacgtgccgcagccgcacgccgcggcgtactactcacagcgggccaccagaggcggcctcctcatcgccgaggccaccggcgtctccgccaccgcgcaggggtacccggagacacccggcatctggacgcagcagcaggtcgacgcctggaagcccatcgtcgatgccgtccaccgcaagggcgctctcttcttctgccagatttggcacgttgggagggtctccaccaacgattttcagccggacggacaggcgccgatctccagcactgacaagcaaataacgcctgatgccgagtctggtatggtctactccaagccccgacagcttcaaacggacgagataccgctgatcgttgatgacttcagacgcgctgccagaaacgcaatcgaggcggggttcgacggcgtggagatccacggggcacacgggtacctattggagcagttcatgaaagacagctctaacaaccgcaccgacgagtatggtggcagcctcgagaaccgatgccgctttgcagtagaggtaatcgatgctatcgtccatgagattggtgcggatcgtgtaggcatcaggttgtctccattcgtggattacatggactgcttcgactccgacccacatgcactcgggatgtacatggtacaacaacttaacaagcatcaaggatttgtctattgccatatggtagagccgcggatggccattgtggatggccgcaggcagataccccatgggctcctgcccttcaggaaagcattcaagggcactttcattgccgctggagggtatgatcgggaggaaggcaacaaagtggtggccgacggttatgctgatctcgttgcttacgggagaatctttctggctaatccagatttgcctaagagattcgagctcgactcaccattgaacaagtacgaccgcaacactttctacacgcaagatcctgtcattggctacacagattatcctttccttgaaggctcgaatgccgagtagttcacccactcgacttccatagtgatgtgcttgattttatacaatatgtaatggtttattcaatgtgtgtatgcacggggcatgcgcattgtatcatttccaccaataatttacttttattctcccatgaaatgccaatatgtcaagatattatttttcccatcaatagtgatatcactgtcttcaacaacctgtaagacaagttctatcccaacgatacccaaaatagtggtgcgtccttaccggttaaag

SEQ ID NO: 3120 - protein, 405 aa, Glycine max
  misc_feature (1)..(405): Ceres Seq. ID no. 15177855
HRHKEQSSEASNRAYHRTVRICAAQSASSAHKIVASKMVAKEAIPLLTPHKMGQFELSHRVVLAPLTRCRSYANVPQPHAAAYYSQRATRGGLLIAEATGVSATAQGYPETPGIWTQQQVDAWKPIVDAVHRKGALFFCQIWHVGRVSTNDFQPDGQAPISSTDKQITPDAESGMVYSKPRQLQTDEIPLIVDDFRRAARNAIEAGFDGVEIHGAHGYLLEQFMKDSSNNRTDEYGGSLENRCRFAVEVIDAIVHEIGADRVGIRLSPFVDYMDCFDSDPHALGMYMVQQLNKHQGFVYCHMVEPRMAIVDGRRQIPHGLLPFRKAFKGTFIAAGGYDREEGNKVVADGYADLVAYGRIFLANPDLPKRFELDSPLNKYDRNTFYTQDPVIGYTDYPFLEGSNAE

SEQ ID NO: 3121 - protein, 368 aa, Glycine max
  misc_feature (1)..(368): Ceres Seq. ID no. 15177856
MVAKEAIPLLTPHKMGQFELSHRVVLAPLTRCRSYANVPQPHAAAYYSQRATRGGLLIAEATGVSATAQGYPETPGIWTQQQVDAWKPIVDAVHRKGALFFCQIWHVGRVSTNDFQPDGQAPISSTDKQITPDAESGMVYSKPRQLQTDEIPLIVDDFRRAARNAIEAGFDGVEIHGAHGYLLEQFMKDSSNNRTDEYGGSLENRCRFAVEVIDAIVHEIGADRVGIRLSPFVDYMDCFDSDPHALGMYMVQQLNKHQGFVYCHMVEPRMAIVDGRRQIPHGLLPFRKAFKGTFIAAGGYDREEGNKVVADGYADLVAYGRIFLANPDLPKRFELDSPLNKYDRNTFYTQDPVIGYTDYPFLEGSNAE

SEQ ID NO: 3122 - protein, 354 aa, Glycine max
  misc_feature (1)..(354): Ceres Seq. ID no. 15177857
MGQFELSHRVVLAPLTRCRSYANVPQPHAAAYYSQRATRGGLLIAEATGVSATAQGYPETPGIWTQQQVDAWKPIVDAVHRKGALFFCQIWHVGRVSTNDFQPDGQAPISSTDKQITPDAESGMVYSKPRQLQTDEIPLIVDDFRRAARNAIEAGFDGVEIHGAHGYLLEQFMKDSSNNRTDEYGGSLENRCRFAVEVIDAIVHEIGADRVGIRLSPFVDYMDCFDSDPHALGMYMVQQLNKHQGFVYCHMVEPRMAIVDGRRQIPHGLLPFRKAFKGTFIAAGGYDREEGNKVVADGYADLVAYGRIFLANPDLPKRFELDSPLNKYDRNTFYTQDPVIGYTDYPFLEGSNAE

SEQ ID NO: 3123 - protein, 368 aa, Glycine max; identical to SEQ ID NO: 3121
  misc_feature (1)..(368): Ceres Seq. ID no. 16625599

SEQ ID NO: 3124 - DNA, 1358 bp, Glycine max
  misc_feature (1)..(1358): Ceres Seq. ID no. 15178325
ctctcacttaaactcccaccgcaatcacattcaaaagtcagattgatttgttttaaattgtgtacaagggcaggagggttgttaaaatgtctgcaactgaagtcacaagctctaggatatcatacgagtcctttgcaataaagcctcctgagcacccaacttatgatttgaagggcattatcaagctagctcttgaagaagatgctggggatcgaggtgatgtaacatgcttggccaccattccatttgacatggaagtggaagcttattttttggcaaaggaggatggcatcattgctggaatagctcttgcagagatgatatttcatgaggttgatccttctctgaaggtatgaaagcaatatgcagatggtctatcattatatttgtggttggtgcttggctgaattattgtaggattactttcaactatcaggtggagtggagtaaaaatgatggagattttgtccataaagggctacagtttggaagagttcatggacgggctcataacattgttgtagctgaaagagtagtgctaaactttatgcagaggatgagtggcactgcaactttaactaaggcaatggcaaatgcagcataccctgcatatatgttggagactagaaaaactgctccaggtcttcgtttagtggataagtgggcggtattaattggtggaggtcggaaccataggatgggtttgtttgatatggtgatgataaaagataatcatatatcagcagctggaggtgttgctgatgctcttaaagctgttgacctgtatctggagcaaaacaatcttcaaatggaggttgaggtggagaccaggactcttgaggaagtggaagaagttttacattattcatctcaaacaaagacttctttgactcgaataatgttggacaatatggttgtacctctaccaaatggggatgtggacatatctatgctaaaagaagctgtgcagttgataaatgggagatatgagactgaggcatcaggcaatgtcacactagatactgtacataaaattgggcaaagcggagtgacctacatttctagtggttcgttgactcattctgtgaaagcactagacatctccctcaaaattgataccgaattagcactcaaagttggaaggcgcactggacgagcttgattggccttcttaagatattactattatctatcaatattttgtatcgggtttttttccccctattttgtcacttttgtgtgacttttttttttcataggcaaataaaacaaatatatatcatggagcacaagaagtgccatgatacacaaacagagttacccctatgctgatcaagacaggaatcttgttattcgtg

SEQ ID NO: 3125 - protein, 269 aa, Glycine max
  misc_feature (1)..(269): Ceres Seq. ID no. 15178326
MKAICRWSIIIFVVGAWLNYCRITFNYQVEWSKNDGDFVHKGLQFGRVHGRAHNIVVAERVVLNFMQRMSGTATLTKAMANAAYPAYMLETRKTAPGLRLVDKWAVLIGGGRNHRMGLFDMVMIKDNHISAAGGVADALKAVDLYLEQNNLQMEVEVETRTLEEVEEVLHYSSQTKTSLTRIMLDNMVVPLPNGDVDISMLKEAVQLINGRYETEASGNVTLDTVHKIGQSGVTYISSGSLTHSVKALDISLKIDTELALKVGRRTGRA

SEQ ID NO: 3126 - protein, 204 aa, Glycine max
  misc_feature (1)..(204): Ceres Seq. ID no. 15178327
MQRMSGTATLTKAMANAAYPAYMLETRKTAPGLRLVDKWAVLIGGGRNHRMGLFDMVMIKDNHISAAGGVADALKAVDLYLEQNNLQMEVEVETRTLEEVEEVLHYSSQTKTSLTRIMLDNMVVPLPNGDVDISMLKEAVQLINGRYETEASGNVTLDTVHKIGQSGVTYISSGSLTHSVKALDISLKIDTELALKVGRRTGRA

SEQ ID NO: 3127 - protein, 201 aa, Glycine max
  misc_feature (1)..(201): Ceres Seq. ID no. 15178328
MSGTATLTKAMANAAYPAYMLETRKTAPGLRLVDKWAVLIGGGRNHRMGLFDMVMIKDNHISAAGGVADALKAVDLYLEQNNLQMEVEVETRTLEEVEEVLHYSSQTKTSLTRIMLDNMVVPLPNGDVDISMLKEAVQLINGRYETEASGNVTLDTVHKIGQSGVTYISSGSLTHSVKALDISLKIDTELALKVGRRTGRA

SEQ ID NO: 3128 - protein, 269 aa, Glycine max; identical to SEQ ID NO: 3125
  misc_feature (1)..(269): Ceres Seq. ID no. 16612110

SEQ ID NO: 3129 - DNA, 737 bp, Glycine max
  misc_feature (1)..(737): Ceres Seq. ID no. 15178344
acattagctccatagttcaatagagagagtaaagagcagacataggaagagataaaatggccatggcaacaaaatcagtttcttacttcaccctcattttcatcctcgttttggtttttttttttgaagcgccggaaatagaagcgcaggatagcgagtgccttaaagaatacggcgggaatgtgggtttcggcttctgtgcgcctcagacatttccgacgatttgttatataagatgccgtgaggacaaggacgcgaaaggtggaagatgcattacgggagatgccggtgcttttgattttaaatgcttatgtgactactgcagtgacaaacctaatgaccagattctacatggtgtcatctgagtcctacatgtgtgatggtttgtgtaataataagtgttctaagtgataatgtaatagtaaggaatatgtgaaataaaaagctgaaagtatctgaggttcacatggtttgattttagatatgggctttgtggtagagaggcgaagagagtaattattaactttcatacacagaccacccgttctgatatttcttatcagaatgatttatttgggttacaacttgcaactaagctaaataatcgctacacgatttagctgcagttcaaagtttcagtcttgtgttaaaattgcgtgtgtctgtttgtgtgtgtgtcatcgtcgacatgttcatgtgtggtattaaaacgagttcacttcttcagtttgcaaact

SEQ ID NO: 3130 - protein, 102 aa, Glycine max
  misc_feature (1)..(102): Ceres Seq. ID no. 15178345
MAMATKSVSYFTLIFILVLVFFFEAPEIEAQDSECLKEYGGNVGFGFCAPQTFPTICYIRCREDKDAKGGRCITGDAGAFDFKCLCDYCSDKPNDQILHGVI

SEQ ID NO: 3131 - protein, 100 aa, Glycine max
  misc_feature (1)..(100): Ceres Seq. ID no. 15178346
MATKSVSYFTLIFILVLVFFFEAPEIEAQDSECLKEYGGNVGFGFCAPQTFPTICYIRCREDKDAKGGRCITGDAGAFDFKCLCDYCSDKPNDQILHGVI

SEQ ID NO: 3132 - protein, 102 aa, Glycine max; identical to SEQ ID NO: 3130
  misc_feature (1)..(102): Ceres Seq. ID no. 16625602

SEQ ID NO: 3133 - DNA, 1787 bp, Glycine max
  misc_feature (1)..(1787): Ceres Seq. ID no. 15224491
gcgaattgggnnncgggccccccctcgagtcagctacgtaggccccccccccatttttattttttttttattatctggatggccaaaccaaaaatgccagggtttcggtttcaacccactgacgttgagctgattgagtattttctgaagaggaaggttcggggtaagaaattcccttccgaaataattgctgaacttgacttgtacaagtttgctccgtgggacctcccagatatgtctttgctcaagaatggggatttgaattggtacttcttttgccctcggggaaagaagtattcgactggtgggaggttgaatcgggccacggaggctgggtattggaagactactgggaaggatagagcaattgaacacaataatagagttgtggggatgataaaaacactggtttttcacactggtagagcccctaagggagatcgaactgattgggttatgcatgaatttagacttgatgacaaggtgctggctgatgaaggcgtattgcaggactcctatgtgatttgtagggtgtaccaaaaggagggtcctggtcctaggaatggtgcacaatatggtaaaccatatgaggagaaagagtgggaaacagatgaggaaattgattctgtacaatctgcccctgttgctgctgtttgtgcacctgttcctatacaacctagtgaaagccatatttcagttgctaattacatccatccctctacaagtggatgtgctggattgacctctgtatcatgtgtatcagaattgatgccatcttgctcgacacatccttcagcacctagcaatccagttggcactgtatcatgtgtatcagaattgattccctcttgctcggaaccacatcatttgccatcaaacaatcaagttggctctgtttcatgtgtttcagaattcatgcyctcttgctcggcacatccttcagcaccaaacagtcaagttggctctgtttcacgtgtttcagaattcatgccatcttgctcggcacatccttcagcaccaaactgtcaagttggctctgtgtcatctgcatcagaattgatgccctcattctcagaccatccttcagcaccaagcaatcaagttggctctgtatcttgtgtaccagaattgatgacctcttgctcagcacatccttcagctccaaataatcaagttgacaatgacattctatctttgcttgattgtttctttgaagatgatgacacattggctgtgaaagaaaacaacagaattgagaacattgatgatcctgatcaggcaaacaatgccgatggtgcactgtgttcagatccaaatgctatttttgaggagttaggagaccttaacagcttggttggattgggtgaaggcagtttttcctgtggccagaaaaatgaatatactacaagcgaaatgctttatactgttgatatattcgggtcttgtgaccatgacttcttggagttgcttgacctagagacaccgcagctctggctgaataaacatggaagtggtagccaagataagtaaggctaaaaaattgagggaagtatcacagcaaattgattgaactatagccccaagtacctaaccttgattagaataaacaaaggattctcttcctgttcttcatttaaaaaccatcatggcaccagttacttcgcatcatatcaactgacaagaatgttgattaaaatctagtgatgttctttgattgtgttatgtttgattaaaatctaattatgctggaagttgttcccaaatctacgttgattgcattttttgcc

SEQ ID NO: 3134 - protein, 509 aa, Glycine max
  misc_feature (1)..(509): Ceres Seq. ID no. 15224492
  misc_feature (4)..(4): Xaa is any aa, unknown or other
  misc_feature (5)..(5): Xaa is any aa, unknown or other
  misc_feature (307)..(307): Xaa is any aa, unknown or other
ANWXXGPPSSQLRRPPPHFYFFFIIWMAKPKMPGFRFQPTDVELIEYFLKRKVRGKKFPSEIIAELDLYKFAPWDLPDMSLLKNGDLNWYFFCPRGKKYSTGGRLNRATEAGYWKTTGKDRAIEHNNRVVGMIKTLVFHTGRAPKGDRTDWVMHEFRLDDKVLADEGVLQDSYVICRVYQKEGPGPRNGAQYGKPYEEKEWETDEEIDSVQSAPVAAVCAPVPIQPSESHISVANYIHPSTSGCAGLTSVSCVSELMPSCSTHPSAPSNPVGTVSCVSELIPSCSEPHHLPSNNQVGSVSCVSEFMXSCSAHPSAPNSQVGSVSRVSEFMPSCSAHPSAPNCQVGSVSSASELMPSFSDHPSAPSNQVGSVSCVPELMTSCSAHPSAPNNQVDNDILSLLDCFFEDDDTLAVKENNRIENIDDPDQANNADGALCSDPNAIFEELGDLNSLVGLGEGSFSCGQKNEYTTSEMLYTVDIFGSCDHDFLELLDLETPQLWLNKHGSGSQDK

SEQ ID NO: 3135 - protein, 483 aa, Glycine max
  misc_feature (1)..(483): Ceres Seq. ID no. 15224493
  misc_feature (281)..(281): Xaa is any aa, unknown or other
MAKPKMPGFRFQPTDVELIEYFLKRKVRGKKFPSEIIAELDLYKFAPWDLPDMSLLKNGDLNWYFFCPRGKKYSTGGRLNRATEAGYWKTTGKDRAIEHNNRVVGMIKTLVFHTGRAPKGDRTDWVMHEFRLDDKVLADEGVLQDSYVICRVYQKEGPGPRNGAQYGKPYEEKEWETDEEIDSVQSAPVAAVCAPVPIQPSESHISVANYIHPSTSGCAGLTSVSCVSELMPSCSTHPSAPSNPVGTVSCVSELIPSCSEPHHLPSNNQVGSVSCVSEFMXSCSAHPSAPNSQVGSVSRVSEFMPSCSAHPSAPNCQVGSVSSASELMPSFSDHPSAPSNQVGSVSCVPELMTSCSAHPSAPNNQVDNDILSLLDCFFEDDDTLAVKENNRIENIDDPDQANNADGALCSDPNAIFEELGDLNSLVGLGEGSFSCGQKNEYTTSEMLYTVDIFGSCDHDFLELLDLETPQLWLNKHGSGSQDK

SEQ ID NO: 3136 - protein, 478 aa, Glycine max
  misc_feature (1)..(478): Ceres Seq. ID no. 15224494
  misc_feature (276)..(276): Xaa is any aa, unknown or other
MPGFRFQPTDVELIEYFLKRKVRGKKFPSEIIAELDLYKFAPWDLPDMSLLKNGDLNWYFFCPRGKKYSTGGRLNRATEAGYWKTTGKDRAIEHNNRVVGMIKTLVFHTGRAPKGDRTDWVMHEFRLDDKVLADEGVLQDSYVICRVYQKEGPGPRNGAQYGKPYEEKEWETDEEIDSVQSAPVAAVCAPVPIQPSESHISVANYIHPSTSGCAGLTSVSCVSELMPSCSTHPSAPSNPVGTVSCVSELIPSCSEPHHLPSNNQVGSVSCVSEFMXSCSAHPSAPNSQVGSVSRVSEFMPSCSAHPSAPNCQVGSVSSASELMPSFSDHPSAPSNQVGSVSCVPELMTSCSAHPSAPNNQVDNDILSLLDCFFEDDDTLAVKENNRIENIDDPDQANNADGALCSDPNAIFEELGDLNSLVGLGEGSFSCGQKNEYTTSEMLYTVDIFGSCDHDFLELLDLETPQLWLNKHGSGSQDK

SEQ ID NO: 3137 - protein, 483 aa, Glycine max; identical to SEQ ID NO: 3135
  misc_feature (1)..(483): Ceres Seq. ID no. 16625646
  misc_feature (281)..(281): Xaa is any aa, unknown or other

SEQ ID NO: 3138 - DNA, 647 bp, Glycine max
  misc_feature (1)..(647): Ceres Seq. ID no. 12484607
gtaccactcctctcttctgttccccattttgggaaaaattgtgttggtggtggcgaagacaatgaggaaccctcgtagtgctctctgcaaaactgctattatggctgctgctgatattttcaacgcctttggtgacaagttgcatgacccagaaatctccgatgcatttgatggcttgctgctacagctgctgctgaaggcatcccaagacaaaaggtttgtgtgtgaagaagctgacagggcacttggcttaatggttggttccatgacccctcttccactgcttcagaaaatgagggtatatgggagtcacaaaaaccttagggtcagggctaaggctgctgtttctctctccagatgtgtctccaagatggggcttcaagaaatggagcagtttgggttggttgaactgattgaagtggcagctgatttactgaatgatagacttccagaggcaagagatgcagcgcgaagtgttgcaacttcaatgtatgaagcactgacaaaggactcggaagagaagatggagctgtggcagagcttctgccaatccaagttgccaccaattcatgctctttcaattttgaaaatagttaagccctaaaagggaggggtgtttctgttgcgtgtagtccctagtcatatat

SEQ ID NO: 3139 - protein, 200 aa, Glycine max
  misc_feature (1)..(200): Ceres Seq. ID no. 12484608
YHSSLLFPILGKIVLVVAKTMRNPRSALCKTAIMAAADIFNAFGDKLHDPEISDAFDGLLLQLLLKASQDKRFVCEEADRALGLMVGSMTPLPLLQKMRVYGSHKNLRVRAKAAVSLSRCVSKMGLQEMEQFGLVELIEVAADLLNDRLPEARDAARSVATSMYEALTKDSEEKMELWQSFCQSKLPPIHALSILKIVKP

SEQ ID NO: 3140 - protein, 180 aa, Glycine max
  misc_feature (1)..(180): Ceres Seq. ID no. 12484609
MRNPRSALCKTAIMAAADIFNAFGDKLHDPEISDAFDGLLLQLLLKASQDKRFVCEEADRALGLMVGSMTPLPLLQKMRVYGSHKNLRVRAKAAVSLSRCVSKMGLQEMEQFGLVELIEVAADLLNDRLPEARDAARSVATSMYEALTKDSEEKMELWQSFCQSKLPPIHALSILKIVKP

SEQ ID NO: 3141 - protein, 167 aa, Glycine max
  misc_feature (1)..(167): Ceres Seq. ID no. 12484610
MAAADIFNAFGDKLHDPEISDAFDGLLLQLLLKASQDKRFVCEEADRALGLMVGSMTPLPLLQKMRVYGSHKNLRVRAKAAVSLSRCVSKMGLQEMEQFGLVELIEVAADLLNDRLPEARDAARSVATSMYEALTKDSEEKMELWQSFCQSKLPPIHALSILKIVKP

SEQ ID NO: 3142 - DNA, 662 bp, Glycine max
  misc_feature (1)..(662): Ceres Seq. ID no. 12781488
atccacaacatccagagcaaagagcatccagattccacactccagagcaactgtttcaggctgagttgagtttttttggggttgccaatggcggacatcgcgatgctggtggcggaggagcacgagaagaggatgaagcgaggggcgccccgcacggtcgccggcgccggcgaggaggcgtccgaggggagggtgaacttcggggcggtgaccaaggtgtggggctcctgggccgagtctgccgccgccgccgcgtccggggtcaaggtgcacgtcgcggtgctcgtcaggtccgacctggtggcggccgagcccaggagcccggtcgcccgggcagccttcgacggcttcttctctgcttgatgagtgtgaattagagtaattcggaggagtttaccgtgtggagtacctctcccccttaagccagcgtcatataactccggtttgtacataaccgtgtgctttactggtttgcaacgaggaagaagtgtacttttcgtactgctcttcgcttgggcggcaactatgcgttttgacattttatctttggagttgggcgctgccaggcgccggccgaccggccaaaatcctaaaccggtgaccctcggagtcgttcagtcacagtcccatgtacggtcacgatttgtatgagtcggtgagcg

SEQ ID NO: 3143 - protein, 124 aa, Glycine max
  misc_feature (1)..(124): Ceres Seq. ID no. 12781489
PQHPEQRASRFHTPEQLFQAELSFFGVANGGHRDAGGGGAREEDEARGAPHGRRRRRGGVRGEGELRGGDQGVGLLGRVCRRRRVRGQGARRGARQVRPGGGRAQEPGRPGSLRRLLLCLMSVN

SEQ ID NO: 3144 - protein, 91 aa, Glycine max
  misc_feature (1)..(91): Ceres Seq. ID no. 12781490
MADIAMLVAEEHEKRMKRGAPRTVAGAGEEASEGRVNFGAVTKVWGSWAESAAAAASGVKVHVAVLVRSDLVAAEPRSPVARAAFDGFFSA

SEQ ID NO: 3145 - protein, 86 aa, Glycine max
  misc_feature (1)..(86): Ceres Seq. ID no. 12781491
MLVAEEHEKRMKRGAPRTVAGAGEEASEGRVNFGAVTKVWGSWAESAAAAASGVKVHVAVLVRSDLVAAEPRSPVARAAFDGFFSA

SEQ ID NO: 3146 - protein, 91 aa, Glycine max; identical to SEQ ID NO: 3144
  misc_feature (1)..(91): Ceres Seq. ID no. 16625389

SEQ ID NO: 3147 - DNA, 767 bp, Glycine max
  misc_feature (1)..(767): Ceres Seq. ID no. 12781605
aggcaggtgagcaacacacagcaacagcaacgaacgaagcactcagtcgagcacctcgatatctttttttccttttcgaaaagaatgttatccccagcttctgcatcagaagcacctcgatatctgcagtcctacagtttgtcagatggcgagcggcggcggcaaggcgacggcctcgtcctgggcggcggcgatgagcatgggcgcgggcacggtggaggcgctcaaggagcggcacgccgggctatgccgctggaactaccacgcgctccggtgcgtccagcagcgcgctggcaccgcggccgccgggaacggcaagaccatggcggcgcccgctgctggcggggcggcggccaggaggaggaaccgaggaaggcgaggcaggagcaggaggaggagctccggactgtcatgtacatcagcaactggggaccaaataactagcaagcagattagtcatcagtcctctgttcttcatcttcttagatggccagaatggtgcaccgtgcacaagctgcaccagttcgtctggctggatctgaatgtgtgggaacacaccacgcgcattctcgagcttgtgtaagacacgcccacagaatcgatcacatcaaatacgagcacgcgcacacaagaaaactgataaccaaagggcccttgtcgtgcccttgtttctcctctttatttctctttttttgtttttctcggtgttacataaactcagcaaccgtgcatatatctttccctaataataaagcacggattgactc

SEQ ID NO: 3148 - protein, 147 aa, Glycine max
  misc_feature (1)..(147): Ceres Seq. ID no. 12781606
RQVSNTQQQQRTKHSVEHLDIFFSFSKRMLSPASASEAPRYLQSYSLSDGERRRQGDGLVLGGGDEHGRGHGGGAQGAARRAMPLELPRAPVRPAARWHRGRRERQDHGGARCWRGGGQEEEPRKARQEQEEELRTVMYISNWGPNN

SEQ ID NO: 3149 - protein, 145 aa, Glycine max
  misc_feature (1)..(145): Ceres Seq. ID no. 12781607
MASGGGKATASSWAAAMSMGAGTVEALKERHAGLCRWNYHALRCVQQRAGTAAAGNGKTMAAPAAGGAAARRRNRGRRGRSRRRSSGLSCTSATGDQITSKQISHQSSVLHLLRWPEWCTVHKLHQFVWLDLNVWEHTTRILELV

SEQ ID NO: 3150 - protein, 129 aa, Glycine max
  misc_feature (1)..(129): Ceres Seq. ID no. 12781608
MSMGAGTVEALKERHAGLCRWNYHALRCVQQRAGTAAAGNGKTMAAPAAGGAAARRRNRGRRGRSRRRSSGLSCTSATGDQITSKQISHQSSVLHLLRWPEWCTVHKLHQFVWLDLNVWEHTTRILELV

SEQ ID NO: 3151 - protein, 145 aa, Glycine max; identical to SEQ ID NO: 3149
  misc_feature (1)..(145): Ceres Seq. ID no. 16625390

SEQ ID NO: 3152 - DNA, 931 bp, Glycine max
  misc_feature (1)..(931): Ceres Seq. ID no. 13582127
actcgagcaggaaaaagcagcagaagaccagaaaatctcttgccgcacaccgcgtccgcgaccgtgacctccctgtccgacgagcgctctacgatggcatctcaggattccaagcccgcgcaagtcccggccgccgccgagctgacggccccgccggctgctgccgcaggggaggcgacgaatcccacttccccgacagcagcccaaaaccctagccctgccgcggccgccgccgccggtggggcagccacggatctagagaagaagatgcgccgcgcggagcggtttgggacgcaggtggtgatgtccgaggacgagaagcgaagcagccgcgccgagaggtttgggaccggatcttccaatgaaaagatggaggagcagaagaagaagtccagggctgagaggtttggccttcccacgccctcctctgatgataccgaggctaagaaaaaagcccgcttagagcgatttggtcagagcacagaagttggcaaggcggaagaagagaagcgaaaggcacgggcccttaggtttgcaggagcacccagtgggtcatctgaaggaaaggacaaagacacctccaagccggatgcggctaccatagctggcacggcatgatggaaaacagtccctgcctttttgagggtcgtctcatatacgcccctcgagacgtcggtgaagccgtagtttgtacaagactaacaacgccaacggcgtcgatgctgtcggagccattcgtgtgctgtttactgtgtagcgcttgatgacttcttgctgtactccgctgggagccatttgagtgctgttaccgtgtagcactcgaggacttccttgctgtactcgttggcatagtctgtttgctgctcggtctggggacacctgtgtactacagtacttcgtttccctttgtagtgatactacttattagccg

SEQ ID NO: 3153 - protein, 205 aa, Glycine max
  misc_feature (1)..(205): Ceres Seq. ID no. 13582128
TRAGKSSRRPENLLPHTASATVTSLSDERSTMASQDSKPAQVPAAAELTAPPAAAAGEATNPTSPTAAQNPSPAAAAAAGGAATDLEKKMRRAERFGTQVVMSEDEKRSSRAERFGTGSSNEKMEEQKKKSRAERFGLPTPSSDDTEAKKKARLERFGQSTEVGKAEEEKRKARALRFAGAPSGSSEGKDKDTSKPDAATIAGTA

SEQ ID NO: 3154 - protein, 174 aa, Glycine max
  misc_feature (1)..(174): Ceres Seq. ID no. 13582129
MASQDSKPAQVPAAAELTAPPAAAAGEATNPTSPTAAQNPSPAAAAAAGGAATDLEKKMRRAERFGTQVVMSEDEKRSSRAERFGTGSSNEKMEEQKKKSRAERFGLPTPSSDDTEAKKKARLERFGQSTEVGKAEEEKRKARALRFAGAPSGSSEGKDKDTSKPDAATIAGTA

SEQ ID NO: 3155 - protein, 116 aa, Glycine max
  misc_feature (1)..(116): Ceres Seq. ID no. 13582130
MRRAERFGTQVVMSEDEKRSSRAERFGTGSSNEKMEEQKKKSRAERFGLPTPSSDDTEAKKKARLERFGQSTEVGKAEEEKRKARALRFAGAPSGSSEGKDKDTSKPDAATIAGTA

SEQ ID NO: 3156 - protein, 174 aa, Glycine max; identical to SEQ ID NO: 3154
  misc_feature (1)..(174): Ceres Seq. ID no. 16625392

SEQ ID NO: 3157 - DNA, 868 bp, Glycine max
  misc_feature (1)..(868): Ceres Seq. ID no. 13594241
atatcgatcccaagcctccctccgtagccagttagttctcatttctaatattgcttccaaaatctctctctctctctctctctggggggtatgtgtgttgttcagtacaactagttttggtatagctagctgctcttcatttgattttgctcgcagtcgcagctccaatccaaatatggaggcgatcactgcttccttagagaggtctcttcaaaactgttccttaaacaataccaacaacaaccatcagcagagcaggaggccggaagaagatgatgggtcagctacagatggaggcataggaatctcatcctgctcagacgatgtcccggacccggataatagtcatatctccgacaccactttagagctcaactcccacatctcactcccttatcattgggagcaatgcctagatttaaagacgggggaaatatattacattaactggaggaacgggatgaaagcaaaggaggatccaagaagcaggagggcagattatagtgtaagtagggattgtgagtccgaagaagaagaagaagaagagagctggtacgacagcgaagagtcttcatcggagtcatgcccttcttcatccaaagagcactatgatgagggacaggtagagaaacagaataacaatgttctggtggtggctgggtgcaagggctgtctcatgtatttcatggtgcccaaacaggttgaagactgcccaaaatgtactggtcaactcctccacttcgatcgatccgaaaatggctctccatgattaattcccactcctcttttctccttgtgtttccttcttcgcttctcttttctttttgctgtgactgtcaaattaaactatagttctctctttttttgt

SEQ ID NO: 3158 - protein, 255 aa, Glycine max
  misc_feature (1)..(255): Ceres Seq. ID no. 13594242
YRSQASLRSQLVLISNIASKISLSLSLWGVCVLFSTTSFGIASCSSFDFARSRSSNPNMEAITASLERSLQNCSLNNTNNNHQQSRRPEEDDGSATDGGIGISSCSDDVPDPDNSHISDTTLELNSHISLPYHWEQCLDLKTGEIYYINWRNGMKAKEDPRSRRADYSVSRDCESEEEEEEESWYDSEESSSESCPSSSKEHYDEGQVEKQNNNVLVVAGCKGCLMYFMVPKQVEDCPKCTGQLLHFDRSENGSP

SEQ ID NO: 3159 - protein, 197 aa, Glycine max
  misc_feature (1)..(197): Ceres Seq. ID no. 13594243
MEAITASLERSLQNCSLNNTNNNHQQSRRPEEDDGSATDGGIGISSCSDDVPDPDNSHISDTTLELNSHISLPYHWEQCLDLKTGEIYYINWRNGMKAKEDPRSRRADYSVSRDCESEEEEEEESWYDSEESSSESCPSSSKEHYDEGQVEKQNNNVLVVAGCKGCLMYFMVPKQVEDCPKCTGQLLHFDRSENGSP

SEQ ID NO: 3160 - DNA, 564 bp, Glycine max
  misc_feature (1)..(564): Ceres Seq. ID no. 13595091
acccagaagccacccaccacccaccccatccctgagtttgatcggagccggaggagagcatccacaccgaggaagaaggagaagcggcgaggcaaggcgaaagatggggaagatgcccgtgcggatgaaggcggtggtgtacgcgctgtcgccgttccagcagcaggtgatgccgggcctgtggaaggacatcaccaccaagatccaccacaaggtctccgagaactggatctccgccacgctcctcatcacccccgtcgtcggcacctaccagtatgcgatgtggtacaaggagcaggagaagctgtcccacagatactaaaggtggagctttctccaatatcgcagcagttggaatttccatgttctataatccaccaagagtgatttaacattttcggaatcacttctagttgtactcttttgctctttccgttgcatatgcaatgatgcagtaagtgtgacttgcaaacctattttgaggcctcaaatgttgagttgtccatcactggagtgattttgtgcaataaagcaaattaaccagtcattttacttggttactgc

SEQ ID NO: 3161 - protein, 128 aa, Glycine max
  misc_feature (1)..(128): Ceres Seq. ID no. 15221485
TQKPPTTHPIPEFDRSRRRASTPRKKEKRRGKAKDGEDARADEGGGVRAVAVPAAGDAGPVEGHHHQDPPQGLRELDLRHAPHHPRRRHLPVCDVVQGAGEAVPQILKVELSPISQQLEFPCSIIHQE

SEQ ID NO: 3162 - protein, 106 aa, Glycine max
  misc_feature (1)..(106): Ceres Seq. ID no. 15221486
PRSHPPPTPSLSLIGAGGEHPHRGRRRSGEARRKMGKMPVRMKAVVYALSPFQQQVMPGLWKDITTKIHHKVSENWISATLLITPVVGTYQYAMWYKEQEKLSHRY

SEQ ID NO: 3163 - protein, 72 aa, Glycine max
  misc_feature (1)..(72): Ceres Seq. ID no. 15221487
MGKMPVRMKAVVYALSPFQQQVMPGLWKDITTKIHHKVSENWISATLLITPVVGTYQYAMWYKEQEKLSHRY

SEQ ID NO: 3164 - protein, 72 aa, Glycine max; identical to SEQ ID NO: 3163
  misc_feature (1)..(72): Ceres Seq. ID no. 16625402

SEQ ID NO: 3165 - DNA, 704 bp, Glycine max
  misc_feature (1)..(704): Ceres Seq. ID no. 13639206
actttccccgttctccttccaatccaccactccgccgctagggtttttaagttttagtcccacagcagcggcggccgtcggcggcgacaaccaaacccccgcgggatcccgagcgaactcgagcgagagagatgaggctcctcacgcacaacttcctggcgtcgaacgtgaagggcgtgagcacgggctacccgctcgcgctggaggtcgccaagacgtccatcaaggaggtggagctcaacgtcgacttcctccgcgggatccttcccaagatcgactggcgggcgctcttcgccgccaccagcgccgcggggttcccggagctcctcgctgcagagcagccgcccgaggcggagctcttcgccgagggcgccgcggacgtcgaaggcagcgcgatccgccgcctccaccacgcgctcctcgagatccacgtcgaggagggcaccctcgtctgccccgacagcggccgctccttccccatcctgaagggcgtccccaatatgcttctccatgaggacgaggtgcggcactgactcgcgtgcagcaccagccggctgccttgcttgcttgtttgctcgtgccacatacggttatgcacttccagggcttagactcctaagattgtgtgtatgaactatcctagtatgaattgtggatcttgaagtcgtaccttgataaatactactacctgtgacgttttgctc

SEQ ID NO: 3166 - protein, 170 aa, Glycine max
  misc_feature (1)..(170): Ceres Seq. ID no. 13639207
LSPFSFQSTTPPLGFLSFSPTAAAAVGGDNQTPAGSRANSSERDEAPHAQLPGVEREGREHGLPARAGGRQDVHQGGGAQRRLPPRDPSQDRLAGALRRHQRRGVPGAPRCRAAARGGALRRGRRGRRRQRDPPPPPRAPRDPRRGGHPRLPRQRPLLPHPEGRPQYASP

SEQ ID NO: 3167 - protein, 133 aa, Glycine max
  misc_feature (1)..(133): Ceres Seq. ID no. 13639208
MRLLTHNFLASNVKGVSTGYPLALEVAKTSIKEVELNVDFLRGILPKIDWRALFAATSAAGFPELLAAEQPPEAELFAEGAADVEGSAIRRLHHALLEIHVEEGTLVCPDSGRSFPILKGVPNMLLHEDEVRH

SEQ ID NO: 3168 - protein, 133 aa, Glycine max; identical to SEQ ID NO: 3167
  misc_feature (1)..(133): Ceres Seq. ID no. 16625410

SEQ ID NO: 3169 - DNA, 477 bp, Glycine max
  misc_feature (1)..(477): Ceres Seq. ID no. 13644008
ttttgaccactttcttggtagctccttctggagtgaaaggtggaagcatctcattctctggttgcattcagcttcttggcttctgtgcttttgagagttgtgttggcatattctggccatccattatgaagatgagatctcaatacatcnctgaggaggccaggagcaccatcatgaactttttccgcattcctctcaacatttttgtgtgtgttgtgctgtacaatgttgatgcattccctatcactgttatgtttggcatgtgctcaattttccttttggtggcttgtatcttgcaaaggcgactgatggtgatttccgataagccaaaaacagaagattggcaattgaaggatagggacgcagagtcagaaccattgaacctttaactggcttttgcctgagttttgaggaggcaccgaacttagctacttaagtcttactaatgcagtttccgtctacatatgtgcacgatgc

SEQ ID NO: 3170 - protein, 128 aa, Glycine max
  misc_feature (1)..(128): Ceres Seq. ID no. 13644009
  misc_feature (50)..(50): Xaa is any aa, unknown or other
LTTFLVAPSGVKGGSISFSGCIQLLGFCAFESCVGIFWPSIMKMRSQYIXEEARSTIMNFFRIPLNIFVCVVLYNVDAFPITVMFGMCSIFLLVACILQRRLMVISDKPKTEDWQLKDRDAESEPLNL

SEQ ID NO: 3171 - protein, 87 aa, Glycine max
  misc_feature (1)..(87): Ceres Seq. ID no. 13644010
  misc_feature (9)..(9): Xaa is any aa, unknown or other
MKMRSQYIXEEARSTIMNFFRIPLNIFVCVVLYNVDAFPITVMFGMCSIFLLVACILQRRLMVISDKPKTEDWQLKDRDAESEPLNL

SEQ ID NO: 3172 - protein, 85 aa, Glycine max
  misc_feature (1)..(85): Ceres Seq. ID no. 13644011
  misc_feature (7)..(7): Xaa is any aa, unknown or other
MRSQYIXEEARSTIMNFFRIPLNIFVCVVLYNVDAFPITVMFGMCSIFLLVACILQRRLMVISDKPKTEDWQLKDRDAESEPLNL

SEQ ID NO: 3173 - DNA, 407 bp, Glycine max
  misc_feature (1)..(407): Ceres Seq. ID no. 13644283
atatacttttgatctttctcttagcatctagttctacttgctcttctttcattcaagctttgtgagtgattcttagaagactctacaatgaacgattgggctcctcctttcatagctgcggctttgttttggctcttgagcccgggaatgatctttcagttgccggggaagaatgcaccctttgagtttatgaacatgaagaccactgtggcatccatgtttgtgcacactgttatttatggtttgtttcttatgctgttctttgttgttcttagtatccatctttatatttaagcagcaacataggctatttaaagaaaactaatgttctgctttatcttttaaattagatcatgtaacaatcttctcatgttgatcagtatgtatgtgctcttttgaattttccg

SEQ ID NO: 3174 - protein, 68 aa, Glycine max
  misc_feature (1)..(68): Ceres Seq. ID no. 13644284
MNDWAPPFIAAALFWLLSPGMIFQLPGKNAPFEFMNMKTTVASMFVHTVIYGLFLMLFFVVLSIHLYI

SEQ ID NO: 3175 - protein, 48 aa, Glycine max
  misc_feature (1)..(48): Ceres Seq. ID no. 13644285
MIFQLPGKNAPFEFMNMKTTVASMFVHTVIYGLFLMLFFVVLSIHLYI

SEQ ID NO: 3176 - protein, 34 aa, Glycine max
  misc_feature (1)..(34): Ceres Seq. ID no. 13644286
MNMKTTVASMFVHTVIYGLFLMLFFVVLSIHLYI

SEQ ID NO: 3177 - protein, 68 aa, Glycine max; identical to SEQ ID NO: 3174
  misc_feature (1)..(68): Ceres Seq. ID no. 16625412

SEQ ID NO: 3178 - DNA, 1600 bp, Glycine max
  misc_feature (1)..(1600): Ceres Seq. ID no. 14304359
gatcattgaccaatcaacaccaactccaaacagttggaatcgacgaaacgcaaaggcatattgacattggcatggctacctcgctgtgtacacccagctacagagtcacactgaaactgtacggaacagattcccataagttaaacgcaaagccctcagttcgttataggcgtcgttttggcaccaccaccagaatatgctgcacctctaataattacaacgacaacaacatccaacgacgaccccaatccgaagctattcaagtttactcgcaaatcgagagattacttacagattctgttagacaatcacaggatggttggtggggttccccagactggagtgaagttgagggagcttggattctcaaaccgaaaagctctgaacccaattatgtagtgcattttatcggaggtatatttgttggagctgctcctcagcttacctaccggaggtttcttgagcgtctctcagaaaagggtatattgatcattgcaacgccatatgctagtgggtttgatcacttcctcattgctgatgaagtacagttcaaatttgataggtgctatcgcacactgcaagaaacaatccaagaccttcctatttttggtgttggccattctttggggtcggtggtccaccttctgattggatcaagatatgcagtgcaaagatctggaaatgttctcatggcattcaataacaaggaagcaagttcagctgttcctttgttctctcctgtgatcgtcccaatggctcaaaccattggtccacttctatcagatattttttcttcaccaactctaagagctggggcagagatgactttgaagcaactagaaaacgttagccctccaattatgaagcaggttcttcctttagttgagcagctccctcccttgtacatggatttggtcaagggaagagaagatttttctccaaagcctgaggagacacgtcgacttataaaatcatactatggcatatccagaaatcttctgataaaattccaggatgatttaatagatgagacttcaactctagcgcaggtgcttagttcagaatcagccattagctcagtgctagacatgtcaatacgaaagttgcctggagatcacggtcttccattgcaacaggccctaccaaatgttccgccagcaatggccgatgcagttaatcgtggaagtgagcttttgtcaaatcttactgttggaacaccgtgggagatagttgcgaaagaagtaggaaactcgctaggcatggattctggagtcctgcgcgctgaagtttcaaaggacatggatatgcttgtcgatgtcatcgcagcctggatagcctccaatgcagggcctaaacttcttcggccctaaggtcacggtttcatctggtccttgtcagttaaagaacacatgctgtagaaatgtataataaatcaatattggcaccgacacttctttcatcctatctcggagaatgccaatcatgtgaatccatacaagtaaagaaaatagaactctgacaatcacctgatgctgtaaaaatatgaattacattgttacaaaaaaaaaaaaaatagttgttatatagaaattattcgttc

SEQ ID NO: 3179 - protein, 455 aa, Glycine max
  misc_feature (1)..(455): Ceres Seq. ID no. 14304360
SLTNQHQLQTVGIDETQRHIDIGMATSLCTPSYRVTLKLYGTDSHKLNAKPSVRYRRRFGTTTRICCTSNNYNDNNIQRRPQSEAIQVYSQIERLLTDSVRQSQDGWWGSPDWSEVEGAWILKPKSSEPNYVVHFIGGIFVGAAPQLTYRRFLERLSEKGILIIATPYASGFDHFLIADEVQFKFDRCYRTLQETIQDLPIFGVGHSLGSVVHLLIGSRYAVQRSGNVLMAFNNKEASSAVPLFSPVIVPMAQTIGPLLSDIFSSPTLRAGAEMTLKQLENVSPPIMKQVLPLVEQLPPLYMDLVKGREDFSPKPEETRRLIKSYYGISRNLLIKFQDDLIDETSTLAQVLSSESAISSVLDMSIRKLPGDHGLPLQQALPNVPPAMADAVNRGSELLSNLTVGTPWEIVAKEVGNSLGMDSGVLRAEVSKDMDMLVDVIAAWIASNAGPKLLRP

SEQ ID NO: 3180 - protein, 432 aa, Glycine max
  misc_feature (1)..(432): Ceres Seq. ID no. 14304361
MATSLCTPSYRVTLKLYGTDSHKLNAKPSVRYRRRFGTTTRICCTSNNYNDNNIQRRPQSEAIQVYSQIERLLTDSVRQSQDGWWGSPDWSEVEGAWILKPKSSEPNYVVHFIGGIFVGAAPQLTYRRFLERLSEKGILIIATPYASGFDHFLIADEVQFKFDRCYRTLQETIQDLPIFGVGHSLGSVVHLLIGSRYAVQRSGNVLMAFNNKEASSAVPLFSPVIVPMAQTIGPLLSDIFSSPTLRAGAEMTLKQLENVSPPIMKQVLPLVEQLPPLYMDLVKGREDFSPKPEETRRLIKSYYGISRNLLIKFQDDLIDETSTLAQVLSSESAISSVLDMSIRKLPGDHGLPLQQALPNVPPAMADAVNRGSELLSNLTVGTPWEIVAKEVGNSLGMDSGVLRAEVSKDMDMLVDVIAAWIASNAGPKLLRP

SEQ ID NO: 3181 - protein, 432 aa, Glycine max; identical to SEQ ID NO: 3180
  misc_feature (1)..(432): Ceres Seq. ID no. 16625443

SEQ ID NO: 3182 - DNA, 1286 bp, Glycine max
  misc_feature (1)..(1286): Ceres Seq. ID no. 14304999
tggatgatggacctgtgaacaagtcaaatggtacagagtgcagaaatattaatccactaccaggttcccagaaagacataaaagaagatgaaatcaatattaatatcaaactaaatgaagaatataacaaatctgttgatacttataccgaatcccgtcaagctcaagatgctggactattagtgaaagctacagaagaccttgctagggaatatacatctttaactactgtaccttctgctcagccggacagggaagtgtctaatgctgtgcctgttcaagatcaaactggtaataacttgggtaaacttggttcatccagagttgatgcttcagttgactcaggtagccggtgtgacagtttggaagggaactggggttctgtttcagttctctcaatgcaatccgatgccccagctgttactgatgctgaaactttgccatcaactggcttgctggcatcaacagggaaatcaagcttgaacaactcaaaagctacacctgacagacagcagtctggaaactctgaaatgtttgaaccaccatctttcatgaccttggttgatcctagtcaggttagccccaaagcttctgcttctgaagtccagaaggggcagaacacacaacatacagattccacttcacaggctgcttggtttcccactctcacgcaggttgtcaacgagtctcaagggaggaagaagaatgaagaaataattgccaaggtgacaaactggagcaccagtaaggagcacactcctctgaagagcctcttaggtgaggctgcccatagtagcaagccaagatctccaaaaatggaaaactctgtgaatcagaagagtggtaaagttctggagaagaatggttctggattgacaactgttaactccattctgggtcctgaatcccctgtggctcaagtggttaaaggagaggctgcaaaagaatggaactctccagcaagatatcctgcagacatcaagagagaaaaaaggaaagtcaagagcagaccatactggatacaattggtatgctgcacgtcagtcggtcctcggtgaaggtagaaaattactaggttctgataatgcttccactcagctctccactctgatggattcttgttattgacatgctatttgcagtatttttctgtttttagtttgtctttaggtgcatattttgatcatgtgtcttctgttcattttggtagcctcctaggagtttggttttatatgttgaccatcttcagttattatttcatccttgcaatcatacatttttactat

SEQ ID NO: 3183 - protein, 351 aa, Glycine max
  misc_feature (1)..(351): Ceres Seq. ID no. 14305000
DDGPVNKSNGTECRNINPLPGSQKDIKEDEININIKLNEEYNKSVDTYTESRQAQDAGLLVKATEDLAREYTSLTTVPSAQPDREVSNAVPVQDQTGNNLGKLGSSRVDASVDSGSRCDSLEGNWGSVSVLSMQSDAPAVTDAETLPSTGLLASTGKSSLNNSKATPDRQQSGNSEMFEPPSFMTLVDPSQVSPKASASEVQKGQNTQHTDSTSQAAWFPTLTQVVNESQGRKKNEEIIAKVTNWSTSKEHTPLKSLLGEAAHSSKPRSPKMENSVNQKSGKVLEKNGSGLTTVNSILGPESPVAQVVKGEAAKEWNSPARYPADIKREKRKVKSRPYWIQLVCCTSVGPR

SEQ ID NO: 3184 - protein, 219 aa, Glycine max
  misc_feature (1)..(219): Ceres Seq. ID no. 14305001
MQSDAPAVTDAETLPSTGLLASTGKSSLNNSKATPDRQQSGNSEMFEPPSFMTLVDPSQVSPKASASEVQKGQNTQHTDSTSQAAWFPTLTQVVNESQGRKKNEEIIAKVTNWSTSKEHTPLKSLLGEAAHSSKPRSPKMENSVNQKSGKVLEKNGSGLTTVNSILGPESPVAQVVKGEAAKEWNSPARYPADIKREKRKVKSRPYWIQLVCCTSVGPR

SEQ ID NO: 3185 - protein, 175 aa, Glycine max
  misc_feature (1)..(175): Ceres Seq. ID no. 14305002
MFEPPSFMTLVDPSQVSPKASASEVQKGQNTQHTDSTSQAAWFPTLTQVVNESQGRKKNEEIIAKVTNWSTSKEHTPLKSLLGEAAHSSKPRSPKMENSVNQKSGKVLEKNGSGLTTVNSILGPESPVAQVVKGEAAKEWNSPARYPADIKREKRKVKSRPYWIQLVCCTSVGPR

SEQ ID NO: 3186 - protein, 219 aa, Glycine max; identical to SEQ ID NO: 3184
  misc_feature (1)..(219): Ceres Seq. ID no. 16625450

SEQ ID NO: 3187 - DNA, 919 bp, Glycine max
  misc_feature (1)..(919): Ceres Seq. ID no. 14305858
acctccattgagttgagttcaaaactctgttctttcctccatgaattcaatttctttaggttccttcatcctcacaccatgcaagttccgcccttttcttcaaaccaaacaccaacccatattccgcactctctccccaattcccctgacacaaaaacccacttttcttcgagccacagactcgaacatcgacgcccccatttccctccccgagggcgcgtccttcgtttccatcccagaaatcatcgagaaggactggtccgtgcttgattgcgccgaacaccgaaccactgaccgcattatagcttccggaaacatcgaacagagttcgagggttttggtctcaactgggtcagaagactttgttgattccttagcgggtttaactccctctgtgtttgttgttcatgactcgcttctgacactggcttgcattaaagaaaaatatgacagggttaagtgttggcaaggggagattatttatgttccggaaaagtgggctccttttgatgctgtgtttctttatttccttcccgcgttgcccttcaagctccaccaaattttggagtctttggctgggaaatgtgcaccgggtggaagggtgattatcagtcatcctaaagggaaagaagtattagaacagcaacgaaaacagtacccagatgtagtagtttctgacctacctaataaaacatatttacaaagtgttgcagctgcccattcttttgacgtggctgaatttgtggatgaacctggcctttatttagccgttttgatctgctcgagagcttaaaaactagagtgtgtacatttgaatacacaatttgattgaactttttatatggtgttttccttcttgattattagcttgaatttttggttgaaaaattataaaataatataatttgattgatatgat

SEQ ID NO: 3188 - protein, 250 aa, Glycine max
  misc_feature (1)..(250): Ceres Seq. ID no. 14305859
MNSISLGSFILTPCKFRPFLQTKHQPIFRTLSPIPLTQKPTFLRATDSNIDAPISLPEGASFVSIPEIIEKDWSVLDCAEHRTTDRIIASGNIEQSSRVLVSTGSEDFVDSLAGLTPSVFVVHDSLLTLACIKEKYDRVKCWQGEIIYVPEKWAPFDAVFLYFLPALPFKLHQILESLAGKCAPGGRVIISHPKGKEVLEQQRKQYPDVVVSDLPNKTYLQSVAAAHSFDVAEFVDEPGLYLAVLICSRA

SEQ ID NO: 3189 - protein, 250 aa, Glycine max; identical to SEQ ID NO: 3188
  misc_feature (1)..(250): Ceres Seq. ID no. 16625457

SEQ ID NO: 3190 - DNA, 1043 bp, Glycine max
  misc_feature (1)..(1043): Ceres Seq. ID no. 14306138
tctctgttagcactctcctctcgacgattccctgtgatctctctctctctttctctctctttctctctcagtcttctctcgctgtggttcagatttcagagcaggatccaaaagccttgcttggtcaagactcattcatgtctgttcctaatgaggaaaacttgtcgtcacattcccagctttcttctcattttttcttggatctccttgattccatcatagttgatgtagcatcagagtgtcacagagtagcaaggctggggcttgattctaatttggaagaagaagatgaagaattgaagctatcggcacaagccagggttagggtggctgatcctagtaacagtaatgaagcaaatggcaagtatgtggttgacatatttggacaaacccatcctcctgtggcaaatgaaatatttgattgcatgaattgtggtcgatccatcatgactgggaggtttgctccacatttggagaagtgcatgggaaagggtaggaaggcacgtctgaaagtgacaagaagcagcacagccgcgcagaaccggtattcacgaggcagtcctagtcctggttctacatattctccatattcaaattactctaccaatagcatgaatcggttggcaaatggaacctccacttttgcaggtgaggagcactcaaatgggacactggagtcatgaactagttcatgtgtaatggctggaatacaggatttctgtcataccttgaacttgtttcttcgccgggagatgtggctgaatttaattgtgtttgaaaataatatttcaaacattttggacctaaacataacaaccatcgttgcctacatcctcgaattgttgtctaccttaaaaaaaaaaaactttgctttttacagtgagttccattgtaattttattatgttttactcctagttccgttgtaattttattataattttactatctgttaacatatgtatattgtgtgcaactatgaactagtattgttcatggatgaaaagatgctcagggttgagatgaataatacacagacatttg

SEQ ID NO: 3191 - protein, 226 aa, Glycine max
  misc_feature (1)..(226): Ceres Seq. ID no. 14306139
SVSTLLSTIPCDLSLSFSLFLSQSSLAVVQISEQDPKALLGQDSFMSVPNEENLSSHSQLSSHFFLDLLDSIIVDVASECHRVARLGLDSNLEEEDEELKLSAQARVRVADPSNSNEANGKYVVDIFGQTHPPVANEIFDCMNCGRSIMTGRFAPHLEKCMGKGRKARLKVTRSSTAAQNRYSRGSPSPGSTYSPYSNYSTNSMNRLANGTSTFAGEEHSNGTLES

SEQ ID NO: 3192 - protein, 181 aa, Glycine max
  misc_feature (1)..(181): Ceres Seq. ID no. 14306140
MSVPNEENLSSHSQLSSHFFLDLLDSIIVDVASECHRVARLGLDSNLEEEDEELKLSAQARVRVADPSNSNEANGKYVVDIFGQTHPPVANEIFDCMNCGRSIMTGRFAPHLEKCMGKGRKARLKVTRSSTAAQNRYSRGSPSPGSTYSPYSNYSTNSMNRLANGTSTFAGEEHSNGTLES

SEQ ID NO: 3193 - protein, 181 aa, Glycine max; identical to SEQ ID NO: 3192
  misc_feature (1)..(181): Ceres Seq. ID no. 16625461

SEQ ID NO: 3194 - DNA, 1167 bp, Glycine max
  misc_feature (1)..(1167): Ceres Seq. ID no. 14306501
aacattccaacgacacccaccacttcttcccatcagatgtgcgacgatcactgggtcaaggtcgccatggccgacgactccctggtcgtcgaccttctcctccgcctccaccgctctccgcctccgccgccctgcctcaacctccactggacggtgcgtcagcgccgctccagatccgctcacaacaaagcggagtccaccagggccagccccaccacgccgctctcatggagcggcgccacgtcagcaagcggcggcaacctcgatggctacgaggagtccaaaccatcccagacctcaagatctaaggttgctaatcccagcgaaacagccactaccagaaagacaaggagaaaaaagaccttaactgaactaaaagaggaggaggatttgttgctgaaagaaagaagaaatttggaaaaagaactggcatccttgcgtctcactattcagaaacatagagccacaaatgaaagcataaagagattgaagcttgattttgagtcacggcagaattctagtgctgctgctacggcctctgaggtgtctgggaaagctgtgaatggcccatttcaatttgtaaaatcagagtgtcatccatctaattccgtcacacatgacgattcacctgtttgtgcagcaaatgcttctcccaaagcacaagataatattggtaaccgagaatctacattcgtgctccctgatctaaatttgcctgccgatgaggatatcaacgccaatgtcatgcattgaactgaattagctaataaaggataggatctcgaatgacattccgcatactgataagttggacaaacgtcatcttgcaagtatgcctaaaagtaatagtataaggtatagcatgtcagtcctaacaaattagattttgctactgtaattgtagatgttaaaccattcacttttcccacttggtcaaaaactgatgtggaaattgttttttcttcttcttttttttcattcgtgaatctgagggtagtgtagaaatcctaacacatcaggcttagttccattcttttttcttcacatgtttctacattgtccaaaattctttgtggcaaccctcgatcgtcctttattatagatatattttatgataaatgtaattacgtgttctatacataattcaagaattttggttcttttaag

SEQ ID NO: 3195 - protein, 250 aa, Glycine max
  misc_feature (1)..(250): Ceres Seq. ID no. 14306502
NIPTTPTTSSHQMCDDHWVKVAMADDSLVVDLLLRLHRSPPPPPCLNLHWTVRQRRSRSAHNKAESTRASPTTPLSWSGATSASGGNLDGYEESKPSQTSRSKVANPSETATTRKTRRKKTLTELKEEEDLLLKERRNLEKELASLRLTIQKHRATNESIKRLKLDFESRQNSSAAATASEVSGKAVNGPFQFVKSECHPSNSVTHDDSPVCAANASPKAQDNIGNRESTFVLPDLNLPADEDINANVMH

SEQ ID NO: 3196 - protein, 238 aa, Glycine max
  misc_feature (1)..(238): Ceres Seq. ID no. 14306503
MCDDHWVKVAMADDSLVVDLLLRLHRSPPPPPCLNLHWTVRQRRSRSAHNKAESTRASPTTPLSWSGATSASGGNLDGYEESKPSQTSRSKVANPSETATTRKTRRKKTLTELKEEEDLLLKERRNLEKELASLRLTIQKHRATNESIKRLKLDFESRQNSSAAATASEVSGKAVNGPFQFVKSECHPSNSVTHDDSPVCAANASPKAQDNIGNRESTFVLPDLNLPADEDINANVMH

SEQ ID NO: 3197 - protein, 228 aa, Glycine max
  misc_feature (1)..(228): Ceres Seq. ID no. 14306504
MADDSLVVDLLLRLHRSPPPPPCLNLHWTVRQRRSRSAHNKAESTRASPTTPLSWSGATSASGGNLDGYEESKPSQTSRSKVANPSETATTRKTRRKKTLTELKEEEDLLLKERRNLEKELASLRLTIQKHRATNESIKRLKLDFESRQNSSAAATASEVSGKAVNGPFQFVKSECHPSNSVTHDDSPVCAANASPKAQDNIGNRESTFVLPDLNLPADEDINANVMH

SEQ ID NO: 3198 - protein, 238 aa, Glycine max; identical to SEQ ID NO: 3196
  misc_feature (1)..(238): Ceres Seq. ID no. 16625463

SEQ ID NO: 3199 - DNA, 1682 bp, Glycine max
  misc_feature (1)..(1682): Ceres Seq. ID no. 14307686
atgttgctgcaggcacaaaccattatcactttgtggaggagttgctcaacatattagacaatgatgcaattcaattgcaggataaaaagggcaacactgccttttgctttgttgctgcggctggcaattggcgcattgctgagttaatgctgaaaagaaatatacttctgccaacagtcaagggtggagatggaatgacccctcttcactttgctgctttgcaaggaagatgcccaatggcatgcaagctataccctatgaccaaagagatgtttgatgatgaggattgggaattattgttcttcacttgcatcaaaacttgcaactatcacttggccttaaaaatggtaagagataggaaagaactagcttttgcacgagatgggaataacggtgaggagaaaaagggcggcatagctttgcatctcttggctcaaaatcaaaagcctttggattcttgttgtcattgccaccaacatcaaattcccgtcaagataaaccctggcatgaaacaacacgtgtttcttcaattggttaattttctctggaatacccttttggaaaacatagactccaagagcaagatacttgacatcataagtgaaccttctcatctattatttgatgctgcagaagttggtaattttgggtttttgtctgagcttattagtgcttatcccagcttgatatgggaagtggatagcagaaacagaagtataattcacacagctgttttgaatcgacatgctagcatctacaacctcatacacgaaatagggtctataaaagatattatagtgacatttgccggagaagaagacgagaacactttattgcatttggctgcaaaattagctccacctagtcaacttgagttagtctcaggagcagctttccaaatgagccttgagatatcatggtttgaggaggtgaacaagataatgccaccatcattcagatggatgaaaaattccgaaggcttaactgctcgagaattattcacaaaggagcatgcagatttgcggaaaaatgcagaatcatggatgaaacgcacagctgagtcatgcatgcttatttcaaccgttattgccacgggagtgttctctgccgcaattagcacaccaggtggcatgaatgacgaatcaaaagaaccaaactatttggacaaaacatcgtttctgatatttgctgtatcagatgcaacttcactgatctcatctgcaactgcaatactcatattcttatcgattctcatctcgcgttatgctgagtatgacttccacaagtcactgccattgaagcttatatttggactgataagtttgttcatctccataacaagcatgatggttgcatttggttgttccttcttcataacttattactatggcatgaagtgggttcctagtttcatctcagtacttgcatgtctacctatacttctctttataggtctgcaattttcgctgtggtcagttattatctactcgacctactactgcaaagctctctttaagccaggtaaaaagatgctctacgtggtagagagaaaaggatacaatgtttaagataaatgaaggatcatataatgtttcgttgaagtttgtaatatagtagttggcaacaatttgtattgtaagggtattttaaataaatttgaaatgtgaataatatatttgcac

SEQ ID NO: 3200 - protein, 521 aa, Glycine max
  misc_feature (1)..(521): Ceres Seq. ID no. 14307687
VAAGTNHYHFVEELLNILDNDAIQLQDKKGNTAFCFVAAAGNWRIAELMLKRNILLPTVKGGDGMTPLHFAALQGRCPMACKLYPMTKEMFDDEDWELLFFTCIKTCNYHLALKMVRDRKELAFARDGNNGEEKKGGIALHLLAQNQKPLDSCCHCHQHQIPVKINPGMKQHVFLQLVNFLWNTLLENIDSKSKILDIISEPSHLLFDAAEVGNFGFLSELISAYPSLIWEVDSRNRSIIHTAVLNRHASIYNLIHEIGSIKDIIVTFAGEEDENTLLHLAAKLAPPSQLELVSGAAFQMSLEISWFEEVNKIMPPSFRWMKNSEGLTARELFTKEHADLRKNAESWMKRTAESCMLISTVIATGVFSAAISTPGGMNDESKEPNYLDKTSFLIFAVSDATSLISSATAILIFLSILISRYAEYDFHKSLPLKLIFGLISLFISITSMMVAFGCSFFITYYYGMKWVPSFISVLACLPILLFIGLQFSLWSVIIYSTYYCKALFKPGKKMLYVVERKGYNV

SEQ ID NO: 3201 - protein, 473 aa, Glycine max
  misc_feature (1)..(473): Ceres Seq. ID no. 14307688
MLKRNILLPTVKGGDGMTPLHFAALQGRCPMACKLYPMTKEMFDDEDWELLFFTCIKTCNYHLALKMVRDRKELAFARDGNNGEEKKGGIALHLLAQNQKPLDSCCHCHQHQIPVKINPGMKQHVFLQLVNFLWNTLLENIDSKSKILDIISEPSHLLFDAAEVGNFGFLSELISAYPSLIWEVDSRNRSIIHTAVLNRHASIYNLIHEIGSIKDIIVTFAGEEDENTLLHLAAKLAPPSQLELVSGAAFQMSLEISWFEEVNKIMPPSFRWMKNSEGLTARELFTKEHADLRKNAESWMKRTAESCMLISTVIATGVFSAAISTPGGMNDESKEPNYLDKTSFLIFAVSDATSLISSATAILIFLSILISRYAEYDFHKSLPLKLIFGLISLFISITSMMVAFGCSFFITYYYGMKWVPSFISVLACLPILLFIGLQFSLWSVIIYSTYYCKALFKPGKKMLYVVERKGYNV

SEQ ID NO: 3202 - protein, 457 aa, Glycine max
  misc_feature (1)..(457): Ceres Seq. ID no. 14307689
MTPLHFAALQGRCPMACKLYPMTKEMFDDEDWELLFFTCIKTCNYHLALKMVRDRKELAFARDGNNGEEKKGGIALHLLAQNQKPLDSCCHCHQHQIPVKINPGMKQHVFLQLVNFLWNTLLENIDSKSKILDIISEPSHLLFDAAEVGNFGFLSELISAYPSLIWEVDSRNRSIIHTAVLNRHASIYNLIHEIGSIKDIIVTFAGEEDENTLLHLAAKLAPPSQLELVSGAAFQMSLEISWFEEVNKIMPPSFRWMKNSEGLTARELFTKEHADLRKNAESWMKRTAESCMLISTVIATGVFSAAISTPGGMNDESKEPNYLDKTSFLIFAVSDATSLISSATAILIFLSILISRYAEYDFHKSLPLKLIFGLISLFISITSMMVAFGCSFFITYYYGMKWVPSFISVLACLPILLFIGLQFSLWSVIIYSTYYCKALFKPGKKMLYVVERKGYNV

SEQ ID NO: 3203 - protein, 473 aa, Glycine max; identical to SEQ ID NO: 3201
  misc_feature (1)..(473): Ceres Seq. ID no. 16625467

SEQ ID NO: 3204 - DNA, 1504 bp, Glycine max
  misc_feature (1)..(1504): Ceres Seq. ID no. 14310856
gatgtgaatcttggtgatagcaattatagctttggggaggctgaggcattgagtgatgagatggaagaagagtctcggtatgttgcggagattttgaggatcagggatgttctgcttaaccctgaagatgagtctgaggctgtgttatttgattcattgaggcggcttcagttgatggaactcaccgtggactgtttaaaggcaactgagattggcaaggctgtcaatcctctccgaaagcatggatcaaaagatattcgtcaactttcaaggactcttatcgatggctggaaagaaatggtggatgagtgggtcaaggccactactaccacagctatcacaggttcagaagaaggtacaccggattcagtgaatccatctgttgtagatgatgatgaagaagaaggacttccatcacctcccttggatgaaggggctttctttgtcactcaggctggttcaatggaactgtcacagttctttgatggcatggacgacgacggaaatcctcgaccaactgggccattcagcaagaaccgtgagaatggcagaaagccggttttcgacagccatgttgtagagaagaggaagtcgcaggcttcccatgacacagccatcattgaccgggatgttaagagtcagcagcaagcaaagaaaaatgaggctgttgtgcctgagaggccaaataaaccagtaacagctgattccgggcctggcagacccccaaaatcaaatatgcagagaaaaagtaatatggagccaaagatgcagcaaaaaatggagaacaattcaatcacaaggaggcctccaaccggtcagctagataaatccaagcgttcagatgactcggcagtccaagtgaagctagaagccaccaagaggaaacttcaggagagctatcaacaagctgaaaacgccaagaggcagaggacaatacaagttatggaaataaacgatcttcccaagcaaggtttgcaccgaaacacacatttcaaacctggatatcacaataggcattgggctaatggtcgaagataaagctattattctatggtggacctgcagatttaacagcatttccaagctgtttgttctttggattgaagattggtccccttgactatagaaaataacaaaatccattcaccatttggactgcatagaattattccaatagagagggaagtaaacctttaaacactgtttatttcccagtttataggagttaagtaaataggaattttgttcatcctagattggatttagaagaggatcctagcttggcacctctacttttgacttgcttccataatgatggtctatagaaatctcaattgtttctgatcacatttttcttgcacatatgacatactagggtctcatatacaagttagtatatataccctttggaagtgctttgtcacaacctcaatgggctttaaacttgtagatgtgattatgttagcaggtgtatgagaattttaatatgaaataacattaaatc

SEQ ID NO: 3205 - protein, 345 aa, Glycine max
  misc_feature (1)..(345): Ceres Seq. ID no. 14310857
DVNLGDSNYSFGEAEALSDEMEEESRYVAEILRIRDVLLNPEDESEAVLFDSLRRLQLMELTVDCLKATEIGKAVNPLRKHGSKDIRQLSRTLIDGWKEMVDEWVKATTTTAITGSEEGTPDSVNPSVVDDDEEEGLPSPPLDEGAFFVTQAGSMELSQFFDGMDDDGNPRPTGPFSKNRENGRKPVFDSHVVEKRKSQASHDTAIIDRDVKSQQQAKKNEAVVPERPNKPVTADSGPGRPPKSNMQRKSNMEPKMQQKMENNSITRRPPTGQLDKSKRSDDSAVQVKLEATKRKLQESYQQAENAKRQRTIQVMEINDLPKQGLHRNTHFKPGYHNRHWANGRR

SEQ ID NO: 3206 - protein, 325 aa, Glycine max
  misc_feature (1)..(325): Ceres Seq. ID no. 14310858
MEEESRYVAEILRIRDVLLNPEDESEAVLFDSLRRLQLMELTVDCLKATEIGKAVNPLRKHGSKDIRQLSRTLIDGWKEMVDEWVKATTTTAITGSEEGTPDSVNPSVVDDDEEEGLPSPPLDEGAFFVTQAGSMELSQFFDGMDDDGNPRPTGPFSKNRENGRKPVFDSHVVEKRKSQASHDTAIIDRDVKSQQQAKKNEAVVPERPNKPVTADSGPGRPPKSNMQRKSNMEPKMQQKMENNSITRRPPTGQLDKSKRSDDSAVQVKLEATKRKLQESYQQAENAKRQRTIQVMEINDLPKQGLHRNTHFKPGYHNRHWANGRR

SEQ ID NO: 3207 - protein, 287 aa, Glycine max
  misc_feature (1)..(287): Ceres Seq. ID no. 14310859
MELTVDCLKATEIGKAVNPLRKHGSKDIRQLSRTLIDGWKEMVDEWVKATTTTAITGSEEGTPDSVNPSVVDDDEEEGLPSPPLDEGAFFVTQAGSMELSQFFDGMDDDGNPRPTGPFSKNRENGRKPVFDSHVVEKRKSQASHDTAIIDRDVKSQQQAKKNEAVVPERPNKPVTADSGPGRPPKSNMQRKSNMEPKMQQKMENNSITRRPPTGQLDKSKRSDDSAVQVKLEATKRKLQESYQQAENAKRQRTIQVMEINDLPKQGLHRNTHFKPGYHNRHWANGRR

SEQ ID NO: 3208 - protein, 345 aa, Glycine max; identical to SEQ ID NO: 3205
  misc_feature (1)..(345): Ceres Seq. ID no. 16625493

SEQ ID NO: 3209 - DNA, 1278 bp, Glycine max
  misc_feature (1)..(1278): Ceres Seq. ID no. 14310932
gtccgtgagcgtgaagcacagcagcatgtggaagttgaggtcagctcgaatctcttatctgctttgtagattgagtcaaatcaaagtaagcgaagcccagattaagcaccaccgtttctgtcacagtcaagtgtcgtcggtattgcctcctccatctaatttgcaacaccaacagacacagtgtgatcctcctcacaccgcagttcccaggaattatattggggaaaatgtatctagaaaagataagaacaaatatctttacactacgcttcttgaactcaacgacagtaaggaggctgtttatggtgctcttgatgcctgggttgcatgggagcaaaacttccccatcgcctcattgaaaacaatattgatttctcttgagaaggaccagcagtggcatagggttgtgcaggtaattaaatggatgctgagcaaaggacaggggatgacaatgggcacatatggtcaactgatacgagctttagatatggaccatagagtcgaagaagctcagaaattctgggaaatcaaaattggttctgatttgcattcagttccttggcaattgtgtcatctcatgatatctgtttattatcgaaacaacatgctccaagatcttgttaagcttttcaagggactggaagcttttgatcgaaaacctcgggataaatctatcattcagaaagtggcaaatgcatatgaggtgttaggcttagttaaagagaaagagagggtactggaaaaatataaccatctcttcacagagacaggaccaaccaagagacataaaaggaactcatttgaggcaaagaaacatgtgcatcctacaaaagagaaaaggcatcagaagcaatctagaaaggcctcatctgaggaaaagtacaagtcagagcaaaaagatccaaaattggatattggacatatctagtgcactcttttctgatgccatgatggtattatgatatgatagtagaccaaagtgcctccatgttcaagtattctgctaacctatgtgggaagcccatcaaggctagaagtgcagcttgatgaaacggaaccaaatgtatgtcacctatggacgtcaaaagctgtttcaaatttatataccaaaagaaaaatgcttttccaagtttgctgcacggtttatagatttagttattggactacggaagtccagaggccatcatgtgtgaagtgtgaacatttttattcagtgaacatttgtcctaaattaactcaaatccttgttatgtaattatttattttccaatcttttag

SEQ ID NO: 3210 - protein, 308 aa, Glycine max
  misc_feature (1)..(308): Ceres Seq. ID no. 14310933
SVSVKHSSMWKLRSARISYLLCRLSQIKVSEAQIKHHRFCHSQVSSVLPPPSNLQHQQTQCDPPHTAVPRNYIGENVSRKDKNKYLYTTLLELNDSKEAVYGALDAWVAWEQNFPIASLKTILISLEKDQQWHRVVQVIKWMLSKGQGMTMGTYGQLIRALDMDHRVEEAQKFWEIKIGSDLHSVPWQLCHLMISVYYRNNMLQDLVKLFKGLEAFDRKPRDKSIIQKVANAYEVLGLVKEKERVLEKYNHLFTETGPTKRHKRNSFEAKKHVHPTKEKRHQKQSRKASSEEKYKSEQKDPKLDIGHI

SEQ ID NO: 3211 - protein, 300 aa, Glycine max
  misc_feature (1)..(300): Ceres Seq. ID no. 14310934
MWKLRSARISYLLCRLSQIKVSEAQIKHHRFCHSQVSSVLPPPSNLQHQQTQCDPPHTAVPRNYIGENVSRKDKNKYLYTTLLELNDSKEAVYGALDAWVAWEQNFPIASLKTILISLEKDQQWHRVVQVIKWMLSKGQGMTMGTYGQLIRALDMDHRVEEAQKFWEIKIGSDLHSVPWQLCHLMISVYYRNNMLQDLVKLFKGLEAFDRKPRDKSIIQKVANAYEVLGLVKEKERVLEKYNHLFTETGPTKRHKRNSFEAKKHVHPTKEKRHQKQSRKASSEEKYKSEQKDPKLDIGHI

SEQ ID NO: 3212 - protein, 167 aa, Glycine max
  misc_feature (1)..(167): Ceres Seq. ID no. 14310935
MLSKGQGMTMGTYGQLIRALDMDHRVEEAQKFWEIKIGSDLHSVPWQLCHLMISVYYRNNMLQDLVKLFKGLEAFDRKPRDKSIIQKVANAYEVLGLVKEKERVLEKYNHLFTETGPTKRHKRNSFEAKKHVHPTKEKRHQKQSRKASSEEKYKSEQKDPKLDIGHI

SEQ ID NO: 3213 - protein, 300 aa, Glycine max; identical to SEQ ID NO: 3211
  misc_feature (1)..(300): Ceres Seq. ID no. 16625494

SEQ ID NO: 3214 - DNA, 1386 bp, Glycine max
  misc_feature (1)..(1386): Ceres Seq. ID no. 14310972
agggtttgagcagaaaagagattgtgttggattggtttccattcccaattcccaatcgtgttgggtggccatggattctctactggcgaactatgcctcttcagatgaagaagaagatcaacagccatccccaccaaaaacgacgacgttttcctcccttcctcaacccaaactttctctgtttcaatcccttcctcaacccaaatcttctctgtttcaatcccttcctccacccaaacaaccttccaccgaaagctcttccctccctaaccctaaccctaaccctgaccctaaaccccaaatcgaaaagacacaacccaaacgcgtcgtgcaattcaggcccccaatcatccctctcccacacccttcacaacacgacgatgacgacgatgacgacgacgacgacgaagaagaagaacgaaacagaagaaagaaaaagttagagtcctccacgcaaacctcatcggtcaagtccttcctcgccagcattccagcacccaggaacaccgccactctcggcgttcaagcaagttccggttcaggccggaaatccatcctcgaaaccgaaacaccgccaccggcatcgaattccggtggtttcagcaatgttcccgtcgatcaaagtacaggggattatgaaaattttgatgattaccaatatgccactgaccagtatgctagttattatggcaattttggttcgggtgccgagccagggagttcgggtactgaaccaaaggctggggttgctgcttatggaactgaacagtatgggaattatggtgatgcctatgcttcctatggggattatggacagtatgggaataattggggtgacgtgtcggcgccaccggtgctggaagcttctgggattgatgtcagtgtggtaaggattcctgggaagagagggaggcatgagattccgacggaagtgattgaggtgaagcaagaagagttgattaagaatcggccaagagaggatcaggtcaagctaactgggattgcattcggacccacttatcagcctgcttcgacaaaggggaagcctacaaagctgcacaagaggaaacatcaaattggttcattgtactttgatatgaaacaaaatgaaatgaaacttgctgagcggcgtgtaaagggcatgcttaccaaagctgaaacacaagcgaaatatggatggtgatttgagatgatgatattggaaatacttacattgaaacgtgaaaaagcaaagtcgaagttttcatatttagttgcaatccttgtgtttcactgttctgtgtacatttgctccgtctttaagtgcaaattatgtatttctattcttatagccagtggaattttataccgtacatttttttatgacaaaaaaaatcatttctttcg

SEQ ID NO: 3215 - protein, 393 aa, Glycine max
  misc_feature (1)..(393): Ceres Seq. ID no. 14310973
GFEQKRDCVGLVSIPNSQSCWVAMDSLLANYASSDEEEDQQPSPPKTTTFSSLPQPKLSLFQSLPQPKSSLFQSLPPPKQPSTESSSLPNPNPNPDPKPQIEKTQPKRVVQFRPPIIPLPHPSQHDDDDDDDDDDEEEERNRRKKKLESSTQTSSVKSFLASIPAPRNTATLGVQASSGSGRKSILETETPPPASNSGGFSNVPVDQSTGDYENFDDYQYATDQYASYYGNFGSGAEPGSSGTEPKAGVAAYGTEQYGNYGDAYASYGDYGQYGNNWGDVSAPPVLEASGIDVSVVRIPGKRGRHEIPTEVIEVKQEELIKNRPREDQVKLTGIAFGPTYQPASTKGKPTKLHKRKHQIGSLYFDMKQNEMKLAERRVKGMLTKAETQAKYGW

SEQ ID NO: 3216 - protein, 370 aa, Glycine max
  misc_feature (1)..(370): Ceres Seq. ID no. 14310974
MDSLLANYASSDEEEDQQPSPPKTTTFSSLPQPKLSLFQSLPQPKSSLFQSLPPPKQPSTESSSLPNPNPNPDPKPQIEKTQPKRVVQFRPPIIPLPHPSQHDDDDDDDDDDEEEERNRRKKKLESSTQTSSVKSFLASIPAPRNTATLGVQASSGSGRKSILETETPPPASNSGGFSNVPVDQSTGDYENFDDYQYATDQYASYYGNFGSGAEPGSSGTEPKAGVAAYGTEQYGNYGDAYASYGDYGQYGNNWGDVSAPPVLEASGIDVSVVRIPGKRGRHEIPTEVIEVKQEELIKNRPREDQVKLTGIAFGPTYQPASTKGKPTKLHKRKHQIGSLYFDMKQNEMKLAERRVKGMLTKAETQAKYGW

SEQ ID NO: 3217 - protein, 370 aa, Glycine max; identical to SEQ ID NO: 3216
  misc_feature (1)..(370): Ceres Seq. ID no. 16625495

SEQ ID NO: 3218 - DNA, 1490 bp, Glycine max
  misc_feature (1)..(1490): Ceres Seq. ID no. 14311287
ggatgcatttatacttacaccgaatcacgaggcgacaacatcgacatggagggtctcatcaacggcttcatcaacgttgctctcggagctgatggtggcgatcgggaagaacaacaacacgggagagacgaccgtagtagaagctcctgggctgaagtcgtctcccaggatcaacaagatcaccctcttcctcatcaccaacacaaggaacaatatcgtcctcagtacgaggagccccaatctcaaagttcctacaaaccccagaaggtggatgaaggtgaagatggatggcagactgttggtagaaagccttcaaggcatccacataaggttcaaaaggacaactggaacagctataaacgacctgctgatgagcaagaatactctaatgaggttgaagttggtgctgatgtggagccctcagaagatgaacttgctgatctgtcaagagcttgtgaaaaactctgggctcttgatttaaatcgtttggtacctggcttacactatgaaattgactgtggagaagggaaaaaggtataccaaaaggaagatatggcacaggggagcttgtttacttgggttagcgatgatgtattcagaaagcctacatttgcccgttttctttcacttttagataattacaatccacatcaaggatgtaaggaagtagtcacatctgaagagagacaagagcaagcttctttcatagaagaaatcagtagaacagcaccaattaagtatcttcacaagtatcttgcatccaagcaaattgtatcagggaattaccaagatttcaaaagaatgattaccagtctgtggtttgacctttatggccgtggtggcacttctggttcctcttctgcttttgaacatgtttttgttggagaaaccaaacaatgtggtgaagtttctggctttcataactggctgcagttttaccttgaagaagcaaaggggagagttgattatcaaggatatatttttccccgtcgacggggagaaactcctgactctgaagctcagcttctgactattcagtttgaatggaatggtgtcctaaaatctgtatccagcactttggttggagtgagccctgaatttgaaattgctttgtataccctgtgtttctatgttggtagggaggataaccacattcagcttggtccatatggggttaatatcaagtgctatcgattgggtgatcgaattggatctgttttccccattgcagattcttgaattttcagtttccagcattggtagtagttgttccctatgaaatcgtttgttatgcatacttgagaacttgtaactcatgggtgtaaaggcaacaataccaattagatcaagtagtacaaggtagcacaatatttactgaattacatacatttggtggttcttttgtcttgtatgaagacagaaattcttgtggaactagtttacttaatttcttcattaagtccttaatgatatgctagtatgttgttatt

SEQ ID NO: 3219 - protein, 412 aa, Glycine max
  misc_feature (1)..(412): Ceres Seq. ID no. 14311288
GCIYTYTESRGDNIDMEGLINGFINVALGADGGDREEQQHGRDDRSRSSWAEVVSQDQQDHPLPHHQHKEQYRPQYEEPQSQSSYKPQKVDEGEDGWQTVGRKPSRHPHKVQKDNWNSYKRPADEQEYSNEVEVGADVEPSEDELADLSRACEKLWALDLNRLVPGLHYEIDCGEGKKVYQKEDMAQGSLFTWVSDDVFRKPTFARFLSLLDNYNPHQGCKEVVTSEERQEQASFIEEISRTAPIKYLHKYLASKQIVSGNYQDFKRMITSLWFDLYGRGGTSGSSSAFEHVFVGETKQCGEVSGFHNWLQFYLEEAKGRVDYQGYIFPRRRGETPDSEAQLLTIQFEWNGVLKSVSSTLVGVSPEFEIALYTLCFYVGREDNHIQLGPYGVNIKCYRLGDRIGSVFPIADS

SEQ ID NO: 3220 - protein, 397 aa, Glycine max
  misc_feature (1)..(397): Ceres Seq. ID no. 14311289
MEGLINGFINVALGADGGDREEQQHGRDDRSRSSWAEVVSQDQQDHPLPHHQHKEQYRPQYEEPQSQSSYKPQKVDEGEDGWQTVGRKPSRHPHKVQKDNWNSYKRPADEQEYSNEVEVGADVEPSEDELADLSRACEKLWALDLNRLVPGLHYEIDCGEGKKVYQKEDMAQGSLFTWVSDDVFRKPTFARFLSLLDNYNPHQGCKEVVTSEERQEQASFIEEISRTAPIKYLHKYLASKQIVSGNYQDFKRMITSLWFDLYGRGGTSGSSSAFEHVFVGETKQCGEVSGFHNWLQFYLEEAKGRVDYQGYIFPRRRGETPDSEAQLLTIQFEWNGVLKSVSSTLVGVSPEFEIALYTLCFYVGREDNHIQLGPYGVNIKCYRLGDRIGSVFPIADS

SEQ ID NO: 3221 - protein, 228 aa, Glycine max
  misc_feature (1)..(228): Ceres Seq. ID no. 14311290
MAQGSLFTWVSDDVFRKPTFARFLSLLDNYNPHQGCKEVVTSEERQEQASFIEEISRTAPIKYLHKYLASKQIVSGNYQDFKRMITSLWFDLYGRGGTSGSSSAFEHVFVGETKQCGEVSGFHNWLQFYLEEAKGRVDYQGYIFPRRRGETPDSEAQLLTIQFEWNGVLKSVSSTLVGVSPEFEIALYTLCFYVGREDNHIQLGPYGVNIKCYRLGDRIGSVFPIADS

SEQ ID NO: 3222 - protein, 397 aa, Glycine max; identical to SEQ ID NO: 3220
  misc_feature (1)..(397): Ceres Seq. ID no. 16625497

SEQ ID NO: 3223 - DNA, 1700 bp, Glycine max
  misc_feature (1)..(1700): Ceres Seq. ID no. 14311755
gtaaagtatcttccatttgaaaacaacccccattcattcattcactcactcaccaacaccaccaaacaaagccttgctggtggcggacactccgaggggcctctctctcctctccctctccacaataaaacccaaaaaactcacacaacccgacccacaacacaagagaaaaagcgcactgctcgctcgtgttctgtttctctctgtttctccgttctctgtttttttttcagatctcgaaaaatgcagagcgcggctttcactttctctccctctctccctctccgcaacccttcccctaactcttggaggagaccctctctttctctccgtctccacgccaaacacagcaacaacaacaacaacagtaacagcaccgaaggcgttaactccaatggcgtctcttccacttccttcactcgccgatcttggactcttcttccttcttcttctttcaaattcaggcctcttccttcttcacctcctcgcgccgccgaaaacgccgttcccgaaagcgcagcagcacccgtcgaaaacccgctcttcaaaactctcgaactcggcgccttgtttggcttatggtacctcttcaacatctacttcaacatctacaacaaacaggtgttgaaggcgtttcattatccggtaactgtgactgttgttcagtttgccgttgggactgtgctagtggcatttatgtggggtttgaatctctataagaggccgaaactcagtggtgctatgcttggagcgattttgccgctggctgcagtgcatactttggggaaccttttcactaatatgagtcttgggaaggtggccgtgtctttcactcacactatcaaagccatggagcctttcttttcagtcatcctttctgccatgttccttggagagtttcctacaccgtgggtggttggttcccttgtgcctattgttggtggagttgcactggcgtctgttaccgaggcctctttcaattgggctggattttggagtgcaatggcatctaatgtgacaaatcaatctcgtaatgttcttagcaaaaaggccatggttaagaaagaggattctatggacaacattactctcttctctataataactgtaatgtccttcttcttgttagcacctgtggctatcttcatggagggtgtcaaatttacccctgcttacttgcaatctgctggggtgaatgttagacaactttacatcagatctcttcttgctgctctctgtttccatgcgtatcaacaagtttcgtatatgatattgcaaagggtatcacctgttacccactctgtgggtaattgtgtgaagcgggttgtggtcattgtgagctctgtcatcttcttccaaacacctgtctcacctgtgaatgcttttgggactgctatagctcttgctggagttttcctctattcaagggtgaagcgtattaaggcaaagccaaaaacagcttaattttcaatggtaaaattttgttagttccattgaggaagccaaatagttgcaatctgcaattctgaatttctttgtaggtgagatagggaatgaggattatctttattgatcctcagtcctcacatttcctttttatttcttctccttaagttaccttgtggatttcattatttatgtttgagtaagtgcctaatggttctgctccatgaaaaaattatcctcttctgaattttgct

SEQ ID NO: 3224 - protein, 487 aa, Glycine max
  misc_feature (1)..(487): Ceres Seq. ID no. 14311756
VKYLPFENNPHSFIHSLTNTTKQSLAGGGHSEGPLSPLPLHNKTQKTHTTRPTTQEKKRTARSCSVSLCFSVLCFFFRSRKMQSAAFTFSPSLPLRNPSPNSWRRPSLSLRLHAKHSNNNNNSNSTEGVNSNGVSSTSFTRRSWTLLPSSSFKFRPLPSSPPRAAENAVPESAAAPVENPLFKTLELGALFGLWYLFNIYFNIYNKQVLKAFHYPVTVTVVQFAVGTVLVAFMWGLNLYKRPKLSGAMLGAILPLAAVHTLGNLFTNMSLGKVAVSFTHTIKAMEPFFSVILSAMFLGEFPTPWVVGSLVPIVGGVALASVTEASFNWAGFWSAMASNVTNQSRNVLSKKAMVKKEDSMDNITLFSIITVMSFFLLAPVAIFMEGVKFTPAYLQSAGVNVRQLYIRSLLAALCFHAYQQVSYMILQRVSPVTHSVGNCVKRVVVIVSSVIFFQTPVSPVNAFGTAIALAGVFLYSRVKRIKAKPKTA

SEQ ID NO: 3225 - protein, 406 aa, Glycine max
  misc_feature (1)..(406): Ceres Seq. ID no. 14311757
MQSAAFTFSPSLPLRNPSPNSWRRPSLSLRLHAKHSNNNNNSNSTEGVNSNGVSSTSFTRRSWTLLPSSSFKFRPLPSSPPRAAENAVPESAAAPVENPLFKTLELGALFGLWYLFNIYFNIYNKQVLKAFHYPVTVTVVQFAVGTVLVAFMWGLNLYKRPKLSGAMLGAILPLAAVHTLGNLFTNMSLGKVAVSFTHTIKAMEPFFSVILSAMFLGEFPTPWVVGSLVPIVGGVALASVTEASFNWAGFWSAMASNVTNQSRNVLSKKAMVKKEDSMDNITLFSIITVMSFFLLAPVAIFMEGVKFTPAYLQSAGVNVRQLYIRSLLAALCFHAYQQVSYMILQRVSPVTHSVGNCVKRVVVIVSSVIFFQTPVSPVNAFGTAIALAGVFLYSRVKRIKAKPKTA

SEQ ID NO: 3226 - protein, 255 aa, Glycine max
  misc_feature (1)..(255): Ceres Seq. ID no. 14311758
MWGLNLYKRPKLSGAMLGAILPLAAVHTLGNLFTNMSLGKVAVSFTHTIKAMEPFFSVILSAMFLGEFPTPWVVGSLVPIVGGVALASVTEASFNWAGFWSAMASNVTNQSRNVLSKKAMVKKEDSMDNITLFSIITVMSFFLLAPVAIFMEGVKFTPAYLQSAGVNVRQLYIRSLLAALCFHAYQQVSYMILQRVSPVTHSVGNCVKRVVVIVSSVIFFQTPVSPVNAFGTAIALAGVFLYSRVKRIKAKPKTA

SEQ ID NO: 3227 - protein, 406 aa, Glycine max; identical to SEQ ID NO: 3225
  misc_feature (1)..(406): Ceres Seq. ID no. 16625504

SEQ ID NO: 3228 - DNA, 1646 bp, Glycine max
  misc_feature (1)..(1646): Ceres Seq. ID no. 14312212
acctaggaaaaaccgtttccaactttacattttcccaccaaccctcctctccattcctcaaaacaatcgttaatctcttctccattgtgaactctgatattctccaagtacacaacacaaacacacatcaatttatagcacccgatttctcttttccccctcaaattcagctccattttgttacagattcaaataataagccaagcagccacaccatgatctcgtcaatgaaatgcacagcctcatctctcacatgttctgctttctcaaacagaaagcttcccattgcaaggcctcaactcgtgacattaccaaccatcaacaacgttgaacaaaacatgggtccctctcagttgtgttcacagaagcctctctacctttcatccaccgagaacttggcattggtgaggagaaggagagtgacggagtgccaggcctatgaagctgacaggtcacggcctctggagatcaacattgagctgccggctgaagaggcggcgcagaggttcaagattggtgtgtattttgctacatggtgggctttgaatgtagttttcaacatttacaataagaaggttttgaatgcttttccttacccgtggctcacctccactttgtcccttgctgctggctccctcatgatgttagtctcatgggccaccagggttgctgaggtcccaaaagtcaacttggacttctggaagggcttgtttcctgttgccgtggcacacacaattgggcatgttgctgcaactgtgagcatgtccaaggttgctgtttcattcactcacatcatcaagagtggagagccagctttcagtgtccttgtgtcaaggttcttgctcggagaagcattcccaatgccggtttatctgtcactgctgccaattattggtggttgtgcactagctgcagtgactgagctcaatttcaacatgattggcttcatgggggctatgatatcaaatttggcatttgtcttccgcaatatattctcaaagaaagggatgaagggaatgtctgttagtggaatgaactactatgcttgtctttccataatgtcactgttaattctgacaccttttgccattgctgttgagggccccaaggtttgggctgcaggctggcaaacagctgtatctcaaattggtcccaattttgtatggtgggtagctgcacagagtgtcttttaccacttgtacaatcaagtctcatacatgtctcttgatcagatttctcccttaacatttagcattggaaacacaatgaagaggatttcggtcattgtttcttccatccttatctttcacacgcctgttcagcccatcaatgctcttggtgctgccattgcaattcttggcaccttcctctattcacaggctaaacagtaaggtggttattttgaagcttttatgtaacacaaggaaacgatgactcatggttggagctcaaagtgtcactgatgaggactatggcattaattagctagtatgttttgttgttaataggaatttaagtttatttcttttgggccatagcagcagcatttgtaatcacgttttgatctttgtaaattagctttagaaggatggaatgcactaaactgtacttaatcttgaggctgaaagtctatgaagaatttcttg

SEQ ID NO: 3229 - protein, 462 aa, Glycine max
  misc_feature (1)..(462): Ceres Seq. ID no. 14312213
LGKTVSNFTFSHQPSSPFLKTIVNLFSIVNSDILQVHNTNTHQFIAPDFSFPPQIQLHFVTDSNNKPSSHTMISSMKCTASSLTCSAFSNRKLPIARPQLVTLPTINNVEQNMGPSQLCSQKPLYLSSTENLALVRRRRVTECQAYEADRSRPLEINIELPAEEAAQRFKIGVYFATWWALNVVFNIYNKKVLNAFPYPWLTSTLSLAAGSLMMLVSWATRVAEVPKVNLDFWKGLFPVAVAHTIGHVAATVSMSKVAVSFTHIIKSGEPAFSVLVSRFLLGEAFPMPVYLSLLPIIGGCALAAVTELNFNMIGFMGAMISNLAFVFRNIFSKKGMKGMSVSGMNYYACLSIMSLLILTPFAIAVEGPKVWAAGWQTAVSQIGPNFVWWVAAQSVFYHLYNQVSYMSLDQISPLTFSIGNTMKRISVIVSSILIFHTPVQPINALGAAIAILGTFLYSQAKQ

SEQ ID NO: 3230 - protein, 391 aa, Glycine max
  misc_feature (1)..(391): Ceres Seq. ID no. 14312214
MISSMKCTASSLTCSAFSNRKLPIARPQLVTLPTINNVEQNMGPSQLCSQKPLYLSSTENLALVRRRRVTECQAYEADRSRPLEINIELPAEEAAQRFKIGVYFATWWALNVVFNIYNKKVLNAFPYPWLTSTLSLAAGSLMMLVSWATRVAEVPKVNLDFWKGLFPVAVAHTIGHVAATVSMSKVAVSFTHIIKSGEPAFSVLVSRFLLGEAFPMPVYLSLLPIIGGCALAAVTELNFNMIGFMGAMISNLAFVFRNIFSKKGMKGMSVSGMNYYACLSIMSLLILTPFAIAVEGPKVWAAGWQTAVSQIGPNFVWWVAAQSVFYHLYNQVSYMSLDQISPLTFSIGNTMKRISVIVSSILIFHTPVQPINALGAAIAILGTFLYSQAKQ

SEQ ID NO: 3231 - protein, 387 aa, Glycine max
  misc_feature (1)..(387): Ceres Seq. ID no. 14312215
MKCTASSLTCSAFSNRKLPIARPQLVTLPTINNVEQNMGPSQLCSQKPLYLSSTENLALVRRRRVTECQAYEADRSRPLEINIELPAEEAAQRFKIGVYFATWWALNVVFNIYNKKVLNAFPYPWLTSTLSLAAGSLMMLVSWATRVAEVPKVNLDFWKGLFPVAVAHTIGHVAATVSMSKVAVSFTHIIKSGEPAFSVLVSRFLLGEAFPMPVYLSLLPIIGGCALAAVTELNFNMIGFMGAMISNLAFVFRNIFSKKGMKGMSVSGMNYYACLSIMSLLILTPFAIAVEGPKVWAAGWQTAVSQIGPNFVWWVAAQSVFYHLYNQVSYMSLDQISPLTFSIGNTMKRISVIVSSILIFHTPVQPINALGAAIAILGTFLYSQAKQ

SEQ ID NO: 3232 - protein, 391 aa, Glycine max; identical to SEQ ID NO: 3230
  misc_feature (1)..(391): Ceres Seq. ID no. 16625508

SEQ ID NO: 3233 - DNA, 1701 bp, Glycine max
  misc_feature (1)..(1701): Ceres Seq. ID no. 14313762
attttcaagtgataagaaggaagctgacagttggatagcaggaaatgctgccaacatgcacggttcccagtcagtaggtacagacatttggttgggtgatgatgcaaaaatgtctcctgattgggattacagggtgagatcttccagctgtattgaagaaaagcatgaacaaaataagcatgggataacgcagggttttatgtatttagccacctctgaacatgacagaatacaaattgctccaggacaagattttaatcagaatgcagagagttttaatcctttgcattcttcaagctgccaagtagttggacaaactcaagtagcagctcccattctaccttcacagggtggaattgttgatggtatgctgaaacaggaagtctctactgagaaaaaatacactactgaaccaaatatcatggatgctggcttattacaagttagttcaagagatcctcctccaactgagaacgtggtaggcaaagaacagcttgctcagcttaccaatctctcagcctcactggctcatatccttggaacagggcaacagctgccacaactttatgctgctttaaattctcatgatgcaaagggcacatcctccctagcaaaagctgaggtgcttgctatgcctctttccaacacactcatcaggccagatcctgctgttggactcctgaagcagtatgatccaatgtgtgacagtgttgagccaaagagtgctgttgcaagtagtggggtaaccccagccattcccccatgtaaaaaagttgcagaagatgtagtggaaatttcatcacagtccaacacagcaagacaaaattgtggcaattcttccaagtctgctggctcagaagaacttgtcaagagtgatcctctaatcctgttgcagccaggtcaaaacattggggttaataaagatgataacaaggaagtgttacctgaggaaaggcaaaaatctaaagatgatcctaaaaataccaaagagagtggtcctttggaaaacatggagcaaactgatggtcctgatgaggcaaagaaaacaaagggaatgaaggggagtcgtgcatttaaatttgcattggtcgagtttgttaaggagcttctgaaaccaacatggaaagatggtcaaatcaccaaagatgattataaaacaattgtgaagaaagttgttgataaagtaactggttccatgcagggggccaatattcctcagacacaggagaaaattgaccactatttgtcattttcaaaaccaaagcttaacaaacttgtacaggcgtatgtggaaaaggttcagaaggcttagtgcaattatagaaatttgactgccaagtagtttatattttactcagcactgttgtcttcaatatgtattctgcttctttacctctggatttttatttttttttttgtattttggccatttgtttgcgtactgtagctcttttgcagcaattgcgtacaacaaatcagggagcatttttttgggcctttaattttttttcttcgtttttttggggaaaaattattaggtgtttgtgccattaccaactcaatagttaggcagtaatgtgggatttaatttatttttccagtttattgtaattataggagacagctgtttgcttttcagaacagtgagaaagaaatggaaccaaaagatgctcaagtccaatgcttgattatttcaaaaag

SEQ ID NO: 3234 - protein, 436 aa, Glycine max
  misc_feature (1)..(436): Ceres Seq. ID no. 14313763
FSSDKKEADSWIAGNAANMHGSQSVGTDIWLGDDAKMSPDWDYRVRSSSCIEEKHEQNKHGITQGFMYLATSEHDRIQIAPGQDFNQNAESFNPLHSSSCQVVGQTQVAAPILPSQGGIVDGMLKQEVSTEKKYTTEPNIMDAGLLQVSSRDPPPTENVVGKEQLAQLTNLSASLAHILGTGQQLPQLYAALNSHDAKGTSSLAKAEVLAMPLSNTLIRPDPAVGLLKQYDPMCDSVEPKSAVASSGVTPAIPPCKKVAEDVVEISSQSNTARQNCGNSSKSAGSEELVKSDPLILLQPGQNIGVNKDDNKEVLPEERQKSKDDPKNTKESGPLENMEQTDGPDEAKKTKGMKGSRAFKFALVEFVKELLKPTWKDGQITKDDYKTIVKKVVDKVTGSMQGANIPQTQEKIDHYLSFSKPKLNKLVQAYVEKVQKA

SEQ ID NO: 3235 - protein, 418 aa, Glycine max
  misc_feature (1)..(418): Ceres Seq. ID no. 14313764
MHGSQSVGTDIWLGDDAKMSPDWDYRVRSSSCIEEKHEQNKHGITQGFMYLATSEHDRIQIAPGQDFNQNAESFNPLHSSSCQVVGQTQVAAPILPSQGGIVDGMLKQEVSTEKKYTTEPNIMDAGLLQVSSRDPPPTENVVGKEQLAQLTNLSASLAHILGTGQQLPQLYAALNSHDAKGTSSLAKAEVLAMPLSNTLIRPDPAVGLLKQYDPMCDSVEPKSAVASSGVTPAIPPCKKVAEDVVEISSQSNTARQNCGNSSKSAGSEELVKSDPLILLQPGQNIGVNKDDNKEVLPEERQKSKDDPKNTKESGPLENMEQTDGPDEAKKTKGMKGSRAFKFALVEFVKELLKPTWKDGQITKDDYKTIVKKVVDKVTGSMQGANIPQTQEKIDHYLSFSKPKLNKLVQAYVEKVQKA

SEQ ID NO: 3236 - protein, 400 aa, Glycine max
  misc_feature (1)..(400): Ceres Seq. ID no. 14313765
MSPDWDYRVRSSSCIEEKHEQNKHGITQGFMYLATSEHDRIQIAPGQDFNQNAESFNPLHSSSCQVVGQTQVAAPILPSQGGIVDGMLKQEVSTEKKYTTEPNIMDAGLLQVSSRDPPPTENVVGKEQLAQLTNLSASLAHILGTGQQLPQLYAALNSHDAKGTSSLAKAEVLAMPLSNTLIRPDPAVGLLKQYDPMCDSVEPKSAVASSGVTPAIPPCKKVAEDVVEISSQSNTARQNCGNSSKSAGSEELVKSDPLILLQPGQNIGVNKDDNKEVLPEERQKSKDDPKNTKESGPLENMEQTDGPDEAKKTKGMKGSRAFKFALVEFVKELLKPTWKDGQITKDDYKTIVKKVVDKVTGSMQGANIPQTQEKIDHYLSFSKPKLNKLVQAYVEKVQKA

SEQ ID NO: 3237 - protein, 314 aa, Glycine max
  misc_feature (1)..(314): Ceres Seq. ID no. 16625518
MLKQEVSTEKKYTTEPNIMDAGLLQVSSRDPPPTENVVGKEQLAQLTNLSASLAHILGTGQQLPQLYAALNSHDAKGTSSLAKAEVLAMPLSNTLIRPDPAVGLLKQYDPMCDSVEPKSAVASSGVTPAIPPCKKVAEDVVEISSQSNTARQNCGNSSKSAGSEELVKSDPLILLQPGQNIGVNKDDNKEVLPEERQKSKDDPKNTKESGPLENMEQTDGPDEAKKTKGMKGSRAFKFALVEFVKELLKPTWKDGQITKDDYKTIVKKVVDKVTGSMQGANIPQTQEKIDHYLSFSKPKLNKLVQAYVEKVQKA

SEQ ID NO: 3238 - DNA, 705 bp, Glycine max
  misc_feature (1)..(705): Ceres Seq. ID no. 14315073
aacccaatcactcttctcaattctcatattccaatgtcaaatcctcaaacaaacaataaccgccaccagcccagccgcctgcagcgccgcgccccctcctccctgcaaataaaccgcgccgtcgagtggaacgtcgccatccccctcctctccccgctcgcatcctctccgccgccgatggagctaaaaccgccgcaagagccgccgcagcgggaggcggagaaggtcaccgtgtcgttcaagaagtggcagcaccccgccgcacctttctgttacgagcccgctcccatggtgcctcccttcgttcccgtgtagatatacaaaccaaagaaaaagaagaagatgaaggaacagagagagttttaggatgctgctatctaatggttcatactactatttagatagaatgaagaagatctaacgctgtatttttaattaattattattgttcctttttttttgttggggagaggctttgccttgttttgcacacggggattatcatgttcatgcttcattcattcatgtgatatgaatgaacattacaccccctctgtgtttttttctctctctctttttttagcttttccccgtttttttttttatgccttttcattttggggcttaaattaaactacttacttcataggaatatctctcttttcttcttctcagcaaaaaataaaaaagaaatctctctctcag

SEQ ID NO: 3239 - protein, 104 aa, Glycine max
  misc_feature (1)..(104): Ceres Seq. ID no. 14315074
NPITLLNSHIPMSNPQTNNNRHQPSRLQRRAPSSLQINRAVEWNVAIPLLSPLASSPPPMELKPPQEPPQREAEKVTVSFKKWQHPAAPFCYEPAPMVPPFVPV

SEQ ID NO: 3240 - protein, 93 aa, Glycine max
  misc_feature (1)..(93): Ceres Seq. ID no. 14315075
MSNPQTNNNRHQPSRLQRRAPSSLQINRAVEWNVAIPLLSPLASSPPPMELKPPQEPPQREAEKVTVSFKKWQHPAAPFCYEPAPMVPPFVPV

SEQ ID NO: 3241 - protein, 93 aa, Glycine max; identical to SEQ ID NO: 3240
  misc_feature (1)..(93): Ceres Seq. ID no. 16625521

SEQ ID NO: 3242 - DNA, 1461 bp, Glycine max
  misc_feature (1)..(1461): Ceres Seq. ID no. 15171131
aggaagtaatagcccctacactcgacagtctcttcttctcttctctgcagcttctctcccctcaacagtgagtaattttggcagaatctccgccaagtatcccaaaatttcctccaatctcttcagagttctgcagacattcatccactttccctctataaaaccattcacaatcccaatccaacttgcaaaaccaaaacctagggttcccaaatcctaattgcactaaaacccagaatgaaagcctctttgaagttccgcgaggaacagcaaaaacccctcttgagagcaaaagtcccactcggcatcctcggcatgcccttccaatccggcatagtcgctggcgaatccaaagaactcactctcaacctttctaccttcttcgaatcgggtccttctctcaaagttgcgtatcgacccaacgactcaaagaaccctttttccttcatagtgaaaacgggaaccggacccttcggttcccctctcaagagctccatgctcatgagctgcgagtttaaccttcccggtacaaccggtaccccgttgtttatgcttcacttcaaaccccgcttcggcgactttactttcaagaagacgcagtcttcgatttttgatgggaaagggtttgggtcttttaacacgcaaaacgacgccgttgagaatgggaataatgctgaaacgccgttgatggaatcggccaaggtttcgattcttgactccggcgcctcgatgttctccggcatggaggtggctgcgcggacgactctgccggtgcggggacgtgctgccgtgaagttccggtggggagttaggattccggcggagttcaaggggaacaacgcgtttcagaagattccgtttctcgtaatggataagatcggcgtggagcacatgatggagtgcggagattcgaagaaggggaagggggacgccggagagaaaccgagggttccggctagtgctgacgtggcggaggcgtgctttgcggtgaagcggcagatggaggttctgcaggcggagaacgggttgcttaggaacgccgtggaagatctccggcgagaaattgtcggcggccgaagcggaggctcgattttggggaaaaaccctaaaaagaacgataggaaaacgacgtcggattacggtaattttcccgggaaatcgacggaggctgaagcgagtgaggaattgaagaaagcattaatgggagcagctggtggtagtagtgcttgaatttgaatctgtagaattgtgtttttctctgttgcaattttagtttcagttttgatgctgcgaaattttcttgtgtagtgttatatatattatgataatgatgatatataggttcattaggttggttcgtcaaggctgcttgttcttgtattcaattcaattttgaagctttgaacggaggatcatgaaaataagaaaatttgaggtttttagtagttggtacgaaatcag

SEQ ID NO: 3243 - protein, 330 aa, Glycine max
  misc_feature (1)..(330): Ceres Seq. ID no. 15171132
MKASLKFREEQQKPLLRAKVPLGILGMPFQSGIVAGESKELTLNLSTFFESGPSLKVAYRPNDSKNPFSFIVKTGTGPFGSPLKSSMLMSCEFNLPGTTGTPLFMLHFKPRFGDFTFKKTQSSIFDGKGFGSFNTQNDAVENGNNAETPLMESAKVSILDSGASMFSGMEVAARTTLPVRGRAAVKFRWGVRIPAEFKGNNAFQKIPFLVMDKIGVEHMMECGDSKKGKGDAGEKPRVPASADVAEACFAVKRQMEVLQAENGLLRNAVEDLRREIVGGRSGGSILGKNPKKNDRKTTSDYGNFPGKSTEAEASEELKKALMGAAGGSSA

SEQ ID NO: 3244 - protein, 304 aa, Glycine max
  misc_feature (1)..(304): Ceres Seq. ID no. 15171133
MPFQSGIVAGESKELTLNLSTFFESGPSLKVAYRPNDSKNPFSFIVKTGTGPFGSPLKSSMLMSCEFNLPGTTGTPLFMLHFKPRFGDFTFKKTQSSIFDGKGFGSFNTQNDAVENGNNAETPLMESAKVSILDSGASMFSGMEVAARTTLPVRGRAAVKFRWGVRIPAEFKGNNAFQKIPFLVMDKIGVEHMMECGDSKKGKGDAGEKPRVPASADVAEACFAVKRQMEVLQAENGLLRNAVEDLRREIVGGRSGGSILGKNPKKNDRKTTSDYGNFPGKSTEAEASEELKKALMGAAGGSSA

SEQ ID NO: 3245 - protein, 244 aa, Glycine max
  misc_feature (1)..(244): Ceres Seq. ID no. 15171134
MLMSCEFNLPGTTGTPLFMLHFKPRFGDFTFKKTQSSIFDGKGFGSFNTQNDAVENGNNAETPLMESAKVSILDSGASMFSGMEVAARTTLPVRGRAAVKFRWGVRIPAEFKGNNAFQKIPFLVMDKIGVEHMMECGDSKKGKGDAGEKPRVPASADVAEACFAVKRQMEVLQAENGLLRNAVEDLRREIVGGRSGGSILGKNPKKNDRKTTSDYGNFPGKSTEAEASEELKKALMGAAGGSSA

SEQ ID NO: 3246 - protein, 330 aa, Glycine max; identical to SEQ ID NO: 3243
  misc_feature (1)..(330): Ceres Seq. ID no. 16625541

SEQ ID NO: 3247 - DNA, 1296 bp, Glycine max
  misc_feature (1)..(1296): Ceres Seq. ID no. 15171163
gggaatgtactgtgcaacagaaatggtggcaccaaccttgaatgtttttccttcttcttctctaagactaagactcgaattgccctctcttcttcactcgaagctcaaacaagcacgctttccgtttccgtcgttctcgcttcaaaaccctaccttccgtcctgttatctgcagagcctccgagtcacccaccgttccacctaagaagcgttcctctaacaacagaaaccctaaaaacaacagcaaaaagaacagtaagagtaactctgtcactgttgattccaactccatttccaattcttctcttccgcctcctcttcccacgtcactgcccaaaccacccacgggattcgtcgtagacgaacgcggtaaagttctatctgcttccagagaccgactcgccactctagttgatccggcgaataaccttcccttagagtgtgtcgtaaggagagagttcaagagttctcaaggagatgattgtatgttgctctgccccgctgatatgcctatccaaatattgaagaacacgagcgaaggatggttggatgtcagtgatgaggaacttgaatctattctgccctctgctgcttatgcacttgccaagatacgcttgtatctggttcatagtggatactgttatacagctcgtggtggtttttgttattcagaagacgacatatttgactttcatacagatagtaaaggtgatagcttgccaaccgaaggtgtagaaattgcacacttcagtctggaacaagcacactacatgatatatacaccatccgatccccttctttttgttgctgtgaaggatcagaatggggtgttgcaaattgctgacgatgaactgcttgaggatccggctatcactagcgctatagatgaagagactgagtttaatgccttggtggaggaagaagctgcgctccttgattcactcttgggtaaaagataaccccatatttacttttttgcagcagagctgtcccagctcccaagacccaccgatgttttgcttttacgtgtttgtttgcatgttgaagaaagaagctactttttgtaacttcttccttaacgcagatcaaaagttaccaaacatgaagttagtatttttcctctggaatgtcccgtcttggtctgtctgcatatcaacaagtatctggggatagaacggctccttttgtctatgtgatcaactttgtatgtatgcctatggcctagttcttggaatttaattttgatacactgtaatgtaaaaaatactatattgtcaatcaattaatttcttttttc

SEQ ID NO: 3248 - protein, 318 aa, Glycine max
  misc_feature (1)..(318): Ceres Seq. ID no. 15171164
GMYCATEMVAPTLNVFPSSSLRLRLELPSLLHSKLKQARFPFPSFSLQNPTFRPVICRASESPTVPPKKRSSNNRNPKNNSKKNSKSNSVTVDSNSISNSSLPPPLPTSLPKPPTGFVVDERGKVLSASRDRLATLVDPANNLPLECVVRREFKSSQGDDCMLLCPADMPIQILKNTSEGWLDVSDEELESILPSAAYALAKIRLYLVHSGYCYTARGGFCYSEDDIFDFHTDSKGDSLPTEGVEIAHFSLEQAHYMIYTPSDPLLFVAVKDQNGVLQIADDELLEDPAITSAIDEETEFNALVEEEAALLDSLLGKR

SEQ ID NO: 3249 - protein, 317 aa, Glycine max
  misc_feature (1)..(317): Ceres Seq. ID no. 15171165
MYCATEMVAPTLNVFPSSSLRLRLELPSLLHSKLKQARFPFPSFSLQNPTFRPVICRASESPTVPPKKRSSNNRNPKNNSKKNSKSNSVTVDSNSISNSSLPPPLPTSLPKPPTGFVVDERGKVLSASRDRLATLVDPANNLPLECVVRREFKSSQGDDCMLLCPADMPIQILKNTSEGWLDVSDEELESILPSAAYALAKIRLYLVHSGYCYTARGGFCYSEDDIFDFHTDSKGDSLPTEGVEIAHFSLEQAHYMIYTPSDPLLFVAVKDQNGVLQIADDELLEDPAITSAIDEETEFNALVEEEAALLDSLLGKR

SEQ ID NO: 3250 - protein, 311 aa, Glycine max
  misc_feature (1)..(311): Ceres Seq. ID no. 15171166
MVAPTLNVFPSSSLRLRLELPSLLHSKLKQARFPFPSFSLQNPTFRPVICRASESPTVPPKKRSSNNRNPKNNSKKNSKSNSVTVDSNSISNSSLPPPLPTSLPKPPTGFVVDERGKVLSASRDRLATLVDPANNLPLECVVRREFKSSQGDDCMLLCPADMPIQILKNTSEGWLDVSDEELESILPSAAYALAKIRLYLVHSGYCYTARGGFCYSEDDIFDFHTDSKGDSLPTEGVEIAHFSLEQAHYMIYTPSDPLLFVAVKDQNGVLQIADDELLEDPAITSAIDEETEFNALVEEEAALLDSLLGKR

SEQ ID NO: 3251 - protein, 311 aa, Glycine max; identical to SEQ ID NO: 3250
  misc_feature (1)..(311): Ceres Seq. ID no. 16625542

SEQ ID NO: 3252 - DNA, 1508 bp, Glycine max
  misc_feature (1)..(1508): Ceres Seq. ID no. 15171456
aaaacccaatcaacgcttgctctttgctctttgcagtgtttactatttttcgctgactccggcgagatccgtgtcacttctccagcatcacttgtctcagttccgtccaccggcgttgcaatggaatcggaatcttcaatctccgattctgaaacacaccctctctcggaccaaatcgacgacgcgtgccacgacatgagctccctggaagagctcgcgagtcgcggcgcttggcgttccatcatcgacaaggtctcacgcgcccgcgctctctctctcctccacaagccccacgaccacctcacctacctcgctttcaacgccctcgccttcacaaaactacgtcgtttcaacgaagcctccgcggaactcgattccctcgaagacctccacagttcccactaccgctacgaaacctaccccaaaatctaccccaatcggattggatccatggtccctttctccctccgctgggtccacgccctaattcccatcaaattagggcaacgtcagcaaggcatggatcgcttctacattcttctcgatttcgtgcgtggaaagattaatgaaaaggagaaacagaacaacctcggtgtctcccttaatctgtggcgtaaaagagaggtttttgtcgtgaattgcatcatagggaaccatttgagtcagaaagagtttggtgtgtgcttaagcttgatgaaggagcttctctctcgcgattgttctgaccctttgctggtttcgcagcttgggtatatgcagttgcagattggggacttggagggtgcgaaaatttcgttcttgaaggtggaggaattggggaagagtaataatggttcattgagtgaggttgagttcaggaaccttgtgaataggaacaaggcgttggtgtatttggttgggaaggattatgtgtctgcggtgagggagtacgaggagtgcattgagagggacagtgcggatgttgtggcagtgaacaacaaggctctgtgtttgatgtatctgagggacttgtcggattctattaaggtgttggagagtgcgcttgagagagttcccactgtggctctcaatgagacgcttgttgtcaatttgtgtagtatgtatgagttggcgtatgttaatcactctgatgttaagagaacgcttagtagctggattgctcgtgttgcacctgatgattttgatgcatcttgtactcgtacatgagaattagtggagactcggtgtgtttgttactgtttgtgcttaaaacacctagaaaatgcaactcgccagcatgaactaggaaggtaattgatgatcaaccattagacagcaagttcattctgggtcttgtgcacactgctgcccatgcctggtgaagaggtacaaatatggacaaaaataagtaggtgtttggttcacatcttgttcatctgtaagctttcaaaacccgacagtgtcaaaattgtatacaattgagaggctaatgattataacaaaactcttgcattacattcattaaattc

SEQ ID NO: 3253 - protein, 401 aa, Glycine max
  misc_feature (1)..(401): Ceres Seq. ID no. 15171457
KTQSTLALCSLQCLLFFADSGEIRVTSPASLVSVPSTGVAMESESSISDSETHPLSDQIDDACHDMSSLEELASRGAWRSIIDKVSRARALSLLHKPHDHLTYLAFNALAFTKLRRFNEASAELDSLEDLHSSHYRYETYPKIYPNRIGSMVPFSLRWVHALIPIKLGQRQQGMDRFYILLDFVRGKINEKEKQNNLGVSLNLWRKREVFVVNCIIGNHLSQKEFGVCLSLMKELLSRDCSDPLLVSQLGYMQLQIGDLEGAKISFLKVEELGKSNNGSLSEVEFRNLVNRNKALVYLVGKDYVSAVREYEECIERDSADVVAVNNKALCLMYLRDLSDSIKVLESALERVPTVALNETLVVNLCSMYELAYVNHSDVKRTLSSWIARVAPDDFDASCTRT

SEQ ID NO: 3254 - protein, 361 aa, Glycine max
  misc_feature (1)..(361): Ceres Seq. ID no. 15171458
MESESSISDSETHPLSDQIDDACHDMSSLEELASRGAWRSIIDKVSRARALSLLHKPHDHLTYLAFNALAFTKLRRFNEASAELDSLEDLHSSHYRYETYPKIYPNRIGSMVPFSLRWVHALIPIKLGQRQQGMDRFYILLDFVRGKINEKEKQNNLGVSLNLWRKREVFVVNCIIGNHLSQKEFGVCLSLMKELLSRDCSDPLLVSQLGYMQLQIGDLEGAKISFLKVEELGKSNNGSLSEVEFRNLVNRNKALVYLVGKDYVSAVREYEECIERDSADVVAVNNKALCLMYLRDLSDSIKVLESALERVPTVALNETLVVNLCSMYELAYVNHSDVKRTLSSWIARVAPDDFDASCTRT

SEQ ID NO: 3255 - protein, 336 aa, Glycine max
  misc_feature (1)..(336): Ceres Seq. ID no. 15171459
MSSLEELASRGAWRSIIDKVSRARALSLLHKPHDHLTYLAFNALAFTKLRRFNEASAELDSLEDLHSSHYRYETYPKIYPNRIGSMVPFSLRWVHALIPIKLGQRQQGMDRFYILLDFVRGKINEKEKQNNLGVSLNLWRKREVFVVNCIIGNHLSQKEFGVCLSLMKELLSRDCSDPLLVSQLGYMQLQIGDLEGAKISFLKVEELGKSNNGSLSEVEFRNLVNRNKALVYLVGKDYVSAVREYEECIERDSADVVAVNNKALCLMYLRDLSDSIKVLESALERVPTVALNETLVVNLCSMYELAYVNHSDVKRTLSSWIARVAPDDFDASCTRT

SEQ ID NO: 3256 - protein, 361 aa, Glycine max; identical to SEQ ID NO: 3254
  misc_feature (1)..(361): Ceres Seq. ID no. 16625546

SEQ ID NO: 3257 - DNA, 1632 bp, Glycine max
  misc_feature (1)..(1632): Ceres Seq. ID no. 15171868
agatcaaacattcgatcgctgattacaatagtctaaacacaatcatctggctaaacattttctggtttttccttttaactgtgaattgtttccttgcaatatttgcatctaataacgcactagagctaccattttatctagtcacattcagtttccttgtgaattcggtttatctattcacaggttattgcttgttgaacagtagagttagatataatataagaactattttaagaagactacaaaataagagcatgtctaatgaaagtcttaatcaaacgaaaacatccgttttaatgcataatagtaagagctatatgtcacaaacactttcttcgccaactaccactaaacagcttgatctagttgatcaagcatttcctggttctaatttgcaaacaaagttttcaaattcacaacagcaaatcagcggctctagaatgttgaacaaatcagcagcgtacgatttttcaaccaatttcgactcatcaactaccacaacgacaagtcattcgaatatgagtaaacatcatcatagacgaagacatagaaagaagagcagtatgaatgatttgaatagcacaatggataattatatagatccatatggtggtattgattatgataatgatgaacaaaatgatgatatctatcaatcatcatatacgttaggaaaaagaagatcaaatacacaactaaatcaattaacagcaagacgcaaacgatcaatgcataagatctattctgatatagacaatatacaagctacatcaactaaacattatgataatatagacaattatacgcctagctatcagcaaggttcgaccgatttcggactaagtgacaacacaatgagcaatcagatgggtttagacgtatcaagtggatatgcgaacacaaggccaacaccatcttcgctatcaatcaacaatagcaatataccagaaacaaatgcaagttcaaattatgaagcttatcaaataccatcgcaattgttttcaaatttacagcctattaattctaatctaccaccttacgttcaacaatataacacacaaaatatttattcaaatagcatggaaatcgaagcacaacaaagactacaaaacatgcaaccaacgtcagcaaaccaaatgtatcaatttgtatcttcacaatctgcacaaccatttaatagatcaaatatatttgctatgctaaacgatcagcaacaacagcaacagcaatcatcacatttagatcagaatacatatcaaagtcaaaacacaatgtcattgaatccatcaacaaatcaactaattgatcaaccaaggccgctagtaaactattcaatgactgccgatgaagatcaattggatcaagatgtaaataaagatataaatgaaattgtagaaaatatttaggataataaattaatagaatataattttgtaagtagtaaatattagaatacattaattgtcaaaagcaagacataacctttcattttgtaaaaaatcatcgtcctagatttttttttaaataaaaaaagatgctttaaaagctgtaaaaattttgtaaaaaatgatgtaaataattctgtgttttttacctgtaaaaaaaaaagaaataaatctatttattatttgc

SEQ ID NO: 3258 - protein, 467 aa, Glycine max
  misc_feature (1)..(467): Ceres Seq. ID no. 15171869
IKHSIADYNSLNTIIWLNIFWFFLLTVNCFLAIFASNNALELPFYLVTFSFLVNSVYLFTGYCLLNSRVRYNIRTILRRLQNKSMSNESLNQTKTSVLMHNSKSYMSQTLSSPTTTKQLDLVDQAFPGSNLQTKFSNSQQQISGSRMLNKSAAYDFSTNFDSSTTTTTSHSNMSKHHHRRRHRKKSSMNDLNSTMDNYIDPYGGIDYDNDEQNDDIYQSSYTLGKRRSNTQLNQLTARRKRSMHKIYSDIDNIQATSTKHYDNIDNYTPSYQQGSTDFGLSDNTMSNQMGLDVSSGYANTRPTPSSLSINNSNIPETNASSNYEAYQIPSQLFSNLQPINSNLPPYVQQYNTQNIYSNSMEIEAQQRLQNMQPTSANQMYQFVSSQSAQPFNRSNIFAMLNDQQQQQQQSSHLDQNTYQSQNTMSLNPSTNQLIDQPRPLVNYSMTADEDQLDQDVNKDINEIVENI

SEQ ID NO: 3259 - protein, 383 aa, Glycine max
  misc_feature (1)..(383): Ceres Seq. ID no. 15171870
MSNESLNQTKTSVLMHNSKSYMSQTLSSPTTTKQLDLVDQAFPGSNLQTKFSNSQQQISGSRMLNKSAAYDFSTNFDSSTTTTTSHSNMSKHHHRRRHRKKSSMNDLNSTMDNYIDPYGGIDYDNDEQNDDIYQSSYTLGKRRSNTQLNQLTARRKRSMHKIYSDIDNIQATSTKHYDNIDNYTPSYQQGSTDFGLSDNTMSNQMGLDVSSGYANTRPTPSSLSINNSNIPETNASSNYEAYQIPSQLFSNLQPINSNLPPYVQQYNTQNIYSNSMEIEAQQRLQNMQPTSANQMYQFVSSQSAQPFNRSNIFAMLNDQQQQQQQSSHLDQNTYQSQNTMSLNPSTNQLIDQPRPLVNYSMTADEDQLDQDVNKDINEIVENI

SEQ ID NO: 3260 - protein, 369 aa, Glycine max
  misc_feature (1)..(369): Ceres Seq. ID no. 15171871
MHNSKSYMSQTLSSPTTTKQLDLVDQAFPGSNLQTKFSNSQQQISGSRMLNKSAAYDFSTNFDSSTTTTTSHSNMSKHHHRRRHRKKSSMNDLNSTMDNYIDPYGGIDYDNDEQNDDIYQSSYTLGKRRSNTQLNQLTARRKRSMHKIYSDIDNIQATSTKHYDNIDNYTPSYQQGSTDFGLSDNTMSNQMGLDVSSGYANTRPTPSSLSINNSNIPETNASSNYEAYQIPSQLFSNLQPINSNLPPYVQQYNTQNIYSNSMEIEAQQRLQNMQPTSANQMYQFVSSQSAQPFNRSNIFAMLNDQQQQQQQSSHLDQNTYQSQNTMSLNPSTNQLIDQPRPLVNYSMTADEDQLDQDVNKDINEIVENI

SEQ ID NO: 3261 - protein, 383 aa, Glycine max; identical to SEQ ID NO: 3259
  misc_feature (1)..(383): Ceres Seq. ID no. 16625549

SEQ ID NO: 3262 - DNA, 1026 bp, Glycine max
  misc_feature (1)..(1026): Ceres Seq. ID no. 15176250
tttcatgcaggaatgattattcaccagatgatctcaacggaaattcaatgttatgtctgcaagagagttggccatttatgctgtgtcaatactgatgatgcaacaccaggagaaatttcttgttacaaatgtggtcagctgggtcacactggtttggcatgttcaaggttgcgggatgagattacaagtggagccacacccagttcatgcttcaaatgtggtgaagaaggacattttgcccgggagtgcacaagttctatcaagtcagggaagaggaattgggaatcatcacacacaaaagataaaagatcccaaaaagaaaatgattacatgggaaatagatctgcatctaatgatatggttggggctcgcagaaagaaacgttcacctaccgaagaaagaggcttttcaactcccaagaaatcaaagagtagaggtggttggacggcggagtatcctaccgaagaaagaggctttacaactccaaagaaatccaaaagtagaggtggctggacaacagagcatcctactgaagaaagaggctttaccactccaaagaaatccaagaatagaggtggctggacatcagagcatcctttggaacaaaaagactacacaactcccaagaaatccaagagtagaggtggatggatgtcagagcatcctgaagaattctttcctctcatgtcctcaaggagcaatggttataggtctctagggacaccatcttctagaaacaataaaattcattcatttggtggtggaagtcacactccaagttataaatcttccaaggtatggaatgatcatgcaggaacttcaatgtctcaaggatcagccaggtcaaatcatcatagattttcagcatcaaggtttggcaactctagtagtgacggacatggtagaaattacaactggtggtagcgatcatgtatatgctgacattatgttctctatatttccttttgttaacttgtaaaacagcacctgcaagttttctaaattaatatttaatttttcctttcg

SEQ ID NO: 3263 - protein, 307 aa, Glycine max
  misc_feature (1)..(307): Ceres Seq. ID no. 15176251
FHAGMIIHQMISTEIQCYVCKRVGHLCCVNTDDATPGEISCYKCGQLGHTGLACSRLRDEITSGATPSSCFKCGEEGHFARECTSSIKSGKRNWESSHTKDKRSQKENDYMGNRSASNDMVGARRKKRSPTEERGFSTPKKSKSRGGWTAEYPTEERGFTTPKKSKSRGGWTTEHPTEERGFTTPKKSKNRGGWTSEHPLEQKDYTTPKKSKSRGGWMSEHPEEFFPLMSSRSNGYRSLGTPSSRNNKIHSFGGGSHTPSYKSSKVWNDHAGTSMSQGSARSNHHRFSASRFGNSSSDGHGRNYNWW

SEQ ID NO: 3264 - protein, 303 aa, Glycine max
  misc_feature (1)..(303): Ceres Seq. ID no. 15176252
MIIHQMISTEIQCYVCKRVGHLCCVNTDDATPGEISCYKCGQLGHTGLACSRLRDEITSGATPSSCFKCGEEGHFARECTSSIKSGKRNWESSHTKDKRSQKENDYMGNRSASNDMVGARRKKRSPTEERGFSTPKKSKSRGGWTAEYPTEERGFTTPKKSKSRGGWTTEHPTEERGFTTPKKSKNRGGWTSEHPLEQKDYTTPKKSKSRGGWMSEHPEEFFPLMSSRSNGYRSLGTPSSRNNKIHSFGGGSHTPSYKSSKVWNDHAGTSMSQGSARSNHHRFSASRFGNSSSDGHGRNYNWW

SEQ ID NO: 3265 - protein, 298 aa, Glycine max
  misc_feature (1)..(298): Ceres Seq. ID no. 15176253
MISTEIQCYVCKRVGHLCCVNTDDATPGEISCYKCGQLGHTGLACSRLRDEITSGATPSSCFKCGEEGHFARECTSSIKSGKRNWESSHTKDKRSQKENDYMGNRSASNDMVGARRKKRSPTEERGFSTPKKSKSRGGWTAEYPTEERGFTTPKKSKSRGGWTTEHPTEERGFTTPKKSKNRGGWTSEHPLEQKDYTTPKKSKSRGGWMSEHPEEFFPLMSSRSNGYRSLGTPSSRNNKIHSFGGGSHTPSYKSSKVWNDHAGTSMSQGSARSNHHRFSASRFGNSSSDGHGRNYNWW

SEQ ID NO: 3266 - protein, 298 aa, Glycine max; identical to SEQ ID NO: 3265
  misc_feature (1)..(298): Ceres Seq. ID no. 16625591

SEQ ID NO: 3267 - DNA, 2180 bp, Glycine max
  misc_feature (1)..(2180): Ceres Seq. ID no. 15177300
attcacatctctatgcattctttatcagtctcattcatttcttctcaacacttcttctctccgtcgccgccgccggaatatcctttctccgatgagaaaatccaccagactctccgccatcggcctctcaaagcctccggaaggaccagaaccgccgaagccttttagcactcgattttcgctgcggtcgtacgcgaagcgcgtgcagctgctcacaccggagcagagatcggtggttttgagaacgggcttcgggaaccttctcctcgttccgaaccacacgctgaacaaggtgttcctcacggagctcatggacgcgtggagctgcgagcgccgcgcgttcgtgctacgctccggcgaagaaattccgatgactcttctcgacgccgctcttatactgggcctgccggttgccggtaaccccgtgaatctcaccgaagaggaaccgttctctgaattggaagaatcttacggagcaacggaaacaaaaaggaaggtggcgatgagttttctggaaaataggttagattcgataggggaagatgtgagtgaggattttgtgaggagcttcttgctctacacaattgggacgtttctcgcttcgaacgatgggaaggtggattcgcggttcttgcggtttcttgaggatttggatgaggtttcagggtttgcttggggaggtgttgttgttgatgatttgtgtcagtggctggataagaggaaagagaataatgtgcagtatgttggaggttgtcttatttttctccaaatatggtcctatgaacattttgatgtagcagcgcgaccacaagtgcaagatcatgatttgacctttcctcgtgtgtgtcgatgggataatactaaacctaagcggggtacttcatggtttaaagacctggatgatgaccaggtgatttggaaactccaacctacttctggagagttacaaatagaggtaatcaaagaagcactggagttgctaggtggcaacaaagagcttcaaagtccagaaagcagttcaacaagctcaacatctagtgttcctgatgtagattcagggttacagcttagtatcaacaaagaagtgcatggagtggacgaggatgatttggagaatcaggtagtggaggacactcccacaaagtcgagcacttgtgatgaagaatatagagagcaaatcaatcctgaaaatctgatagtgttggacactcccccagatttaaccatttgtgacaaagtaggtagggggcaaggaatgaatcttgaaaacctggtagtggtagttgaggatacccctacagctaccagtattgctgaggaagtaagtggagatgaagaggtcaacagtgaaaaactcatagtggaggatactcccccgaattccatttgtgacaaagtatgtagagagcaagaaatgaatcttgaaaacctggaagtgctagttgaggatgcttctcttgctgtcgaagtaggtggggatcaggagttcaatggtgaaaaactcatagtggaggatactccccctgtgctgagcttttatgatgatgatataagaaagaagaatgtcatgttagaagtgaaaaacactgaattgaagatgaaaatagacctagtaatggaggaaaatgaacttctccgtacacagattttatcaaatacccgatttgaagagcagaacgctgagttgaagaaagagctggacttgttgagagaagaaaacagaattttaagactgtcaataagtgattttgcagatcggattgatagacatgttttggatttcgaatctaatgcagctgagtaaacatgctatccttgaatttcaccataacttaactagctgcttatagagctagggctgtgacacccaaacaagccttcaaaccttgctgcagccgccacaacattgatcaatcccagttcttccgcaaagtataggattgtgggtaatcaagtgtgtgtatatatattgttaaggtaaacaaacatgattcattctaatttaggtgtgggtagtattaagaggtttctttttaagtgaaaccatgaaattcataccagggaaacagaactatttgtgttctttattgtatattatgtagcagataacacatctacttctccaaacacaagatgttggagttcaaatggtatatagttatccttttcttttcatgagc

SEQ ID NO: 3268 - protein, 600 aa, Glycine max
  misc_feature (1)..(600): Ceres Seq. ID no. 15177301
FTSLCILYQSHSFLLNTSSLRRRRRNILSPMRKSTRLSAIGLSKPPEGPEPPKPFSTRFSLRSYAKRVQLLTPEQRSVVLRTGFGNLLLVPNHTLNKVFLTELMDAWSCERRAFVLRSGEEIPMTLLDAALILGLPVAGNPVNLTEEEPFSELEESYGATETKRKVAMSFLENRLDSIGEDVSEDFVRSFLLYTIGTFLASNDGKVDSRFLRFLEDLDEVSGFAWGGVVVDDLCQWLDKRKENNVQYVGGCLIFLQIWSYEHFDVAARPQVQDHDLTFPRVCRWDNTKPKRGTSWFKDLDDDQVIWKLQPTSGELQIEVIKEALELLGGNKELQSPESSSTSSTSSVPDVDSGLQLSINKEVHGVDEDDLENQVVEDTPTKSSTCDEEYREQINPENLIVLDTPPDLTICDKVGRGQGMNLENLVVVVEDTPTATSIAEEVSGDEEVNSEKLIVEDTPPNSICDKVCREQEMNLENLEVLVEDASLAVEVGGDQEFNGEKLIVEDTPPVLSFYDDDIRKKNVMLEVKNTELKMKIDLVMEENELLRTQILSNTRFEEQNAELKKELDLLREENRILRLSISDFADRIDRHVLDFESNAAE

SEQ ID NO: 3269 - protein, 570 aa, Glycine max
  misc_feature (1)..(570): Ceres Seq. ID no. 15177302
MRKSTRLSAIGLSKPPEGPEPPKPFSTRFSLRSYAKRVQLLTPEQRSVVLRTGFGNLLLVPNHTLNKVFLTELMDAWSCERRAFVLRSGEEIPMTLLDAALILGLPVAGNPVNLTEEEPFSELEESYGATETKRKVAMSFLENRLDSIGEDVSEDFVRSFLLYTIGTFLASNDGKVDSRFLRFLEDLDEVSGFAWGGVVVDDLCQWLDKRKENNVQYVGGCLIFLQIWSYEHFDVAARPQVQDHDLTFPRVCRWDNTKPKRGTSWFKDLDDDQVIWKLQPTSGELQIEVIKEALELLGGNKELQSPESSSTSSTSSVPDVDSGLQLSINKEVHGVDEDDLENQVVEDTPTKSSTCDEEYREQINPENLIVLDTPPDLTICDKVGRGQGMNLENLVVVVEDTPTATSIAEEVSGDEEVNSEKLIVEDTPPNSICDKVCREQEMNLENLEVLVEDASLAVEVGGDQEFNGEKLIVEDTPPVLSFYDDDIRKKNVMLEVKNTELKMKIDLVMEENELLRTQILSNTRFEEQNAELKKELDLLREENRILRLSISDFADRIDRHVLDFESNAAE

SEQ ID NO: 3270 - protein, 497 aa, Glycine max
  misc_feature (1)..(497): Ceres Seq. ID no. 15177303
MDAWSCERRAFVLRSGEEIPMTLLDAALILGLPVAGNPVNLTEEEPFSELEESYGATETKRKVAMSFLENRLDSIGEDVSEDFVRSFLLYTIGTFLASNDGKVDSRFLRFLEDLDEVSGFAWGGVVVDDLCQWLDKRKENNVQYVGGCLIFLQIWSYEHFDVAARPQVQDHDLTFPRVCRWDNTKPKRGTSWFKDLDDDQVIWKLQPTSGELQIEVIKEALELLGGNKELQSPESSSTSSTSSVPDVDSGLQLSINKEVHGVDEDDLENQVVEDTPTKSSTCDEEYREQINPENLIVLDTPPDLTICDKVGRGQGMNLENLVVVVEDTPTATSIAEEVSGDEEVNSEKLIVEDTPPNSICDKVCREQEMNLENLEVLVEDASLAVEVGGDQEFNGEKLIVEDTPPVLSFYDDDIRKKNVMLEVKNTELKMKIDLVMEENELLRTQILSNTRFEEQNAELKKELDLLREENRILRLSISDFADRIDRHVLDFESNAAE

SEQ ID NO: 3271 - protein, 570 aa, Glycine max; identical to SEQ ID NO: 3269
  misc_feature (1)..(570): Ceres Seq. ID no. 16625596

SEQ ID NO: 3272 - DNA, 1834 bp, Glycine max
  misc_feature (1)..(1834): Ceres Seq. ID no. 15177390
  misc_feature (1095)..(1095): n is a, c, t, g, unknown, or other
gactcatcttcatctccttctgtggggtggccggttcaggaaattgctgcatctgattgtgctagtcctcatggaagtgaagatggtgagaagaagcacttggttttggagaataaggagtttgagaaacgagtttcagccttgccagaggttgagatgatgaaggagaggtttgcaaaattgttacttggagaagatatgtcaggttgcggaaatggggtcactacagccctggctatttcaaatgccataaccaatctatgtgctaccctctttgggcaactttggagattagagcccctacgttcagagaagaaagcaatgtggcgacgagaaatagagtggtttctttctgtcagtgatcatatagttgaattgacacctaattggcagacctttccagatggaagcaagcttgaggtcatgacctgtcgaccacgctcagatctttatgtcaatcttccagctctgcgcaaattagataacatgcttcttgaaattctagatagttttgtcaatacagagttctggtatatagaccaaggggttctagctccagatgctgatggtccatcttcttttcgacaagcacttcagcgacaggaggagaaatggtggcttcttgtaccgcgagtccctccatgtggcctaaatgaaaactcaaggaagcagttgcagcacaagcgtgattccacaaaccaaatattaaaggctgcaatggccattaacagcatcactttagctgaaatggacatccctgagtcctatttggaatctcttccaaagaatgctagagtaagcttgggggatgttatttatcgttatatcacatcggatcatttctctcctgagtgcttgctagcttgccttgatttatcttctgagcatcaagctatagagattgcgaaccgagccgaggcttccatgtatatttggcgtaaaaggacaaactccaagcctgccagtatcagtgccaggtctagttcaagaacatcatgggaaatggtcaaggatctgatggttgatgcagacaaaagggatttgtttgcagagagagcagaaagccttttgctttccttgaagcagcgttttctnggtctccctcaaacagccttggatatgagcaaaatccaatacaacaaggatattgggaaagccattctggagagctactctcgcgtgctagagagtttggcgtttaacatggtagcgcgaattgatgatgtgctctatgtagacgacttgaccaaaaattcagataaaatctcatctctctcaaaagttggtgtagttactcacaagagtatatcagttccacactcagtgcctatcccaggcactccatataaatcggctttcggcacgccaaccctttctccagcacatgggattagtagtcctgccaagctagggaagtccccactcatcaatgacagcaaccttccccaaagagggtcagggatcaagaagtctttgactgattttcttagcattgatccaaaagggaaggaaagtggcagttcaattgaggaacaagttccagaatcaaatacacttgatgaagtgacaacatgtgaaacagatgtggagtccagtgattgcacagaaggtggtgccagcccaagtatcttggaccggaaatggcacgtgtgaggctattgatcttttatagttgaggcatttctccacctgcctttcttttttctcatctttgagtctttgtatcattgtatgtatatgaaatatgtagaaggattcacatagttaagaatggatagtgctttttgttatttacttgtggtagtaatgtgatgcctctaagagaggttattct

SEQ ID NO: 3273 - protein, 550 aa, Glycine max
  misc_feature (1)..(550): Ceres Seq. ID no. 15177391
  misc_feature (365)..(365): Xaa is any aa, unknown or other
DSSSSPSVGWPVQEIAASDCASPHGSEDGEKKHLVLENKEFEKRVSALPEVEMMKERFAKLLLGEDMSGCGNGVTTALAISNAITNLCATLFGQLWRLEPLRSEKKAMWRREIEWFLSVSDHIVELTPNWQTFPDGSKLEVMTCRPRSDLYVNLPALRKLDNMLLEILDSFVNTEFWYIDQGVLAPDADGPSSFRQALQRQEEKWWLLVPRVPPCGLNENSRKQLQHKRDSTNQILKAAMAINSITLAEMDIPESYLESLPKNARVSLGDVIYRYITSDHFSPECLLACLDLSSEHQAIEIANRAEASMYIWRKRTNSKPASISARSSSRTSWEMVKDLMVDADKRDLFAERAESLLLSLKQRFXGLPQTALDMSKIQYNKDIGKAILESYSRVLESLAFNMVARIDDVLYVDDLTKNSDKISSLSKVGVVTHKSISVPHSVPIPGTPYKSAFGTPTLSPAHGISSPAKLGKSPLINDSNLPQRGSGIKKSLTDFLSIDPKGKESGSSIEEQVPESNTLDEVTTCETDVESSDCTEGGASPSILDRKWHV

SEQ ID NO: 3274 - protein, 498 aa, Glycine max
  misc_feature (1)..(498): Ceres Seq. ID no. 15177392
  misc_feature (313)..(313): Xaa is any aa, unknown or other
MMKERFAKLLLGEDMSGCGNGVTTALAISNAITNLCATLFGQLWRLEPLRSEKKAMWRREIEWFLSVSDHIVELTPNWQTFPDGSKLEVMTCRPRSDLYVNLPALRKLDNMLLEILDSFVNTEFWYIDQGVLAPDADGPSSFRQALQRQEEKWWLLVPRVPPCGLNENSRKQLQHKRDSTNQILKAAMAINSITLAEMDIPESYLESLPKNARVSLGDVIYRYITSDHFSPECLLACLDLSSEHQAIEIANRAEASMYIWRKRTNSKPASISARSSSRTSWEMVKDLMVDADKRDLFAERAESLLLSLKQRFXGLPQTALDMSKIQYNKDIGKAILESYSRVLESLAFNMVARIDDVLYVDDLTKNSDKISSLSKVGVVTHKSISVPHSVPIPGTPYKSAFGTPTLSPAHGISSPAKLGKSPLINDSNLPQRGSGIKKSLTDFLSIDPKGKESGSSIEEQVPESNTLDEVTTCETDVESSDCTEGGASPSILDRKWHV

SEQ ID NO: 3275 - protein, 497 aa, Glycine max
  misc_feature (1)..(497): Ceres Seq. ID no. 15177393
  misc_feature (312)..(312): Xaa is any aa, unknown or other
MKERFAKLLLGEDMSGCGNGVTTALAISNAITNLCATLFGQLWRLEPLRSEKKAMWRREIEWFLSVSDHIVELTPNWQTFPDGSKLEVMTCRPRSDLYVNLPALRKLDNMLLEILDSFVNTEFWYIDQGVLAPDADGPSSFRQALQRQEEKWWLLVPRVPPCGLNENSRKQLQHKRDSTNQILKAAMAINSITLAEMDIPESYLESLPKNARVSLGDVIYRYITSDHFSPECLLACLDLSSEHQAIEIANRAEASMYIWRKRTNSKPASISARSSSRTSWEMVKDLMVDADKRDLFAERAESLLLSLKQRFXGLPQTALDMSKIQYNKDIGKAILESYSRVLESLAFNMVARIDDVLYVDDLTKNSDKISSLSKVGVVTHKSISVPHSVPIPGTPYKSAFGTPTLSPAHGISSPAKLGKSPLINDSNLPQRGSGIKKSLTDFLSIDPKGKESGSSIEEQVPESNTLDEVTTCETDVESSDCTEGGASPSILDRKWHV

SEQ ID NO: 3276 - protein, 498 aa, Glycine max; identical to SEQ ID NO: 3274
  misc_feature (1)..(498): Ceres Seq. ID no. 16625597
  misc_feature (313)..(313): Xaa is any aa, unknown or other

SEQ ID NO: 3277 - DNA, 1528 bp, Glycine max
  misc_feature (1)..(1528): Ceres Seq. ID no. 15177994
attttgcttcatttttttttttactttgttgagacttgagagtgttggaaaatgttggggactgctctgcaatttggttgtgttcgtggtgatgatcggttttacattccggtgaaggcaaggaagaaccagaaccagcgtaaaccggttcagagagagaagggtgttggtgaaactgagagaactgattcagtttcaaagagggaacttgttgcttctgagaatgggaattccaatgagtcttcctactcgttgaagaaacccatctcttgcccttctgtagagcctgctagtaacattgataggtttctggaatccacaactcctttagtcacagctcaatatttggccaagacaacaatgagaggttggaagacttgtgatgtggagtatcaatcttactttgctcttgatgatctctgggaatcgtttaaggagtggagtgcgtatggagcaggagtccctttggtacttgatcaaagacaatctgttgtgcaatattatgttccgtatttgtcggctattcaactatatggtcaatcagataagaagtcaaatgctaagccaaggtacaccagtgaagatagtgacggtgattactgccgagattcaagcagcgatggaagcagtgacagtgaatttggaaaaaggactgaactttttacagcacaaagaaatagtcactatcatataggtgatgcttcgtttcaaatgagcaggctatctgtacatgatcacaatacaatgcaagagggattttctagtgacgatagtgaaactgggaatcctaaagatcttctttttgagtattttgatcatgatcctccttatagccgtgaacctttgtctgacaagatacttgatcttgcacgcgactatcctagcctcaagtctgtaagaagttgtgatttattaccggccagttggatgtgtgtagcatggtatcctatatatcgaatacccaccggtccaacattaaaagatttagatgcctgctttcttacataccatacactccatacacccttgacaggaaatggaggtactcaggccccaattttggtttatccaaatgacattgatggcggtgtgccaaagatttccttaccaacttttgcaatggcttcctataagttaaagggatctatttggacacaaaatggagttagtgagagtcaagtagtaaattctctcttgcaggctgcagataactggttaaggctgcttcaggtgaatcaccctgattatcagttcttcgtatcgcatggcacataccacaggtgaatcaaatgagatgccttaaatttctgtgttcattgctctttgcaaacttggtatggtccttctatccatcaatccatcaatccatccatagagactgatgatggagttgggatttctaatgtggattcttgttactcattgcataagcagcacaaaagatgagcttgtctcaagtgaagaatgaaatagagattgctaaagtaaaaaaaaaaaaaacagaaaaaaaaaaaagattgctaaagtg

SEQ ID NO: 3278 - protein, 410 aa, Glycine max
  misc_feature (1)..(410): Ceres Seq. ID no. 15177995
MLGTALQFGCVRGDDRFYIPVKARKNQNQRKPVQREKGVGETERTDSVSKRELVASENGNSNESSYSLKKPISCPSVEPASNIDRFLESTTPLVTAQYLAKTTMRGWKTCDVEYQSYFALDDLWESFKEWSAYGAGVPLVLDQRQSVVQYYVPYLSAIQLYGQSDKKSNAKPRYTSEDSDGDYCRDSSSDGSSDSEFGKRTELFTAQRNSHYHIGDASFQMSRLSVHDHNTMQEGFSSDDSETGNPKDLLFEYFDHDPPYSREPLSDKILDLARDYPSLKSVRSCDLLPASWMCVAWYPIYRIPTGPTLKDLDACFLTYHTLHTPLTGNGGTQAPILVYPNDIDGGVPKISLPTFAMASYKLKGSIWTQNGVSESQVVNSLLQAADNWLRLLQVNHPDYQFFVSHGTYHR

SEQ ID NO: 3279 - protein, 307 aa, Glycine max
  misc_feature (1)..(307): Ceres Seq. ID no. 15177996
MRGWKTCDVEYQSYFALDDLWESFKEWSAYGAGVPLVLDQRQSVVQYYVPYLSAIQLYGQSDKKSNAKPRYTSEDSDGDYCRDSSSDGSSDSEFGKRTELFTAQRNSHYHIGDASFQMSRLSVHDHNTMQEGFSSDDSETGNPKDLLFEYFDHDPPYSREPLSDKILDLARDYPSLKSVRSCDLLPASWMCVAWYPIYRIPTGPTLKDLDACFLTYHTLHTPLTGNGGTQAPILVYPNDIDGGVPKISLPTFAMASYKLKGSIWTQNGVSESQVVNSLLQAADNWLRLLQVNHPDYQFFVSHGTYHR

SEQ ID NO: 3280 - protein, 410 aa, Glycine max; identical to SEQ ID NO: 3278
  misc_feature (1)..(410): Ceres Seq. ID no. 16625600

SEQ ID NO: 3281 - DNA, 482 bp, Glycine max
  misc_feature (1)..(482): Ceres Seq. ID no. 15226386
aacacagagtgagaagtgaggagtgaggagtgaagagtgaagaattgaagagaaatgggtgctgattggggaccagttattattgctgtggctttgttcatcctcttatctccgggtttgttgttccaatttcccgcaaggtatagggtggttgagtttggaaacatgagcactagtgggatcgcaattttggttcatgccatcattttcttctgcatacttaccatcttggttgtagcaataggcattcacatacacatcaattgaatcctttgttcaccttatgtagtcaccacaaatctccacatatatgtttacgattactttctcttcttttttttttggctcctttgatgtattaattaatttccctttgaagtttttcatcttggtttctcttctggggtactgtgtaccaaatattgttcaaaagggaaaaggagatataaaactataggaattatgcaaaaaaaaaaaaaaaa

SEQ ID NO: 3282 - protein, 70 aa, Glycine max
  misc_feature (1)..(70): Ceres Seq. ID no. 15226387
MGADWGPVIIAVALFILLSPGLLFQFPARYRVVEFGNMSTSGIAILVHAIIFFCILTILVVAIGIHIHIN

SEQ ID NO: 3283 - protein, 48 aa, Glycine max
  misc_feature (1)..(48): Ceres Seq. ID no. 15226388
MFTITFSSFFFGSFDVLINFPLKFFILVSLLGYCVPNIVQKGKGDIKL

SEQ ID NO: 3284 - protein, 70 aa, Glycine max; identical to SEQ ID NO: 3282
  misc_feature (1)..(70): Ceres Seq. ID no. 16625655

SEQ ID NO: 3285 - DNA, 1133 bp, Glycine max
  misc_feature (1)..(1133): Ceres Seq. ID no. 15226811
cgtaccgcgccccccctcgagwcagctacgtaggcccccccccctattcgcgaaggaccacctttgcgcttccaccgccgatcccaacatgacccaccaacggttactctctttcaccgtttgtgaccccaaaatcgtatcatttcctatgcacttgctcctccaaaacccacccactcctgctaagcccctgtgttccagcagcttgaatgactcgtacctcattctgggttcctgcaatggcttactgtgtctgtatcatattcctcggtgttacgtagcgttgtggaacccttcaatcagattcacatcaaaaagattgcccaccggcttatcacctggcgagggttttagtactttccatggttttggctatgatgcagtaaatgataagtacaagttgctattagccatgagagttctcggtgagacagtgaccaaaatatatacatttggtgcggattcttcctgtaaggtgattcagaatttgccattggatccgcacccgaccgagcggctagggaagtttgttagtggcactcttaattggatagcgcctaagatgggtgtaagtgatgagaaatgggtgatttgttcatttgattttgcgacggagactagtggtcaagtggtgctgccttatggagacagggacaatgtttgcaagcctgtgataaatgcggttcgtaactgtctttgtgtttgtttctttgactctaggaaagctcattgggctgtgtggctgatgaaagagtatggggttcaagattcgtggactaaattgatggtcattcctcgttttgttcaagaagatagttggccctggaaattgatccctcatgatgagctctgcacttgtagagggtttccagcacttgaacccttgtgcatttcaggaaatggtattgctctgttcaaaactacagcttccaacatagttgtgtataattcaaatgatggtaggttggattttcttaggatttggggtgacctttggagttatctggaaggtttggtttcgccatcatgacattaaaatctcattcctattgcttattgttggcagcttgttgtgtttcttattcttcatgaccttggaaatgttctttaatttagtaagaatatggttttat

SEQ ID NO: 3286 - protein, 342 aa, Glycine max
  misc_feature (1)..(342): Ceres Seq. ID no. 15226812
  misc_feature (7)..(7): Xaa is any aa, unknown or other
VPRPPSXQLRRPPPLFAKDHLCASTADPNMTHQRLLSFTVCDPKIVSFPMHLLLQNPPTPAKPLCSSSLNDSYLILGSCNGLLCLYHIPRCYVALWNPSIRFTSKRLPTGLSPGEGFSTFHGFGYDAVNDKYKLLLAMRVLGETVTKIYTFGADSSCKVIQNLPLDPHPTERLGKFVSGTLNWIAPKMGVSDEKWVICSFDFATETSGQVVLPYGDRDNVCKPVINAVRNCLCVCFFDSRKAHWAVWLMKEYGVQDSWTKLMVIPRFVQEDSWPWKLIPHDELCTCRGFPALEPLCISGNGIALFKTTASNIVVYNSNDGRLDFLRIWGDLWSYLEGLVSPS

SEQ ID NO: 3287 - protein, 313 aa, Glycine max
  misc_feature (1)..(313): Ceres Seq. ID no. 15226813
MTHQRLLSFTVCDPKIVSFPMHLLLQNPPTPAKPLCSSSLNDSYLILGSCNGLLCLYHIPRCYVALWNPSIRFTSKRLPTGLSPGEGFSTFHGFGYDAVNDKYKLLLAMRVLGETVTKIYTFGADSSCKVIQNLPLDPHPTERLGKFVSGTLNWIAPKMGVSDEKWVICSFDFATETSGQVVLPYGDRDNVCKPVINAVRNCLCVCFFDSRKAHWAVWLMKEYGVQDSWTKLMVIPRFVQEDSWPWKLIPHDELCTCRGFPALEPLCISGNGIALFKTTASNIVVYNSNDGRLDFLRIWGDLWSYLEGLVSPS

SEQ ID NO: 3288 - protein, 293 aa, Glycine max
  misc_feature (1)..(293): Ceres Seq. ID no. 15226814
MHLLLQNPPTPAKPLCSSSLNDSYLILGSCNGLLCLYHIPRCYVALWNPSIRFTSKRLPTGLSPGEGFSTFHGFGYDAVNDKYKLLLAMRVLGETVTKIYTFGADSSCKVIQNLPLDPHPTERLGKFVSGTLNWIAPKMGVSDEKWVICSFDFATETSGQVVLPYGDRDNVCKPVINAVRNCLCVCFFDSRKAHWAVWLMKEYGVQDSWTKLMVIPRFVQEDSWPWKLIPHDELCTCRGFPALEPLCISGNGIALFKTTASNIVVYNSNDGRLDFLRIWGDLWSYLEGLVSPS

SEQ ID NO: 3289 - protein, 313 aa, Glycine max; identical to SEQ ID NO: 3287
  misc_feature (1)..(313): Ceres Seq. ID no. 16625659

SEQ ID NO: 3290 - DNA, 427 bp, Glycine max
  misc_feature (1)..(427): Ceres Seq. ID no. 3270530
aacattttcgttcactcagcatggcaccaccggtcctccaaaacaggctccaactgcacttaactctggagtttatccagatggtcctcctgtgccagttcgcgccggtaaactacttaaatacgtggagacagctgaggtcgtgcgaggcccacatgatgctcctggccattggttggtaacagctgctaagcttgtgactgatggtggtaagattggattacaagtgaagtttgcattgttagattattggtgattccaggcaactgttcactctattcagggtatattggttgccatgtgttgcttaaaatggttttgaaactatagacacttgtatatattctttctacaggctgtgtacagtacaattacaaaatgagtggctgttgaaatcgggcaatagaaaattaaaatttgactattc

SEQ ID NO: 3291 - protein, 84 aa, Glycine max
  misc_feature (1)..(84): Ceres Seq. ID no. 3270531
TFSFTQHGTTGPPKQAPTALNSGVYPDGPPVPVRAGKLLKYVETAEVVRGPHDAPGHWLVTAAKLVTDGGKIGLQVKFALLDYW

SEQ ID NO: 3292 - protein, 59 aa, Glycine max
  misc_feature (1)..(59): Ceres Seq. ID no. 3270532
HFRSLSMAPPVLQNRLQLHLTLEFIQMVLLCQFAPVNYLNTWRQLRSCEAHMMLLAIGW

SEQ ID NO: 3293 - protein, 53 aa, Glycine max
  misc_feature (1)..(53): Ceres Seq. ID no. 3270533
MAPPVLQNRLQLHLTLEFIQMVLLCQFAPVNYLNTWRQLRSCEAHMMLLAIGW

SEQ ID NO: 3294 - DNA, 409 bp, Glycine max
  misc_feature (1)..(409): Ceres Seq. ID no. 4270430
gaagaaggaattgagagttactctatcgtgacaactacaaagcctttatttgaagagttgggtggaagggcatcaatttggagcgccttgtcaccatctgtgcaacaagcatctcttcacgtggattcagaatttcaaagcctcttcatatccaagatcaaggaaaccacaaatctcattcctcccactactaattagtcactttgtttatgcatatatttatgtattttcaatgtatgatgttgagtgtttacttacccttgagttgcttttggagaaaaagtctgtgttgcgatcaaccagaaatgttaaaataaaccaagtgtgacaacctatttccaataatttcataaaatatgagttttatgtgctaataaagttgtatatggattggatatacttttggccc

SEQ ID NO: 3295 - protein, 65 aa, Glycine max
  misc_feature (1)..(65): Ceres Seq. ID no. 4270431
EEGIESYSIVTTTKPLFEELGGRASIWSALSPSVQQASLHVDSEFQSLFISKIKETTNLIPPTTN

SEQ ID NO: 3296 - protein, 35 aa, Glycine max
  misc_feature (1)..(35): Ceres Seq. ID no. 4270432
MHIFMYFQCMMLSVYLPLSCFWRKSLCCDQPEMLK

SEQ ID NO: 3297 - DNA, 1350 bp, Glycine max
  misc_feature (1)..(1350): Ceres Seq. ID no. 12364854
cagctacgtaggccccccccccccgatgaaaccatgctgttgcaaagaaaggatggcaagattacagctggtactacgaatgctaaagtttcccatttaatggagtccatcgagaaagattatgtctttgtcaattcccatttcgcatcattggaggctttctctgactactttgaagcatctgtgcaagatagttcctcgcacaggatttctctgtttccttcaaagaggactaatatggaggttagagatgcaaaacaaacaaaggatctgccctcttcctccactgaaggattagaaaatttaaaaagcaataaacttgaggcatgtgcagcttcctgtgaatttgctgccttaaggaaagaacatcaaatttccccactgcacccttcaaacaggttacagttgttgcatcagtatgtgcagatcattgctgaactttcacaagaaaagtataacacaggactgtatctagagtctcttgcagttgagttggtggttttggctatatggaaacagactctagaaatttgtagctcttggatggcctcaattacaaagagtgagttgcctggaagcagttcagctaatgaatccatatctgccagagatattaacttgccacagtctacagaacagaaaataaattttagtgatccttcatctatctccctgtgggccaaacatgagtttattgatgcagttgatcgtgctgagaaactatcatgtcatgttcaaaatatggataaggcaactgagatgccagatgcaatggaaattatattccaaaaagctctcttaattgggacaagtggtgctgtagatgaatatatggagatcagagatagggctgctgcatcttactcaaaagcgatgcttctactttcatttattgtggcagaagcagagaaccttccactgaacccaccattttcacttgttgccactaataaggagcgaatctcacaatatattcacagcttgcagtctcgtaaagaatcttcatcagagtcctcttcaaagaaagtgcttatacttttatcaaagtaaattactggtttttatagtttgtcttttcatcaccacttttggaatcggtgaagcaatttgttgctgacatcaatgttgacttcctgtgatgagtgcagacgagagactacctttgacagataccatgttgtatatagatagatagatataacctatcatggccttgtaaggggactttgcctttactgcatgatttcatgtatagaatgttatttctttgacatggaatttgtaaatagtgtatagctcatagtcttttacaattttgaaaccactatgatcaatcaattgaaatttctc

SEQ ID NO: 3298 - protein, 349 aa, Glycine max
  misc_feature (1)..(349): Ceres Seq. ID no. 12364855
QLRRPPPPDETMLLQRKDGKITAGTTNAKVSHLMESIEKDYVFVNSHFASLEAFSDYFEASVQDSSSHRISLFPSKRTNMEVRDAKQTKDLPSSSTEGLENLKSNKLEACAASCEFAALRKEHQISPLHPSNRLQLLHQYVQIIAELSQEKYNTGLYLESLAVELVVLAIWKQTLEICSSWMASITKSELPGSSSANESISARDINLPQSTEQKINFSDPSSISLWAKHEFIDAVDRAEKLSCHVQNMDKATEMPDAMEIIFQKALLIGTSGAVDEYMEIRDRAAASYSKAMLLLSFIVAEAENLPLNPPFSLVATNKERISQYIHSLQSRKESSSESSSKKVLILLSK

SEQ ID NO: 3299 - protein, 338 aa, Glycine max
  misc_feature (1)..(338): Ceres Seq. ID no. 12364856
MLLQRKDGKITAGTTNAKVSHLMESIEKDYVFVNSHFASLEAFSDYFEASVQDSSSHRISLFPSKRTNMEVRDAKQTKDLPSSSTEGLENLKSNKLEACAASCEFAALRKEHQISPLHPSNRLQLLHQYVQIIAELSQEKYNTGLYLESLAVELVVLAIWKQTLEICSSWMASITKSELPGSSSANESISARDINLPQSTEQKINFSDPSSISLWAKHEFIDAVDRAEKLSCHVQNMDKATEMPDAMEIIFQKALLIGTSGAVDEYMEIRDRAAASYSKAMLLLSFIVAEAENLPLNPPFSLVATNKERISQYIHSLQSRKESSSESSSKKVLILLSK

SEQ ID NO: 3300 - protein, 316 aa, Glycine max
  misc_feature (1)..(316): Ceres Seq. ID no. 12364857
MESIEKDYVFVNSHFASLEAFSDYFEASVQDSSSHRISLFPSKRTNMEVRDAKQTKDLPSSSTEGLENLKSNKLEACAASCEFAALRKEHQISPLHPSNRLQLLHQYVQIIAELSQEKYNTGLYLESLAVELVVLAIWKQTLEICSSWMASITKSELPGSSSANESISARDINLPQSTEQKINFSDPSSISLWAKHEFIDAVDRAEKLSCHVQNMDKATEMPDAMEIIFQKALLIGTSGAVDEYMEIRDRAAASYSKAMLLLSFIVAEAENLPLNPPFSLVATNKERISQYIHSLQSRKESSSESSSKKVLILLSK

SEQ ID NO: 3301 - DNA, 1742 bp, Glycine max
  misc_feature (1)..(1742): Ceres Seq. ID no. 12581696
cagctacgtaggccccccccccagaatgctctctgcaaccaaggaacatgaatatcacaagactacagggaggtgtgaatgtcagcagtagtgacaatcccaaacctaaaagtttaggtccagaaagttcaaatggttcagcccatgtggatcatccatctagagagttccagattgcagttagcagcaataggaaggtagtgaacgggagtacctgtagttctgttaggacaacagtaaatgaatttagtgaacgggaaatgccttacatgactaatgccaatgcttccatcattgtgaaggatgattttgataatgtcacaactacctctcaaaggattgaagatcatatggttaaggataggttagccttaaatgatgacgacttgggatccattgaaggagatatgtgtgcttcttcaacaggagttgtaagagtgcaatcaagaaagaaagctgagatgttcctagttcgaacagatggattttcttgtaccagagaaaaagtgactgaatcttctttggctttcactcatcctagcacccagcagcagatgcttatgtggaagtctatgccaaagaatgtgttattgttgaaaaagctgggggaagaactaatggaagaagcaaaaatggttgcttcttttctttatcaccaagagaaaatgaatgttcttgtggaacctgatgtgcatgacatatttgctagaattccaggctttggatttgttcagaccttctatagtcaagataccagtgatctacatgagaaagtcgattttgtggcatgcttgggtggagatggcgttatactgcatgcgtcaaatctattcagagatgctgttccccctattgtgtcatttaaccttggctcccttggttttctgacttctcatgattttgaagattacaagcaagacctacgacaagtcatccatggaaataatacacgagatggtgtgtatattactcttagaatgcgcctccgatgtgaaatttttcgtaaaggtaaagcaatgccagggaaagtatttgacatcctcaatgaggttgttgttgatcggggttctaatccatacctttcaaagattgaatgctatgaacatgatcgacttataaccaaagtacaaggtgatggagtcattgtggccacccctacaggaagtactgcctattctacagctgccggaggttccatggtccatcctaatgtcccttgcatactgtttaccccaatctgtccacattcactctcatttaggccagttatacttccagattctgctcaactagaattaaagattccggaagatgctagaagtaatgcctgggtttcatttgatgggaagagaaggcagcaactctcgagaggcgattctgtccgaatatcgatgagccagcatccccttccaactgttaacaagtttgaccaaacgggtgattggttcagtagcttgattcgctgcctaaattggaatgagaggcttgatcaaaaggctctgtgatgcatgtgaaagtgaagaacagatatgcattaccctaacgtgaggatagggcttctataattactgtacagcttgtacattgagattacagaacttagatatatagcagatacctacactttattacattggctaccattgtgaagatagggtttgccaatgttttttcaacatgtcataatggcaagatgctgttgtatatacatttataaaatgtagtaatttttttttaatctt

SEQ ID NO: 3302 - protein, 485 aa, Glycine max
  misc_feature (1)..(485): Ceres Seq. ID no. 12581697
MNITRLQGGVNVSSSDNPKPKSLGPESSNGSAHVDHPSREFQIAVSSNRKVVNGSTCSSVRTTVNEFSEREMPYMTNANASIIVKDDFDNVTTTSQRIEDHMVKDRLALNDDDLGSIEGDMCASSTGVVRVQSRKKAEMFLVRTDGFSCTREKVTESSLAFTHPSTQQQMLMWKSMPKNVLLLKKLGEELMEEAKMVASFLYHQEKMNVLVEPDVHDIFARIPGFGFVQTFYSQDTSDLHEKVDFVACLGGDGVILHASNLFRDAVPPIVSFNLGSLGFLTSHDFEDYKQDLRQVIHGNNTRDGVYITLRMRLRCEIFRKGKAMPGKVFDILNEVVVDRGSNPYLSKIECYEHDRLITKVQGDGVIVATPTGSTAYSTAAGGSMVHPNVPCILFTPICPHSLSFRPVILPDSAQLELKIPEDARSNAWVSFDGKRRQQLSRGDSVRISMSQHPLPTVNKFDQTGDWFSSLIRCLNWNERLDQKAL

SEQ ID NO: 3303 - protein, 414 aa, Glycine max
  misc_feature (1)..(414): Ceres Seq. ID no. 12581698
MPYMTNANASIIVKDDFDNVTTTSQRIEDHMVKDRLALNDDDLGSIEGDMCASSTGVVRVQSRKKAEMFLVRTDGFSCTREKVTESSLAFTHPSTQQQMLMWKSMPKNVLLLKKLGEELMEEAKMVASFLYHQEKMNVLVEPDVHDIFARIPGFGFVQTFYSQDTSDLHEKVDFVACLGGDGVILHASNLFRDAVPPIVSFNLGSLGFLTSHDFEDYKQDLRQVIHGNNTRDGVYITLRMRLRCEIFRKGKAMPGKVFDILNEVVVDRGSNPYLSKIECYEHDRLITKVQGDGVIVATPTGSTAYSTAAGGSMVHPNVPCILFTPICPHSLSFRPVILPDSAQLELKIPEDARSNAWVSFDGKRRQQLSRGDSVRISMSQHPLPTVNKFDQTGDWFSSLIRCLNWNERLDQKAL

SEQ ID NO: 3304 - protein, 411 aa, Glycine max
  misc_feature (1)..(411): Ceres Seq. ID no. 12581699
MTNANASIIVKDDFDNVTTTSQRIEDHMVKDRLALNDDDLGSIEGDMCASSTGVVRVQSRKKAEMFLVRTDGFSCTREKVTESSLAFTHPSTQQQMLMWKSMPKNVLLLKKLGEELMEEAKMVASFLYHQEKMNVLVEPDVHDIFARIPGFGFVQTFYSQDTSDLHEKVDFVACLGGDGVILHASNLFRDAVPPIVSFNLGSLGFLTSHDFEDYKQDLRQVIHGNNTRDGVYITLRMRLRCEIFRKGKAMPGKVFDILNEVVVDRGSNPYLSKIECYEHDRLITKVQGDGVIVATPTGSTAYSTAAGGSMVHPNVPCILFTPICPHSLSFRPVILPDSAQLELKIPEDARSNAWVSFDGKRRQQLSRGDSVRISMSQHPLPTVNKFDQTGDWFSSLIRCLNWNERLDQKAL

SEQ ID NO: 3305 - DNA, 1174 bp, Glycine max
  misc_feature (1)..(1174): Ceres Seq. ID no. 12581709
cagctacgtaggccccccccctatatatatatatatatatattttaatcaacgatattatgtcagtagctcttaaagagtaaacttaaagtatcaagagtgttatggttctattcattatgtgtctgctttgtgctttgttgattcatcatgttaaattaagcaacacatacaatacaaactatgaatatggaatgttacgatgctacagtgattggaaaatgagctgcttcaaatgcttgaacttgtatagggtcattgagttgatgaaattgaatgatatattttgaattttcaatctatacattaatcgtaatacatataatgtgatatggccactttttagtgtatgcagctggagtaacctctactgctttaaactaacatgttgctgattcagaacctaattaataattgtcctctaaaatagttaaaatttaaaccctgacagttagggtttgaacagaggatgactgccgcatagttctctagtcaattgttggtaagtttttaaatgcaacaggctcagggagcatgacacatggatcacccctacgctgtctggagatactattaaaaagttaattgatcttgcacaaactgagcttgacattataattcctactctgccatctatatctaattatctatactaaatctgatatataacacgctatctctagtatagtaatctctaacgagacttaaaatggccatgcaggtgcttgggatgcagttgtaacttgtttctttatcgatactgctcataatattgttgagtacattgaaataatttcaaaaattttgaaagatgggggagtttggataaatttgggacctctactttatcactttgcagatatgtatggacaggatgatgaaatgtccattgaattgagtttggaagatgttaagagggttgcatttcattatggatttgaatttgagaatgaaagaactattgagacaacttacaccgcaaattctagatcaatgatgcaaaatcgttactttgctgcattttggacaatgagaaaaaaatctgctgcagtgcagcagcaagtgccctgagaatagctgattcaattattgtgatataaagtacaaattagctctcttttacttggtcatgccttgtacttttccttgttggagtgaggaactttccttaattc

SEQ ID NO: 3306 - protein, 69 aa, Glycine max
  misc_feature (1)..(69): Ceres Seq. ID no. 12581710
MYGQDDEMSIELSLEDVKRVAFHYGFEFENERTIETTYTANSRSMMQNRYFAAFWTMRKKSAAVQQQVP

SEQ ID NO: 3307 - protein, 62 aa, Glycine max
  misc_feature (1)..(62): Ceres Seq. ID no. 12581711
MSIELSLEDVKRVAFHYGFEFENERTIETTYTANSRSMMQNRYFAAFWTMRKKSAAVQQQVP

SEQ ID NO: 3308 - protein, 61 aa, Glycine max
  misc_feature (1)..(61): Ceres Seq. ID no. 12581712
MVLFIMCLLCALLIHHVKLSNTYNTNYEYGMLRCYSDWKMSCFKCLNLYRVIELMKLNDIF

SEQ ID NO: 3309 - DNA, 1255 bp, Glycine max
  misc_feature (1)..(1255): Ceres Seq. ID no. 12581768
cagctacgtaggcccccccccccgaatatcagagcattagtaaatctaattaatataagttcaagcaaaccacatatgaccgaaaagaagcctgttcatattctaataagctcaacattagctacaattgttgttactgctttaaccaaccctctcgatgtgttgaaggtgagaattcaaaataacgataagaattgcagcactatcaaccacactcattgcgtgactcgatcaagttctcactctgctcccaattccttacgacaagcttccttatatcgtcttgtaatgacaccgaaccttcaagaacattatcaagtcttgtgtgattgcctcccctttagatcaaacgcaaaagcccttgtttacttgactcgtaaagagggatacagagtacttaccaacggattggctcaaggtttgatgggttctgtactgagcaccgtaacttacttttactgctacgaggctgcaagaaagcgtgtgaagcaatatacttcacacaatattggtcttccattgttgacagctctgacagccagaaccatcacgacatgtatcgctttcccatttgaatattggaagaccttgcaacaaagttcggttggtgtgagtggaaagtcttcaatgaaactcggaacaaaaataaatgcaggattcggtactttgctcggaagagacttgatgttttctgggctttattgggtgttggtggaaaatatcagaagacatgtgaagagctggagccaacaaaatgaagagggatatcaagataaaggaagtctattgctttctaatgtgattgccggtggtttggcaggaggaatatcagcatccgtgacattacccttggatgtggtaaaaacaagaaaacaattgaatccaaaagaatataagaagaaatccacaattcgaattctcaaggatatctattataatgaaggaaaggatgctttgacagcaggtatgagacaaagagtgaccaaggttactatggcatgtgcaggcatcttgacattatatgagctcttctctgacatgttgagagaagacaatgtttactgagtggagtagttaggtttgcttgattgattttttaaattaaatattttggctgatttcgtacatttttattgtaattttagctagtgctcttcctttcgaataatgtctttttatctctttgtttatttatctatccctgtataaagataattaaatatcgtattgtataaccatatcatgaaaattattg

SEQ ID NO: 3310 - protein, 354 aa, Glycine max
  misc_feature (1)..(354): Ceres Seq. ID no. 12581769
QLRRPPPPNIRALVNLINISSSKPHMTEKKPVHILISSTLATIVVTALTNPLDVLKVRIQNNDKNCSTINHTHCVTRSSSHSAPNSLRQASLYRLVMTPNLQEHYQVLCDCLPFRSNAKALVYLTRKEGYRVLTNGLAQGLMGSVLSTVTYFYCYEAARKRVKQYTSHNIGLPLLTALTARTITTCIAFPFEYWKTLQQSSVGVSGKSSMKLGTKINAGFGTLLGRDLMFSGLYWVLVENIRRHVKSWSQQNEEGYQDKGSLLLSNVIAGGLAGGISASVTLPLDVVKTRKQLNPKEYKKKSTIRILKDIYYNEGKDALTAGMRQRVTKVTMACAGILTLYELFSDMLREDNVY

SEQ ID NO: 3311 - protein, 329 aa, Glycine max
  misc_feature (1)..(329): Ceres Seq. ID no. 12581770
MTEKKPVHILISSTLATIVVTALTNPLDVLKVRIQNNDKNCSTINHTHCVTRSSSHSAPNSLRQASLYRLVMTPNLQEHYQVLCDCLPFRSNAKALVYLTRKEGYRVLTNGLAQGLMGSVLSTVTYFYCYEAARKRVKQYTSHNIGLPLLTALTARTITTCIAFPFEYWKTLQQSSVGVSGKSSMKLGTKINAGFGTLLGRDLMFSGLYWVLVENIRRHVKSWSQQNEEGYQDKGSLLLSNVIAGGLAGGISASVTLPLDVVKTRKQLNPKEYKKKSTIRILKDIYYNEGKDALTAGMRQRVTKVTMACAGILTLYELFSDMLREDNVY

SEQ ID NO: 3312 - protein, 258 aa, Glycine max
  misc_feature (1)..(258): Ceres Seq. ID no. 12581771
MTPNLQEHYQVLCDCLPFRSNAKALVYLTRKEGYRVLTNGLAQGLMGSVLSTVTYFYCYEAARKRVKQYTSHNIGLPLLTALTARTITTCIAFPFEYWKTLQQSSVGVSGKSSMKLGTKINAGFGTLLGRDLMFSGLYWVLVENIRRHVKSWSQQNEEGYQDKGSLLLSNVIAGGLAGGISASVTLPLDVVKTRKQLNPKEYKKKSTIRILKDIYYNEGKDALTAGMRQRVTKVTMACAGILTLYELFSDMLREDNVY

SEQ ID NO: 3313 - DNA, 1988 bp, Glycine max
  misc_feature (1)..(1988): Ceres Seq. ID no. 12581802
cagctacgtaggcccccccccccgcgatctccctctctctaacgacgccgtttcgatcctctccttctgcttcgtagtaacagagttcaaaccataccatggatgagacttcagctctcatcgaagccattctccgagagcaagaggaagaagaagaagaagctcacagaagaagaaggaaccacaccacaatcaaaaataacaacaacaacaacaacgaatggcaaacggtgtcgtatacaaagcgcaaccgcaaccgcaacaataataggaagcctctcgccgacgacaatttcgccgccgatccttcttcctccgacgtcttcagctccgtccagcgccattccgaggaccgccgcctccggctactcaagtctcagatcgccgccgctgaagcggctgctgcggaagccacaccgagcagatcgaagcggcattccgacaacgaggaggacggcgatgccgagcctgaagccgaggtgaagaaggcgaagcagaagaagccgaagaagccgaaggtgacggtggccgaagctgcttccggaatcagcgccgatgatctcgacgcgtttctcgctgaaattaccgcttcgtatgaatcgcagcaagatattatgctgatgcggtttgctgattacttcggtcgcgcgttctcgtcggtgagtggagctcaattcccatggttgaagacgttcaaagagtctaccgttgcaaagattgttgatatccctcttttgcatatatctgaggatatttacaaaatatcaacggattgggtcagtcatcgatcatatgaagcacttggttcctttgtgctatggtcgttggacagcattcttgcagaccttgccagtcatcaaggagttgttaagggatctaagaaggcagtccagcaatcatcaccgaaatctcaggttgccatgtttgtggttttagcaatggtgcttcgacgaaaacctgatgtcttgattagtttattaccaataataaaggagaataaaaaatatcaaggacaggataaactccctgtcattgtttgggtgataactcaggcttctcaaggagatctagttatggggttgtacttgtgggtatatcttctattgccaatgctgagtgtgaagtctggttgtaatccacagtcaagagacttgatattacagttggttgagagaattatcacatctcctaaagctcgttctatcttgctaaatggggctgtcagaaggggggagcgtgttgtgcccccatgggcacttgattctctattgagagttactttccctcttccttcagcccgggtcaaggccactgaaagatttgaagctgtttatccaacattaagagaagttgcccttgccagttcccctggaagcaaagcaataaagcatcttgcacaacagatactaagctttgcaattaaagctgcaggagaagctaattctgacctatcaaaggaggcaagtgacatttttatttggtgtttgactcagaaccctgaatgttacaagcaatgggattttctttatatggataaccttgaagcaagtgttgttgtattgagaaaactttctggtgaatggaaggaatactttgtcaaacatcctactcttgatcctttgagggaaaatcttaagagcttcagtcaaaagaatgaaaaggcattggctaaggtggatgatggtgctcgccatgcattattgaaggatgcagacaagtactgcaaagtccttttgggacaattgtcacaaggccatggatgcttgaagagcatgatagttctttctgttgtacttgctgttggtgccgttttcatgtcccagaacttgcatttatgggattatagtcaactgacagaaatgttgaatctctcctaggatgagagttatcctgtgatttgctcggtgcttatgcccagtgtggatcacttcagtcaatagtgaggtgtgatgaggaatatttaatttattttagtcttcgattgagcg

SEQ ID NO: 3314 - protein, 592 aa, Glycine max
  misc_feature (1)..(592): Ceres Seq. ID no. 12581803
MDETSALIEAILREQEEEEEEAHRRRRNHTTIKNNNNNNNEWQTVSYTKRNRNRNNNRKPLADDNFAADPSSSDVFSSVQRHSEDRRLRLLKSQIAAAEAAAAEATPSRSKRHSDNEEDGDAEPEAEVKKAKQKKPKKPKVTVAEAASGISADDLDAFLAEITASYESQQDIMLMRFADYFGRAFSSVSGAQFPWLKTFKESTVAKIVDIPLLHISEDIYKISTDWVSHRSYEALGSFVLWSLDSILADLASHQGVVKGSKKAVQQSSPKSQVAMFVVLAMVLRRKPDVLISLLPIIKENKKYQGQDKLPVIVWVITQASQGDLVMGLYLWVYLLLPMLSVKSGCNPQSRDLILQLVERIITSPKARSILLNGAVRRGERVVPPWALDSLLRVTFPLPSARVKATERFEAVYPTLREVALASSPGSKAIKHLAQQILSFAIKAAGEANSDLSKEASDIFIWCLTQNPECYKQWDFLYMDNLEASVVVLRKLSGEWKEYFVKHPTLDPLRENLKSFSQKNEKALAKVDDGARHALLKDADKYCKVLLGQLSQGHGCLKSMIVLSVVLAVGAVFMSQNLHLWDYSQLTEMLNLS

SEQ ID NO: 3315 - protein, 420 aa, Glycine max
  misc_feature (1)..(420): Ceres Seq. ID no. 12581804
MLMRFADYFGRAFSSVSGAQFPWLKTFKESTVAKIVDIPLLHISEDIYKISTDWVSHRSYEALGSFVLWSLDSILADLASHQGVVKGSKKAVQQSSPKSQVAMFVVLAMVLRRKPDVLISLLPIIKENKKYQGQDKLPVIVWVITQASQGDLVMGLYLWVYLLLPMLSVKSGCNPQSRDLILQLVERIITSPKARSILLNGAVRRGERVVPPWALDSLLRVTFPLPSARVKATERFEAVYPTLREVALASSPGSKAIKHLAQQILSFAIKAAGEANSDLSKEASDIFIWCLTQNPECYKQWDFLYMDNLEASVVVLRKLSGEWKEYFVKHPTLDPLRENLKSFSQKNEKALAKVDDGARHALLKDADKYCKVLLGQLSQGHGCLKSMIVLSVVLAVGAVFMSQNLHLWDYSQLTEMLNLS

SEQ ID NO: 3316 - protein, 418 aa, Glycine max
  misc_feature (1)..(418): Ceres Seq. ID no. 12581805
MRFADYFGRAFSSVSGAQFPWLKTFKESTVAKIVDIPLLHISEDIYKISTDWVSHRSYEALGSFVLWSLDSILADLASHQGVVKGSKKAVQQSSPKSQVAMFVVLAMVLRRKPDVLISLLPIIKENKKYQGQDKLPVIVWVITQASQGDLVMGLYLWVYLLLPMLSVKSGCNPQSRDLILQLVERIITSPKARSILLNGAVRRGERVVPPWALDSLLRVTFPLPSARVKATERFEAVYPTLREVALASSPGSKAIKHLAQQILSFAIKAAGEANSDLSKEASDIFIWCLTQNPECYKQWDFLYMDNLEASVVVLRKLSGEWKEYFVKHPTLDPLRENLKSFSQKNEKALAKVDDGARHALLKDADKYCKVLLGQLSQGHGCLKSMIVLSVVLAVGAVFMSQNLHLWDYSQLTEMLNLS

SEQ ID NO: 3317 - DNA, 991 bp, Glycine max
  misc_feature (1)..(991): Ceres Seq. ID no. 12581874
cagctacgtaggccccccccccgaagagagtagcattcctatttcctagctagtgtatactccacaacagtacacagctgacagcacccatttagtaaacgtgagtagtgactaccaaagtttatctttccatactccactccgttcactttttagactttcttcgccgtttgtggaagatgaggttgtgtctgtgtttaacgttgttgctggttctggctagtgtggcaatgggagaagaagatgcagatcataataagcactccctaaaagccaagtcacacgcgcagatccagtgcacaatgtgttcctcttgtaacaacccttgcaaccaagttccatctccaccaccaccatctccttcctccaacaactgtcctccaccaccctctcctccttcctccggcggcggaggcgaaggagctccgtactattactccccgcctccaccctctcagtatacctactcctcaccacctcctcccgcatccaccggcggaggaatgtactactacactcctcccagcaacagaaactacccaagaccgccgccgcctaacccgattgtgccgtattttccgttctactactacagccctctgccgcccgggtccactgcagctcctccgccctccacggcctcctcgattctctgtgcacttgctttctcatcttttctattgttgttgctttgatagtaaatgtaagaaaagaaaaaaaatgaaggaaaatggtaggaataacggcgcatatttgcagatctagagattctgagggaaatgagagggaggtagaactgtacaagtgcacgtgaatttcccaatctgccctgcacacgtgaactgaagtaccagtattatgttttctctctgaatttcttgtgccaatgtagattcatctgcaatttgttaataatttttatttttatgtactattaatactagtaagtcgtatttcgttagtataaaaataaaataaattacaaagattt

SEQ ID NO: 3318 - protein, 171 aa, Glycine max
  misc_feature (1)..(171): Ceres Seq. ID no. 12581875
MRLCLCLTLLLVLASVAMGEEDADHNKHSLKAKSHAQIQCTMCSSCNNPCNQVPSPPPPSPSSNNCPPPPSPPSSGGGGEGAPYYYSPPPPSQYTYSSPPPPASTGGGMYYYTPPSNRNYPRPPPPNPIVPYFPFYYYSPLPPGSTAAPPPSTASSILCALAFSSFLLLLL

SEQ ID NO: 3319 - protein, 154 aa, Glycine max
  misc_feature (1)..(154): Ceres Seq. ID no. 12581876
MGEEDADHNKHSLKAKSHAQIQCTMCSSCNNPCNQVPSPPPPSPSSNNCPPPPSPPSSGGGGEGAPYYYSPPPPSQYTYSSPPPPASTGGGMYYYTPPSNRNYPRPPPPNPIVPYFPFYYYSPLPPGSTAAPPPSTASSILCALAFSSFLLLLL

SEQ ID NO: 3320 - protein, 130 aa, Glycine max
  misc_feature (1)..(130): Ceres Seq. ID no. 12581877
MCSSCNNPCNQVPSPPPPSPSSNNCPPPPSPPSSGGGGEGAPYYYSPPPPSQYTYSSPPPPASTGGGMYYYTPPSNRNYPRPPPPNPIVPYFPFYYYSPLPPGSTAAPPPSTASSILCALAFSSFLLLLL

SEQ ID NO: 3321 - DNA, 911 bp, Glycine max
  misc_feature (1)..(911): Ceres Seq. ID no. 12582051
cagctacgtaggcccccccccccaagaacaaaagcagttggcatcatttgatattccttatagagtaattgaatgtttcttgaggctttggtcatataaggtagtctaagagttataaggtggtgattaagggccggaagattgttgttttcactgctgtgaattttagttcccgcatacactattttcgggctcaggtctgttctatggctgcaagaaaaatgctaagtttagtgtttttaaaggaaaaacataccacttttagggttttatcatacttttgaaaactgttatggtgttaaatcctgtattgtttagctttatttcttatatatagagcattacccatataattttggattgtgggctaacctcctcagggaaaagctcctagtatggttgctagcaccccaaaagttccaaaatccccttggatgccttttcctttgcttcttgatgctatcagaaatcaggttcctcccaagggtatggatgtaatcaaaatatattatgaacaattcaggtcaaagcatatatcgcgggatgattttgtgaagatgctgaggttaatagttggagatggtctgttgagaactacaataacaaatcttcagttcaagataccttccggtggtgaattgaaaggctcaatcaagaaggaagtctgaggctgtatttctgtgaggtggagatctttctccttggagtcaattaatgtcaactttttgctggataaatcaaaatgaagttgtgatattgttatctcttaggcaaactatctttttcatttccttttgccatctttatttggacttgagacatacatgcaactagaactatattagagtttagtttgaactgttcgtgatcaggtgacctgtcaatcaatcctcttgtttatgttggatttc

SEQ ID NO: 3322 - protein, 90 aa, Glycine max
  misc_feature (1)..(90): Ceres Seq. ID no. 12582052
MVASTPKVPKSPWMPFPLLLDAIRNQVPPKGMDVIKIYYEQFRSKHISRDDFVKMLRLIVGDGLLRTTITNLQFKIPSGGELKGSIKKEV

SEQ ID NO: 3323 - protein, 77 aa, Glycine max
  misc_feature (1)..(77): Ceres Seq. ID no. 12582053
MPFPLLLDAIRNQVPPKGMDVIKIYYEQFRSKHISRDDFVKMLRLIVGDGLLRTTITNLQFKIPSGGELKGSIKKEV

SEQ ID NO: 3324 - protein, 59 aa, Glycine max
  misc_feature (1)..(59): Ceres Seq. ID no. 12582054
MDVIKIYYEQFRSKHISRDDFVKMLRLIVGDGLLRTTITNLQFKIPSGGELKGSIKKEV

SEQ ID NO: 3325 - DNA, 1329 bp, Glycine max
  misc_feature (1)..(1329): Ceres Seq. ID no. 12582113
cagctacgtaggccccccccccgaaaaactattcatttcttcatcagcaacttcacggaggagagaaaggcatggctggcaatataatagcttcatcagtgcccaagagcgtccaagaaatgtccatggatggtgatgaaccaccatcaagatatgtagttaatggaaatagctttggatctaaagattcttctgtacagtttccaatacccatcattgatgtgcgtctcctctcatcagaagatgagctagagaagcttagatctgctctaagttcagctggatgcttccaggcaattggtcatggaatgtcaagttcatatcttgacaatatacgagaaactgcaaaacaattttttgcactcccagaagaggaaaagcagaagtatgctcgagctgttaatgaatctgaagggtatggaaatgacagagtagtttcagacaaacaggtccttgactggtcctatcgcctaacacttcgagtttttccagaaacaaaacgaaggctttctctttggccaaaaattcctactgattttagtgagaaattagaggagttttctacgaaagtgaaatcaatgatggaatatctcttgagatgcatggcgaggtcactgaatttggaagagggtagcttcgtggaccagtttggggaacaaccgttgatgctatcgaggttcaacttctatccactttgttctagacctgatttggttcttggcgtcaaacctcatacagatagatcaggaatcacagtcctgttgcaagacaaagaagtggaaggtcttcaagttttgatagatgacaattggatcaatgtccccacaatgcctgatgctcttgttgtcaaccttggcgatcaaatgcagatcatgagtaatggaatattcaagagcataatgcacagggttgtgaccaatacagaaaagctgaggatgtctgtagcaatgtttaatgagccagaggccgagaacgagattggacctgtagaaggtctaatagatgagtcacggccaaggttatacagaaacgttaaaaattatggtgatatcaactacaagtgttatcaagagggaaagattgcactagagactgtcaaaattgcagataactctaatcagaggtgagactgtttcatatttgaattcccaaaagacaagattcatctagaccagccggttggaaagtacattaaagtttttgtaatttaagtcaaaccaatgaactaacagaaaaaaaatatgtatggttctcttactgtgaaaccgtaactagtcatacatttcaatctcgcaaaaaaaaaaaaaaaaagaattcctgcagcccggg

SEQ ID NO: 3326 - protein, 351 aa, Glycine max
  misc_feature (1)..(351): Ceres Seq. ID no. 12582114
MAGNIIASSVPKSVQEMSMDGDEPPSRYVVNGNSFGSKDSSVQFPIPIIDVRLLSSEDELEKLRSALSSAGCFQAIGHGMSSSYLDNIRETAKQFFALPEEEKQKYARAVNESEGYGNDRVVSDKQVLDWSYRLTLRVFPETKRRLSLWPKIPTDFSEKLEEFSTKVKSMMEYLLRCMARSLNLEEGSFVDQFGEQPLMLSRFNFYPLCSRPDLVLGVKPHTDRSGITVLLQDKEVEGLQVLIDDNWINVPTMPDALVVNLGDQMQIMSNGIFKSIMHRVVTNTEKLRMSVAMFNEPEAENEIGPVEGLIDESRPRLYRNVKNYGDINYKCYQEGKIALETVKIADNSNQR

SEQ ID NO: 3327 - protein, 335 aa, Glycine max
  misc_feature (1)..(335): Ceres Seq. ID no. 12582115
MSMDGDEPPSRYVVNGNSFGSKDSSVQFPIPIIDVRLLSSEDELEKLRSALSSAGCFQAIGHGMSSSYLDNIRETAKQFFALPEEEKQKYARAVNESEGYGNDRVVSDKQVLDWSYRLTLRVFPETKRRLSLWPKIPTDFSEKLEEFSTKVKSMMEYLLRCMARSLNLEEGSFVDQFGEQPLMLSRFNFYPLCSRPDLVLGVKPHTDRSGITVLLQDKEVEGLQVLIDDNWINVPTMPDALVVNLGDQMQIMSNGIFKSIMHRVVTNTEKLRMSVAMFNEPEAENEIGPVEGLIDESRPRLYRNVKNYGDINYKCYQEGKIALETVKIADNSNQR

SEQ ID NO: 3328 - protein, 333 aa, Glycine max
  misc_feature (1)..(333): Ceres Seq. ID no. 12582116
MDGDEPPSRYVVNGNSFGSKDSSVQFPIPIIDVRLLSSEDELEKLRSALSSAGCFQAIGHGMSSSYLDNIRETAKQFFALPEEEKQKYARAVNESEGYGNDRVVSDKQVLDWSYRLTLRVFPETKRRLSLWPKIPTDFSEKLEEFSTKVKSMMEYLLRCMARSLNLEEGSFVDQFGEQPLMLSRFNFYPLCSRPDLVLGVKPHTDRSGITVLLQDKEVEGLQVLIDDNWINVPTMPDALVVNLGDQMQIMSNGIFKSIMHRVVTNTEKLRMSVAMFNEPEAENEIGPVEGLIDESRPRLYRNVKNYGDINYKCYQEGKIALETVKIADNSNQR

SEQ ID NO: 3329 - DNA, 1105 bp, Glycine max
  misc_feature (1)..(1105): Ceres Seq. ID no. 12582187
cagctacgtaggccccccccccgaccaagaacctggattttataaggaaaatcagatgactcagtgtgcaacttgttatggaaggggtttaatcgctcataaagatggttctgacactgtatgtgtgaaatgtaatggcaagggaaagattccttgtgtaacatgtggatctcgtggactaattcagtgtgcaacatgtaatggaagtggttctcttctagcacgcaatctggccattattcgatggaagacactttcaactcggaaagtaaatgcaacaagtggagcagcatcagtaccggatgaagttttccatagatccaaaggggttcaattgtgcaacactcaagcataccaatgcactccagccttttttgctgattcttattttctcaacaaattctcttctgatgtcattgcagaaagagctcaagtgcctgccactgcaagggtcatatgtgaaaggcatgcaatctcagttgtgccagtaactcgtgtcaccatggctcatcgtcgacaatccttcagtttctacattatagaatatggcagagaggtgtatttgaaggattattaccctgctagatattgttggggcctgtgtccttgtttggagtggttgaagttgtaatgttgaaactgttcttcctggcagcattgggcagttgtaaaggtttcatctacacatttgtgagttctgtgtttgttcagtttgataataacaccagcagatttcagggtttgagggctgagcagatgaactttatgatatgaggaaataggttatgcattgataatgtaaaataattttacactgtcatccaattactaatcactatgtattgtaagtttgttaacttttacgataactattttaaaaagtcttatcaatggtgatttctaattggttggttgtagtgtaaagattttataccaacagcgcataactattaaactgttatcatttaatccattggctttatggatcactgctgtgaggttatatttatgaaataaggtcagattcaagttgagtgttaattgtgaattcttgatgttactgtgaattatttaaataaaagacaatccctatcagttttgtctt

SEQ ID NO: 3330 - protein, 209 aa, Glycine max
  misc_feature (1)..(209): Ceres Seq. ID no. 12582188
SYVGPPPDQEPGFYKENQMTQCATCYGRGLIAHKDGSDTVCVKCNGKGKIPCVTCGSRGLIQCATCNGSGSLLARNLAIIRWKTLSTRKVNATSGAASVPDEVFHRSKGVQLCNTQAYQCTPAFFADSYFLNKFSSDVIAERAQVPATARVICERHAISVVPVTRVTMAHRRQSFSFYIIEYGREVYLKDYYPARYCWGLCPCLEWLKL

SEQ ID NO: 3331 - protein, 191 aa, Glycine max
  misc_feature (1)..(191): Ceres Seq. ID no. 12582189
MTQCATCYGRGLIAHKDGSDTVCVKCNGKGKIPCVTCGSRGLIQCATCNGSGSLLARNLAIIRWKTLSTRKVNATSGAASVPDEVFHRSKGVQLCNTQAYQCTPAFFADSYFLNKFSSDVIAERAQVPATARVICERHAISVVPVTRVTMAHRRQSFSFYIIEYGREVYLKDYYPARYCWGLCPCLEWLKL

SEQ ID NO: 3332 - DNA, 2113 bp, Glycine max
  misc_feature (1)..(2113): Ceres Seq. ID no. 12582251
cagctacgtaggccccccccccgagttgttgttgttgtttgtgccgcgaaagagaaggcaagcaaaaaaggtgatcctgggcgtacaagaccataacaccaccttccagctcactctccataaaccctaacgcttcgtctagggtttcgctgaattccccaattttcccaacccccgaccggacatgctccttctccgatggccgtcgtaactagcaacggcaagcgccgccaacattggccctccgcgaattaccactttccatctcccaattccaaaagacccagacttccaacaatgtcccaaaaccacgcgcaatccgtgttatcctccagtagtatcatttctagaatttctacgtaccccgaaaccaagccacccctccatagggaggttcacgccccgtgtagaccacgtaagtttgattctcctgccttcaatagaagtgctcattattatcgcaaggaagagattagtcacgatgtgggcaacttgttaagtaaaaattaccaaagggcgaaaaattccgcgttagctagcattaggtttggggaaaagggcaaggaggtgatagaagtggatgctgatagttccaaggatatggtttcggaggaggattcgagtgtggaagaggttcgttttgtggaagaagatggacgagaagtgcgctccgtggtgacggagcacaagtggcaagagggtgatttggttgtgactgaggttaaggatttggatgctaaggatatgtgtggtggccctcagcagcagtcaacttcatccgtggtttctgagttgactaatggtgatctgaatgtggttaatgctgagaagatgttggacattctttctttgactccggatcatgatctttcctccgttcaagcctacaagaagttgctcgatgctcttggccagcgaacggatacccttaacaggctggaggctgaaattaaagttaacgagaagcgtatgtccacgtttgaattgttgcgcccgaagaaggaactagtagaggaagttccattggaaccttttattcctcttactaaagaggaagaagttgaggttgcacatgccttttctaccaaccggaaaaagatcttggtttcccatgagaaatctggcattgagatctcgggagaaaagtttcaatgccttagaccgggtgcatggttaaacgatgaggtaataaatgtgtaccttgaattgctgaaagagagggagagaagagagccacagaagtttctgaactgtcattttttcagtacctttttctacaagaggttaataagtggcaagaatgggtatgatttcaaatctgtgaggagatggaccagccaaaagaaattgggatatggcctacatgaatgtgataaaatatttgttcctatccataaagagattcattggtgcttggctgttatcaataagaaagataagaaatttcagtatctggactcactaagaggaacagatgcccaagtaatgaaagttctggctagctatattgtagatgaagtaaaggacaagactggaaaagatattgatgtaagttcttggaaaaaagaatttgttgaagaccttcctgagcagcagaacgggtatgattgtggggtgtttatgatcaaatatgccgacttctatagcagaaacttggggctatgtttcaaccaggaacacatgtcttactttcggcgcagaacagctaaagaaatcttgagattaaaagctaactaagcaaaagaatattcatttgtatttccatattggattttggtcatcagaaattgaaacaatcattaatgtaaaatcagtagagcactttttgatgaaggatccttcactcctgtcactatctcgaccttaaccattcaaaagttctggcatttgttagattgtggactggactgattatacatatcatcccgatatccaggtacaccatgttggtagtgtagtgtgtagtgggttgtatatgctacgcaaaggtgaaatcatagatgagatgaggcattaggttgtggttttaattatgtaatcataaatgtgctccctcaccttttttggtgtctggttactaaaaaaaaaaaaaaaagaaaaaaaaaaaaaaaaa

SEQ ID NO: 3333 - protein, 512 aa, Glycine max
  misc_feature (1)..(512): Ceres Seq. ID no. 12582252
MAVVTSNGKRRQHWPSANYHFPSPNSKRPRLPTMSQNHAQSVLSSSSIISRISTYPETKPPLHREVHAPCRPRKFDSPAFNRSAHYYRKEEISHDVGNLLSKNYQRAKNSALASIRFGEKGKEVIEVDADSSKDMVSEEDSSVEEVRFVEEDGREVRSVVTEHKWQEGDLVVTEVKDLDAKDMCGGPQQQSTSSVVSELTNGDLNVVNAEKMLDILSLTPDHDLSSVQAYKKLLDALGQRTDTLNRLEAEIKVNEKRMSTFELLRPKKELVEEVPLEPFIPLTKEEEVEVAHAFSTNRKKILVSHEKSGIEISGEKFQCLRPGAWLNDEVINVYLELLKERERREPQKFLNCHFFSTFFYKRLISGKNGYDFKSVRRWTSQKKLGYGLHECDKIFVPIHKEIHWCLAVINKKDKKFQYLDSLRGTDAQVMKVLASYIVDEVKDKTGKDIDVSSWKKEFVEDLPEQQNGYDCGVFMIKYADFYSRNLGLCFNQEHMSYFRRRTAKEILRLKAN

SEQ ID NO: 3334 - protein, 479 aa, Glycine max
  misc_feature (1)..(479): Ceres Seq. ID no. 12582253
MSQNHAQSVLSSSSIISRISTYPETKPPLHREVHAPCRPRKFDSPAFNRSAHYYRKEEISHDVGNLLSKNYQRAKNSALASIRFGEKGKEVIEVDADSSKDMVSEEDSSVEEVRFVEEDGREVRSVVTEHKWQEGDLVVTEVKDLDAKDMCGGPQQQSTSSVVSELTNGDLNVVNAEKMLDILSLTPDHDLSSVQAYKKLLDALGQRTDTLNRLEAEIKVNEKRMSTFELLRPKKELVEEVPLEPFIPLTKEEEVEVAHAFSTNRKKILVSHEKSGIEISGEKFQCLRPGAWLNDEVINVYLELLKERERREPQKFLNCHFFSTFFYKRLISGKNGYDFKSVRRWTSQKKLGYGLHECDKIFVPIHKEIHWCLAVINKKDKKFQYLDSLRGTDAQVMKVLASYIVDEVKDKTGKDIDVSSWKKEFVEDLPEQQNGYDCGVFMIKYADFYSRNLGLCFNQEHMSYFRRRTAKEILRLKAN

SEQ ID NO: 3335 - protein, 378 aa, Glycine max
  misc_feature (1)..(378): Ceres Seq. ID no. 12582254
MVSEEDSSVEEVRFVEEDGREVRSVVTEHKWQEGDLVVTEVKDLDAKDMCGGPQQQSTSSVVSELTNGDLNVVNAEKMLDILSLTPDHDLSSVQAYKKLLDALGQRTDTLNRLEAEIKVNEKRMSTFELLRPKKELVEEVPLEPFIPLTKEEEVEVAHAFSTNRKKILVSHEKSGIEISGEKFQCLRPGAWLNDEVINVYLELLKERERREPQKFLNCHFFSTFFYKRLISGKNGYDFKSVRRWTSQKKLGYGLHECDKIFVPIHKEIHWCLAVINKKDKKFQYLDSLRGTDAQVMKVLASYIVDEVKDKTGKDIDVSSWKKEFVEDLPEQQNGYDCGVFMIKYADFYSRNLGLCFNQEHMSYFRRRTAKEILRLKAN

SEQ ID NO: 3336 - DNA, 895 bp, Glycine max
  misc_feature (1)..(895): Ceres Seq. ID no. 12582347
cagctacgtaggcccccccccccttgaatcagtatgtttccttgaaaaagcttgctccttaccaggaggaggaatggaaactaagcaaacagaaaagatacatgctgaagatgagggctaaggagctccttcgcacatcaagtttggataagaagaaaaggaagaagtcaaaggttgattctggcaagataacttcatcaaaaagtgttgtggagaacgaaaaaccaagcacagaagaatcaaatattaatagggataatctatcaaggaaagccaagagaaggcggcaagtggctaatttgaaattatcacaatcgaggcttaaagcatatgggaagattccctcaaaatctaagcatggaggaaagcactgaaagctgtcactgatatatgcagaaggaaccaactaaccgaggaacttacgatcttagaacagatttggagcttactattgcaaattactgtgccgtggatcatggatgtgtttgcctaagtgtttttgtggagagaagttttagttgtctttatgttttctcaaaatgaagtttcttagagtctatggaatttcttagcatacaattacaaactgtcaattggacaagcaatgttgaccaaaagttggtgctcgtctctgttttcaatattgcatgtactcatttagaattagtgctttagtatttgcttgtcttgcggaatctcactatttgcaataagttgcaactgtttctacaacttcattgagctcaattgatgttcttgccatatatattaggcatgggatcaaaaaaaaaaaaaaaaatttcctgcaccccggggaatccattatttctaaagcggccgcccccgcggggaactcccactttttgtccctttaagggagggtaatttccaagtt

SEQ ID NO: 3337 - protein, 90 aa, Glycine max
  misc_feature (1)..(90): Ceres Seq. ID no. 12582348
MLKMRAKELLRTSSLDKKKRKKSKVDSGKITSSKSVVENEKPSTEESNINRDNLSRKAKRRRQVANLKLSQSRLKAYGKIPSKSKHGGKH

SEQ ID NO: 3338 - protein, 87 aa, Glycine max
  misc_feature (1)..(87): Ceres Seq. ID no. 12582349
MRAKELLRTSSLDKKKRKKSKVDSGKITSSKSVVENEKPSTEESNINRDNLSRKAKRRRQVANLKLSQSRLKAYGKIPSKSKHGGKH

SEQ ID NO: 3339 - protein, 50 aa, Glycine max
  misc_feature (1)..(50): Ceres Seq. ID no. 12582350
MQKEPTNRGTYDLRTDLELTIANYCAVDHGCVCLSVFVERSFSCLYVFSK

SEQ ID NO: 3340 - DNA, 867 bp, Glycine max
  misc_feature (1)..(867): Ceres Seq. ID no. 12582729
acacttttccagatctagcattccgttcccgttccgttcaaacagtttgtctttctcacatacactttcttcctttgtttgtcaccgcagtttcaatctcagatccaacattgttcagtccaaattcaacgcattccatggcaaatcctgcatccgcaagattctccgttcttattcttctcgtttctttgctagtcaacatcgccgccaccgccgccaccgccgccgaatcgccagctccgactccgacgccggattttcctccgtcgtcttctcctccttttccttctcctgcttcgaatccttccacggccaattttccgccatctccaactccggcgccttctcatcactcgccgccggctccttcgcctagtagcaatccttctccgtctccggctccggctccagtggatgatgcacatgacggagttagccacgccggcgtggacggcagcgacggaaaatcgtcctcctccggcggaatgagttccggcaagaaagcgggaatagcgttgggagttatcatcggtgccggagtggttgtgttgggagcgctggtgtacaagaggcgccgccagaacattcaacggtctcagtacggatacgcagccaggagagaacttctgtaggttataaacattcagtaatattctcggtagtttttttttttgtttctaatttcaattgcattatagagaattcgtgatctctgaatttcaatttcaaaattcattttacaaattactacaaatttgttttgttcctcctagtcctagctagtagcaaaatataggttgttcaaaaattatccattcgtgtattgaattttggctattctttggtctattgcccagggaatcctct

SEQ ID NO: 3341 - protein, 209 aa, Glycine max
  misc_feature (1)..(209): Ceres Seq. ID no. 12582730
TFPDLAFRSRSVQTVCLSHIHFLPLFVTAVSISDPTLFSPNSTHSMANPASARFSVLILLVSLLVNIAATAATAAESPAPTPTPDFPPSSSPPFPSPASNPSTANFPPSPTPAPSHHSPPAPSPSSNPSPSPAPAPVDDAHDGVSHAGVDGSDGKSSSSGGMSSGKKAGIALGVIIGAGVVVLGALVYKRRRQNIQRSQYGYAARRELL

SEQ ID NO: 3342 - protein, 164 aa, Glycine max
  misc_feature (1)..(164): Ceres Seq. ID no. 12582731
MANPASARFSVLILLVSLLVNIAATAATAAESPAPTPTPDFPPSSSPPFPSPASNPSTANFPPSPTPAPSHHSPPAPSPSSNPSPSPAPAPVDDAHDGVSHAGVDGSDGKSSSSGGMSSGKKAGIALGVIIGAGVVVLGALVYKRRRQNIQRSQYGYAARRELL

SEQ ID NO: 3343 - protein, 124 aa, Glycine max
  misc_feature (1)..(124): Ceres Seq. ID no. 12582732
HFSRSSIPFPFRSNSLSFSHTLSSFVCHRSFNLRSNIVQSKFNAFHGKSCIRKILRSYSSRFFASQHRRHRRHRRRIASSDSDAGFSSVVFSSFSFSCFESFHGQFSAISNSGAFSSLAAGSFA

SEQ ID NO: 3344 - DNA, 520 bp, Glycine max
  misc_feature (1)..(520): Ceres Seq. ID no. 12582751
attggtgatttgttttgttacattggtctggaatctgaagatggttgttcattgttaggcattgaggtttctgagcattgattttgatttggtggagaaagatgaaggatttctgtgggacacctggcactgttcttgggcttgttcttaggatgtcacagttcgtttttgctgctgggtctattgcttccatggctaccacaatcagtttctttaatttgactgccttttgggtgactgatgtggcagtataatactgaatagaatgaccgcagctaggtagaaactaggctcatggtcgagatgaacaagggtgtttgcaaaggatggagatcttcagtgagatctcaatggaatgggactgtgatatagctcctgaattctgattatcaaccattcaactttattgttttctattcaagtctatgttcttgcttctctagactgtaataaaaacatgttactcatgaaatattttgcttttgattgagtggtgcttctcgtgccggcttctcgtatc

SEQ ID NO: 3345 - protein, 50 aa, Glycine max
  misc_feature (1)..(50): Ceres Seq. ID no. 12582752
MKDFCGTPGTVLGLVLRMSQFVFAAGSIASMATTISFFNLTAFWVTDVAV

SEQ ID NO: 3346 - protein, 33 aa, Glycine max
  misc_feature (1)..(33): Ceres Seq. ID no. 12582753
MSQFVFAAGSIASMATTISFFNLTAFWVTDVAV

SEQ ID NO: 3347 - DNA, 674 bp, Glycine max
  misc_feature (1)..(674): Ceres Seq. ID no. 12582898
gaagaaggggtaaagaggggatatgaaatagggatctggtgagggtggaggcgagggttggttcatttgatctgcgagtggagaagagaatcgtgatgggaggaggacacggtcacggcaccacctacaaaggagttaccgttcatcacccaaagcgctggcacactatcaccggcaagggtttgtgcgcggtcatgtggttttgggtattctacagggcaaagcaagacggtcctgttgtattgggctggaggcatccttgggagggtcatcacgatgatcatggcaagggccattaagcattccttaggtatgagctccaagaacaggaagaacagaatttgaagtgtctgttgctgtgggtgtgctgttagttgaaatgtttactttgatcaattcaataaatttggctgtaaaataagagatttctttttgcgtggtttcatgagcattagatatgattgtgcatgttacctgttaactgggatcaaagtcatgtctatgtttggttggattattaaccatttcgtcgcttttcttagaaatttatgggagttgactcaatgtgtgtgtcaactatgatagacgtgtgtccgccagttaacaaaatgttgtagtgctctccgtttgtgctaacctatgcttaattgttttaatgggagcataatttgttc

SEQ ID NO: 3348 - protein, 67 aa, Glycine max
  misc_feature (1)..(67): Ceres Seq. ID no. 12582899
MGGGHGHGTTYKGVTVHHPKRWHTITGKGLCAVMWFWVFYRAKQDGPVVLGWRHPWEGHHDDHGKGH

SEQ ID NO: 3349 - protein, 45 aa, Glycine max
  misc_feature (1)..(45): Ceres Seq. ID no. 12582900
MSIRYDCACYLLTGIKVMSMFGWIINHFVAFLRNLWELTQCVCQL

SEQ ID NO: 3350 - protein, 34 aa, Glycine max
  misc_feature (1)..(34): Ceres Seq. ID no. 12582901
MWFWVFYRAKQDGPVVLGWRHPWEGHHDDHGKGH

SEQ ID NO: 3351 - DNA, 1296 bp, Glycine max
  misc_feature (1)..(1296): Ceres Seq. ID no. 12583314
aatgactggcattcaagttagcttagctatgatgaatgaagaggagtatagatggtcaacgtttttggtaagcaactagtaattaagcaagcaagaatcacaaattggaaccatgtttctcaaatgttttggcttcggcgctcagagacagtatccaacggtgatagaagagttgtgccatcgattttctctcgcagatctaaggaaatcaaccaacaatttcgatcaaaacacagtaattgatcgtggaggatgtggcagagtatataaaggttgtctccagcacaatgaacatgcttctgatacagtcgctgtaaagcgattgggaatgggaaatgaagagttgttcaggaatgaaatagagttactctgtcagcttcgtcaccctaatttggtctctcttataggattctgcaacgaccaaaaagagaagattattgtgtacgagtacttgtccaatggatctcttgatcaacttctacaaagtggggtactgtcatggaagaaaagactagagatatgcataggagcagcgcgtggactacactaccttcacgctggagccaaacgcaccatcattcaccgtgacatcaaacccagcaacattcttttggatgataacatggagccaaaactcgcaggtttcagccttagcgtactgggaccgcgttttaagtcaaaacccaaaccaattaaagtagattctgttttgggtacttatggctacctggctgcggagcatctcaaggacctcaccgtcacagataaaactgatgtttactcatttggtatggttctacttgatgttgtgtgtggagggaaatatttcatgaagtcaattaaaacggaatttctggaaaaacctcttgaggagaaaattgatggaattatcgaaggaagtatcgcaccagagtgttggcaagtcttcatagatatcatccgaaagtgcgtgaaatatgaagcacatgagcgaccaacaatgggtgaagtagaggtagaacttgagcatgctctgtcgttgcaggaacaagcagatatcacaaacaacattaaccaacaatgggtgaaattggaagcagatgagcgaccaacaatgggtgaagtaaaggtagaacttgagcatgctctgtccttacaagcactagcagatagagtaaacaccaactgtcgttataccttaatgtccaaaaccgttattaatccctggctcaaagagtcacaagattctgaataaagtattgaaatccataggtgatttgattaggtaagctgaaattaaggttagtgttttgagtc

SEQ ID NO: 3352 - protein, 373 aa, Glycine max
  misc_feature (1)..(373): Ceres Seq. ID no. 12583315
MFLKCFGFGAQRQYPTVIEELCHRFSLADLRKSTNNFDQNTVIDRGGCGRVYKGCLQHNEHASDTVAVKRLGMGNEELFRNEIELLCQLRHPNLVSLIGFCNDQKEKIIVYEYLSNGSLDQLLQSGVLSWKKRLEICIGAARGLHYLHAGAKRTIIHRDIKPSNILLDDNMEPKLAGFSLSVLGPRFKSKPKPIKVDSVLGTYGYLAAEHLKDLTVTDKTDVYSFGMVLLDVVCGGKYFMKSIKTEFLEKPLEEKIDGIIEGSIAPECWQVFIDIIRKCVKYEAHERPTMGEVEVELEHALSLQEQADITNNINQQWVKLEADERPTMGEVKVELEHALSLQALADRVNTNCRYTLMSKTVINPWLKESQDSE

SEQ ID NO: 3353 - protein, 301 aa, Glycine max
  misc_feature (1)..(301): Ceres Seq. ID no. 12583316
MGNEELFRNEIELLCQLRHPNLVSLIGFCNDQKEKIIVYEYLSNGSLDQLLQSGVLSWKKRLEICIGAARGLHYLHAGAKRTIIHRDIKPSNILLDDNMEPKLAGFSLSVLGPRFKSKPKPIKVDSVLGTYGYLAAEHLKDLTVTDKTDVYSFGMVLLDVVCGGKYFMKSIKTEFLEKPLEEKIDGIIEGSIAPECWQVFIDIIRKCVKYEAHERPTMGEVEVELEHALSLQEQADITNNINQQWVKLEADERPTMGEVKVELEHALSLQALADRVNTNCRYTLMSKTVINPWLKESQDSE

SEQ ID NO: 3354 - protein, 203 aa, Glycine max
  misc_feature (1)..(203): Ceres Seq. ID no. 12583317
MEPKLAGFSLSVLGPRFKSKPKPIKVDSVLGTYGYLAAEHLKDLTVTDKTDVYSFGMVLLDVVCGGKYFMKSIKTEFLEKPLEEKIDGIIEGSIAPECWQVFIDIIRKCVKYEAHERPTMGEVEVELEHALSLQEQADITNNINQQWVKLEADERPTMGEVKVELEHALSLQALADRVNTNCRYTLMSKTVINPWLKESQDSE

SEQ ID NO: 3355 - DNA, 1137 bp, Glycine max
  misc_feature (1)..(1137): Ceres Seq. ID no. 12583413
acacaaacatctctctctctctctctctctctctctctctctaagacacacaaacacaacaaacacatcacaatctcacactgttctcaagtttcaacactttctagttctaccatggcggtaggactctccgccgccataaccatgaagtccctcctccgtttccaccaacctcacctgaacctccccaaatcaatcccaacaacactccctttctcccccatgagaattttccaccacacagcatcaccaagaacccaaaaagtttcaactttcaccgtttgtgtcctcatgcaggacccaaaacaaggcacccacatggaaattgagccacaagaacaatctcctcctcctcctcctcctcccgctcaacaagttctgtcaccaaagttggctgagaaattggccagaaaagagtctgagaggttcacttaccttgttgctgcggtcatgtctagcttcggcatcacatccatggcagtgttcgctgtttattgcagattctcgtggcaaatggagggtggagaagtgccttggtctgaaatgtttggcacatttgctctatcagtgggagctgctgtgggtatggaattttgggctagatgggctcatagggctctctggcatgcttcgctgtggcacatgcatgagtcccaccatcgaccaagagaaggacccttcgagcttaacgatgtatttgcaataatcaacgctgtccctgccatcgctctcctttcctatggtttctttaacaagggactggtccctggcctttgctttggtgcgggtcttggaattacggtctttgggatggcctacatgtttgtacacgatggattggttcataagagattcccggtgggccccattgcaaacgtgccctatctcagaagggtggcctctgctcaccaacttcaccattcggaaaaattcaatggagtgccatatgggctgtttttgggacccaaggaaattgaagaggtgggagggctagaagagctggagaaagagataagtaggagagcaagatcatacaaaatagctaatgagaacaactaatacaaatccagaatgtttcgaagaattatcagtgtaaatcagaaatatgaaataaaatgatccaaaaattttgcttgc

SEQ ID NO: 3356 - protein, 352 aa, Glycine max
  misc_feature (1)..(352): Ceres Seq. ID no. 12583414
TQTSLSLSLSLSLSKTHKHNKHITISHCSQVSTLSSSTMAVGLSAAITMKSLLRFHQPHLNLPKSIPTTLPFSPMRIFHHTASPRTQKVSTFTVCVLMQDPKQGTHMEIEPQEQSPPPPPPPAQQVLSPKLAEKLARKESERFTYLVAAVMSSFGITSMAVFAVYCRFSWQMEGGEVPWSEMFGTFALSVGAAVGMEFWARWAHRALWHASLWHMHESHHRPREGPFELNDVFAIINAVPAIALLSYGFFNKGLVPGLCFGAGLGITVFGMAYMFVHDGLVHKRFPVGPIANVPYLRRVASAHQLHHSEKFNGVPYGLFLGPKEIEEVGGLEELEKEISRRARSYKIANENN

SEQ ID NO: 3357 - protein, 314 aa, Glycine max
  misc_feature (1)..(314): Ceres Seq. ID no. 12583415
MAVGLSAAITMKSLLRFHQPHLNLPKSIPTTLPFSPMRIFHHTASPRTQKVSTFTVCVLMQDPKQGTHMEIEPQEQSPPPPPPPAQQVLSPKLAEKLARKESERFTYLVAAVMSSFGITSMAVFAVYCRFSWQMEGGEVPWSEMFGTFALSVGAAVGMEFWARWAHRALWHASLWHMHESHHRPREGPFELNDVFAIINAVPAIALLSYGFFNKGLVPGLCFGAGLGITVFGMAYMFVHDGLVHKRFPVGPIANVPYLRRVASAHQLHHSEKFNGVPYGLFLGPKEIEEVGGLEELEKEISRRARSYKIANENN

SEQ ID NO: 3358 - protein, 304 aa, Glycine max
  misc_feature (1)..(304): Ceres Seq. ID no. 12583416
MKSLLRFHQPHLNLPKSIPTTLPFSPMRIFHHTASPRTQKVSTFTVCVLMQDPKQGTHMEIEPQEQSPPPPPPPAQQVLSPKLAEKLARKESERFTYLVAAVMSSFGITSMAVFAVYCRFSWQMEGGEVPWSEMFGTFALSVGAAVGMEFWARWAHRALWHASLWHMHESHHRPREGPFELNDVFAIINAVPAIALLSYGFFNKGLVPGLCFGAGLGITVFGMAYMFVHDGLVHKRFPVGPIANVPYLRRVASAHQLHHSEKFNGVPYGLFLGPKEIEEVGGLEELEKEISRRARSYKIANENN

SEQ ID NO: 3359 - DNA, 1256 bp, Glycine max
  misc_feature (1)..(1256): Ceres Seq. ID no. 12583421
aaaaaaaatcatgagccgcgtcaaatcacatcactgccaattcgaaatttccaatttcacagaacttttgttgcattgatctccgattttgttttccaacgcttcttcgtattctcaccaatctcaaatggcttctatctcccttcttctcgccctgttcgtgttcttcctaattgccacttctcttaccgaaagtaggaaggaattaaggaacaagcaggaaactgcattacagatgttagagcgctcaattcatttttccaacagaattaatccatcacgtgttgtccaaatctcttggcaaccaagggtttttctatacaaagggtttttgtcggacaaggagtgtgactaccttgtttctttggcatatgctgtgaaagaaaaatcctcagggaatggtggcctttcagagggggttgaaacttccttggatatggaagatgatattcttgcaaggattgaagaaagactttcagtttgggctttccttcctaaagagtacagcaagcctttgcaggtcatgcattatgggcctgagcagaatggtcggaacttagattattttacaaacaaaacccaattagaattaagtggacctttaatggcaacaattattttatatctctcaaatgatgttactcaagggggtcaaattctttttcctgaatcattgcctgggagtagcagctggtcaagttgtagtaatagcagcaatattctccaaccagtaaaagggaatgcaattctgtttttctctcttcacccaagtgcttctcctgacaagagtagcttccatgctagatgccctgtccttgagggtgatatgtggtctgcaattaaatacttctatgcaaaaccaattagtagaggtaaagtctcagccacattagatggtggtgaatgcactgatgaagatgacagttgtcccgcttgggcagccgtgggagaatgtcaacgaaaccctgtgttcatgattggatctcctgattattatggtacatgtaggaaaagttgtaatgcatgctgatcacaagttgattttacttttacactttttgtttatataattattctccctagagaaatacatgtggaattatcaattgctttttttaaaaatttcctcaagttcttttgagctgcacatcaaaaggtgctggaaatagtgtataggaaattagaacttgacacgatttagatttcaatttgatgtaatttttttgaatattcttttagtgatgtattgagtgttg

SEQ ID NO: 3360 - protein, 300 aa, Glycine max
  misc_feature (1)..(300): Ceres Seq. ID no. 12583422
MASISLLLALFVFFLIATSLTESRKELRNKQETALQMLERSIHFSNRINPSRVVQISWQPRVFLYKGFLSDKECDYLVSLAYAVKEKSSGNGGLSEGVETSLDMEDDILARIEERLSVWAFLPKEYSKPLQVMHYGPEQNGRNLDYFTNKTQLELSGPLMATIILYLSNDVTQGGQILFPESLPGSSSWSSCSNSSNILQPVKGNAILFFSLHPSASPDKSSFHARCPVLEGDMWSAIKYFYAKPISRGKVSATLDGGECTDEDDSCPAWAAVGECQRNPVFMIGSPDYYGTCRKSCNAC

SEQ ID NO: 3361 - protein, 264 aa, Glycine max
  misc_feature (1)..(264): Ceres Seq. ID no. 12583423
MLERSIHFSNRINPSRVVQISWQPRVFLYKGFLSDKECDYLVSLAYAVKEKSSGNGGLSEGVETSLDMEDDILARIEERLSVWAFLPKEYSKPLQVMHYGPEQNGRNLDYFTNKTQLELSGPLMATIILYLSNDVTQGGQILFPESLPGSSSWSSCSNSSNILQPVKGNAILFFSLHPSASPDKSSFHARCPVLEGDMWSAIKYFYAKPISRGKVSATLDGGECTDEDDSCPAWAAVGECQRNPVFMIGSPDYYGTCRKSCNAC

SEQ ID NO: 3362 - protein, 197 aa, Glycine max
  misc_feature (1)..(197): Ceres Seq. ID no. 12583424
MEDDILARIEERLSVWAFLPKEYSKPLQVMHYGPEQNGRNLDYFTNKTQLELSGPLMATIILYLSNDVTQGGQILFPESLPGSSSWSSCSNSSNILQPVKGNAILFFSLHPSASPDKSSFHARCPVLEGDMWSAIKYFYAKPISRGKVSATLDGGECTDEDDSCPAWAAVGECQRNPVFMIGSPDYYGTCRKSCNAC

SEQ ID NO: 3363 - DNA, 745 bp, Glycine max
  misc_feature (1)..(745): Ceres Seq. ID no. 12583666
aaataggaagaagttctccatttgggcttatgaagagtttgagaaaggtaacataagtggaattttggacaaaaggctagctaaccaagaagttgatatggagcaagtaagaagagcaattcaggcaagcttttggtgcatccaagagcagccatctcacagaccaacaatgagcagagtgctacaaatgcttgaaggggtaacagagcctgaaaggccacctgccccaaaatcagtgatggaaggagctgttagtggaaccagcacatacctgagtagcaatgccagtgcattctcagtcggagtttcaccccctggtccctcttcttcatcatcatttcagactagtgctgtttcaaccttcacctcaggaaggaaccttgagaagacaacctcatcccttttacaatcagacacatgacagaaattgcttccttttttcctttttcatactttcaattagaatcggttcaaagtcacattcacttgggacttggtgctggaacagcagaagtaaaagctttgcttgtaaagccgtgtattttatttttttggtaagagccataggtatcattcaaataatgcaacccttctcgaggtagaactagtatgaatgacaaatttcttcttctgtgtataatatgatattgattgtatactgagtttatttttcttttctttaccctgatcattgtatactcattcaaaacaagagattgcaaagttgtagtaattatttgtattc

SEQ ID NO: 3364 - protein, 139 aa, Glycine max
  misc_feature (1)..(139): Ceres Seq. ID no. 12583667
NRKKFSIWAYEEFEKGNISGILDKRLANQEVDMEQVRRAIQASFWCIQEQPSHRPTMSRVLQMLEGVTEPERPPAPKSVMEGAVSGTSTYLSSNASAFSVGVSPPGPSSSSSFQTSAVSTFTSGRNLEKTTSSLLQSDT

SEQ ID NO: 3365 - protein, 107 aa, Glycine max
  misc_feature (1)..(107): Ceres Seq. ID no. 12583668
MEQVRRAIQASFWCIQEQPSHRPTMSRVLQMLEGVTEPERPPAPKSVMEGAVSGTSTYLSSNASAFSVGVSPPGPSSSSSFQTSAVSTFTSGRNLEKTTSSLLQSDT

SEQ ID NO: 3366 - protein, 106 aa, Glycine max
  misc_feature (1)..(106): Ceres Seq. ID no. 12583669
MPVHSQSEFHPLVPLLHHHFRLVLFQPSPQEGTLRRQPHPFYNQTHDRNCFLFSFFILSIRIGSKSHSLGTWCWNSRSKSFACKAVYFIFLVRAIGIIQIMQPFSR

SEQ ID NO: 3367 - DNA, 454 bp, Glycine max
  misc_feature (1)..(454): Ceres Seq. ID no. 12583678
aagcattctcaaccatgaactcgtctccgtcttcttcccagttaccttcatcaagcgctgattttgacaagtttaatagtttgccgcgcttccgcccacttgaatgcttgcaagggaacccggttccggcgttcctgtccaagactttcgaactcgtcgacgatccctcgctggatccgatcatatcctggggctccaccggtgttagcttcgtggtgtgggatcctaccctgtttgcaagacacgtcttgccgaggaatttcaagcataacaatttctccagttttgttcgccagttaaatacctatgtgggtactctatgtatttttattttattttttatgtttctattgtaagtttgtaactggtttgatttgatgaagatcaaccatgtgtaattatttgatttgagacattgttttgtcaactgggaatgaacttttttttctttttc

SEQ ID NO: 3368 - protein, 117 aa, Glycine max
  misc_feature (1)..(117): Ceres Seq. ID no. 12583679
AFSTMNSSPSSSQLPSSSADFDKFNSLPRFRPLECLQGNPVPAFLSKTFELVDDPSLDPIISWGSTGVSFVVWDPTLFARHVLPRNFKHNNFSSFVRQLNTYVGTLCIFILFFMFLL

SEQ ID NO: 3369 - protein, 113 aa, Glycine max
  misc_feature (1)..(113): Ceres Seq. ID no. 12583680
MNSSPSSSQLPSSSADFDKFNSLPRFRPLECLQGNPVPAFLSKTFELVDDPSLDPIISWGSTGVSFVVWDPTLFARHVLPRNFKHNNFSSFVRQLNTYVGTLCIFILFFMFLL

SEQ ID NO: 3370 - DNA, 645 bp, Glycine max
  misc_feature (1)..(645): Ceres Seq. ID no. 12583682
cacaagcaaagcataaacattactgatagttctcatccacaacacaatgatttccaatcccatgttaatgttactagttgtggtactgctggtggttggttttgcaaagtcagatttaagtaaggacagagaagaatgtgcagacaaactaattgacctagctagctgtgttccttacgttggtggtgaagccaaaacccccaccatagattgctgcactggtctcaaagcggttcttgaccggagcaagaaatgcctctgcatcctcatcaaagatcgcgacgaccccaatcttggcatcaagatcaatgctactctcgctattcagctaccctctgcttgccactcacctgctaatattactcagtgtgtagatcttttgcatttagcacctaactctcctgatgctaaggtgtttgagggattccaaaaatctgccaaaacaaacagctccaccccagtttcagtttccagtggtgctgagaagggatcaagctcaagtgctcaggaaaagagtggtgctgtctccacaattacaaaggcgcaccacctgttttactctatcttaccattaccattattatttcttgtttgaaccaccatcaagcttgcttgcttcatctatttctagctattattgtgtgc

SEQ ID NO: 3371 - protein, 182 aa, Glycine max
  misc_feature (1)..(182): Ceres Seq. ID no. 12583683
MISNPMLMLLVVVLLVVGFAKSDLSKDREECADKLIDLASCVPYVGGEAKTPTIDCCTGLKAVLDRSKKCLCILIKDRDDPNLGIKINATLAIQLPSACHSPANITQCVDLLHLAPNSPDAKVFEGFQKSAKTNSSTPVSVSSGAEKGSSSSAQEKSGAVSTITKAHHLFYSILPLPLLFLV

SEQ ID NO: 3372 - protein, 177 aa, Glycine max
  misc_feature (1)..(177): Ceres Seq. ID no. 12583684
MLMLLVVVLLVVGFAKSDLSKDREECADKLIDLASCVPYVGGEAKTPTIDCCTGLKAVLDRSKKCLCILIKDRDDPNLGIKINATLAIQLPSACHSPANITQCVDLLHLAPNSPDAKVFEGFQKSAKTNSSTPVSVSSGAEKGSSSSAQEKSGAVSTITKAHHLFYSILPLPLLFLV

SEQ ID NO: 3373 - protein, 175 aa, Glycine max
  misc_feature (1)..(175): Ceres Seq. ID no. 12583685
MLLVVVLLVVGFAKSDLSKDREECADKLIDLASCVPYVGGEAKTPTIDCCTGLKAVLDRSKKCLCILIKDRDDPNLGIKINATLAIQLPSACHSPANITQCVDLLHLAPNSPDAKVFEGFQKSAKTNSSTPVSVSSGAEKGSSSSAQEKSGAVSTITKAHHLFYSILPLPLLFLV

SEQ ID NO: 3374 - DNA, 794 bp, Glycine max
  misc_feature (1)..(794): Ceres Seq. ID no. 12583773
gacacgaaacacgcagaagtgttgtggcattcggtagataaaaatctctcgaaacataggcttataaaatgccaaagattgggccattttggtaatttcatgttacaagatatgttttctgcgttccccttttgcctatataaatgctagtatgtagagtgagcaagtcactaactcaattagaattcttcaaaaaactctagaatttgcatgcactgttcttcatacaatggcattacgcgagcttattgtgatggggttattgctgctggtttgtcttgcaaaggtttcatctgatgttaacatagaaaaggagcaagatgaagaatttcgctttcctgttgaccatcttatcgtgagaggcgggaacagaaggctaatgcaggacatagattgtggaggattgtgcaagacaaggtgcagtgcccattcaaggccaaatgtgtgcaacagggcttgtggcacatgttgtgtgaggtgcaagtgtgttccacctggaacttccggcaacagggagctttgtgggacctgctatactgatatgaccacccatggtaacaagaccaagtgcccgtaaagcccatagaaggtgagccctatccaattgggcccttcacacacctagctaatcacaccaagcaaagctagcatagtttagtaaataataaatgtgttatctacacttttgtagatttggatttgtcatctttaagatgtgttctagtttttatctttgttataaaggtatggtactatatgaatcaagtatataaactttgcgcttagattactcc

SEQ ID NO: 3375 - protein, 115 aa, Glycine max
  misc_feature (1)..(115): Ceres Seq. ID no. 12583774
MALRELIVMGLLLLVCLAKVSSDVNIEKEQDEEFRFPVDHLIVRGGNRRLMQDIDCGGLCKTRCSAHSRPNVCNRACGTCCVRCKCVPPGTSGNRELCGTCYTDMTTHGNKTKCP

SEQ ID NO: 3376 - protein, 107 aa, Glycine max
  misc_feature (1)..(107): Ceres Seq. ID no. 12583775
MGLLLLVCLAKVSSDVNIEKEQDEEFRFPVDHLIVRGGNRRLMQDIDCGGLCKTRCSAHSRPNVCNRACGTCCVRCKCVPPGTSGNRELCGTCYTDMTTHGNKTKCP

SEQ ID NO: 3377 - protein, 65 aa, Glycine max
  misc_feature (1)..(65): Ceres Seq. ID no. 12583776
MQDIDCGGLCKTRCSAHSRPNVCNRACGTCCVRCKCVPPGTSGNRELCGTCYTDMTTHGNKTKCP

SEQ ID NO: 3378 - DNA, 1375 bp, Glycine max
  misc_feature (1)..(1375): Ceres Seq. ID no. 12607239
gaagagtatgtgactctaccatatgtgttcttatgtgacaaacaccatatgtacctagttcttcacttatcctttttgctggaaagtgtcttcattaaaccattgatgataatttcttatatggaccacacacagaatgtcttgggcaaatggagttcaaaactatttgcaattgctttacttgcctcaggtcaaagttctactataacaggaacatatgcagggcaatatgtcatgcagggatttcttgatttgcgactaaagtcatggattcggaatctgctaactcgttgcttagccattgttcctagtttgattgttgcactcattggtggctctgctggagctggggagctcatcataattgcatcgatgatcctatcatttgagcttccttttgctttgattccactcctcaagttcactagcagcaaaatcaagatgggagaacatgtcaactcaatcacggtaattttttttgtgacatgaaaattgaaacgttgcaaatatttagaatcatggtctgacatatgctatttgaaagcaagaaagacacatgtactattcacttaatttgactgtgacatgcagtttctcctgcacttcaattagccataattcttggagttaatgatggaaacgggtgctattgcttcatgctacaaagttatgtgtcttatgcattttgtctgatatatgattttctatatataatttaattgcagatctcggctattacttggatcattggttccctcatcatgggcataaatatatactatttattgactagctttgtcaaattgcttctgcacgtccacttaaaaattgttactaaggtgtttcttggaatattgggattttcgggtgtgacattatatatgggaggcattgcatatctagtgtttcgcaaaaataaaaaaactacacactttctggcatttagaacatcggaagaacagcaagtggcaaatgaacaaggtgatatatcaatgtataatctgccaagagaagacatagtaagcatgcaattgcctcaaaatagtaggagtcccacagatattgatagagaaatatcttagtgaggtagattaactagatacagtcctagcaaagcttttatcagggatatataataagatcccattttatgttaatttctagaaattgaacatatgcaaaagggaacattgctcggggcaaattaattagtaccaagcacatcacctcacatatttataaagttacaatcagtgcgaatgtagaaaatgggtgggatcaattgtaatcatatggtaaaaactatgcaactataaagttgtgtgtatctttgtgtgggtaacaattttatataagatcacaaggatctctttgg

SEQ ID NO: 3379 - protein, 162 aa, Glycine max
  misc_feature (1)..(162): Ceres Seq. ID no. 12607240
EEYVTLPYVFLCDKHHMYLVLHLSFLLESVFIKPLMIISYMDHTQNVLGKWSSKLFAIALLASGQSSTITGTYAGQYVMQGFLDLRLKSWIRNLLTRCLAIVPSLIVALIGGSAGAGELIIIASMILSFELPFALIPLLKFTSSKIKMGEHVNSITVIFFVT

SEQ ID NO: 3380 - protein, 146 aa, Glycine max
  misc_feature (1)..(146): Ceres Seq. ID no. 12607241
MYLVLHLSFLLESVFIKPLMIISYMDHTQNVLGKWSSKLFAIALLASGQSSTITGTYAGQYVMQGFLDLRLKSWIRNLLTRCLAIVPSLIVALIGGSAGAGELIIIASMILSFELPFALIPLLKFTSSKIKMGEHVNSITVIFFVT

SEQ ID NO: 3381 - protein, 127 aa, Glycine max
  misc_feature (1)..(127): Ceres Seq. ID no. 12607242
MIISYMDHTQNVLGKWSSKLFAIALLASGQSSTITGTYAGQYVMQGFLDLRLKSWIRNLLTRCLAIVPSLIVALIGGSAGAGELIIIASMILSFELPFALIPLLKFTSSKIKMGEHVNSITVIFFVT

SEQ ID NO: 3382 - DNA, 761 bp, Glycine max
  misc_feature (1)..(761): Ceres Seq. ID no. 12607455
cagtgaagagcaggtcaaacttgctctgctgtctgacccctctctctccactggcccctttattttctaatttattttgattttacgctgaacaaatatgctgcagcagctgcttactgttgcaaacaaaaatttgaatcctgtagacgaaagctattctatccgatgccattaaatgtaatcaagaagaaaaacaccttgcagtcaccctggaatttgcaaaatgggaattgggcgatactgagaaggaattgaagttgctcaagtctgctgtttcctcttcagagaaagaatacgatcaaattccgaaagatacggaagctattcaaatggaattggagagtgaaaggagtttacggaagaagcttgaggaagaacttggagaattgaacagcaaaattgatgagctgacttctgaaactggagaaaccacaatacaaaaactcgaaaaagaaataaggatttgcaagaacatgatcaagtgtactgtctgtactgatcgtccaaaggaggttgtgattgtcaagtgctatcatctgttctgcaatccatgcattcagagaaatctagagcttcggcaccgcaaatgtcctgcatgtggaacagcatttggacagagtgatgtccgctttgtaaaaatatgaaacagatgttaagatagatactttgtagataggtgttgattgattgtaatgttttggatccttggttaccctgatcatagtttcaaacaagcattcttagccgaaagaaatatatgc

SEQ ID NO: 3383 - protein, 104 aa, Glycine max
  misc_feature (1)..(104): Ceres Seq. ID no. 12607456
MELESERSLRKKLEEELGELNSKIDELTSETGETTIQKLEKEIRICKNMIKCTVCTDRPKEVVIVKCYHLFCNPCIQRNLELRHRKCPACGTAFGQSDVRFVKI

SEQ ID NO: 3384 - protein, 56 aa, Glycine max
  misc_feature (1)..(56): Ceres Seq. ID no. 12607457
MIKCTVCTDRPKEVVIVKCYHLFCNPCIQRNLELRHRKCPACGTAFGQSDVRFVKI

SEQ ID NO: 3385 - DNA, 850 bp, Glycine max
  misc_feature (1)..(850): Ceres Seq. ID no. 12607631
cccccttgggcccccccgggttttccctttttgttttcgggttttttttttgggggaaattgggaggggaaaaaatttttccccgggaaaaatttttcccctgttttccccaaatttgaaatttaccccccctaaaggggaaaaaaaggggggttccccccggggggggggcccttttaaaaaatggggtcccccggggggggggaaaaacttttttttttttttttttttttttttttttttttttttttttttttttttttttttttttttttttttttttttttttttttttttttttttttttttnngagagtagcaatggtaccatataaacaaccagaaaattaaaacacattcaaatattcaacacatacatgtctggaattaagcatgttgtatcaggcacacgaaagagaagaattgtaaaaatatatatgaggggtaagatggcaaactagtagagttcatttcaatcaacaaatataccaagtgcctgatgaggcaacacctaatacatgttgagaccggcagaagaacatctcctatgaaattgcgcaagaaatatggcgccgcagaggaatcagggaactactagcttcacaatcttcaccaagtcaagtactccatttttataaagtaaatagtccagtactctttctgtagtacgaatcaggcatgcaaccaaataatttgtgtgtgttgaaatatttgacgctgcaggttacgtaaaaaggaagtgtcactaaccaactaagacagatggcatctgctattcaatctggatgctataaaataacgcacatgcatttgttctgtgttgctttgttggcagctttcttctctttct

SEQ ID NO: 3386 - protein, 105 aa, Glycine max
  misc_feature (1)..(105): Ceres Seq. ID no. 12607632
  misc_feature (103)..(103): Xaa is any aa, unknown or other
  misc_feature (104)..(104): Xaa is any aa, unknown or other
PLGPPRVFPFCFRVFFLGEIGRGKNFSPGKIFPLFSPNLKFTPPKGEKKGGSPRGGGPFKKWGPPGGGKNFFFFFFFFFFFFFFFFFFFFFFFFFFFFFFFFXXE

SEQ ID NO: 3387 - protein, 55 aa, Glycine max
  misc_feature (1)..(55): Ceres Seq. ID no. 12607633
  misc_feature (43)..(43): Xaa is any aa, unknown or other
MGSPGGGEKLFFFFFFFFFFFFFFFFFFFFFFFFFFFFFFFFXRVAMVPYKQPEN

SEQ ID NO: 3388 - DNA, 1271 bp, Glycine max
  misc_feature (1)..(1271): Ceres Seq. ID no. 12607735
aacagctaatgcaaaaggtgcattaatgtctggaggtaattctgtgagaggctcagccctagttgggagtggaaatgttaccaacaaaatcagggcagatcagtacaaccttcctgattttccaaccaaatatgatcatgcacttttctttgtcatcaaatcatacagtgaagatgatatccataagagcatcaagtacaacgtgtgggcaagtactcctaatgggaataagaggctggatggtgcatttcaggatgcacagaagagaatggaagaaaaagggtgcaaatgccctgtgttccttttcttttcggtcaatgctagcggtcaattttgtggagtggctgagatgaccggacgtgttgatttcaataaaagtatggatttctggcaacaagataaatggaatggatatttccctgtcaaatggcacattataaaggatgttccaaatcctcaactacggcatataatactcgagaataatgatcacaagcctgttacaagcagtagagacacacaagaggtgagttttccccaaggtgttgaaatgctcaacatttttaagaattatgtggctagaacttccatattggatgactttgaattttacgaaagccgccagaaggtcatgcaggagaagaaaacaaggcaatctatgccccatatcaatgtacagcaaatagaggaattaaccatacttgggtcattagacctatcatccgtgaagaacatggaggatcctaaggtggttaagaaagtgaatgactgagtaacatgtagggctgatgctattcctggggacccaccatgtcagcatgctggtccgcggtaagtcatgtgggccacaaagtaagaaaaaaaagctaatgaattcaaacttgaagttctaaaccaaaaaattcttgctgatgatgatgctttagaaagggagaaaaagaagaaaaaaataataatttttatctgggcaagtgggtgactgcattcctaattgtacaaaactacaaaggaagaaagtctttggaaagtggatggacccggtgatatagctgttacagggtgctatgaaaagcatgtgtcatttactctttttaaaaaaaataatttttgtttgcacataataagctcagtttggttccttctttgttcttggtattttcacttttttttctttcttgtagttgtatttaccgattttaacaacataacaaatggcacgatttggacaactcaccaataataatatgttgagaatgatgggttccatgtgg

SEQ ID NO: 3389 - protein, 256 aa, Glycine max
  misc_feature (1)..(256): Ceres Seq. ID no. 12607736
TANAKGALMSGGNSVRGSALVGSGNVTNKIRADQYNLPDFPTKYDHALFFVIKSYSEDDIHKSIKYNVWASTPNGNKRLDGAFQDAQKRMEEKGCKCPVFLFFSVNASGQFCGVAEMTGRVDFNKSMDFWQQDKWNGYFPVKWHIIKDVPNPQLRHIILENNDHKPVTSSRDTQEVSFPQGVEMLNIFKNYVARTSILDDFEFYESRQKVMQEKKTRQSMPHINVQQIEELTILGSLDLSSVKNMEDPKVVKKVND

SEQ ID NO: 3390 - protein, 248 aa, Glycine max
  misc_feature (1)..(248): Ceres Seq. ID no. 12607737
MSGGNSVRGSALVGSGNVTNKIRADQYNLPDFPTKYDHALFFVIKSYSEDDIHKSIKYNVWASTPNGNKRLDGAFQDAQKRMEEKGCKCPVFLFFSVNASGQFCGVAEMTGRVDFNKSMDFWQQDKWNGYFPVKWHIIKDVPNPQLRHIILENNDHKPVTSSRDTQEVSFPQGVEMLNIFKNYVARTSILDDFEFYESRQKVMQEKKTRQSMPHINVQQIEELTILGSLDLSSVKNMEDPKVVKKVND

SEQ ID NO: 3391 - protein, 167 aa, Glycine max
  misc_feature (1)..(167): Ceres Seq. ID no. 12607738
MEEKGCKCPVFLFFSVNASGQFCGVAEMTGRVDFNKSMDFWQQDKWNGYFPVKWHIIKDVPNPQLRHIILENNDHKPVTSSRDTQEVSFPQGVEMLNIFKNYVARTSILDDFEFYESRQKVMQEKKTRQSMPHINVQQIEELTILGSLDLSSVKNMEDPKVVKKVND

SEQ ID NO: 3392 - DNA, 926 bp, Glycine max
  misc_feature (1)..(926): Ceres Seq. ID no. 12607846
atggatttgtggatgggtatcatctgaacggtgaaaatgtcctagcaaacaatagtatacaaaatggagatgtgggagagaaaagaattatagagatagaaccatctgggcaaaatgatccattgggcagaagtgggatcaagcatttaaattctgctccaaaaaagacacttaagaagttaaattcagagctgaaagaaccaacggaaaatggaaaagaattatccagaaaggaatcaccaaaacagttgaaggctgataaggattcatcagagaagaatagtgacgaacagaggaaagaatatttcgaacgggagatggagaagcgatttattcgtaggagcccattaggtaaggacagagattacaataattattggtggttctgtcgttatgggaggatatttgttgaaagctgtgactccaagaagtggggatactacagcagtaaggaagagcttgatgcattgatgagttcactgaattgcaagggtgagcgggaaagggtactgcgaaagcagctagaaaaatattatagtacaatatgctcagaactccagaaaacatctaaggatttgatgcacaggtttgtagatgagtctgttcttcgtaggtctactcgtgttagagctcaaccagggcagaacccctccgatgcttgcctcagatataaaaacaagtaccataaagaagaataggtggtgctaggggaaattcagtaaagttaccttcaaacgaatggaacttggaacttttaaaggagcttagtttgattcattgccttgactgtaatagagattaagcagttttccgatccatttttggatgatggacaagcatgcgtgtatgcttgtttcagaaattttgtacattacttattcgattcatcaataatatctgaaactgcaaaaattgaatgccgtttt

SEQ ID NO: 3393 - protein, 231 aa, Glycine max
  misc_feature (1)..(231): Ceres Seq. ID no. 12607847
GFVDGYHLNGENVLANNSIQNGDVGEKRIIEIEPSGQNDPLGRSGIKHLNSAPKKTLKKLNSELKEPTENGKELSRKESPKQLKADKDSSEKNSDEQRKEYFEREMEKRFIRRSPLGKDRDYNNYWWFCRYGRIFVESCDSKKWGYYSSKEELDALMSSLNCKGERERVLRKQLEKYYSTICSELQKTSKDLMHRFVDESVLRRSTRVRAQPGQNPSDACLRYKNKYHKEE

SEQ ID NO: 3394 - protein, 126 aa, Glycine max
  misc_feature (1)..(126): Ceres Seq. ID no. 12607848
MEKRFIRRSPLGKDRDYNNYWWFCRYGRIFVESCDSKKWGYYSSKEELDALMSSLNCKGERERVLRKQLEKYYSTICSELQKTSKDLMHRFVDESVLRRSTRVRAQPGQNPSDACLRYKNKYHKEE

SEQ ID NO: 3395 - DNA, 950 bp, Glycine max
  misc_feature (1)..(950): Ceres Seq. ID no. 12608035
agtaactcaaccttcaaacattttgccttttcagctttcattgcccaaccttgtagtgtggccttgctgttttctcaatgagaaaggcttttactctgcaacgcgcacttttgcgcttctctgttgcgttgttgctggttgccagcttcacttgtgctacttctgttatggcaataactgaagtttcagggaatgaagtgaatacagatgggaagcttgtaaatgaagaactagcaaaaacaagccaacaaggatatgacaaagaagcaaaatttaaaggatttttttcaaaacctattccaaaaccaatttctgttgttaagcctattcctattccactatataagtctataccaaaatcaattcccatagtgaaacctatcccaaagtcaattcctaatgaagaagaaaaatttaaaggactttttccaaagcctattcccatagttaagcctattccgaagtcaattcccattgttaagccaatactaaaaccaattcctgttgttaaacctattcctattccagtatacaagtccataccaaaatctgttcctattgttaagcctgtgccaaagttaattccggttgttaaacccataacaaaacccattcctacttttgagccagaatcttttctaaagccgaagcctttctttgaaaaacctgttcctaaattgccactggagcccaaattcaagaaaccacgtattccacattttccggttcaaaagccaatttcaactccaactccataaaactattttgctcagaaagttattcgatccattatctaacgcctatatatctacactaaatatctcaaaattatcagttgcatctgcataatcatcctatcatatttgtgtactgtattggataacatgtggcggatgtaaatcaatattatattaaaatacaagagtcgtattgattttccatttttattt

SEQ ID NO: 3396 - protein, 226 aa, Glycine max
  misc_feature (1)..(226): Ceres Seq. ID no. 12608036
MRKAFTLQRALLRFSVALLLVASFTCATSVMAITEVSGNEVNTDGKLVNEELAKTSQQGYDKEAKFKGFFSKPIPKPISVVKPIPIPLYKSIPKSIPIVKPIPKSIPNEEEKFKGLFPKPIPIVKPIPKSIPIVKPILKPIPVVKPIPIPVYKSIPKSVPIVKPVPKLIPVVKPITKPIPTFEPESFLKPKPFFEKPVPKLPLEPKFKKPRIPHFPVQKPISTPTP

SEQ ID NO: 3397 - protein, 196 aa, Glycine max
  misc_feature (1)..(196): Ceres Seq. ID no. 12608037
MAITEVSGNEVNTDGKLVNEELAKTSQQGYDKEAKFKGFFSKPIPKPISVVKPIPIPLYKSIPKSIPIVKPIPKSIPNEEEKFKGLFPKPIPIVKPIPKSIPIVKPILKPIPVVKPIPIPVYKSIPKSVPIVKPVPKLIPVVKPITKPIPTFEPESFLKPKPFFEKPVPKLPLEPKFKKPRIPHFPVQKPISTPTP

SEQ ID NO: 3398 - DNA, 1691 bp, Glycine max
  misc_feature (1)..(1691): Ceres Seq. ID no. 12608060
accagaacatcctaatcgaaaaagtatagggtgaaagtcctttgggacttgggcgctgggatgatgtatgtaatatatagggtaacataaaaatagcgagcgcaaccctctctcccagtctcggaagaagaaatgaagcagctgccaacgctgctgacgaagtccctctcactctcagtgtgttctttgccagcagcagcttccacaaccacccttcaacaaattgctctccatcaacccaaagtttgtgtttggtaggtgttgcaaaggttgtacttaaaaaggggaagacacaactctttaaggatggcaacccaatggtgtacagtggagctgttgatagaataattgggaggccacctcccaagaccggggatgttgttctggtagcagatgggactgagaaaccaattggatggggcatgtacaactcagtttctatgttctgtgttcggctcatgcagcttgaagatgaagctactagcgattcatcttgtgcattgaatatggagaaactgattgaaacaagaattgatgcagctgttgaaatgcgtagaaggttgggtcttccatcagtccacaccaatgcataccgtctaatcaatagtgagggtgacagactatcaggattgataattgacgtctttggaggtgttgctgtagtagcgtcatctgctgcttgggttgagaaatacaaatcagagatagaggcatgcatcaagaaaatcaactatatcaatcatgtaaattggaggccatctgttgatattttaaaggaagatggagttaatgaatctgatttaaacaaaatgcattcatctacatgtcctgaaagaacaaagattgtggaaaatgaaattgtatacacaatttcattgaagggccagaagacgggattctatgcagatcagcgtgagaaccgccagtttatatcaagaatttcagatggtcaaaaggttcttgatatttgctgctatagtggcggttttgctctaaatgctgtgcgtggaggtgctctaaatgtcaccggtattgacacatcaccgctagctttggagcttgctaaagaaaatgttgtactcaacaacattgatcctggaagaatatcctttttgagggaagatgctactgaatttatgaagggtgctctcttgagaaatgaatcctgggatattgtcatcattgatcctcctaaactggcaccaacaaaaaaggttctacatagtgcttctggtatgtacaggaatttgaattcacttgctatgcaacttacaaaaagaggtggtcttctgatgacatgttcctgttctggagctgtgacccaaagtgggatattcatgcgcatccttcagggtgcagcatctatggcgggtaggagaatcactgtcctcagacaggctggagcagcttgtgatcaccctatcgatccatcatacccagaaggagcatatctaaccaacattctattgcgagtttcatgagtattgtatttgggggattttcattcatttaagttttttcccatgtaattatatattttaatggaactttggaaagtgccctttcaccgaattagtgaagaaaatgtcttacacatcagttgaaagaaaaaaatgggcataggtttgcttatttaattaataattattgtcaaactgaaaaaaaaaaaaaaaaaagcttatcgataccgt

SEQ ID NO: 3399 - protein, 387 aa, Glycine max
  misc_feature (1)..(387): Ceres Seq. ID no. 12608061
MVYSGAVDRIIGRPPPKTGDVVLVADGTEKPIGWGMYNSVSMFCVRLMQLEDEATSDSSCALNMEKLIETRIDAAVEMRRRLGLPSVHTNAYRLINSEGDRLSGLIIDVFGGVAVVASSAAWVEKYKSEIEACIKKINYINHVNWRPSVDILKEDGVNESDLNKMHSSTCPERTKIVENEIVYTISLKGQKTGFYADQRENRQFISRISDGQKVLDICCYSGGFALNAVRGGALNVTGIDTSPLALELAKENVVLNNIDPGRISFLREDATEFMKGALLRNESWDIVIIDPPKLAPTKKVLHSASGMYRNLNSLAMQLTKRGGLLMTCSCSGAVTQSGIFMRILQGAASMAGRRITVLRQAGAACDHPIDPSYPEGAYLTNILLRVS

SEQ ID NO: 3400 - protein, 352 aa, Glycine max
  misc_feature (1)..(352): Ceres Seq. ID no. 12608062
MYNSVSMFCVRLMQLEDEATSDSSCALNMEKLIETRIDAAVEMRRRLGLPSVHTNAYRLINSEGDRLSGLIIDVFGGVAVVASSAAWVEKYKSEIEACIKKINYINHVNWRPSVDILKEDGVNESDLNKMHSSTCPERTKIVENEIVYTISLKGQKTGFYADQRENRQFISRISDGQKVLDICCYSGGFALNAVRGGALNVTGIDTSPLALELAKENVVLNNIDPGRISFLREDATEFMKGALLRNESWDIVIIDPPKLAPTKKVLHSASGMYRNLNSLAMQLTKRGGLLMTCSCSGAVTQSGIFMRILQGAASMAGRRITVLRQAGAACDHPIDPSYPEGAYLTNILLRVS

SEQ ID NO: 3401 - protein, 346 aa, Glycine max
  misc_feature (1)..(346): Ceres Seq. ID no. 12608063
MFCVRLMQLEDEATSDSSCALNMEKLIETRIDAAVEMRRRLGLPSVHTNAYRLINSEGDRLSGLIIDVFGGVAVVASSAAWVEKYKSEIEACIKKINYINHVNWRPSVDILKEDGVNESDLNKMHSSTCPERTKIVENEIVYTISLKGQKTGFYADQRENRQFISRISDGQKVLDICCYSGGFALNAVRGGALNVTGIDTSPLALELAKENVVLNNIDPGRISFLREDATEFMKGALLRNESWDIVIIDPPKLAPTKKVLHSASGMYRNLNSLAMQLTKRGGLLMTCSCSGAVTQSGIFMRILQGAASMAGRRITVLRQAGAACDHPIDPSYPEGAYLTNILLRVS

SEQ ID NO: 3402 - DNA, 1004 bp, Glycine max
  misc_feature (1)..(1004): Ceres Seq. ID no. 12608127
actgttttctcttaccataatcatcaatggcttccttatccctctcctctcccccatctctctcttccgcacaccacaacgcctccacgcgccttattctacgcacccctaactcccttaaactgcgcactccaccccactccctccccgccatccgcgccatcaccctcacccaggacgacctcaagagactcgccgccgacaaggccgtggagtccgtcaagagcggcatggtcctcggcctaggcaccggctccactgctgccttcgtcgtcctgggtgagggtgatggcgcggaatgcacggagtacgtgaaggagtacatgaccgggaaggggtacgcggtcgacctcgaaatggtctccaaagaggcggaggagttcgcgaggagtgtgcctctcggcggcgacgggaaggacgcgtggattttcgacatcgacgagactctcctctccaatctcccctattatgccgcacacggatacgggcttgaggtctttgaccacgagaagtttaacaattgggtggagaagggtgtagctccagccattgaacccagtttaaagctctatgaagatgttttgaatctgggattcaaggttattctactgacaggacggagtgaaaggcacaggagtgtcactgttgataatttgatcaatgctgggtttaaggaatgggaccagctcatactaagaaactcagatgatcaagggaaacgagctgtactctacaaatcagagaagaggagtgagatggagaaagatggatacaggattcttggaaattctggtgaccagtggagcgatttattaggttcttcagtatctgttcggtccttcaagcttccaaatcccatgtattacattccatagtaaatgtctcattcatttgcaaataattgctgtttgaattgtacataacgaaagtggatcaattcgtatactgaatatcattgcaaataattcataaactgaatgtcattgaaattctaatacataccg

SEQ ID NO: 3403 - protein, 282 aa, Glycine max
  misc_feature (1)..(282): Ceres Seq. ID no. 12608128
MASLSLSSPPSLSSAHHNASTRLILRTPNSLKLRTPPHSLPAIRAITLTQDDLKRLAADKAVESVKSGMVLGLGTGSTAAFVVLGEGDGAECTEYVKEYMTGKGYAVDLEMVSKEAEEFARSVPLGGDGKDAWIFDIDETLLSNLPYYAAHGYGLEVFDHEKFNNWVEKGVAPAIEPSLKLYEDVLNLGFKVILLTGRSERHRSVTVDNLINAGFKEWDQLILRNSDDQGKRAVLYKSEKRSEMEKDGYRILGNSGDQWSDLLGSSVSVRSFKLPNPMYYIP

SEQ ID NO: 3404 - protein, 214 aa, Glycine max
  misc_feature (1)..(214): Ceres Seq. ID no. 12608129
MVLGLGTGSTAAFVVLGEGDGAECTEYVKEYMTGKGYAVDLEMVSKEAEEFARSVPLGGDGKDAWIFDIDETLLSNLPYYAAHGYGLEVFDHEKFNNWVEKGVAPAIEPSLKLYEDVLNLGFKVILLTGRSERHRSVTVDNLINAGFKEWDQLILRNSDDQGKRAVLYKSEKRSEMEKDGYRILGNSGDQWSDLLGSSVSVRSFKLPNPMYYIP

SEQ ID NO: 3405 - protein, 183 aa, Glycine max
  misc_feature (1)..(183): Ceres Seq. ID no. 12608130
MTGKGYAVDLEMVSKEAEEFARSVPLGGDGKDAWIFDIDETLLSNLPYYAAHGYGLEVFDHEKFNNWVEKGVAPAIEPSLKLYEDVLNLGFKVILLTGRSERHRSVTVDNLINAGFKEWDQLILRNSDDQGKRAVLYKSEKRSEMEKDGYRILGNSGDQWSDLLGSSVSVRSFKLPNPMYYIP

SEQ ID NO: 3406 - DNA, 970 bp, Glycine max
  misc_feature (1)..(970): Ceres Seq. ID no. 12608154
agaacatcctaatcgaaaaaattctcaaagcaatgcaacaaaaaatgttgaactccacacccacctgcttccaccgcaccaccactctcactccctctccttctcttctatccactcctcttccttcttgttcttcttcttccacccatcatcattcatatctacacccccgccactcctccttccacactcaacctcttcgcttaagcaacctccgctaccacacccatttgccatcaacccccaagacactcaaagtgaactgttccaccagcgagcctctgaaggtcatgatatcaggtgcacctgcatcgggcaaaggcacgcaatgtgaattgattgtccaaaagtttggattggtgcatatatcaacaggggatttgctaagagcagaggtagcggctgggactgaaattggaaataaagcaaaggagttcatgaacacgggtcaattggttcctgatgaaattgtgacagcgatggtggcagcacgattggctcgcgaagatgttaggcataaagggtggcttcttgatgggtaccctcggagttttggccaagcccagagtctggagaaaatgcagatacggcctgatgtgtatatcgtattagatgttcctgatgaaattctgatcgacagatgtgttggtagaaggctagacccagtgacagggaagatatatcatctaaagttttttccaccggatacagaagaaattaaagcaaggctgataactcggcctgatgacactgaggagaagttatttgaaaggatggactcatcatgaaatgatctcctaaagtcttgtctccgtggatgcgcagtagattttgttgcatgacaagtttgatcacaaaattaatgagaatttaaagatcttagttgtcaaagttttagactgtattttcagcagaatcattaaagacgctttatcagttagcataatgcattattaggatggtgtcattt

SEQ ID NO: 3407 - protein, 261 aa, Glycine max
  misc_feature (1)..(261): Ceres Seq. ID no. 12608155
NILIEKILKAMQQKMLNSTPTCFHRTTTLTPSPSLLSTPLPSCSSSSTHHHSYLHPRHSSFHTQPLRLSNLRYHTHLPSTPKTLKVNCSTSEPLKVMISGAPASGKGTQCELIVQKFGLVHISTGDLLRAEVAAGTEIGNKAKEFMNTGQLVPDEIVTAMVAARLAREDVRHKGWLLDGYPRSFGQAQSLEKMQIRPDVYIVLDVPDEILIDRCVGRRLDPVTGKIYHLKFFPPDTEEIKARLITRPDDTEEKLFERMDSS

SEQ ID NO: 3408 - protein, 251 aa, Glycine max
  misc_feature (1)..(251): Ceres Seq. ID no. 12608156
MQQKMLNSTPTCFHRTTTLTPSPSLLSTPLPSCSSSSTHHHSYLHPRHSSFHTQPLRLSNLRYHTHLPSTPKTLKVNCSTSEPLKVMISGAPASGKGTQCELIVQKFGLVHISTGDLLRAEVAAGTEIGNKAKEFMNTGQLVPDEIVTAMVAARLAREDVRHKGWLLDGYPRSFGQAQSLEKMQIRPDVYIVLDVPDEILIDRCVGRRLDPVTGKIYHLKFFPPDTEEIKARLITRPDDTEEKLFERMDSS

SEQ ID NO: 3409 - protein, 247 aa, Glycine max
  misc_feature (1)..(247): Ceres Seq. ID no. 12608157
MLNSTPTCFHRTTTLTPSPSLLSTPLPSCSSSSTHHHSYLHPRHSSFHTQPLRLSNLRYHTHLPSTPKTLKVNCSTSEPLKVMISGAPASGKGTQCELIVQKFGLVHISTGDLLRAEVAAGTEIGNKAKEFMNTGQLVPDEIVTAMVAARLAREDVRHKGWLLDGYPRSFGQAQSLEKMQIRPDVYIVLDVPDEILIDRCVGRRLDPVTGKIYHLKFFPPDTEEIKARLITRPDDTEEKLFERMDSS

SEQ ID NO: 3410 - DNA, 943 bp, Glycine max
  misc_feature (1)..(943): Ceres Seq. ID no. 12608163
aaggtagcaattgaactgtcttcgaaatcaacaacaatctctctctgtctctggctatggctgctattcatgttcatgatgatggtgaagttggttttgaagaaggaatgctatggttaccctctcatgttctgaacgaggcatgcggcactaaggtatgtttgaggaaccgccaccaaaagttccaaaaccatcagcaaatgcatcagcagcgtcatcataaatcacctggagaaccaaaatcacagtactcaaaatctgcctcaagatcttcgtatcaaaggccaaaacttgccaatggtggacctggaatgcgagctattttcttaggatccacgcatagatcatgtggcactggtgtgttcttaccccaaagagcaggcacaaacttccaaccaagcaagaggccagcttgtgctcctatcctagttccagctggagttattcaagctctaaatcttaatgtgcgtgcattaggtctgcagatttcacccccgcaagttcagagttataacccaagatgcagggaagtatacaataataattcagaagaaaagaaaagtgatcagaaagattcgtccaagcaatgtcgttttatatctcagaatcaatgttctactccagagatatttctcccaaaggaatggacttactagctagcttttcattttcaaagagaaaatttaaatttgggaagcacacaaaggggagttaacatcggaccgtgtacatacaaataaaaaaaaaatgaaatcatgctttatgtagaatgctgggaaagtttaaagtgcaattaatttattgctagctgtactgttagattctttgatcatgtatagatgttagcttttgtaataatagattaatggcaacccaagtctcacgagggtcttgtttgtaattgcatgcttcagtattgatataattatattcagtggttctc

SEQ ID NO: 3411 - protein, 199 aa, Glycine max
  misc_feature (1)..(199): Ceres Seq. ID no. 12608164
MAAIHVHDDGEVGFEEGMLWLPSHVLNEACGTKVCLRNRHQKFQNHQQMHQQRHHKSPGEPKSQYSKSASRSSYQRPKLANGGPGMRAIFLGSTHRSCGTGVFLPQRAGTNFQPSKRPACAPILVPAGVIQALNLNVRALGLQISPPQVQSYNPRCREVYNNNSEEKKSDQKDSSKQCRFISQNQCSTPEIFLPKEWTY

SEQ ID NO: 3412 - protein, 182 aa, Glycine max
  misc_feature (1)..(182): Ceres Seq. ID no. 12608165
MLWLPSHVLNEACGTKVCLRNRHQKFQNHQQMHQQRHHKSPGEPKSQYSKSASRSSYQRPKLANGGPGMRAIFLGSTHRSCGTGVFLPQRAGTNFQPSKRPACAPILVPAGVIQALNLNVRALGLQISPPQVQSYNPRCREVYNNNSEEKKSDQKDSSKQCRFISQNQCSTPEIFLPKEWTY

SEQ ID NO: 3413 - protein, 151 aa, Glycine max
  misc_feature (1)..(151): Ceres Seq. ID no. 12608166
MHQQRHHKSPGEPKSQYSKSASRSSYQRPKLANGGPGMRAIFLGSTHRSCGTGVFLPQRAGTNFQPSKRPACAPILVPAGVIQALNLNVRALGLQISPPQVQSYNPRCREVYNNNSEEKKSDQKDSSKQCRFISQNQCSTPEIFLPKEWTY

SEQ ID NO: 3414 - DNA, 635 bp, Glycine max
  misc_feature (1)..(635): Ceres Seq. ID no. 12608192
catgaagccataaaaaaacgctataagcacctccctgaagttaaccgtatcgcaagacatagacacttgccaagaccaatattcaaagcttctgctttaatgcgcgttatggcggatgctaagagaaggaaggaagagaagaggaaagctcacagtgctccagggagtattacaacacagccattacgaagacgaagaattatcaaagaagtcgagtgaggtttttctgagccggtacctaaaaaaaatcaagcaaatatttatcagctattacggagacgaagaattatcaaatatactgatgtcagcatgcttctcttgggacgttccatctctggaggtgcttccaggttgatttcttaggcaaatggatgtaccgtgcctacaattttatgcctagttggctcagttgcatgtttagattggtaaaacaaggttatatttttgtgattcttcttctgggttcagttcactcccaattcaagaatttttttttcttgaatgtagtttctccttttccttaaaagcccttagagagctaattgttatatttttaattcaattcagtgcagtgattatgacaaaatcagtgacagatttcagttttagtatttataaaaaaaaaatcattgttt

SEQ ID NO: 3415 - protein, 79 aa, Glycine max
  misc_feature (1)..(79): Ceres Seq. ID no. 12608193
MLREGRKRRGKLTVLQGVLQHSHYEDEELSKKSSEVFLSRYLKKIKQIFISYYGDEELSNILMSACFSWDVPSLEVLPG

SEQ ID NO: 3416 - protein, 72 aa, Glycine max
  misc_feature (1)..(72): Ceres Seq. ID no. 12608194
HEAIKKRYKHLPEVNRIARHRHLPRPIFKASALMRVMADAKRRKEEKRKAHSAPGSITTQPLRRRRIIKEVE

SEQ ID NO: 3417 - protein, 50 aa, Glycine max
  misc_feature (1)..(50): Ceres Seq. ID no. 12608195
MYRAYNFMPSWLSCMFRLVKQGYIFVILLLGSVHSQFKNFFFLNVVSPFP

SEQ ID NO: 3418 - DNA, 980 bp, Glycine max
  misc_feature (1)..(980): Ceres Seq. ID no. 12608215
aatttccattacgtcccctctttccgcttttgaacgttttctctgtgtgtctcgctagggcaaaaaccatgaacatcttcaggctcgccggtgacatgacccatcttttcagcattctcgtcctcctcctcaaaatctacgccaccaaatcatgttcagggatttctcgcaagactcaagagctgtacgcgattgtgttcgtggcacgctatttggatctgttcacggacttcatatccgtttacaacaccttcatgaaggtggtgttcattgcaagctccttagccattttttggtgcatgcgttttcatcccatggtcaggagaagctacgatagggacctagacacttttcgccactatttccttgttggggcaagctttgctttggcactcatcttgcatgaaaagttcactgttcaagagattttctgggcattttcaatatacttggaggcagttgcaatattacctcagttggttttgttgcaaagaagtggaaatgtggacaatttgactgtgcaatatgtattctttcttggtgcatatcgtgcattttacatcctgaactggatataccgctatatgactgagccacgttttactagatggatagcctgtgcctcaggtgttgttcagacagctttgtatgcagatttcttctactattatttcatcagctggaagaacaattcaaaactgaagttgcctgcctgaattatcacgaggtgtttaggaatttggacccgtgtgaccagtcactgctaaatttacagagcgtggtttggatgatgttagttttgagagtgaagggacaaggctaactcctctccctgttcatgagggggtgagtttttgtttttgggttcaagggtaaacagttttaacgtctgatgaatataaccgtctcgtggcaattcaagagtaggttaaaatgcaaatgttatgtgatggtgttttgtatattcacgtctccattgc

SEQ ID NO: 3419 - protein, 237 aa, Glycine max
  misc_feature (1)..(237): Ceres Seq. ID no. 12608216
FPLRPLFPLLNVFSVCLARAKTMNIFRLAGDMTHLFSILVLLLKIYATKSCSGISRKTQELYAIVFVARYLDLFTDFISVYNTFMKVVFIASSLAIFWCMRFHPMVRRSYDRDLDTFRHYFLVGASFALALILHEKFTVQEIFWAFSIYLEAVAILPQLVLLQRSGNVDNLTVQYVFFLGAYRAFYILNWIYRYMTEPRFTRWIACASGVVQTALYADFFYYYFISWKNNSKLKLPA

SEQ ID NO: 3420 - protein, 215 aa, Glycine max
  misc_feature (1)..(215): Ceres Seq. ID no. 12608217
MNIFRLAGDMTHLFSILVLLLKIYATKSCSGISRKTQELYAIVFVARYLDLFTDFISVYNTFMKVVFIASSLAIFWCMRFHPMVRRSYDRDLDTFRHYFLVGASFALALILHEKFTVQEIFWAFSIYLEAVAILPQLVLLQRSGNVDNLTVQYVFFLGAYRAFYILNWIYRYMTEPRFTRWIACASGVVQTALYADFFYYYFISWKNNSKLKLPA

SEQ ID NO: 3421 - protein, 206 aa, Glycine max
  misc_feature (1)..(206): Ceres Seq. ID no. 12608218
MTHLFSILVLLLKIYATKSCSGISRKTQELYAIVFVARYLDLFTDFISVYNTFMKVVFIASSLAIFWCMRFHPMVRRSYDRDLDTFRHYFLVGASFALALILHEKFTVQEIFWAFSIYLEAVAILPQLVLLQRSGNVDNLTVQYVFFLGAYRAFYILNWIYRYMTEPRFTRWIACASGVVQTALYADFFYYYFISWKNNSKLKLPA

SEQ ID NO: 3422 - DNA, 1232 bp, Glycine max
  misc_feature (1)..(1232): Ceres Seq. ID no. 12608262
gaattaatagagatacagataacgtgaaactgaaaggaaaatggcactctcagtctcctcaccctcatgcgtacgcgttccttcatgtttttggaaaccaaatggcaagagttgcaaagagcgtactaaggtttcatgtgcagctcacaatgataataagaatccgttggttggaatcggtattggggttgtaacgtcttgtgtgatgggtttaactgcattggatgcggacgccacgagaatcgaatactacgcaacagtggcagagcctttgtgtgagtacaactatgttaagtctggcctcggctactgcgatattgctgagggcttcggtgacgaagctccactgggtgagcttatcaatgttcactatactgcgagattcgctgatgggatagtattcgatagcagctataaacgtgctagacctctcaccatgcgcattggtgtgggcaaggtaatcaagggactggatcaggggattttagggggtgaaggagtacctccaatgcggataggtgggaaacgcaaactgcagattcctccgcacttagcatatggccctgaacctgcagggtgcttctcaggtgactgcaatatacccgccaatgccactcttctgtatgatattaattttgttgaggtttattcggggaacagatcaaagtgaagtcagtcaaaactggtcagatacatatatacatatgaaccacagatggatgggtttagagcaatgaaatggacattttgctagagaatatggatcaacttgtttggcagaatcttcttcctgattacaactacctcaagttactgttcctggttagtggagttgtacatgattgacctggatatcccttttgagagtaatgagcaatccttcctggtgatatatattaagataattcatgtgtatctctgcacatgacatgcgaacagtttgtgcatctttagtgtaaatgtaattttcaatactgctctgaatgataaaaaattgttaattcttcatttgataaatgcctgtctctaatacgtgatatgctttacccttttcaccttcctgtctgaaataggcatggctctacatgcttagagcagtaaaatgcaaagggagaatcataatttcaaaagattaacaggattagcagttaaacgtgttcaaatatgatttctatgctgaattgattaatcacccgtttgcaggtaattcatctaaagttagaaatatgttc

SEQ ID NO: 3423 - protein, 209 aa, Glycine max
  misc_feature (1)..(209): Ceres Seq. ID no. 12608263
MALSVSSPSCVRVPSCFWKPNGKSCKERTKVSCAAHNDNKNPLVGIGIGVVTSCVMGLTALDADATRIEYYATVAEPLCEYNYVKSGLGYCDIAEGFGDEAPLGELINVHYTARFADGIVFDSSYKRARPLTMRIGVGKVIKGLDQGILGGEGVPPMRIGGKRKLQIPPHLAYGPEPAGCFSGDCNIPANATLLYDINFVEVYSGNRSK

SEQ ID NO: 3424 - protein, 154 aa, Glycine max
  misc_feature (1)..(154): Ceres Seq. ID no. 12608264
MGLTALDADATRIEYYATVAEPLCEYNYVKSGLGYCDIAEGFGDEAPLGELINVHYTARFADGIVFDSSYKRARPLTMRIGVGKVIKGLDQGILGGEGVPPMRIGGKRKLQIPPHLAYGPEPAGCFSGDCNIPANATLLYDINFVEVYSGNRSK

SEQ ID NO: 3425 - DNA, 638 bp, Glycine max
  misc_feature (1)..(638): Ceres Seq. ID no. 12608289
cgtcccaaaaaatatgtccatggagacctcaagccaagtaacatacttcttggacaaaacatggaaccccacatttctgacttcggagttgggcgccttgcaaacatcgctggagggtctccaaccttgcaatcgaaccgagtggccgctgagaaactacagggaagacaaaagagcttgtccaatgaagtcacaagcaatgtgttgggaaacggttacatggcaccagaagcaatgaaagtggtgaagccatcacagaagtgggatgtgtattcatatggtgtgatattgttggaaattatcacaggaagatcatccattgtgctagtggggaactcagaaatggaccttgttcagtggattcagttgtgcattgaggaaaagaagccactcttggaggtgttagacccttacttgggtgaagatgcagatagagaagaggagattattggagttttgaagattgcaatggcttgtgttcatagcagccctgaaaagaggcctactatgaggcacgtgcttgatgctttggataaattgactatttcctctgattgagaaatttcagggagctgtgcactgtgaatccagctcatttgtgtagcttttgcctttacctcttgtcttgtcacgttaac

SEQ ID NO: 3426 - protein, 185 aa, Glycine max
  misc_feature (1)..(185): Ceres Seq. ID no. 12608290
RPKKYVHGDLKPSNILLGQNMEPHISDFGVGRLANIAGGSPTLQSNRVAAEKLQGRQKSLSNEVTSNVLGNGYMAPEAMKVVKPSQKWDVYSYGVILLEIITGRSSIVLVGNSEMDLVQWIQLCIEEKKPLLEVLDPYLGEDADREEEIIGVLKIAMACVHSSPEKRPTMRHVLDALDKLTISSD

SEQ ID NO: 3427 - protein, 165 aa, Glycine max
  misc_feature (1)..(165): Ceres Seq. ID no. 12608291
MEPHISDFGVGRLANIAGGSPTLQSNRVAAEKLQGRQKSLSNEVTSNVLGNGYMAPEAMKVVKPSQKWDVYSYGVILLEIITGRSSIVLVGNSEMDLVQWIQLCIEEKKPLLEVLDPYLGEDADREEEIIGVLKIAMACVHSSPEKRPTMRHVLDALDKLTISSD

SEQ ID NO: 3428 - protein, 112 aa, Glycine max
  misc_feature (1)..(112): Ceres Seq. ID no. 12608292
MAPEAMKVVKPSQKWDVYSYGVILLEIITGRSSIVLVGNSEMDLVQWIQLCIEEKKPLLEVLDPYLGEDADREEEIIGVLKIAMACVHSSPEKRPTMRHVLDALDKLTISSD

SEQ ID NO: 3429 - DNA, 720 bp, Glycine max
  misc_feature (1)..(720): Ceres Seq. ID no. 12608325
aattaaagtttccatctaaaatgagttccaaagcatggcttgtgttccttctcctggcactggccatggtggctgaaacatatgccacaatagatgaatttgcatctacaacaatagaagaatttgactctattatctctaacggtgatgctgatctcattgtagatgacaatgagtttttgatgagttcagaatcaacacctcggtcactgatgcatggccatcctggaaaaggcagagctaggtacatcagctatgcagcccttagaagtaaccagataccatgcggtaggcgtggacgttcctactacaattgcaacgaaaggggtagggcaaacccttacagtcgtggttgcattgccatcacacactgtgccagagacaccagttagattgaagaacaaaaaaaagccacaacaaagaggaagctatattgtggcatgtggctaaggacactcttgatcttcttattgagattcctgagtagcatatataatttgttacaacaacttccttggttctaacaatttgcatattttaaagtatggtgatcttattttactatattaattctttgtcttgtttaattattgctgttgtgagatatattaattaatgtaaggtggaaaacaacttggtctatttctatttctctatgtaacatctgtttacattcttcttgttatatcagcatggaggaaatacaaaatattgacattt

SEQ ID NO: 3430 - protein, 129 aa, Glycine max
  misc_feature (1)..(129): Ceres Seq. ID no. 12608326
LKFPSKMSSKAWLVFLLLALAMVAETYATIDEFASTTIEEFDSIISNGDADLIVDDNEFLMSSESTPRSLMHGHPGKGRARYISYAALRSNQIPCGRRGRSYYNCNERGRANPYSRGCIAITHCARDTS

SEQ ID NO: 3431 - protein, 123 aa, Glycine max
  misc_feature (1)..(123): Ceres Seq. ID no. 12608327
MSSKAWLVFLLLALAMVAETYATIDEFASTTIEEFDSIISNGDADLIVDDNEFLMSSESTPRSLMHGHPGKGRARYISYAALRSNQIPCGRRGRSYYNCNERGRANPYSRGCIAITHCARDTS

SEQ ID NO: 3432 - protein, 108 aa, Glycine max
  misc_feature (1)..(108): Ceres Seq. ID no. 12608328
MVAETYATIDEFASTTIEEFDSIISNGDADLIVDDNEFLMSSESTPRSLMHGHPGKGRARYISYAALRSNQIPCGRRGRSYYNCNERGRANPYSRGCIAITHCARDTS

SEQ ID NO: 3433 - DNA, 615 bp, Glycine max
  misc_feature (1)..(615): Ceres Seq. ID no. 12608364
ttctaaaaccttatctctttcagttatcctcggccatggcgtctctactgctagcatcaccttctccactctccgttcaattgcacaattccacctgtcacctttccttctctcactcccaaactctttcctcaccgctctccacttcctttccttctctctcagcctctgcaaccaccactctctccccaaccccttctgtgtactgtggcagaggggacaggaaaactgcaaagggaaagcgcttcgctcattcatttggaaatgtaattctcttatcccattttcacttttcttcattttttttactttttagtttttcatgttgtgtttttctggtttctaatattatgctattttatgaggttggataggcgaggccaaaggacaagaagaagggtagagggccactgaggccttatgctccaccggcaccttccaaaaaagacaggttcgaagataatgaggtggtgaagattgaaattgacgagtctctcttttctggttgattttggtggtgaattgtaattttgtgtcttccatggtttagttgttgatatatgattccattgtgacatacacaattcggcttgtgcttatgctatatcagtttcc

SEQ ID NO: 3434 - protein, 123 aa, Glycine max
  misc_feature (1)..(123): Ceres Seq. ID no. 12608365
LKPYLFQLSSAMASLLLASPSPLSVQLHNSTCHLSFSHSQTLSSPLSTSFPSLSASATTTLSPTPSVYCGRGDRKTAKGKRFAHSFGNVILLSHFHFSSFFLLFSFSCCVFLVSNIMLFYEVG

SEQ ID NO: 3435 - protein, 112 aa, Glycine max
  misc_feature (1)..(112): Ceres Seq. ID no. 12608366
MASLLLASPSPLSVQLHNSTCHLSFSHSQTLSSPLSTSFPSLSASATTTLSPTPSVYCGRGDRKTAKGKRFAHSFGNVILLSHFHFSSFFLLFSFSCCVFLVSNIMLFYEVG

SEQ ID NO: 3436 - protein, 104 aa, Glycine max
  misc_feature (1)..(104): Ceres Seq. ID no. 12608367
SKTLSLSVILGHGVSTASITFSTLRSIAQFHLSPFLLSLPNSFLTALHFLSFSLSLCNHHSLPNPFCVLWQRGQENCKGKALRSFIWKCNSLIPFSLFFIFFTF

SEQ ID NO: 3437 - DNA, 1773 bp, Glycine max
  misc_feature (1)..(1773): Ceres Seq. ID no. 12608463
aaccacaatgcaccaaaacaactctttttcttcttcttcttcttcaccattctcaattcttttcttcttcttctaacatgggaccctcttccacgcacactcctcgttcccctacgtacttaattccctgcgttatagctcttgccctcttctccctcactggactcctcctctacaaggtggacgacgtcgcttcgcgcaccggaacggtggtgggtcacaacctagaaccgacgccgtggcacgtcttccctcacaagcccttcgacgaggagtcccgccagcagcgcgcgtacaaaatcctacaatgctcctacctgacgtgccgctacgccgctgaagccctcggcggagcacggcggagaaccggcggcggcagggaggagtgccccaagtttttccgggcaatccatcgggacctggcgccgtggtcggagagccggatatcgaaggcgcacgtggcggcggcgcagcggtacgcggcgttcagagtggtgattgttgaagggaaggtgtttgtggattggtactatgcttgtgtgcagagtagggcaatgtttacactgtgggggttgttgcagcttatgaggaggtaccctgggatggtgccagatgtggatatgatgtttgattgcatggataaaccttctgttaataagactgaacaccaagcaatgcctttgcctctatttcggtattgcaccacaaaggaacactttgacatcccttttccggattggtctttctggggttggtcagaaataaacatacgaccctggcaggaagagttcccagatatcaagcgaggttctcgatctgttacttggaaaaataagttaccatgggcatactggaaaggaaaccctgatgttgcatctcctattcgtactgaattaataaattgtaatgattctaggaagtggggagcagagattatgcgccaggattggggggaagcagctagaaatggctttaagcagtcaaaactttcagatcagtgtaatcatcggtataagatctatgctgaagggtatgcatggtctgtgagtttgaaatatattctctcatgtggttctgttgcattgattatatcaccccagtatgaagattttttcagccgtggccttattccaaaccataatttttggcttgttgatcctctaaatctatgtccatctataaagtatgctgtagaatgggggaaccaacacccagtagaggcagaggctatagggaaaagagggcaggatttaatggaaagcttgaacatgaatcgaatttatgaatacatgttccaccttatttctgattactcaaaacttcaagacttcaagcctactccaccaccaactgccctggaagtttgtgtagaatctgtgctttgctttgctgatgagaagcagaggatgttcctcaataaatcatttacattcccttcacataaacctccttgcaatctcaaacctgcctagttatatcacctcttagtttacacaacaaatatactaaaggattttacacatccaagaatatggaaactcccagtgaacattacacgttatttaatagtgtaaaaatatagtgccttttaggttatcatttacaagatttagctttagtaataggccatcatcatttatcagaaaacaacaccacaggaatttcattttcattctcttcccggtcattcttttgttactctgttttttgttttcttatctttgtctttccctttttttattttgcataaatttcttaaatcacaactaaatt

SEQ ID NO: 3438 - protein, 489 aa, Glycine max
  misc_feature (1)..(489): Ceres Seq. ID no. 12608464
PQCTKTTLFLLLLLHHSQFFSSSSNMGPSSTHTPRSPTYLIPCVIALALFSLTGLLLYKVDDVASRTGTVVGHNLEPTPWHVFPHKPFDEESRQQRAYKILQCSYLTCRYAAEALGGARRRTGGGREECPKFFRAIHRDLAPWSESRISKAHVAAAQRYAAFRVVIVEGKVFVDWYYACVQSRAMFTLWGLLQLMRRYPGMVPDVDMMFDCMDKPSVNKTEHQAMPLPLFRYCTTKEHFDIPFPDWSFWGWSEINIRPWQEEFPDIKRGSRSVTWKNKLPWAYWKGNPDVASPIRTELINCNDSRKWGAEIMRQDWGEAARNGFKQSKLSDQCNHRYKIYAEGYAWSVSLKYILSCGSVALIISPQYEDFFSRGLIPNHNFWLVDPLNLCPSIKYAVEWGNQHPVEAEAIGKRGQDLMESLNMNRIYEYMFHLISDYSKLQDFKPTPPPTALEVCVESVLCFADEKQRMFLNKSFTFPSHKPPCNLKPA

SEQ ID NO: 3439 - protein, 464 aa, Glycine max
  misc_feature (1)..(464): Ceres Seq. ID no. 12608465
MGPSSTHTPRSPTYLIPCVIALALFSLTGLLLYKVDDVASRTGTVVGHNLEPTPWHVFPHKPFDEESRQQRAYKILQCSYLTCRYAAEALGGARRRTGGGREECPKFFRAIHRDLAPWSESRISKAHVAAAQRYAAFRVVIVEGKVFVDWYYACVQSRAMFTLWGLLQLMRRYPGMVPDVDMMFDCMDKPSVNKTEHQAMPLPLFRYCTTKEHFDIPFPDWSFWGWSEINIRPWQEEFPDIKRGSRSVTWKNKLPWAYWKGNPDVASPIRTELINCNDSRKWGAEIMRQDWGEAARNGFKQSKLSDQCNHRYKIYAEGYAWSVSLKYILSCGSVALIISPQYEDFFSRGLIPNHNFWLVDPLNLCPSIKYAVEWGNQHPVEAEAIGKRGQDLMESLNMNRIYEYMFHLISDYSKLQDFKPTPPPTALEVCVESVLCFADEKQRMFLNKSFTFPSHKPPCNLKPA

SEQ ID NO: 3440 - protein, 305 aa, Glycine max
  misc_feature (1)..(305): Ceres Seq. ID no. 12608466
MFTLWGLLQLMRRYPGMVPDVDMMFDCMDKPSVNKTEHQAMPLPLFRYCTTKEHFDIPFPDWSFWGWSEINIRPWQEEFPDIKRGSRSVTWKNKLPWAYWKGNPDVASPIRTELINCNDSRKWGAEIMRQDWGEAARNGFKQSKLSDQCNHRYKIYAEGYAWSVSLKYILSCGSVALIISPQYEDFFSRGLIPNHNFWLVDPLNLCPSIKYAVEWGNQHPVEAEAIGKRGQDLMESLNMNRIYEYMFHLISDYSKLQDFKPTPPPTALEVCVESVLCFADEKQRMFLNKSFTFPSHKPPCNLKPA

SEQ ID NO: 3441 - DNA, 1146 bp, Glycine max
  misc_feature (1)..(1146): Ceres Seq. ID no. 12608505
cgaaaaatactagaaaatctatctatgattatgagagcgtagttgaaagcaacgactgaaatcgagagggagacgaaaagtttagatcgagagagatgggaaaggagagtagcaaagatacggttccggtgacgcagtggctgaatcgaatggtctcagaaccttactacctcttccatttcttaaccttcttctcctatttcgtcgttcgcagctccgcaacccaaatcttagcgcctcatctcactcaccatctccttcgtcgcgaaatacaaacactgctagtgttcgcgatattggctttcatcaagggaataaaagaagaaacatgggaagcctttatagctgatgtgcttttcctggccaagatttgtctttttctcctagcctttacaatggatcgccgcttagccgtttggtatattcttgtatttttagtgatacatatgttaacacaacaacctccattccaaggactaggtacgtctagcaagctaacaccgttgcagttggaaagcctgctgacagagggaacaactacaagattgtggctggtggaattccgttcttcatattcacctgcttgcattcgctcaagtcagcagtttcctgagctctcaattacatattcaagcaaaaatttatcatttggaatagttgatcttggtctctttcccaatgctgctgaaagatttggaatatctctaagtggaagcatgggccagcttccaacatttatcttatttgagaatgcagctgaagttgcccgctttcctgagttggattttgaagctgcatattttcaccctaaaattacaaaggggcttctttctcgacattttgagcttgatcggcaccttctcgaatatgttagtggtaaataggatgttagtggagcaagttgtccgaaatttagtcatcactgagaatggcaattttggatttccggatatctgaggaggacattttcgtaaatgaactttgaaagttaacgtttgtttaacaccatcacacaagggtcaaagtaatgtcttcagacaacgggggtgtatgtgtaattagattaaatctcaataggtgttattataatttgttctttattttataatctatcatcggttctaagtgaaagtcaaaaaatttggc

SEQ ID NO: 3442 - protein, 262 aa, Glycine max
  misc_feature (1)..(262): Ceres Seq. ID no. 12608506
MGKESSKDTVPVTQWLNRMVSEPYYLFHFLTFFSYFVVRSSATQILAPHLTHHLLRREIQTLLVFAILAFIKGIKEETWEAFIADVLFLAKICLFLLAFTMDRRLAVWYILVFLVIHMLTQQPPFQGLGTSSKLTPLQLESLLTEGTTTRLWLVEFRSSYSPACIRSSQQFPELSITYSSKNLSFGIVDLGLFPNAAERFGISLSGSMGQLPTFILFENAAEVARFPELDFEAAYFHPKITKGLLSRHFELDRHLLEYVSGK

SEQ ID NO: 3443 - protein, 244 aa, Glycine max
  misc_feature (1)..(244): Ceres Seq. ID no. 12608507
MVSEPYYLFHFLTFFSYFVVRSSATQILAPHLTHHLLRREIQTLLVFAILAFIKGIKEETWEAFIADVLFLAKICLFLLAFTMDRRLAVWYILVFLVIHMLTQQPPFQGLGTSSKLTPLQLESLLTEGTTTRLWLVEFRSSYSPACIRSSQQFPELSITYSSKNLSFGIVDLGLFPNAAERFGISLSGSMGQLPTFILFENAAEVARFPELDFEAAYFHPKITKGLLSRHFELDRHLLEYVSGK

SEQ ID NO: 3444 - protein, 162 aa, Glycine max
  misc_feature (1)..(162): Ceres Seq. ID no. 12608508
MDRRLAVWYILVFLVIHMLTQQPPFQGLGTSSKLTPLQLESLLTEGTTTRLWLVEFRSSYSPACIRSSQQFPELSITYSSKNLSFGIVDLGLFPNAAERFGISLSGSMGQLPTFILFENAAEVARFPELDFEAAYFHPKITKGLLSRHFELDRHLLEYVSGK

SEQ ID NO: 3445 - DNA, 949 bp, Glycine max
  misc_feature (1)..(949): Ceres Seq. ID no. 12608620
accccattttggaaaataaccttatttcttggtctgcaaaacatcatggcagaagcgagtttctttgttggagtcataggtaacatcatctcaattctcatgtttctttctcctgtacctacgttttggaaaataaagaagcacggatccaccgaagatttctcaagccttccttatatttgcacattgcttaattgctccctctggacttactatggaatcataaaagctggagagtaccttgtggccactgttaatggctttggcattctcatggagacaatctacattattctatttctcatatatgcaccaaaagggataaggggtaggactgctattttggctttgattttggatgtggtaatcttgacggcaataataattattactcaattagcattagaaggagagactcgtagtggtgctgttggtgttatgggagcaggcttaaatattgttatgtattcctcacctctgtcggtcatgaaaacagtggtgactacaaaaagcgtggagtatatgccattcttgctttcttttttcttctttttcaacggtgccgtttggttgttgtatgctgttctcgttcgtgatgttatcctcggggtgccaaacggtactggatttttactgggagcgatgcaattagtgctatacgcgatctacagaaatgggaagcgtgtttcaaataacagattggaagaaggattacaacatgagcctctcatctcagagccgaataatgagtcacatcagagtgaagacaggcccatctagtttgtcctcaagttttaaagctatatatgcatgctagctcgaccattgttatttgatattttcaatataaaaagagataagttaaatgttcaattgattagtttattcgattaaagtatgtttttaccgatcaagtgcatgaaataattaatgtgaaattatttcaatt

SEQ ID NO: 3446 - protein, 259 aa, Glycine max
  misc_feature (1)..(259): Ceres Seq. ID no. 12608621
TPFWKITLFLGLQNIMAEASFFVGVIGNIISILMFLSPVPTFWKIKKHGSTEDFSSLPYICTLLNCSLWTYYGIIKAGEYLVATVNGFGILMETIYIILFLIYAPKGIRGRTAILALILDVVILTAIIIITQLALEGETRSGAVGVMGAGLNIVMYSSPLSVMKTVVTTKSVEYMPFLLSFFFFFNGAVWLLYAVLVRDVILGVPNGTGFLLGAMQLVLYAIYRNGKRVSNNRLEEGLQHEPLISEPNNESHQSEDRPI

SEQ ID NO: 3447 - protein, 244 aa, Glycine max
  misc_feature (1)..(244): Ceres Seq. ID no. 12608622
MAEASFFVGVIGNIISILMFLSPVPTFWKIKKHGSTEDFSSLPYICTLLNCSLWTYYGIIKAGEYLVATVNGFGILMETIYIILFLIYAPKGIRGRTAILALILDVVILTAIIIITQLALEGETRSGAVGVMGAGLNIVMYSSPLSVMKTVVTTKSVEYMPFLLSFFFFFNGAVWLLYAVLVRDVILGVPNGTGFLLGAMQLVLYAIYRNGKRVSNNRLEEGLQHEPLISEPNNESHQSEDRPI

SEQ ID NO: 3448 - protein, 226 aa, Glycine max
  misc_feature (1)..(226): Ceres Seq. ID no. 12608623
MFLSPVPTFWKIKKHGSTEDFSSLPYICTLLNCSLWTYYGIIKAGEYLVATVNGFGILMETIYIILFLIYAPKGIRGRTAILALILDVVILTAIIIITQLALEGETRSGAVGVMGAGLNIVMYSSPLSVMKTVVTTKSVEYMPFLLSFFFFFNGAVWLLYAVLVRDVILGVPNGTGFLLGAMQLVLYAIYRNGKRVSNNRLEEGLQHEPLISEPNNESHQSEDRPI

SEQ ID NO: 3449 - DNA, 518 bp, Glycine max
  misc_feature (1)..(518): Ceres Seq. ID no. 12608714
acatatttaaggatcctcatcccacagcctcaacccaaaccaaaccaaaccaaatcaaagcaagccaattggtctctctcttacaccatgagtgcatcaaccaaagcttggattgtggcatcaagcataggggcagtggaggccttgaaagaccaattaggtgtatgcagatggaactatgctttaaggtcactacaacaacatgcaaagaacaacatcagatcttatagtcaagctaggaaattgtcctctgcatcctctgctgcggtttccaacaaggtcaagagaaccaaagaagagcatatggggaaagtcatcgaattcaattgctggggtcctagtactgcaaagttttaattagttaatatttatcttaggtgttgctacgatgagacggtgaatagagactgcttttttccatattcaatcccaatatcccccattaagcatcattatgtatctcaattccaatgtctagtgcccctttgcaagatatatacttattcgtagtcctttcc

SEQ ID NO: 3450 - protein, 118 aa, Glycine max
  misc_feature (1)..(118): Ceres Seq. ID no. 12608715
TYLRILIPQPQPKPNQTKSKQANWSLSYTMSASTKAWIVASSIGAVEALKDQLGVCRWNYALRSLQQHAKNNIRSYSQARKLSSASSAAVSNKVKRTKEEHMGKVIEFNCWGPSTAKF

SEQ ID NO: 3451 - protein, 89 aa, Glycine max
  misc_feature (1)..(89): Ceres Seq. ID no. 12608716
MSASTKAWIVASSIGAVEALKDQLGVCRWNYALRSLQQHAKNNIRSYSQARKLSSASSAAVSNKVKRTKEEHMGKVIEFNCWGPSTAKF

SEQ ID NO: 3452 - protein, 75 aa, Glycine max
  misc_feature (1)..(75): Ceres Seq. ID no. 12608717
IFKDPHPTASTQTKPNQIKASQLVSLLHHECINQSLDCGIKHRGSGGLERPIRCMQMELCFKVTTTTCKEQHQIL

SEQ ID NO: 3453 - DNA, 568 bp, Glycine max
  misc_feature (1)..(568): Ceres Seq. ID no. 12608777
gaaatgggaatttcttccaagtgcatgactgttctgaacaacttgatgaatgacatgtttgagaggctggcttttgaggcttctaagctgaaggactacactggacacatgacattgtcttcaagggagattcaaggagcagtgaggctggttttgccaggagaacttggaaagcatgcaattgctgaaggggtcaaagctgttaacaactacacatcctatgatgcttgatgtatacacatctagttctctagtagtttagacaagatttctatgtttaaatccatgatgttgatatataaatatgtacttaattagttatatggtttgtttcttaattagttggtgtgtactgtgttaactagctagagatgtgttgttttttgcattttgcatttgagaagcagctgaaaaatggaacattgccttattttgtgtatggttgcttcatagggttagaattgtagattaccaactgttggccttgtgaccttgtgtatgtgtaatgcaagtagctacctcaattttctgggcaaaaaaaaaaaatcaagaattgcacgagaccatt

SEQ ID NO: 3454 - protein, 76 aa, Glycine max
  misc_feature (1)..(76): Ceres Seq. ID no. 12608778
EMGISSKCMTVLNNLMNDMFERLAFEASKLKDYTGHMTLSSREIQGAVRLVLPGELGKHAIAEGVKAVNNYTSYDA

SEQ ID NO: 3455 - protein, 75 aa, Glycine max
  misc_feature (1)..(75): Ceres Seq. ID no. 12608779
MGISSKCMTVLNNLMNDMFERLAFEASKLKDYTGHMTLSSREIQGAVRLVLPGELGKHAIAEGVKAVNNYTSYDA

SEQ ID NO: 3456 - protein, 68 aa, Glycine max
  misc_feature (1)..(68): Ceres Seq. ID no. 12608780
MTVLNNLMNDMFERLAFEASKLKDYTGHMTLSSREIQGAVRLVLPGELGKHAIAEGVKAVNNYTSYDA

SEQ ID NO: 3457 - DNA, 588 bp, Glycine max
  misc_feature (1)..(588): Ceres Seq. ID no. 12609077
ataatgaaatgctcaaaatccctagctaagcaaagtgaggaggaggcatagcagataacacaaacacaaccttagccaacaacaaagcaaaggaaaggaaaggaaagcatgggtttactgtggtggcgaaaggggaataaaacccaagcccaacctgaagcaaagtcgaacggcgcagactcaacgaaacccctcactgaggccccagggatgaacggcgccgtggaggttccccggccctcgaacaccaccgtctcgattttcgagtttggctccgtggccgcctccaacgacaaggtcacgctcgccggctattgccccgtctccgaagacctcgagccctgccgctgggagatcctccccgccgttcagtccaacgccccccagtttcgcgtggtcttctgattctgatacccaactttttttctctcttttgccgcttgtgggattcaattttatctactttttttttttttttgctataaaacattcgagtttaagcgcatttttctttttgttatgttatgtgtctcttttcttttcgcctgttcggttttttactcccaatattacatgactgtcactgtt

SEQ ID NO: 3458 - protein, 98 aa, Glycine max
  misc_feature (1)..(98): Ceres Seq. ID no. 12609078
MGLLWWRKGNKTQAQPEAKSNGADSTKPLTEAPGMNGAVEVPRPSNTTVSIFEFGSVAASNDKVTLAGYCPVSEDLEPCRWEILPAVQSNAPQFRVVF

SEQ ID NO: 3459 - protein, 64 aa, Glycine max
  misc_feature (1)..(64): Ceres Seq. ID no. 12609079
MNGAVEVPRPSNTTVSIFEFGSVAASNDKVTLAGYCPVSEDLEPCRWEILPAVQSNAPQFRVVF

SEQ ID NO: 3460 - DNA, 628 bp, Glycine max
  misc_feature (1)..(628): Ceres Seq. ID no. 12609201
aacaacagaacttacttacagaagcctctttaatttccaccccctctagattttctctctaactggttttccttagatctctcacaatgacctttaatcttatgcttttgttctgtttggttgcagtgatcagcaatgttgttgttccaactagtgcaagacaactcatgagtaccaccactacttcaccagacgagaaagaagtgatgatgaatattggcactgcaaatagaggacatgatgaaaaacatgatcatcaagtacaagtagatgatccaacaagcaagaactataacgtggaaaagaaagaagaaagatttgacaaaaaccaaatcatccctcccattcttccattcccatttggttttccatttccacgtccttcttttccatttccacgtgctgcttttccatttccacgttttccacttccaacaccattcgttccagggcttccatggccaataagccctgatgcggtttcttcatttccgtatcctcctgtagacatgcctgcttctccttaccttcatacaacaccttcatctccacctaactaaacatgtttccatgtgatgcatgggggtgatatccatttgcatgctatgtgcttctcgtgcggcacgag

SEQ ID NO: 3461 - protein, 157 aa, Glycine max
  misc_feature (1)..(157): Ceres Seq. ID no. 12609202
MTFNLMLLFCLVAVISNVVVPTSARQLMSTTTTSPDEKEVMMNIGTANRGHDEKHDHQVQVDDPTSKNYNVEKKEERFDKNQIIPPILPFPFGFPFPRPSFPFPRAAFPFPRFPLPTPFVPGLPWPISPDAVSSFPYPPVDMPASPYLHTTPSSPPN

SEQ ID NO: 3462 - protein, 152 aa, Glycine max
  misc_feature (1)..(152): Ceres Seq. ID no. 12609203
MLLFCLVAVISNVVVPTSARQLMSTTTTSPDEKEVMMNIGTANRGHDEKHDHQVQVDDPTSKNYNVEKKEERFDKNQIIPPILPFPFGFPFPRPSFPFPRAAFPFPRFPLPTPFVPGLPWPISPDAVSSFPYPPVDMPASPYLHTTPSSPPN

SEQ ID NO: 3463 - protein, 130 aa, Glycine max
  misc_feature (1)..(130): Ceres Seq. ID no. 12609204
MSTTTTSPDEKEVMMNIGTANRGHDEKHDHQVQVDDPTSKNYNVEKKEERFDKNQIIPPILPFPFGFPFPRPSFPFPRAAFPFPRFPLPTPFVPGLPWPISPDAVSSFPYPPVDMPASPYLHTTPSSPPN

SEQ ID NO: 3464 - DNA, 557 bp, Glycine max
  misc_feature (1)..(557): Ceres Seq. ID no. 12609643
accttgcgttggccctccaccaccaccaaatcaccataagcgactagatctgattcgcaacacctccgaccatggcgaatgtggcgattcttgagctcaatggaaactgtggtaatacagtggaagagatagtgaaaatggagagagagatctttcccgagcatgaatcactgacttcattctttcacgatgaacttagaaagaagaacagtggattgctttatcttcacgtggatggcgaacttgtaggctatgtcatgtattcttggccttcttcctcgtatgccactatcaccgagctcgcagttaaggagcaatggaggggacaaggccacggagaggctttgttgaaagcagcaattcagaaatgcagtacaaggaaagttttgcgcataatgcttcatgtggatcccttgaggactcctgcagtgaatctttacaagaaacatggtttccaagttgacactttggttgaagtgtactactcctcagatagaaatgcttatagaatgtacttggacttcgattcaagttgaaggagaaaatgaataacattt

SEQ ID NO: 3465 - protein, 154 aa, Glycine max
  misc_feature (1)..(154): Ceres Seq. ID no. 12609644
MANVAILELNGNCGNTVEEIVKMEREIFPEHESLTSFFHDELRKKNSGLLYLHVDGELVGYVMYSWPSSSYATITELAVKEQWRGQGHGEALLKAAIQKCSTRKVLRIMLHVDPLRTPAVNLYKKHGFQVDTLVEVYYSSDRNAYRMYLDFDSS

SEQ ID NO: 3466 - protein, 132 aa, Glycine max
  misc_feature (1)..(132): Ceres Seq. ID no. 12609645
MEREIFPEHESLTSFFHDELRKKNSGLLYLHVDGELVGYVMYSWPSSSYATITELAVKEQWRGQGHGEALLKAAIQKCSTRKVLRIMLHVDPLRTPAVNLYKKHGFQVDTLVEVYYSSDRNAYRMYLDFDSS

SEQ ID NO: 3467 - protein, 92 aa, Glycine max
  misc_feature (1)..(92): Ceres Seq. ID no. 12609646
MYSWPSSSYATITELAVKEQWRGQGHGEALLKAAIQKCSTRKVLRIMLHVDPLRTPAVNLYKKHGFQVDTLVEVYYSSDRNAYRMYLDFDSS

SEQ ID NO: 3468 - DNA, 956 bp, Glycine max
  misc_feature (1)..(956): Ceres Seq. ID no. 12609770
gtggtgcaaggcataaagaggagaattggtggggataggcgaaggaggtggcgactgagtagtgaatagggtttttgattgattgatagcaataattggtgttagcgaagcttgagaattgagatttatgggtcgcaatcgcagtcgcagtcgcagtgtgtcacgctctccttccaattcccgcagaagaaggtactctccatcccctgtttctcatcgccactcgagaacttccaggcgccgctctccttcccacaagcgccgtcgaaggcacagaacctcttcctccccctctctttcacgcagccccactcccaaacccaagaaagatcaaaacaaaagcaagcgtcaacacgaggaagagttgaaactattggaagaagagactgcaagaagactggaagaagcaattcgaaaaaatgttgaggagaaacttaacacagaggaagtcaagttagaaatagaaaagcgcgtagcagagggagtgaagaaattgtttgatgatgttgaagctcaacttgaaaaagaaaaggaagatgctcttactgaagctagaaggaaggaagaacaagcccgtaaagaaagagaagagctggacaagatgcttgaagagaataggaggagagtggaagaatctcagagaagagaagctctagagcagcaaagaaaggaggaggaacgacaaagggaattggagatgattcagagacaaaaagaagaggctgctcggagaaagaagctggaggaggaagaagaacatgcaaatcgaattaattctttgggtaagaacaaatctaggcctaaatcttatggtttctaattactactatatgtgatatcattttgtaccccaaattatttgtaccctttatgtggaacaatgatcttgaatgaaagatttgatactcctatgtttgagcttgcaacctactttattaaaagatctaagaaaatcg

SEQ ID NO: 3469 - protein, 230 aa, Glycine max
  misc_feature (1)..(230): Ceres Seq. ID no. 12609771
MGRNRSRSRSVSRSPSNSRRRRYSPSPVSHRHSRTSRRRSPSHKRRRRHRTSSSPSLSRSPTPKPKKDQNKSKRQHEEELKLLEEETARRLEEAIRKNVEEKLNTEEVKLEIEKRVAEGVKKLFDDVEAQLEKEKEDALTEARRKEEQARKEREELDKMLEENRRRVEESQRREALEQQRKEEERQRELEMIQRQKEEAARRKKLEEEEEHANRINSLGKNKSRPKSYGF

SEQ ID NO: 3470 - DNA, 631 bp, Glycine max
  misc_feature (1)..(631): Ceres Seq. ID no. 12609890
aacgcactcggcaatcagcagtcaagcaatccccactcacatctctccacttcccgaatcctttgtccagctcgccatggacgcctcagccaccgtagccaccgggaaggggaagaagggcgtggccgggcgcaaggcgggcggccccaggaagaagtccgtgtcgcggtccgtcaaggccgggctccagttccccgtcagccgcatcgggcgcttcctcaagaagggccgctacgcgcagcgcgtcggctccggcgcccccgtctacctcgcggccgtcctcgagtacctcgccgccgagctgctggagctcgcgggcaacgccgccaaggacaacaagaagagccggatcatcccccgccacctgctgctcgccatcaggaacgacgaggagctcggcaagctgctcgccggcatcaccatcgcgcacggcggcgtgattcccaacatcaacccggtgctgctccccaagaagacggccgagaagtcccccaaggagcccaagtcgcccaagaagaccgccaagtcccccaagaaggcttaggttccttgcgtagttaggctgtagctggggtgtatggatgggtgtgcttgaggatacttcagttcgaagtagactgttcttgctttg

SEQ ID NO: 3471 - protein, 186 aa, Glycine max
  misc_feature (1)..(186): Ceres Seq. ID no. 12609891
NALGNQQSSNPHSHLSTSRILCPARHGRLSHRSHREGEEGRGRAQGGRPQEEVRVAVRQGRAPVPRQPHRALPQEGPLRAARRLRRPRLPRGRPRVPRRRAAGARGQRRQGQQEEPDHPPPPAARHQERRGARQAARRHHHRARRRDSQHQPGAAPQEDGREVPQGAQVAQEDRQVPQEGLGSLRS

SEQ ID NO: 3472 - protein, 180 aa, Glycine max
  misc_feature (1)..(180): Ceres Seq. ID no. 12609892
THSAISSQAIPTHISPLPESFVQLAMDASATVATGKGKKGVAGRKAGGPRKKSVSRSVKAGLQFPVSRIGRFLKKGRYAQRVGSGAPVYLAAVLEYLAAELLELAGNAAKDNKKSRIIPRHLLLAIRNDEELGKLLAGITIAHGGVIPNINPVLLPKKTAEKSPKEPKSPKKTAKSPKKA

SEQ ID NO: 3473 - protein, 155 aa, Glycine max
  misc_feature (1)..(155): Ceres Seq. ID no. 12609893
MDASATVATGKGKKGVAGRKAGGPRKKSVSRSVKAGLQFPVSRIGRFLKKGRYAQRVGSGAPVYLAAVLEYLAAELLELAGNAAKDNKKSRIIPRHLLLAIRNDEELGKLLAGITIAHGGVIPNINPVLLPKKTAEKSPKEPKSPKKTAKSPKKA

SEQ ID NO: 3474 - DNA, 695 bp, Glycine max
  misc_feature (1)..(695): Ceres Seq. ID no. 12609898
acatccacagccaattccgagctcttccgagtccctgaatccatctctcatctcctccatcgttccacagacgcacgagctctcgtcgagcaggccataccggactggctagccgagctccgatggtttcctcaatgaagcagtgcagagatgaggcccaggaggtgcccctgtccctctcgctctccctcggcgtcatggccgaccgcagcaagaagcagcgccgcggcggcgcagatggcgagttcgtctgcaagacgtgcagccgcgccttcccgtcgttccaggcgctgggcgggcaccggactagccacctccgcggccgccacgggctagcgctcggcctcacttcagggtccgatcagccggggaccaagaagacgacggaccagaagcaggcgcaccagtgccacgtctgcgggctggagttcgagatggggcaggcgatgggcggccacatgcgccgacaccgcgagcaggaggccgccaccacggcgcaggcgccgcccgttctgctccagctcttcgtctagcaccgcactgatttctctcaagttacatagctaggcatttctggttctagtagagatttacaggttggcctatgtgcgcggtttggtttgtacatttgctgcacactactgtagctcgttggtctgttcgctcttgttaggtatatatgcacatattttagg

SEQ ID NO: 3475 - protein, 136 aa, Glycine max
  misc_feature (1)..(136): Ceres Seq. ID no. 12609899
MVSSMKQCRDEAQEVPLSLSLSLGVMADRSKKQRRGGADGEFVCKTCSRAFPSFQALGGHRTSHLRGRHGLALGLTSGSDQPGTKKTTDQKQAHQCHVCGLEFEMGQAMGGHMRRHREQEAATTAQAPPVLLQLFV

SEQ ID NO: 3476 - protein, 132 aa, Glycine max
  misc_feature (1)..(132): Ceres Seq. ID no. 12609900
MKQCRDEAQEVPLSLSLSLGVMADRSKKQRRGGADGEFVCKTCSRAFPSFQALGGHRTSHLRGRHGLALGLTSGSDQPGTKKTTDQKQAHQCHVCGLEFEMGQAMGGHMRRHREQEAATTAQAPPVLLQLFV

SEQ ID NO: 3477 - protein, 111 aa, Glycine max
  misc_feature (1)..(111): Ceres Seq. ID no. 12609901
MADRSKKQRRGGADGEFVCKTCSRAFPSFQALGGHRTSHLRGRHGLALGLTSGSDQPGTKKTTDQKQAHQCHVCGLEFEMGQAMGGHMRRHREQEAATTAQAPPVLLQLFV

SEQ ID NO: 3478 - DNA, 650 bp, Glycine max
  misc_feature (1)..(650): Ceres Seq. ID no. 12609925
ctctcgtctccgttcacgatcgatccgcatcgccgtcgccctcgatcgccttcccttccgcacagactcccagggcctgctgaaacctgcttcttcttctccgtcgtcatcttcgtcttcgtcttcatcgtcttcttcttgtggagatcgaccagatgactggctgcaacggtaacggcaactcgtccgcctcggccatggggcatcagacggtcgctgagaagaagttcggaggaattgcaccaaagaagcctctgatttcaaaggaccatgagcgcgcctacttcgactccgccgactgggtcctcggcaagcaagctgcaagcaacaacgcacaggcggcggcaatcgagtccttgaagccaaagctaaagaggacgccccatcaccagctcccccctcgcaagccggcctgcgcgtccggctgatcgaccgcgacgggacaaaggatcactggaggaagccggagcggtcgcatgagacgacgaagctggtgatctagctggttgcatatgttaggagtcgatcgagtcagggtttgggatctgcagttagacccttttggttctagcagcctatgatttgtcacagtagggctagtagcatactcctacattgttatggcttcagctttgagatgtttggtttcc

SEQ ID NO: 3479 - protein, 90 aa, Glycine max
  misc_feature (1)..(90): Ceres Seq. ID no. 12609926
MTGCNGNGNSSASAMGHQTVAEKKFGGIAPKKPLISKDHERAYFDSADWVLGKQAASNNAQAAAIESLKPKLKRTPHHQLPPRKPACASG

SEQ ID NO: 3480 - protein, 76 aa, Glycine max
  misc_feature (1)..(76): Ceres Seq. ID no. 12609927
MGHQTVAEKKFGGIAPKKPLISKDHERAYFDSADWVLGKQAASNNAQAAAIESLKPKLKRTPHHQLPPRKPACASG

SEQ ID NO: 3481 - protein, 57 aa, Glycine max
  misc_feature (1)..(57): Ceres Seq. ID no. 12609928
SRLRSRSIRIAVALDRLPFRTDSQGLLKPASSSPSSSSSSSSSSSSCGDRPDDWLQR

SEQ ID NO: 3482 - DNA, 817 bp, Glycine max
  misc_feature (1)..(817): Ceres Seq. ID no. 12610243
aaaaagcttaaactaaaacccccaagaaacggagatgggtttggtcacagaggaggtgagagctaaggcagagatgtacacgggagatgagatatgccgggagaagacaaaatgcttcctcaaggaaatatctatgcccaatggcttactacctttgaaggacatagaagaggctgggtatgacagagagtcaggtgttgtgtggctgaagcagaaacagagcatcacccacaagttcgaaaatatcgataagctcgtctcctatggaaccgaggtcactgccgtggtcaaaaccgggaagatcaagaagctcactggtgtcaaggccaaggagcttcttatttgggtcagtgtcagtgagatctatacagaggagaaagagaagatcacctttaagtcaccaaccacactgtccaggactttccctgtctcagcttttattgtcccagaggaagtggaaccagccaaggaagagcctgctaaggagaagagcagtgaagccaccgaggaggtcaccgaggaagaacctgccaaggaggctgccaaggttgaacctgccaaagaggctgttgccgtcaaggaggcctaaccaagcttatcactgcttctatagtaaaaagagaccaaaatcttttgaagtgtgcttcaacaatttaaaccgacctttgagagttagtgcttctcactgctcttactctcatctattacctaccactcgttgctgcttatttttacctgtaataagatgtcaacatcatcctgttcttacaagtattaccgtataattatttataaactacactgaagttggttctgt

SEQ ID NO: 3483 - protein, 184 aa, Glycine max
  misc_feature (1)..(184): Ceres Seq. ID no. 12610244
MGLVTEEVRAKAEMYTGDEICREKTKCFLKEISMPNGLLPLKDIEEAGYDRESGVVWLKQKQSITHKFENIDKLVSYGTEVTAVVKTGKIKKLTGVKAKELLIWVSVSEIYTEEKEKITFKSPTTLSRTFPVSAFIVPEEVEPAKEEPAKEKSSEATEEVTEEEPAKEAAKVEPAKEAVAVKEA

SEQ ID NO: 3484 - protein, 173 aa, Glycine max
  misc_feature (1)..(173): Ceres Seq. ID no. 12610245
MEPRSLPWSKPGRSRSSLVSRPRSFLFGSVSVRSIQRRKRRSPLSHQPHCPGLSLSQLLLSQRKWNQPRKSLLRRRAVKPPRRSPRKNLPRRLPRLNLPKRLLPSRRPNQAYHCFYSKKRPKSFEVCFNNLNRPLRVSASHCSYSHLLPTTRCCLFLPVIRCQHHPVLTSITV

SEQ ID NO: 3485 - protein, 171 aa, Glycine max
  misc_feature (1)..(171): Ceres Seq. ID no. 12610246
MYTGDEICREKTKCFLKEISMPNGLLPLKDIEEAGYDRESGVVWLKQKQSITHKFENIDKLVSYGTEVTAVVKTGKIKKLTGVKAKELLIWVSVSEIYTEEKEKITFKSPTTLSRTFPVSAFIVPEEVEPAKEEPAKEKSSEATEEVTEEEPAKEAAKVEPAKEAVAVKEA

SEQ ID NO: 3486 - DNA, 917 bp, Glycine max
  misc_feature (1)..(917): Ceres Seq. ID no. 12610267
gtcaagagacaagaggactgccaaacccacacccatacaagaggcaggcaaggggcaccctcctcaagcctcaagcaaccaacgcagttcttccaccgatatttccttccctcgccggcaccgccgacgatctgcagccatggcaatggcttacaagatggcgacggaggggatgaacatcaaggaggagtgcaagcggtggttcacggagatgaagtggaagaaggtgcaccgcttcgtggtctacaagatcgacgagcggacgcgcgccgtgctggtggacaaggtgggcggccccggggaggggtacgacgagctcgtcgccgcgctgcccggcgacgactgccgctacgccgtcttcgacttcgacttcgtctccgtcgacaactgccagaagagcaagatcttcttcatcgcatggtcgccggcggcgtcgaggataagggccaagattctgtacgcgacgtcgaagcaaggcctgcggcgggtgctggagggggtccactacgaggtgcaggccaccgagcgctccgagatgggcttcgacgtcatcagagagcgcgcgcaatgagcgagcttgctgccgggagtgagttttatgtctgcagtctgcgcgacgatcgccgctgtactataatcggacggacgctgattggggctggttgggtgtgctctgccggcagcctcgatgcaacctgacgagggtttgggctttgatttagaaaaattatccgtggtttgagattgtgccgtgtgatgtataggcggagctgagagagtggcagcggattaatgaaacgtcccatctctgcgtgcgacgtggaaattccactgacgctggggatgccccgacttcgtttgctattgtgcttcaacacttcaaccgttcaagatagtacttctacggttgattgctc

SEQ ID NO: 3487 - protein, 232 aa, Glycine max
  misc_feature (1)..(232): Ceres Seq. ID no. 12610268
VKRQEDCQTHTHTRGRQGAPSSSLKQPTQFFHRYFLPSPAPPTICSHGNGLQDGDGGDEHQGGVQAVVHGDEVEEGAPLRGLQDRRADARRAGGQGGRPRGGVRRARRRAARRRLPLRRLRLRLRLRRQLPEEQDLLHRMVAGGVEDKGQDSVRDVEARPAAGAGGGPLRGAGHRALRDGLRRHQRARAMSELAAGSEFYVCSLRDDRRCTIIGRTLIGAGWVCSAGSLDAT

SEQ ID NO: 3488 - protein, 189 aa, Glycine max
  misc_feature (1)..(189): Ceres Seq. ID no. 12610269
SRDKRTAKPTPIQEAGKGHPPQASSNQRSSSTDISFPRRHRRRSAAMAMAYKMATEGMNIKEECKRWFTEMKWKKVHRFVVYKIDERTRAVLVDKVGGPGEGYDELVAALPGDDCRYAVFDFDFVSVDNCQKSKIFFIAWSPAASRIRAKILYATSKQGLRRVLEGVHYEVQATERSEMGFDVIRERAQ

SEQ ID NO: 3489 - protein, 143 aa, Glycine max
  misc_feature (1)..(143): Ceres Seq. ID no. 12610270
MAMAYKMATEGMNIKEECKRWFTEMKWKKVHRFVVYKIDERTRAVLVDKVGGPGEGYDELVAALPGDDCRYAVFDFDFVSVDNCQKSKIFFIAWSPAASRIRAKILYATSKQGLRRVLEGVHYEVQATERSEMGFDVIRERAQ

SEQ ID NO: 3490 - DNA, 981 bp, Glycine max
  misc_feature (1)..(981): Ceres Seq. ID no. 12610286
aaaaaatcaaaaatctcagccatggcgattgcttcaacctccactcttatcttctcctgcgccaaacccgatctccggccatttccgtcccattttcgttcttcttctccgtctccctctcctcttgtgagtcagctccgtatccctagcctaacccatgacccgatttctctgtcgggtcttatcggaaccggtttggtggctgcgacgttcatggcggcaggaccaggtagtactgctatggcggcggttgattctcttcagctaagcgaaccggcgaatgcgttgtctttacccacttgggctgttcatgtttccagcgttgtcgaatggattacggcgatggtgttggtatggaaatatggagaaagagagggttacgagtcatggaaaggtctctcatggggaatggtgcctttgcttggtggagctctttgcgcatgcacatggcatttcttttacaatgctgaatctcttgaggtgttggtagcgcttcagggagcactaactgtgattggtaatattactctgtgcattgctgcctttcgaatcaacaagtctgcatccaaaatggaaacctctgaagagccgtgagggctaaatacacatctatgtgtttaaaataaaggtcaaaggaatgatttgttttcagtaatttctacaggcaggaatctgaggtgtagcctttttggagagtggtgatggttagagaagcaactggatctttggatgtggtattagcggaaagatctttttgctttatatctctagtgattgcactaaacatgtttcttgagcgtgtgtgtgtatatacttttatattgtagtgtattgtattgtattatcctgattatattcctggtgagtgaggccagtgcttcatgttcataacctattatgtaaacattcttcttctgcaatcgttgtagtcctgacttcattattttcggtcttaggcttggatgatcacagagttcatgc

SEQ ID NO: 3491 - protein, 197 aa, Glycine max
  misc_feature (1)..(197): Ceres Seq. ID no. 12610287
KKSKISAMAIASTSTLIFSCAKPDLRPFPSHFRSSSPSPSPLVSQLRIPSLTHDPISLSGLIGTGLVAATFMAAGPGSTAMAAVDSLQLSEPANALSLPTWAVHVSSVVEWITAMVLVWKYGEREGYESWKGLSWGMVPLLGGALCACTWHFFYNAESLEVLVALQGALTVIGNITLCIAAFRINKSASKMETSEEP

SEQ ID NO: 3492 - protein, 190 aa, Glycine max
  misc_feature (1)..(190): Ceres Seq. ID no. 12610288
MAIASTSTLIFSCAKPDLRPFPSHFRSSSPSPSPLVSQLRIPSLTHDPISLSGLIGTGLVAATFMAAGPGSTAMAAVDSLQLSEPANALSLPTWAVHVSSVVEWITAMVLVWKYGEREGYESWKGLSWGMVPLLGGALCACTWHFFYNAESLEVLVALQGALTVIGNITLCIAAFRINKSASKMETSEEP

SEQ ID NO: 3493 - protein, 126 aa, Glycine max
  misc_feature (1)..(126): Ceres Seq. ID no. 12610289
MAAGPGSTAMAAVDSLQLSEPANALSLPTWAVHVSSVVEWITAMVLVWKYGEREGYESWKGLSWGMVPLLGGALCACTWHFFYNAESLEVLVALQGALTVIGNITLCIAAFRINKSASKMETSEEP

SEQ ID NO: 3494 - DNA, 766 bp, Glycine max
  misc_feature (1)..(766): Ceres Seq. ID no. 12610334
gtttttcctatcctctccctcttcttcatctctcgtatacaatcaaaaccaacacatacagagagacacgaaccaaagagtgcaaaatggcagcgacgtctctctccatcgcaaccacattccgctcctcgtcttacctcactcacgcttctccccatggcttcttcccttcccgacccaacacaacattccgcatctgttcaccttcctccacaccgacccaccgtgcaacccacctccgtcccgtctccgccgtcgaagctccggagaagatcgagaagattgggtccgagatctcttctctgactctcgaggaagcccgcgtcctcgtggactaccttcaggacaagttcggtgtgtcgccgctctcgttagctcccgctgcggcggctgtggctgctccgggagacggtggcggtgcggcggctgcggtggaggagcagacggagttcgacgtggtgattaacgaagtgccgagcagtgcgcgtatcgcggtgattaaagcggtgagggctttgactagcttggcgttgaaggaagcgaaggagcttatcgaagggttgccgaagaagtttaaggaaggtgtgacgaaggatgaagctgaagaagctaagaagcagcttgaagaagctggcgctaaggtctcgattgcttaaagaatgtgtgggtctttttttgctgtgttgttagtatagttggcgaatgagaattgttgattaaatttttgaaaaaaaaaaaaaaaaaagcttatcgataccgtcgacct

SEQ ID NO: 3495 - protein, 217 aa, Glycine max
  misc_feature (1)..(217): Ceres Seq. ID no. 12610335
FSYPLPLLHLSYTIKTNTYRETRTKECKMAATSLSIATTFRSSSYLTHASPHGFFPSRPNTTFRICSPSSTPTHRATHLRPVSAVEAPEKIEKIGSEISSLTLEEARVLVDYLQDKFGVSPLSLAPAAAAVAAPGDGGGAAAAVEEQTEFDVVINEVPSSARIAVIKAVRALTSLALKEAKELIEGLPKKFKEGVTKDEAEEAKKQLEEAGAKVSIA

SEQ ID NO: 3496 - protein, 189 aa, Glycine max
  misc_feature (1)..(189): Ceres Seq. ID no. 12610336
MAATSLSIATTFRSSSYLTHASPHGFFPSRPNTTFRICSPSSTPTHRATHLRPVSAVEAPEKIEKIGSEISSLTLEEARVLVDYLQDKFGVSPLSLAPAAAAVAAPGDGGGAAAAVEEQTEFDVVINEVPSSARIAVIKAVRALTSLALKEAKELIEGLPKKFKEGVTKDEAEEAKKQLEEAGAKVSIA

SEQ ID NO: 3497 - protein, 154 aa, Glycine max
  misc_feature (1)..(154): Ceres Seq. ID no. 12610337
FFLSSPSSSSLVYNQNQHIQRDTNQRVQNGSDVSLHRNHIPLLVLPHSRFSPWLLPFPTQHNIPHLFTFLHTDPPCNPPPSRLRRRSSGEDREDWVRDLFSDSRGSPRPRGLPSGQVRCVAALVSSRCGGCGCSGRRWRCGGCGGGADGVRRGD

SEQ ID NO: 3498 - DNA, 808 bp, Glycine max
  misc_feature (1)..(808): Ceres Seq. ID no. 12610475
aggacgagccggcggcgcagccagtcagaggagcggcggcggcgcgagctctgtctccggggagaagccgaggagcgagtgagcagcagccactccgtgcgttgcggggtggggaggcaactccgtgagctcgtcttcgtgcggccgccggcgccggtggtgaccaggccaggtccgccatgtcggccttcaccggcgtgtccatcgccgacggctacaagcggtgcggctgcgagacgctggccgtggacgcccgcggggacagcggctaccacctgctcatggtcaacggctactcgcgcaccaaagagctgattcccaccggccagagcatcaccgccaactctttcaatgtgggaggccatgactggttgatcgagtactaccctaacggcgagaaccttctctacgacaccgatgacgacgacgaagagcccgtggaggtcaggttcagtttcagcttggtggaccaggtggagaagcagatgcccatgtacattcgtgcaacccgcagcttctccagcaccacttcaatctggggcaacgacaggtttatcagaaagagcgattcattcctgataaaatccttatgttctataccataagagaacctacctcaaggccaacacgttccctagtggaaaatgatgctgatgcttgttctatactatatgttggtgatgcattctttcagcattgccatgagcctctgttttctttctactcctctgttttcttagtttttttcctgaaagagtatgtttctttcagtggaagcactatgcatgtttacgtcattcattcattc

SEQ ID NO: 3499 - protein, 141 aa, Glycine max
  misc_feature (1)..(141): Ceres Seq. ID no. 12610476
MSAFTGVSIADGYKRCGCETLAVDARGDSGYHLLMVNGYSRTKELIPTGQSITANSFNVGGHDWLIEYYPNGENLLYDTDDDDEEPVEVRFSFSLVDQVEKQMPMYIRATRSFSSTTSIWGNDRFIRKSDSFLIKSLCSIP

SEQ ID NO: 3500 - protein, 107 aa, Glycine max
  misc_feature (1)..(107): Ceres Seq. ID no. 12610477
MVNGYSRTKELIPTGQSITANSFNVGGHDWLIEYYPNGENLLYDTDDDDEEPVEVRFSFSLVDQVEKQMPMYIRATRSFSSTTSIWGNDRFIRKSDSFLIKSLCSIP

SEQ ID NO: 3501 - protein, 104 aa, Glycine max
  misc_feature (1)..(104): Ceres Seq. ID no. 12610478
RTSRRRSQSEERRRRELCLRGEAEERVSSSHSVRCGVGRQLRELVFVRPPAPVVTRPGPPCRPSPACPSPTATSGAAARRWPWTPAGTAATTCSWSTATRAPKS

SEQ ID NO: 3502 - DNA, 588 bp, Glycine max
  misc_feature (1)..(588): Ceres Seq. ID no. 12610503
gaacagctggtcgaagcgagcgcctggtctatcaatggcggaggagaccgagaccgagaagcagctcttctctccgtcggatgtctcgctccacgcatccacgaaggactgctgggtcgtcatccatggcaaggtgtacgatgtgaccaaattcctcgaggaccaccccggcggagaggatgtcctcctccatgcatctgcctctggggatgccacggaggcttttgaagatgtgggccacagcacatcagccatcagcatgatgagcagctacctgattggaagcatcgaggactttgtgcctcccagtgcaacgaaggacgccacagttggtggcagtgatgtgcttccagattccagaacaatgaagaggaacaaaggctctcctgctccaaacacatttctggacttcgtgctccctttatgcatgcttgtcctggcctttgtagcttggtactacctaaccttcgtggccgagagctagtaaattcggagaagattcatatcattgcacatttttacgtcactagtgttgctgcagcgatacatttaaggagcgtaaacttggtcatagaatcatttgctctc

SEQ ID NO: 3503 - protein, 160 aa, Glycine max
  misc_feature (1)..(160): Ceres Seq. ID no. 12610504
NSWSKRAPGLSMAEETETEKQLFSPSDVSLHASTKDCWVVIHGKVYDVTKFLEDHPGGEDVLLHASASGDATEAFEDVGHSTSAISMMSSYLIGSIEDFVPPSATKDATVGGSDVLPDSRTMKRNKGSPAPNTFLDFVLPLCMLVLAFVAWYYLTFVAES

SEQ ID NO: 3504 - protein, 149 aa, Glycine max
  misc_feature (1)..(149): Ceres Seq. ID no. 12610505
MAEETETEKQLFSPSDVSLHASTKDCWVVIHGKVYDVTKFLEDHPGGEDVLLHASASGDATEAFEDVGHSTSAISMMSSYLIGSIEDFVPPSATKDATVGGSDVLPDSRTMKRNKGSPAPNTFLDFVLPLCMLVLAFVAWYYLTFVAES

SEQ ID NO: 3505 - DNA, 852 bp, Glycine max
  misc_feature (1)..(852): Ceres Seq. ID no. 12610648
tcccacaacaccccacccgcccctctccccctccccaatctccgacccgaaccccagcggcggagccgacgaagaggaggagaccaaggctcgacggacaaggggaagacctccgctccctcggcgatcgcgacaccaccctcctcatcaagatggtgctgatgcaggcagatccgttcctgagcgagctgaccaacatgtacgagcggagcacggagaagggctccgtgtgggtcaccatgaagcgatcgtcgatgaagtgtcaggctaggttgaagaagatggcgagtaagggggagcctgttgagtaccggtgcctggtccgcgccactgatggcaagaggaacatctccacctcgctgtctgcaaaggagtatctgaaattccaagcttcatatgccctggtccttaaagcccatatgcacgctttgaagaagagggagaggaaggacaggaagaagacggtcgaggcagagaagatacccgagaaggaaccgaagaagcagaagaaatcatcttcgaaaaaatccgcagggtctaagtagtgaggtacttgcagaatttgactgagacctttttcgcccacatgtgcggtcaagacgttgtcacccgttttacccttaattcatgtccgcgagatgaagcctgtgaatacctatatagagacgcctcgtcgcctggcatttttgaagctgcgttttgttctggttgtaagcctccctggatggcatgggcatgctttcttgaactgctagatctgaccaccaaagtcttagttcaggttggaatggttcgccggtttgatggttttatgcctatggtatgaatgaagaatctgtagcttggttgttg

SEQ ID NO: 3506 - protein, 180 aa, Glycine max
  misc_feature (1)..(180): Ceres Seq. ID no. 12610649
PQHPTRPSPPPQSPTRTPAAEPTKRRRPRLDGQGEDLRSLGDRDTTLLIKMVLMQADPFLSELTNMYERSTEKGSVWVTMKRSSMKCQARLKKMASKGEPVEYRCLVRATDGKRNISTSLSAKEYLKFQASYALVLKAHMHALKKRERKDRKKTVEAEKIPEKEPKKQKKSSSKKSAGSK

SEQ ID NO: 3507 - protein, 130 aa, Glycine max
  misc_feature (1)..(130): Ceres Seq. ID no. 12610650
MVLMQADPFLSELTNMYERSTEKGSVWVTMKRSSMKCQARLKKMASKGEPVEYRCLVRATDGKRNISTSLSAKEYLKFQASYALVLKAHMHALKKRERKDRKKTVEAEKIPEKEPKKQKKSSSKKSAGSK

SEQ ID NO: 3508 - protein, 127 aa, Glycine max
  misc_feature (1)..(127): Ceres Seq. ID no. 12610651
MQADPFLSELTNMYERSTEKGSVWVTMKRSSMKCQARLKKMASKGEPVEYRCLVRATDGKRNISTSLSAKEYLKFQASYALVLKAHMHALKKRERKDRKKTVEAEKIPEKEPKKQKKSSSKKSAGSK

SEQ ID NO: 3509 - DNA, 711 bp, Glycine max
  misc_feature (1)..(711): Ceres Seq. ID no. 12610679
aaggtaatcaactcgctcctactgactcagtccgagtcacccgattcactaacgaatcttcactcttgttcacagaacttgagatgaaaggcggccaatcgaaagcagaagcaacgagcacagatcaaagactcaaaaccagaggaaggaagaagaagacggcgacgaaggacccaaacaaacctaagagacctccaagcgctttcttcgtcttcttagatgattttcgacgggagttcaaagaggcgaaccctaacaacaagtccgtcgccgccgttggtaaggctgctggagctaagtggaagtctatgactgaggaagagaaagctccttatgcttccaaggcagagaccaggaagagtgaatataataagagtatgcaacagtacaacatgaaactggctaatggaaccagtagaggtgaagatgatgagtccaagtctgaagttgacgaagctggaggagcaagcgaagcggaggaagaagacgatgattaaggaggctttctcgtctaggttactgccattgactgactcagatttgtggatgggattagtaatttaaatgtgtcccaaaaaaaaactgaaaaactggttatgctttgtgtttgtaatattaagaacctcagttgctacttcttcgtgtttaggtcagttgtatggtcggataggatcacttggatgctatgtctccttattaccttctgtgttt

SEQ ID NO: 3510 - protein, 164 aa, Glycine max
  misc_feature (1)..(164): Ceres Seq. ID no. 12610680
GNQLAPTDSVRVTRFTNESSLLFTELEMKGGQSKAEATSTDQRLKTRGRKKKTATKDPNKPKRPPSAFFVFLDDFRREFKEANPNNKSVAAVGKAAGAKWKSMTEEEKAPYASKAETRKSEYNKSMQQYNMKLANGTSRGEDDESKSEVDEAGGASEAEEEDDD

SEQ ID NO: 3511 - protein, 137 aa, Glycine max
  misc_feature (1)..(137): Ceres Seq. ID no. 12610681
MKGGQSKAEATSTDQRLKTRGRKKKTATKDPNKPKRPPSAFFVFLDDFRREFKEANPNNKSVAAVGKAAGAKWKSMTEEEKAPYASKAETRKSEYNKSMQQYNMKLANGTSRGEDDESKSEVDEAGGASEAEEEDDD

SEQ ID NO: 3512 - DNA, 805 bp, Glycine max
  misc_feature (1)..(805): Ceres Seq. ID no. 12610699
aaaaagaatcattcaaatgaaatggtggttcagaaatgggggaaggaggagcctccctttctctctgtgtgtatgggttgcgagaaggagtagaaccatgcgttcagacgcggcgttggaagccatagccaaagcttcagaagacagagttcccaacatagttctctacaactacccttccttttctggagcatactctgctctctttgctcacctcttctacactcaccacaatctcccttccctcatattacccttctcttcggttccccttctcgctctcagggttgaagatttgtgctttgaaggcctggagacgtgttatctacttgactttattcctccgaaggaattccttttcgacctttctcgtaaatcaaaatgcaagattattgggtttgatcatcggaaatcggtacttggacatattccccctgccaatgattgccctgagaatattatgattaatgtaaatcttgagaagagtagctccagtgttgtttatgagtactttgccggcaaatgtgaggatgctaatatttctaatggtgaggctccatgtttggtggactcaaaagacaaaggccgagtggagccttccaaaattttggtttgttctgctgcttttgttttgttcctcatccctgaaggacgtcttatttcaagttataaaagttctactagatgaaaagataaagtagtcaggtgatcctgtgatatatttgttctcttatctatcgaaatctgctggaataataagcatttagatcaaaaaaaaaaaaaaatatcgataccgtcgacctcg

SEQ ID NO: 3513 - protein, 228 aa, Glycine max
  misc_feature (1)..(228): Ceres Seq. ID no. 12610700
KRIIQMKWWFRNGGRRSLPFSLCVWVARRSRTMRSDAALEAIAKASEDRVPNIVLYNYPSFSGAYSALFAHLFYTHHNLPSLILPFSSVPLLALRVEDLCFEGLETCYLLDFIPPKEFLFDLSRKSKCKIIGFDHRKSVLGHIPPANDCPENIMINVNLEKSSSSVVYEYFAGKCEDANISNGEAPCLVDSKDKGRVEPSKILVCSAAFVLFLIPEGRLISSYKSSTR

SEQ ID NO: 3514 - protein, 223 aa, Glycine max
  misc_feature (1)..(223): Ceres Seq. ID no. 12610701
MKWWFRNGGRRSLPFSLCVWVARRSRTMRSDAALEAIAKASEDRVPNIVLYNYPSFSGAYSALFAHLFYTHHNLPSLILPFSSVPLLALRVEDLCFEGLETCYLLDFIPPKEFLFDLSRKSKCKIIGFDHRKSVLGHIPPANDCPENIMINVNLEKSSSSVVYEYFAGKCEDANISNGEAPCLVDSKDKGRVEPSKILVCSAAFVLFLIPEGRLISSYKSSTR

SEQ ID NO: 3515 - protein, 196 aa, Glycine max
  misc_feature (1)..(196): Ceres Seq. ID no. 12610702
MRSDAALEAIAKASEDRVPNIVLYNYPSFSGAYSALFAHLFYTHHNLPSLILPFSSVPLLALRVEDLCFEGLETCYLLDFIPPKEFLFDLSRKSKCKIIGFDHRKSVLGHIPPANDCPENIMINVNLEKSSSSVVYEYFAGKCEDANISNGEAPCLVDSKDKGRVEPSKILVCSAAFVLFLIPEGRLISSYKSSTR

SEQ ID NO: 3516 - DNA, 972 bp, Glycine max
  misc_feature (1)..(972): Ceres Seq. ID no. 12610896
cgaaaaatcacattcaccttcaaacatcaaacatcacatctcttaaaagagtttctttgtatcaatggcaggtatcaaagttttcggacacgctgcttccatttccaccagaagagtcctcctcaccctccacgagaaaaacctcgactttgagctcgttcatgtcgacctcaaggacggtgagcacaagaaagagtctttcctatcccacaacccttttggtaaagttccggcctttgaagatggagacctcaaaatcttcgagtcaagagctatcactcagtacatagctcaccgatacgaaggccaaggaactaaccttctccagcccgactccaagaacctggcccactatgcaatcatggccatgggaatgcaagtagaagctcaccagttcgacccactggcttcaaagcttgcttgggaacatgtatttaagctcatctatggcttgaccacagaccaagccgttgttgccgaagaagaggctaagttagccaaggtccttaatgtatacgaggctcggctcaaggagttcaagtatttggctggtgacacttttactttgaccgatcttcaccacattcctgcggttcaatacttgcttgaaactcccaccaagaagcttttcaccgagcgtccacatgtcaacaagtgggtggctgagatcaccaagaggccagcttcacagaagatccttcagtgaggaatttctaaaaggctctgcttcagtaacagtaataatgctcagactaaataagtggctgcttcactgcccaatttctcattaatctgtttttctttctcagttatgtgtgtgtgtgttcttgagagatctttgttgaatcaaaaactatctatctaatctttaagctcttttataataaaaaggttagttaattaatacaaaggttgcaatgtcttaactgcaatgtcttaactgcagagttattactgagaatattatacatt

SEQ ID NO: 3517 - protein, 213 aa, Glycine max
  misc_feature (1)..(213): Ceres Seq. ID no. 12610897
MAGIKVFGHAASISTRRVLLTLHEKNLDFELVHVDLKDGEHKKESFLSHNPFGKVPAFEDGDLKIFESRAITQYIAHRYEGQGTNLLQPDSKNLAHYAIMAMGMQVEAHQFDPLASKLAWEHVFKLIYGLTTDQAVVAEEEAKLAKVLNVYEARLKEFKYLAGDTFTLTDLHHIPAVQYLLETPTKKLFTERPHVNKWVAEITKRPASQKILQ

SEQ ID NO: 3518 - protein, 114 aa, Glycine max
  misc_feature (1)..(114): Ceres Seq. ID no. 12610898
MAMGMQVEAHQFDPLASKLAWEHVFKLIYGLTTDQAVVAEEEAKLAKVLNVYEARLKEFKYLAGDTFTLTDLHHIPAVQYLLETPTKKLFTERPHVNKWVAEITKRPASQKILQ

SEQ ID NO: 3519 - protein, 112 aa, Glycine max
  misc_feature (1)..(112): Ceres Seq. ID no. 12610899
MGMQVEAHQFDPLASKLAWEHVFKLIYGLTTDQAVVAEEEAKLAKVLNVYEARLKEFKYLAGDTFTLTDLHHIPAVQYLLETPTKKLFTERPHVNKWVAEITKRPASQKILQ

SEQ ID NO: 3520 - DNA, 677 bp, Glycine max
  misc_feature (1)..(677): Ceres Seq. ID no. 12610904
atttttctagggttctgagattcaggagagagataacgaacagcaatggcgaatcaagtgatctccggaatcaaggaaacggttcaatcgatcaacggcgcggctcgtccatggggcgatttcctcgatctctccgctttcagcttcccgtcctccttctccgacgccacaactcgcctcactcagaaccttgctcatttccgcatcaactacaccatcatcctctccgtcctcctcgctctaaccttgatcacacgcccgatcgccatcctcgctttcgtagccgtcggcttagcttggttcttcctctatttcgctcgcgaggaggcgctcaccgtcttcgggttcaccgtcgacgatggcgtcgtggcggtgcttctcatcgttctaacgatcgcagcgctagttaccactggagtttggctcagtgctctcaccaccgttggattcggagctctggttttgatcttacacgcggcgctgagaggaacggaggatcttgtgacggatgatctggaatcgccttacggaccaatgctctctaccgccggcggagataacggtgattacagtgggatttgagctacatttggtgcttgtaactaaactctaattgttttctttgtgttcattattagacattgttcaagacgttaaggaatcaaatgaaagtttat

SEQ ID NO: 3521 - protein, 178 aa, Glycine max
  misc_feature (1)..(178): Ceres Seq. ID no. 12610905
MANQVISGIKETVQSINGAARPWGDFLDLSAFSFPSSFSDATTRLTQNLAHFRINYTIILSVLLALTLITRPIAILAFVAVGLAWFFLYFAREEALTVFGFTVDDGVVAVLLIVLTIAALVTTGVWLSALTTVGFGALVLILHAALRGTEDLVTDDLESPYGPMLSTAGGDNGDYSGI

SEQ ID NO: 3522 - protein, 169 aa, Glycine max
  misc_feature (1)..(169): Ceres Seq. ID no. 12610906
FSRVLRFRREITNSNGESSDLRNQGNGSIDQRRGSSMGRFPRSLRFQLPVLLLRRHNSPHSEPCSFPHQLHHHPLRPPRSNLDHTPDRHPRFRSRRLSLVLPLFRSRGGAHRLRVHRRRWRRGGASHRSNDRSASYHWSLAQCSHHRWIRSSGFDLTRGAERNGGSCDG

SEQ ID NO: 3523 - protein, 133 aa, Glycine max
  misc_feature (1)..(133): Ceres Seq. ID no. 12610907
MGRFPRSLRFQLPVLLLRRHNSPHSEPCSFPHQLHHHPLRPPRSNLDHTPDRHPRFRSRRLSLVLPLFRSRGGAHRLRVHRRRWRRGGASHRSNDRSASYHWSLAQCSHHRWIRSSGFDLTRGAERNGGSCDG

SEQ ID NO: 3524 - DNA, 743 bp, Glycine max
  misc_feature (1)..(743): Ceres Seq. ID no. 12610954
atagactctttcatttcctcttttctttgtgtactaacatttttttgttcaaatccatttgctcctttagacaccgatctccttcatggctccgattgctgtcggtagtgttttaccagacggaaaaattttcctctttgacgagaacgatcagctccagacggtcaccgttcactctctcttggctggtaagaaggtcattctctttggtgtccccggtgctttcacttccgcctgcagcttgcagcatgtgcctagtttcattgagaaagcggaccagctgaaagcaaagggtgttaatgagataatatgctatggcatgaatgatccgtatgtgatgaaagcatggggaaagacattcccagagaacaagcatgtcaagtttgtctcagacggctcaggagaatacacaaagctcctcggactggagcttgaccttaaggacaaaggtcttggtattaggacaaggagatttgctatgttgctcgataacctcaaggtgactgtcgccaacattgaaacaggtggcgagttcacggtttctagcgccgaggatatcctcaaggctctctaagaaactaccatgtgaaagtagaggatctctagcctgattttcagaataagaagttggcataataaattagttttagttgtttaattcctctttctaattataataacgtactagtttttgaaggcccggtttgtttccaaagtttaataaatttttaataaatttctct

SEQ ID NO: 3525 - protein, 162 aa, Glycine max
  misc_feature (1)..(162): Ceres Seq. ID no. 12610955
MAPIAVGSVLPDGKIFLFDENDQLQTVTVHSLLAGKKVILFGVPGAFTSACSLQHVPSFIEKADQLKAKGVNEIICYGMNDPYVMKAWGKTFPENKHVKFVSDGSGEYTKLLGLELDLKDKGLGIRTRRFAMLLDNLKVTVANIETGGEFTVSSAEDILKAL

SEQ ID NO: 3526 - protein, 93 aa, Glycine max
  misc_feature (1)..(93): Ceres Seq. ID no. 12610956
RLFHFLFSLCTNIFLFKSICSFRHRSPSWLRLLSVVFYQTEKFSSLTRTISSRRSPFTLSWLVRRSFSLVSPVLSLPPAACSMCLVSLRKRTS

SEQ ID NO: 3527 - protein, 84 aa, Glycine max
  misc_feature (1)..(84): Ceres Seq. ID no. 12610957
MNDPYVMKAWGKTFPENKHVKFVSDGSGEYTKLLGLELDLKDKGLGIRTRRFAMLLDNLKVTVANIETGGEFTVSSAEDILKAL

SEQ ID NO: 3528 - DNA, 696 bp, Glycine max
  misc_feature (1)..(696): Ceres Seq. ID no. 12611071
acacccagacaaccgactgccccccacacacgcacacatcaagcagcagctgatccaccagtcgatcgatccgacagctagctagccatggccgccgggaggaaggtgacgatgagcagcgccggcgtggccgccgcgctggtggcgctgctggtcgtggcggcggcgtcgggcgcggccgggctcagggtctgcagcgtggacagggacagcgtcgtcaacaactgcaagtcctactgcacggtgggcagcacggaggccagccccagcggcgcgtgctgcaacgcggtgcgcggcggcaacttcaagtgcctctgccagttcaggaacgcgctgtccccggacatcgacggcaaccgcgccatgcagatccccgccaagtgcggctacggggcggcctcctgctagtcaccgtcacgcactatgcagcccgatacgcgccggccgccgcggtccgccgccggtcgccggttgcaccagtagatcgtaacgtggtgttttgctgtcaactttcagtcgttcgtaggagtacgtacgttctggtcggctggctgatccgaacgcgctcctgcgtgcgtgcatgcatgctttgtgttggccatgcatgctagtacctttgtatcctcttctgcttttcgtaagtgatgttgctgtgtgtctacaaccatgtcgcagaaataaacttgtttcccgttt

SEQ ID NO: 3529 - protein, 106 aa, Glycine max
  misc_feature (1)..(106): Ceres Seq. ID no. 12611072
MAAGRKVTMSSAGVAAALVALLVVAAASGAAGLRVCSVDRDSVVNNCKSYCTVGSTEASPSGACCNAVRGGNFKCLCQFRNALSPDIDGNRAMQIPAKCGYGAASC

SEQ ID NO: 3530 - protein, 98 aa, Glycine max
  misc_feature (1)..(98): Ceres Seq. ID no. 12611073
MSSAGVAAALVALLVVAAASGAAGLRVCSVDRDSVVNNCKSYCTVGSTEASPSGACCNAVRGGNFKCLCQFRNALSPDIDGNRAMQIPAKCGYGAASC

SEQ ID NO: 3531 - DNA, 496 bp, Glycine max
  misc_feature (1)..(496): Ceres Seq. ID no. 12611161
atgtgtataaaactttgatggcacgtgatcggcgatttgttggtgaagttggatcacgtgagagacgatcgatcgatctttgtttctggtttgactgttacgaaacgacgaagcattccattttgtttcgtttgggatctgaatggcgacgagaaatcgcactctgcttttcagaaagcacagagatgcgttgaagagtgttcgaattccctcattctcttcggcgccgtccaccgcttccggcgccggcggtggccccgtcatcgaattggccaccacttcatttctcaattccaatcgctcttacactccgatcagtaccgatgatcccggcaattcaaggtgcacttcatcacattacagatcttaaatatcgatgttaattttatcgtggatcaaatgtccgaatagcttattatttcttagatccgtagctttttttattgatttccttttcaacgattcattgaatactagtaggagtgctcacatttgc

SEQ ID NO: 3532 - protein, 75 aa, Glycine max
  misc_feature (1)..(75): Ceres Seq. ID no. 12611162
MATRNRTLLFRKHRDALKSVRIPSFSSAPSTASGAGGGPVIELATTSFLNSNRSYTPISTDDPGNSRCTSSHYRS

SEQ ID NO: 3533 - protein, 63 aa, Glycine max
  misc_feature (1)..(63): Ceres Seq. ID no. 12611163
VYKTLMARDRRFVGEVGSRERRSIDLCFWFDCYETTKHSILFRLGSEWRREIALCFSESTEMR

SEQ ID NO: 3534 - protein, 58 aa, Glycine max
  misc_feature (1)..(58): Ceres Seq. ID no. 12611164
MARDRRFVGEVGSRERRSIDLCFWFDCYETTKHSILFRLGSEWRREIALCFSESTEMR

SEQ ID NO: 3535 - DNA, 638 bp, Glycine max
  misc_feature (1)..(638): Ceres Seq. ID no. 12611231
aacacggccacgatcgaccgatggcccagccaccggctccggcgactccggcggcggcgtacgggtgcgcggcgtgcggcgcggacctgaacctgtcggcctccaacctgtacccggcggggacctacttcgaggcggggaacaagggcacgctgtccttcagctgggtggacgagtcgcggctgcggttcgcggcggaggaccggatccggcccttcttcgagacgctcgactactggggcatccagcggaagcgcacccgcgtcagctgcgacgcctgcggcaggctcctcggccacgtctacgacgacgggccgccgctcatggacggcaccggccagctcgggatgggccctagccaggtcgtcccccgccggcccaggtaccggttcaaggtcaaggccgtcaccgccgccggttcctcctccgccgccgccgcgcgctgaccgccgagttgtgaagctttgattcatcccgcggcgatgcttgcttgcggttacagatgtgtttccttcctgctgtagatcagcactactactagatgtaaaaatcgttggttgcgaaatgaacttgtacgagtgaaatttgctgtaaattgtgtgaagatcgaagacggtgtgatccaccaaaaaaaaaaa

SEQ ID NO: 3536 - protein, 147 aa, Glycine max
  misc_feature (1)..(147): Ceres Seq. ID no. 12611232
HGHDRPMAQPPAPATPAAAYGCAACGADLNLSASNLYPAGTYFEAGNKGTLSFSWVDESRLRFAAEDRIRPFFETLDYWGIQRKRTRVSCDACGRLLGHVYDDGPPLMDGTGQLGMGPSQVVPRRPRYRFKVKAVTAAGSSSAAAAR

SEQ ID NO: 3537 - protein, 141 aa, Glycine max
  misc_feature (1)..(141): Ceres Seq. ID no. 12611233
MAQPPAPATPAAAYGCAACGADLNLSASNLYPAGTYFEAGNKGTLSFSWVDESRLRFAAEDRIRPFFETLDYWGIQRKRTRVSCDACGRLLGHVYDDGPPLMDGTGQLGMGPSQVVPRRPRYRFKVKAVTAAGSSSAAAAR

SEQ ID NO: 3538 - protein, 118 aa, Glycine max
  misc_feature (1)..(118): Ceres Seq. ID no. 12611234
TRPRSTDGPATGSGDSGGGVRVRGVRRGPEPVGLQPVPGGDLLRGGEQGHAVLQLGGRVAAAVRGGGPDPALLRDARLLGHPAEAHPRQLRRLRQAPRPRLRRRAAAHGRHRPARDGP

SEQ ID NO: 3539 - DNA, 807 bp, Glycine max
  misc_feature (1)..(807): Ceres Seq. ID no. 12611403
ggatcacatacatagcatttcagaagacagaaaggattggaaatcagacacacatgtcaagcatcattgctatactcgaaactaaaatgacagtgtgaccacagttgttgcccgtggaacagagatacctttcaatctaagaaatcatataaaatgtgccaccaaatcctcttagcaggcaacacaaggatatttcgctacaaaagtagaagctaaatccatgacataaaccatgtcatatgacaggaagattattttcagtctaggctagtaatttggagagaagctattttgttggagacactcctctaataactcaagaattaaaaggacggccccagaatagctttccaaaagacgaatccaagatttgtatcctctttaaaaaggatggtgaatcaacatggcaaattcaagtaccttagctatgctctacccttgcctctcccgcatcacccatcttttccattcccctgggagagctcgcagcaggcccgggcgctggccgacgggtgcgccgtcatccgccctagcacgaccgccgccgtcagcggcgaccccatcatggccgccaggggccgtgcggccccgagcggggaggtggagtgggagggggggaagggggaagggatccggcggcgcggggccgcgaagggaggaggggcgcggaggccgccgaccgcggcggagggtgccgggcggcggaccgcggcaagaacggtgcgggacgcagcgccgcgccacgccatggctagggttcaggcggaggagagggtggaggcgatggtggtggtggtgattggaagt

SEQ ID NO: 3540 - protein, 139 aa, Glycine max
  misc_feature (1)..(139): Ceres Seq. ID no. 12611404
MVNQHGKFKYLSYALPLPLPHHPSFPFPWESSQQARALADGCAVIRPSTTAAVSGDPIMAARGRAAPSGEVEWEGGKGEGIRRRGAAKGGGARRPPTAAEGAGRRTAARTVRDAAPRHAMARVQAEERVEAMVVVVIGS

SEQ ID NO: 3541 - protein, 131 aa, Glycine max
  misc_feature (1)..(131): Ceres Seq. ID no. 12611405
MANSSTLAMLYPCLSRITHLFHSPGRARSRPGRWPTGAPSSALARPPPSAATPSWPPGAVRPRAGRWSGRGGRGKGSGGAGPRREEGRGGRRPRRRVPGGGPRQERCGTQRRATPWLGFRRRRGWRRWWWW

SEQ ID NO: 3542 - protein, 123 aa, Glycine max
  misc_feature (1)..(123): Ceres Seq. ID no. 12611406
MLYPCLSRITHLFHSPGRARSRPGRWPTGAPSSALARPPPSAATPSWPPGAVRPRAGRWSGRGGRGKGSGGAGPRREEGRGGRRPRRRVPGGGPRQERCGTQRRATPWLGFRRRRGWRRWWWW

SEQ ID NO: 3543 - protein, 98 aa, Glycine max
  misc_feature (1)..(98): Ceres Seq. ID no. 16625717
MAWRGAASRTVLAAVRRPAPSAAVGGLRAPPPFAAPRRRIPSPFPPSHSTSPLGAARPLAAMMGSPLTAAVVLGRMTAHPSASARACCELSQGNGKDG

SEQ ID NO: 3544 - DNA, 1087 bp, Glycine max
  misc_feature (1)..(1087): Ceres Seq. ID no. 12611474
aaaaagtgaagaaaacagaccaaaaatagaaagaaagagaaataccaaaaccttggcgcatcatattctttattccctcacttggatcgttaattccgcgaacgagcttctgcccttcaaattaaccatggagaatattggtgaggagtacggctactggccggagaacgacatgcttttccaaaacgaagaccttggcagctgggcgataatggatgaggcagcgttatcagggtcagggtactatgattcaagctccccggacggtactggtgcttcttcatcggtggcatctaagaacattgtctccgagaggaatagaaggaagaagctcaacgataggctttttgctctaagagcagtggtccccaacattaccaagatggataaggcttctatcattaaggatgctattgagtacatccagcacttgcatgaccaagagaagagaatccaagctgagattttggatcttgaatctgggaataaactcaaaaacccaacctatgaatttgaccaggacctccctattctgctcaggtccaagaagaagagaacagaacagctattcggttctgtcagttcaagaaattctccaattgaaataattgacctgagggtaacatacatgggagagaagacgtttgtggtgagcttgacatgtagcaaaaggacagacacaatggtaaaactgtgtgcggtgttcgaatctttaaagctgaaagtcattacggccaatatcacttctttttcaggcacgcttctgaagacagtcttcatccaggcagatgaagaagagagagactttttgcatataaaaattcagacagcgatttcagctctcaatgatcctctaagcccaatgagtatctgatgaagaaacgagttcagatcgaagctgagattgttctgtttgttgagtttccttttctcactcaatgttaattatctgtagtgaatgagtcttaaactcgaaagttggcaagttttctttttcttttccattttctgtatgttgatgttgatagcctctaacgttgtaagctttacgttattaatgaaatcgcattttcatgttcttcatggt

SEQ ID NO: 3545 - protein, 290 aa, Glycine max
  misc_feature (1)..(290): Ceres Seq. ID no. 12611475
KSEENRPKIERKRNTKTLAHHILYSLTWIVNSANELLPFKLTMENIGEEYGYWPENDMLFQNEDLGSWAIMDEAALSGSGYYDSSSPDGTGASSSVASKNIVSERNRRKKLNDRLFALRAVVPNITKMDKASIIKDAIEYIQHLHDQEKRIQAEILDLESGNKLKNPTYEFDQDLPILLRSKKKRTEQLFGSVSSRNSPIEIIDLRVTYMGEKTFVVSLTCSKRTDTMVKLCAVFESLKLKVITANITSFSGTLLKTVFIQADEEERDFLHIKIQTAISALNDPLSPMSI

SEQ ID NO: 3546 - protein, 248 aa, Glycine max
  misc_feature (1)..(248): Ceres Seq. ID no. 12611476
MENIGEEYGYWPENDMLFQNEDLGSWAIMDEAALSGSGYYDSSSPDGTGASSSVASKNIVSERNRRKKLNDRLFALRAVVPNITKMDKASIIKDAIEYIQHLHDQEKRIQAEILDLESGNKLKNPTYEFDQDLPILLRSKKKRTEQLFGSVSSRNSPIEIIDLRVTYMGEKTFVVSLTCSKRTDTMVKLCAVFESLKLKVITANITSFSGTLLKTVFIQADEEERDFLHIKIQTAISALNDPLSPMSI

SEQ ID NO: 3547 - protein, 233 aa, Glycine max
  misc_feature (1)..(233): Ceres Seq. ID no. 12611477
MLFQNEDLGSWAIMDEAALSGSGYYDSSSPDGTGASSSVASKNIVSERNRRKKLNDRLFALRAVVPNITKMDKASIIKDAIEYIQHLHDQEKRIQAEILDLESGNKLKNPTYEFDQDLPILLRSKKKRTEQLFGSVSSRNSPIEIIDLRVTYMGEKTFVVSLTCSKRTDTMVKLCAVFESLKLKVITANITSFSGTLLKTVFIQADEEERDFLHIKIQTAISALNDPLSPMSI

SEQ ID NO: 3548 - DNA, 752 bp, Glycine max
  misc_feature (1)..(752): Ceres Seq. ID no. 12611671
aatccaccaactgcattggaacacccttttctccttcaatggaaggtgaggaggggaaacagtcttcccaaaaaaacccttacgttgaactagaagaagttgactttgattttattctagcaatgagcatgcaagaacaagagagagagttcacaatgctttcaactattgaaagtgaaagtgatgaatatctaagtgactcctctatagataatgatgatgatggtgatcctgactttatagcgagtcaagagtttgaaaccgaccttcggtttcttgaaggtgaaggaagcgacgatgatgatgaagacatggaaatggaagaagatgagattgatccagacgaattatcttatgaagaattgatggagttggaagagtttataggagaagaaacaagagggttatcagcaaatgaaatctctttgtgcttgtacccttatacctgccaatgtgctgaaagcaaaagtggcattgatcgttgtgtgatttgtcaggttgaatatgaagaaggtgaagcactagtggcacttcaatgtgagcacccttatcattcagattgcataagaaagtggcttcaaattaagaaggtttgtccaatttgtggaaatgaagtttcaactcccaacttggcttcgaacccttagttatttagtttggattgaaaaattaatgtgtgtacactaattattgtaatctggatttgcatgaaactgtagttgagaaaataaacaaagcatggaagcttaacc

SEQ ID NO: 3549 - protein, 214 aa, Glycine max
  misc_feature (1)..(214): Ceres Seq. ID no. 12611672
STNCIGTPFSPSMEGEEGKQSSQKNPYVELEEVDFDFILAMSMQEQEREFTMLSTIESESDEYLSDSSIDNDDDGDPDFIASQEFETDLRFLEGEGSDDDDEDMEMEEDEIDPDELSYEELMELEEFIGEETRGLSANEISLCLYPYTCQCAESKSGIDRCVICQVEYEEGEALVALQCEHPYHSDCIRKWLQIKKVCPICGNEVSTPNLASNP

SEQ ID NO: 3550 - protein, 202 aa, Glycine max
  misc_feature (1)..(202): Ceres Seq. ID no. 12611673
MEGEEGKQSSQKNPYVELEEVDFDFILAMSMQEQEREFTMLSTIESESDEYLSDSSIDNDDDGDPDFIASQEFETDLRFLEGEGSDDDDEDMEMEEDEIDPDELSYEELMELEEFIGEETRGLSANEISLCLYPYTCQCAESKSGIDRCVICQVEYEEGEALVALQCEHPYHSDCIRKWLQIKKVCPICGNEVSTPNLASNP

SEQ ID NO: 3551 - protein, 174 aa, Glycine max
  misc_feature (1)..(174): Ceres Seq. ID no. 12611674
MSMQEQEREFTMLSTIESESDEYLSDSSIDNDDDGDPDFIASQEFETDLRFLEGEGSDDDDEDMEMEEDEIDPDELSYEELMELEEFIGEETRGLSANEISLCLYPYTCQCAESKSGIDRCVICQVEYEEGEALVALQCEHPYHSDCIRKWLQIKKVCPICGNEVSTPNLASNP

SEQ ID NO: 3552 - DNA, 695 bp, Glycine max
  misc_feature (1)..(695): Ceres Seq. ID no. 12611808
gccacacacacgcacacacaccagattcatcaagaaaacctcgagaggatcatggccggcgtgaacaccagtgtggtcggcctcaagcccgccgcggcggtgccgcagtccgcctcgccggcggcggcaaagcgcgtgcaggtcgccccggccaaggaccggcggtcggcgcttctcggcctggcggccgtcttcgccgtcacggccgcctccgccgggtcggccagggcaagcgtcttcgacgagtacctcgagaagagcaagctcaacaaggagctgaacgacaagaagagggcggcgacgagcggcgccaacttcgcgcgcgcctacaccgtccagttcggcagctgcaagttcccctacaacttcaccggctgccaggacctcgccaagcagaagaaagtcccgttcatcaccgacgacctggagatcgagtgcgaggggaaggagaagttcaagtgcggatccaacgtcttctggaaatggtgaagctggtcgatctgccaggcaatatggcgagtgctgatgtatgtcagcgcaccgcgtgtacctagatgtccaaactgcgcaagtgtttcgactgtgaagttatcgtcgctgtaattttatcatcatcaagtggaattctgttttcacctggatatggatatatgcatgttagcatgtatcttgtcacatccagaacgcgaacattc

SEQ ID NO: 3553 - protein, 183 aa, Glycine max
  misc_feature (1)..(183): Ceres Seq. ID no. 12611809
HTHAHTPDSSRKPREDHGRREHQCGRPQARRGGAAVRLAGGGKARAGRPGQGPAVGASRPGGRLRRHGRLRRVGQGKRLRRVPREEQAQQGAERQEEGGDERRQLRARLHRPVRQLQVPLQLHRLPGPRQAEESPVHHRRPGDRVRGEGEVQVRIQRLLEMVKLVDLPGNMASADVCQRTACT

SEQ ID NO: 3554 - protein, 162 aa, Glycine max
  misc_feature (1)..(162): Ceres Seq. ID no. 12611810
ATHTHTHQIHQENLERIMAGVNTSVVGLKPAAAVPQSASPAAAKRVQVAPAKDRRSALLGLAAVFAVTAASAGSARASVFDEYLEKSKLNKELNDKKRAATSGANFARAYTVQFGSCKFPYNFTGCQDLAKQKKVPFITDDLEIECEGKEKFKCGSNVFWKW

SEQ ID NO: 3555 - protein, 145 aa, Glycine max
  misc_feature (1)..(145): Ceres Seq. ID no. 12611811
MAGVNTSVVGLKPAAAVPQSASPAAAKRVQVAPAKDRRSALLGLAAVFAVTAASAGSARASVFDEYLEKSKLNKELNDKKRAATSGANFARAYTVQFGSCKFPYNFTGCQDLAKQKKVPFITDDLEIECEGKEKFKCGSNVFWKW

SEQ ID NO: 3556 - DNA, 1423 bp, Glycine max
  misc_feature (1)..(1423): Ceres Seq. ID no. 12611971
ctacctcctcttcctcttcctcttcctgcatttctccgcgtgtgtgtatgtgtgtatactctctcaagtacgcacatacatacacatccattcgtacataaatacttatatctcttcttccttcgccgttaattctctgaatccctagctcttctgttctccgatccgatcatggcctcgcttgtcaacaacgctaacggcgccgtcaatggttttcctggaatatcccagaagctcattatcgataccgaccctgggatcgatgatagcatggccattcttatggcttttcaaagtccagatgtggaggttctgggtttgacaaccatttttggtaatacaactaccgaactttcaacactcaatgctttgcttttgtgtgagatggcaggccgtgaagatattccagttgcacagggaagccatgagccattgaagggtggaaagcctcgtgttgctgattttgttcatggtaaagatggactagggaacacattcctacccccacctaaaggtgagaaaattgagaaaagtgctagtgagtttttggtagagaaagtctctgaatatcctggtgaagtatctgtgctagcacttggaccactaacaaatttggctttggcaatcaaaagggattcttcctttgcaagcaaagtgaagagaatagttatacttggtggtgcattctttgccttggggaatgtgaatcctgctgcagaagccaatatccatggagacccggaagccgcagatattgtgtttacctctggggcagatattgttgttattggaataaacattacaacccaagtccaattcacagatgctgatctcctcgaactgaaggaatctaaaggaaagtatgctcccttcttgagtgacatatgcaaattctatagggactttcatgtaaaatctgatggtgtccacggaattttcctccacgatcctgtaagttttgtggcagttgtgcgtccagatcttttcacatacaagaagggggtagtgagggtagaaacacaaggcatctgtgttgggcatacacttatggaccaaggattgaaaaactggaatacgagcaacccatggacgggttattctcctgttgcagttgcttggacagtgaatctcgaggaagttcttgattatatcagggagctggtgatgaaaccctgaagtataggcatttgtactacccttctgacagacaaaaagcattggaaagtgataggacgatagcttcttatttgcaaaaatatgcataaggtcattttctttatttcattcaaggtcacaatgagttcttaccccgtttaatattataaagttcatgtaccaatgaaattctctttacatgaacttatttgtgtttggatttcgctactcttatttgagaagaaagcagtcattctttacttttcct

SEQ ID NO: 3557 - protein, 334 aa, Glycine max
  misc_feature (1)..(334): Ceres Seq. ID no. 12611972
MASLVNNANGAVNGFPGISQKLIIDTDPGIDDSMAILMAFQSPDVEVLGLTTIFGNTTTELSTLNALLLCEMAGREDIPVAQGSHEPLKGGKPRVADFVHGKDGLGNTFLPPPKGEKIEKSASEFLVEKVSEYPGEVSVLALGPLTNLALAIKRDSSFASKVKRIVILGGAFFALGNVNPAAEANIHGDPEAADIVFTSGADIVVIGINITTQVQFTDADLLELKESKGKYAPFLSDICKFYRDFHVKSDGVHGIFLHDPVSFVAVVRPDLFTYKKGVVRVETQGICVGHTLMDQGLKNWNTSNPWTGYSPVAVAWTVNLEEVLDYIRELVMKP

SEQ ID NO: 3558 - protein, 301 aa, Glycine max
  misc_feature (1)..(301): Ceres Seq. ID no. 12611973
MAILMAFQSPDVEVLGLTTIFGNTTTELSTLNALLLCEMAGREDIPVAQGSHEPLKGGKPRVADFVHGKDGLGNTFLPPPKGEKIEKSASEFLVEKVSEYPGEVSVLALGPLTNLALAIKRDSSFASKVKRIVILGGAFFALGNVNPAAEANIHGDPEAADIVFTSGADIVVIGINITTQVQFTDADLLELKESKGKYAPFLSDICKFYRDFHVKSDGVHGIFLHDPVSFVAVVRPDLFTYKKGVVRVETQGICVGHTLMDQGLKNWNTSNPWTGYSPVAVAWTVNLEEVLDYIRELVMKP

SEQ ID NO: 3559 - protein, 297 aa, Glycine max
  misc_feature (1)..(297): Ceres Seq. ID no. 12611974
MAFQSPDVEVLGLTTIFGNTTTELSTLNALLLCEMAGREDIPVAQGSHEPLKGGKPRVADFVHGKDGLGNTFLPPPKGEKIEKSASEFLVEKVSEYPGEVSVLALGPLTNLALAIKRDSSFASKVKRIVILGGAFFALGNVNPAAEANIHGDPEAADIVFTSGADIVVIGINITTQVQFTDADLLELKESKGKYAPFLSDICKFYRDFHVKSDGVHGIFLHDPVSFVAVVRPDLFTYKKGVVRVETQGICVGHTLMDQGLKNWNTSNPWTGYSPVAVAWTVNLEEVLDYIRELVMKP

SEQ ID NO: 3560 - DNA, 1272 bp, Glycine max
  misc_feature (1)..(1272): Ceres Seq. ID no. 12611994
aaatgttattcctgatcctctttggagaaatgaattgatcccaggggctctgtgatttgatcagcagatagagattgaacatttgcagcgaaaagggaaagaaagagaaaatcatgtcaacagcagaagctcctccttctttccaagaagcagcgcgatgcgttgtctgcaattgcagtttcaacactttcagaagaaggcaccactgtcgatcctgtgggagaacattgtgtaatgaacattcatcaaatcaaatggctttaccacaatttggcctttactcaaatgtccgagtatgtgctgattgtttcaacaacttgcggtctgggaaggatgaaccacagacttcttcagacggagtaaacagtgtgacagatacaatttctaaattagatatcaacgcaaatgttgattcaaaatccatactaactgcagagactaagcttttgtcaggcattaaagagtgtaaatgtggaatgccactttgcatttgtgaagctccaaccccttcctctgatgcattcccccagcagaaacccaatccagttattgcagctccatcaaatcctaaacctaagaagacagatactgttccgaaaattagaagctccatttcaactagtaaatttagttctatgtttaacgttggtcatgtaactaatggtacctcagacagaccccagattgattatgaagttactggagagggtttaagagaagcaataaaaaatagtgacgttgctgctgttaagaaacttcttaatgagggtgtggatgcaaattacagggacaagcaaggactgtctttattacatttggctgcagtcttcaatcaaactgatatagttttcattctcatggattcgggggcaagcctggaatacagaaatgcacaaggagaaacacctttagattgtgcaccagctaccttgcaatacaaaatgcgaaagaagatggaggaaggtggagcagtggaccaaagcatttgaacaatctattacttttatcagtgttctttttatgcagtcctcccaaagagagcttcaaatattaccactgtctaaagctcctctgttaccagaacaaaaaatttcgccttctgtataattgtgacagaggagttcaattcatcttggcagactaagtatgcagacctatataagacatatctttgtcagctgcgcaacttgggcagtattactattcagcttgtaaatttctttggtctgtgacataagagcatttttaaatatgtgcatctttgtattgttg

SEQ ID NO: 3561 - protein, 291 aa, Glycine max
  misc_feature (1)..(291): Ceres Seq. ID no. 12611995
MSTAEAPPSFQEAARCVVCNCSFNTFRRRHHCRSCGRTLCNEHSSNQMALPQFGLYSNVRVCADCFNNLRSGKDEPQTSSDGVNSVTDTISKLDINANVDSKSILTAETKLLSGIKECKCGMPLCICEAPTPSSDAFPQQKPNPVIAAPSNPKPKKTDTVPKIRSSISTSKFSSMFNVGHVTNGTSDRPQIDYEVTGEGLREAIKNSDVAAVKKLLNEGVDANYRDKQGLSLLHLAAVFNQTDIVFILMDSGASLEYRNAQGETPLDCAPATLQYKMRKKMEEGGAVDQSI

SEQ ID NO: 3562 - protein, 244 aa, Glycine max
  misc_feature (1)..(244): Ceres Seq. ID no. 12611996
MALPQFGLYSNVRVCADCFNNLRSGKDEPQTSSDGVNSVTDTISKLDINANVDSKSILTAETKLLSGIKECKCGMPLCICEAPTPSSDAFPQQKPNPVIAAPSNPKPKKTDTVPKIRSSISTSKFSSMFNVGHVTNGTSDRPQIDYEVTGEGLREAIKNSDVAAVKKLLNEGVDANYRDKQGLSLLHLAAVFNQTDIVFILMDSGASLEYRNAQGETPLDCAPATLQYKMRKKMEEGGAVDQSI

SEQ ID NO: 3563 - protein, 170 aa, Glycine max
  misc_feature (1)..(170): Ceres Seq. ID no. 12611997
MPLCICEAPTPSSDAFPQQKPNPVIAAPSNPKPKKTDTVPKIRSSISTSKFSSMFNVGHVTNGTSDRPQIDYEVTGEGLREAIKNSDVAAVKKLLNEGVDANYRDKQGLSLLHLAAVFNQTDIVFILMDSGASLEYRNAQGETPLDCAPATLQYKMRKKMEEGGAVDQSI

SEQ ID NO: 3564 - DNA, 621 bp, Glycine max
  misc_feature (1)..(621): Ceres Seq. ID no. 12612067
ttaatctctctctctctctcatttgacatggctgcttccaactcgaccctccactcacccaccactcccaacaccaccttcgtccaagccaacccttccaacttccgcgccgtcgtccagaagctcaccggcgcctccgatgacccctccgcccataaactccccctcactctccccacgcgcctcgcggcagcgcagtcccaccgccccgcctccgccggcgagccctggggtttatgggaaaggggcttaccctggttatgctggggacttgctggttgactctaccactggtgctagctacaatgtaaagggggctaatgggaggaagtaccttgttcctgctctgtatgatccttctacgtcgtcttgctcaacgcccgtgtgatcagaagggttattttggtgatgccgatcgttctgttccatgctgctactacgatgatgttagaaaccacggattagggaggtgtacaaagcttctaataaacatttttgtagaattatttcatttatttgtttgtttatactatcttctggatatgtacgcggattaaggatgttatgtagtagaagcaaatgttcttccctttgctttttaatattaaaaaatttattatt

SEQ ID NO: 3565 - protein, 93 aa, Glycine max
  misc_feature (1)..(93): Ceres Seq. ID no. 12612068
LISLSLSFDMAASNSTLHSPTTPNTTFVQANPSNFRAVVQKLTGASDDPSAHKLPLTLPTRLAAAQSHRPASAGEPWGLWERGLPWLCWGLAG

SEQ ID NO: 3566 - protein, 84 aa, Glycine max
  misc_feature (1)..(84): Ceres Seq. ID no. 12612069
MAASNSTLHSPTTPNTTFVQANPSNFRAVVQKLTGASDDPSAHKLPLTLPTRLAAAQSHRPASAGEPWGLWERGLPWLCWGLAG

SEQ ID NO: 3567 - protein, 82 aa, Glycine max
  misc_feature (1)..(82): Ceres Seq. ID no. 12612070
MTPPPINSPSLSPRASRQRSPTAPPPPASPGVYGKGAYPGYAGDLLVDSTTGASYNVKGANGRKYLVPALYDPSTSSCSTPV

SEQ ID NO: 3568 - DNA, 773 bp, Glycine max
  misc_feature (1)..(773): Ceres Seq. ID no. 12612333
atcaaactcatacatagaaaataaataagaagaatttagaaaccctaaccatcatgtctccaaaatcaaaggctaaagctatgttcatcatcttcaaaatattaatgttaaatcttttgccaccaatatatgcatgtgggccatgcactacgccacgttaccccaaagggccgccccatcacggaggaggccggccgaaagtgtcgcctccgctgccgccaatcataatcaaccctccggtggtaccgccaccggtggtgatataccctccaccaatctcaccgccatacccgccgccgcacggtggtggtggttctcctccacaaaggacatgcccagttgatgccctaaaattggggctttgcttggatgtgcttggaggattggtgcatgtgggaatagggaacccagttgagaacgtgtgctgtccagttatacaagggttgcttgatcttgaagctgcaatttgtctttgcaccgttattagggctaagcttcttaacctcagcatcttccttcctattgcacttcaagtcttggtcacttgcgggaagactcctcctcctggttttgtttgtccaccgctgtattaaaccactgcatgcactacttcatactaccccaatactcaagcctatatagttctagttagttactacttactactagattaatatgtctttatcttttctattagggtttatgtaatgactcttatttcgttttatgtgtatgagtttacgctttaattaattatatacttctcaggattt

SEQ ID NO: 3569 - protein, 179 aa, Glycine max
  misc_feature (1)..(179): Ceres Seq. ID no. 12612334
MSPKSKAKAMFIIFKILMLNLLPPIYACGPCTTPRYPKGPPHHGGGRPKVSPPLPPIIINPPVVPPPVVIYPPPISPPYPPPHGGGGSPPQRTCPVDALKLGLCLDVLGGLVHVGIGNPVENVCCPVIQGLLDLEAAICLCTVIRAKLLNLSIFLPIALQVLVTCGKTPPPGFVCPPLY

SEQ ID NO: 3570 - protein, 170 aa, Glycine max
  misc_feature (1)..(170): Ceres Seq. ID no. 12612335
MFIIFKILMLNLLPPIYACGPCTTPRYPKGPPHHGGGRPKVSPPLPPIIINPPVVPPPVVIYPPPISPPYPPPHGGGGSPPQRTCPVDALKLGLCLDVLGGLVHVGIGNPVENVCCPVIQGLLDLEAAICLCTVIRAKLLNLSIFLPIALQVLVTCGKTPPPGFVCPPLY

SEQ ID NO: 3571 - protein, 162 aa, Glycine max
  misc_feature (1)..(162): Ceres Seq. ID no. 12612336
MLNLLPPIYACGPCTTPRYPKGPPHHGGGRPKVSPPLPPIIINPPVVPPPVVIYPPPISPPYPPPHGGGGSPPQRTCPVDALKLGLCLDVLGGLVHVGIGNPVENVCCPVIQGLLDLEAAICLCTVIRAKLLNLSIFLPIALQVLVTCGKTPPPGFVCPPLY

SEQ ID NO: 3572 - DNA, 1256 bp, Glycine max
  misc_feature (1)..(1256): Ceres Seq. ID no. 12612408
ggaagaagaatcagagttcagaatccatggcaggtgctatagtaaagtacggaatcataggagtaggaatgatgggtagagagcatcttgtgaatttgtaccatcttcgcacccaaggcgtggcagttgttgctattgctgaccctcatcttccctctcaacaactcgctcttgacttagcacactcctttacttggcctctcaaggttttctcaggtcaccaggagctgttggacagtggactatgtgatgttttggtggtatccactcctaacatgacccatcataggattcttatggacattatcaatcattccaaaccccatcatgtactggtagagaagcccttgtgcaccacaatctcacactgcaaagaggttgtcaatgctgctagaaagagacctgatatattggtacaagttggactggaatatagatacatgccacctgttgcaaagctgatagaaatagttaagggaggaaaccttggacatgtcaaaatggtagcaattcgggagcatcggtttccttttctggttaaggtgaacaattggaaccggttcaatattaactcagggggcactctggtagagaagtgttgccacttctttgatctgatgagactgtttgttggtgcaaatcctgttcgtgtgatggcttctggagctattgatgttaatcacaaggatgaagtatatgatggaaaggtgccagatatcattgacaatgcatatgttatagttgaatttgacaatggttctcgaggaatgcttgacctttgtatgtttgctgaagggagtaaaaatgagcaagaaatatctgttgtcggtgatattggaaagggagaagcctttgttcctgagagtgttgtgcagtttggtacccgagaggcggggcgagatggtgtccagactttgaaagctgaggatcacaggataaaatatgatgggttacaccatgggtctagctatctggaacaccttaacttcttgtctgcaatcagagcaaaaggagaaaaggctcctagtgtagatctccaagatggattaatatctgttgctatgggagttgcagcacagctctctatagaatatggtcgatttgtttctattcaggaagttatgaatgagtgcaaaatttgagtgttgcaacttggaagtgagagtaatggttgtctctgctgttatgtgttctttgacaaagggatgctgtattgttgctatcactgcctcaagaaaaagtgcaaaatgatttgc

SEQ ID NO: 3573 - protein, 379 aa, Glycine max
  misc_feature (1)..(379): Ceres Seq. ID no. 12612409
KKNQSSESMAGAIVKYGIIGVGMMGREHLVNLYHLRTQGVAVVAIADPHLPSQQLALDLAHSFTWPLKVFSGHQELLDSGLCDVLVVSTPNMTHHRILMDIINHSKPHHVLVEKPLCTTISHCKEVVNAARKRPDILVQVGLEYRYMPPVAKLIEIVKGGNLGHVKMVAIREHRFPFLVKVNNWNRFNINSGGTLVEKCCHFFDLMRLFVGANPVRVMASGAIDVNHKDEVYDGKVPDIIDNAYVIVEFDNGSRGMLDLCMFAEGSKNEQEISVVGDIGKGEAFVPESVVQFGTREAGRDGVQTLKAEDHRIKYDGLHHGSSYLEHLNFLSAIRAKGEKAPSVDLQDGLISVAMGVAAQLSIEYGRFVSIQEVMNECKI

SEQ ID NO: 3574 - protein, 371 aa, Glycine max
  misc_feature (1)..(371): Ceres Seq. ID no. 12612410
MAGAIVKYGIIGVGMMGREHLVNLYHLRTQGVAVVAIADPHLPSQQLALDLAHSFTWPLKVFSGHQELLDSGLCDVLVVSTPNMTHHRILMDIINHSKPHHVLVEKPLCTTISHCKEVVNAARKRPDILVQVGLEYRYMPPVAKLIEIVKGGNLGHVKMVAIREHRFPFLVKVNNWNRFNINSGGTLVEKCCHFFDLMRLFVGANPVRVMASGAIDVNHKDEVYDGKVPDIIDNAYVIVEFDNGSRGMLDLCMFAEGSKNEQEISVVGDIGKGEAFVPESVVQFGTREAGRDGVQTLKAEDHRIKYDGLHHGSSYLEHLNFLSAIRAKGEKAPSVDLQDGLISVAMGVAAQLSIEYGRFVSIQEVMNECKI

SEQ ID NO: 3575 - protein, 357 aa, Glycine max
  misc_feature (1)..(357): Ceres Seq. ID no. 12612411
MMGREHLVNLYHLRTQGVAVVAIADPHLPSQQLALDLAHSFTWPLKVFSGHQELLDSGLCDVLVVSTPNMTHHRILMDIINHSKPHHVLVEKPLCTTISHCKEVVNAARKRPDILVQVGLEYRYMPPVAKLIEIVKGGNLGHVKMVAIREHRFPFLVKVNNWNRFNINSGGTLVEKCCHFFDLMRLFVGANPVRVMASGAIDVNHKDEVYDGKVPDIIDNAYVIVEFDNGSRGMLDLCMFAEGSKNEQEISVVGDIGKGEAFVPESVVQFGTREAGRDGVQTLKAEDHRIKYDGLHHGSSYLEHLNFLSAIRAKGEKAPSVDLQDGLISVAMGVAAQLSIEYGRFVSIQEVMNECKI

SEQ ID NO: 3576 - DNA, 1507 bp, Glycine max
  misc_feature (1)..(1507): Ceres Seq. ID no. 12612470
acctcccaagctccctagcaccatatgctaaggtcgttaacaacttcaatgggaattgtatcagtagcaccaactcagactgtggtgtatttggtccctcggtatcctccatcaatctccacatatctctatgcttcttctcttaccaaggctaagaccattcatcaacccacacaatcttatgttcactccaaatcagtagaaactgcaatagagagtacatcacagttggtgccattcccattgttgacgaatgggaattacacagcatgcaccattccttggaggttcccttcagacgatccaagcattcccactcccaccgagctatcttggattaatctcctcctcaatactatccccaccttcaagaagcatgctgagaatgatacttctgttcctgatgctgcaaataaagctgaaaattttgctcaaaggtatgctagaatacttgaagatttcaagaaagatcctgcaagtcaaggcaggcctcttgatatccttattctatgcagacttcgtgagcaagtccttagagaacagggattcagagatatcttcaagaaaataaaggatgtagagaatgcaaatgccatatccctatttcagaatgttgttcatcttaatgatgccattgaagatgaagggaaacgactggagaatttggttagaggaatttttgcagggaacatatttgatcttggtgctacacagcttgcagaggttttctcaagggatggagtatctttttcgactacttgtcaaaatcttgtccctcgaccctggattattgatgaccttgaaactttcagaatagcatggagcaagaagtcctggaagaaggtaatcatatttgtggataactctggtgcagatgtcattttgggtattctgccatttgcaagggagctccttcgacgtgggagtcaggttatattggctgctaatgacttaccttccatcaatgatgtgacttactctgacctaattgaaattataccaaagttaaaggatgaagaaggacgtctcacgggtgtcagtacttcaaatcttctaattgccaactccggaaatgatttacctgttattgatcttacaagggtgtcacaagaacttgcataccttgctaatgatgtagatcttgtcatcttagaagggatgggtcgtggaatagaaacaaatctctatgctcaatttaaatgtgattcccttaagattgggatggtaaaacatcctgaggttgcagaatttcttgggtcacgtttgtatgactgcgtgatcaaatacgatgaagtttagagcttataattaagttgattctttactttgataaatacctaacactacatttgcaatttcaactgcaaatttccaaataatcaaaattgaaatttccaaacaattactttttcaatgtacaagtccgaatttggatcaacaatgctggaaaaaaaaaatctgaacccattaaatttaattagattgaattaaaaaaatatttattatt

SEQ ID NO: 3577 - protein, 424 aa, Glycine max
  misc_feature (1)..(424): Ceres Seq. ID no. 12612471
MLRSLTTSMGIVSVAPTQTVVYLVPRYPPSISTYLYASSLTKAKTIHQPTQSYVHSKSVETAIESTSQLVPFPLLTNGNYTACTIPWRFPSDDPSIPTPTELSWINLLLNTIPTFKKHAENDTSVPDAANKAENFAQRYARILEDFKKDPASQGRPLDILILCRLREQVLREQGFRDIFKKIKDVENANAISLFQNVVHLNDAIEDEGKRLENLVRGIFAGNIFDLGATQLAEVFSRDGVSFSTTCQNLVPRPWIIDDLETFRIAWSKKSWKKVIIFVDNSGADVILGILPFARELLRRGSQVILAANDLPSINDVTYSDLIEIIPKLKDEEGRLTGVSTSNLLIANSGNDLPVIDLTRVSQELAYLANDVDLVILEGMGRGIETNLYAQFKCDSLKIGMVKHPEVAEFLGSRLYDCVIKYDEV

SEQ ID NO: 3578 - protein, 416 aa, Glycine max
  misc_feature (1)..(416): Ceres Seq. ID no. 12612472
MGIVSVAPTQTVVYLVPRYPPSISTYLYASSLTKAKTIHQPTQSYVHSKSVETAIESTSQLVPFPLLTNGNYTACTIPWRFPSDDPSIPTPTELSWINLLLNTIPTFKKHAENDTSVPDAANKAENFAQRYARILEDFKKDPASQGRPLDILILCRLREQVLREQGFRDIFKKIKDVENANAISLFQNVVHLNDAIEDEGKRLENLVRGIFAGNIFDLGATQLAEVFSRDGVSFSTTCQNLVPRPWIIDDLETFRIAWSKKSWKKVIIFVDNSGADVILGILPFARELLRRGSQVILAANDLPSINDVTYSDLIEIIPKLKDEEGRLTGVSTSNLLIANSGNDLPVIDLTRVSQELAYLANDVDLVILEGMGRGIETNLYAQFKCDSLKIGMVKHPEVAEFLGSRLYDCVIKYDEV

SEQ ID NO: 3579 - DNA, 801 bp, Glycine max
  misc_feature (1)..(801): Ceres Seq. ID no. 12612527
atccaatccagcacagcagaccacacgtgtgtctgagaagaaaatcgaaacgcagacagtgtctctgatggcagcgtcgttcaggtggatattacaactacacaaggatgttccaaaagccgcacgcttctactccgaaggcttggacttcagcatcaatgtctgcagccttcgttgggccgaactccaatccggttctctcaagcttgccctcatgcattctcccaatgagcaagccacacagaaagggtactcatcgcttctgtcatttactgttcctgatatgaacagtacagtaactaaattaatggcgttaggagctgaactagatggacccatcaaatatgaggtccatggaaaggttgcagctatgcggtgtattgatggacatatcttaggcctctatgaacccgtgtaaagatacacataacataggagattcagtatcaacagtaccctcttttgtcatggtggattccttgcaataattgatgctgttctcttgtcaagacctgtagcagcaggattgtagcgtgtgaagcaatagggctgagaataaggcaaaatgattaggagatagaaaaaaagctatccagatatctccaaattatctgtcttgtagatgggtttgtttggtgccatccatatctgctagaggtgacagcaaatcatctgttggttttatttaatttttcgtctccctgttgaaacgttgaaacttgacgctttcaattgtagactttgcccatgcaattactcaacgattgaaatatttatggattaatgtatgtctcgtgtgcc

SEQ ID NO: 3580 - protein, 138 aa, Glycine max
  misc_feature (1)..(138): Ceres Seq. ID no. 12612528
SNPAQQTTRVSEKKIETQTVSLMAASFRWILQLHKDVPKAARFYSEGLDFSINVCSLRWAELQSGSLKLALMHSPNEQATQKGYSSLLSFTVPDMNSTVTKLMALGAELDGPIKYEVHGKVAAMRCIDGHILGLYEPV

SEQ ID NO: 3581 - protein, 116 aa, Glycine max
  misc_feature (1)..(116): Ceres Seq. ID no. 12612529
MAASFRWILQLHKDVPKAARFYSEGLDFSINVCSLRWAELQSGSLKLALMHSPNEQATQKGYSSLLSFTVPDMNSTVTKLMALGAELDGPIKYEVHGKVAAMRCIDGHILGLYEPV

SEQ ID NO: 3582 - DNA, 1256 bp, Glycine max
  misc_feature (1)..(1256): Ceres Seq. ID no. 12781936
acggcagagttttcccctttcccccctccccactcgccaaaaatcctcgatccaaatccccactccggcgacgcgacgcggccatgcgcagctgccgataggcgacgactgcagcgaccacgcgtgagcggccatggacgagggctacgccagcctccccaccagccacctcctcggctccgtccccgctgtggctgtggctcccgatgagaggaagcccggtgctcccgccgaagttggaaatgccgctgccacctcgcgcctgcagcagtttccgcctgctcctgctgcgaacggaggagggtaccagcctccagggagccctctaggtggagatgtagaaacacagacaaactggaaaggatacttcaatgttgcctcttatactccatatttcaatgttgatactgatgtcgttgttgacagacttatcagttcagtttatccaatggagggatttttcaggaagatagatgttaatcctgacatgtatgggcccttatggatcaccactacactgatatttatgctggctgcattcggaaactttgccacttatctaatgcaaaggaaaagtgatctgaatatatggaactttgatgttagctatttcagtttggcggcatcagtcatgtacggttatgctatcgtggtacctgctgcattctttttcctgtttcagtactttggatcacgcccaagccttatccggttttggtgtatgtggggctattctctgtttatcttcgtaccagcatctatactgctacttattcccgtggaatttcttcgctgggtcatcatagctggtgccggtggtgcatcatcttggttcatctttttaaacttgaaggaatgcaccgaaggagctgatatgatggctttgatcgcaagtgcatcagtgctgcagtttgctctggcactgttcatcaaagttttcttttttgcctgagatctattctgtgttgcttcaggtgagctggatgttttctttgtgtccccgtcgttctgttctgccattcatctttctgaggaccaggcagtggactagtttcaccctacatacatattgaccctagatttgatagaccttgggagtgtctgttttcaagatttttgactctgtgtagttaagggaatttcactgtgtgcgttccagtgcgaagttactaagtttgccatctaaatttgcacctggtgaactttctgccaccgtgctgtacaacaacggtggttagcaagaatgtgaagctctc

SEQ ID NO: 3583 - protein, 272 aa, Glycine max
  misc_feature (1)..(272): Ceres Seq. ID no. 12781937
MDEGYASLPTSHLLGSVPAVAVAPDERKPGAPAEVGNAAATSRLQQFPPAPAANGGGYQPPGSPLGGDVETQTNWKGYFNVASYTPYFNVDTDVVVDRLISSVYPMEGFFRKIDVNPDMYGPLWITTTLIFMLAAFGNFATYLMQRKSDLNIWNFDVSYFSLAASVMYGYAIVVPAAFFFLFQYFGSRPSLIRFWCMWGYSLFIFVPASILLLIPVEFLRWVIIAGAGGASSWFIFLNLKECTEGADMMALIASASVLQFALALFIKVFFFA

SEQ ID NO: 3584 - protein, 167 aa, Glycine max
  misc_feature (1)..(167): Ceres Seq. ID no. 12781938
MEGFFRKIDVNPDMYGPLWITTTLIFMLAAFGNFATYLMQRKSDLNIWNFDVSYFSLAASVMYGYAIVVPAAFFFLFQYFGSRPSLIRFWCMWGYSLFIFVPASILLLIPVEFLRWVIIAGAGGASSWFIFLNLKECTEGADMMALIASASVLQFALALFIKVFFFA

SEQ ID NO: 3585 - protein, 154 aa, Glycine max
  misc_feature (1)..(154): Ceres Seq. ID no. 12781939
MYGPLWITTTLIFMLAAFGNFATYLMQRKSDLNIWNFDVSYFSLAASVMYGYAIVVPAAFFFLFQYFGSRPSLIRFWCMWGYSLFIFVPASILLLIPVEFLRWVIIAGAGGASSWFIFLNLKECTEGADMMALIASASVLQFALALFIKVFFFA

SEQ ID NO: 3586 - DNA, 999 bp, Glycine max
  misc_feature (1)..(999): Ceres Seq. ID no. 12781940
catccatccaccattcatccatcagccacttcacaccagcaagtggcagtagtgcgatccacacaagtttaggcatggcgactccgagagcactcgccctctgcgtcctgctggcgatggccgtcgccaacaccgaggcggcgtcagtcgtcgtcggcctggccaagtgcgccgactgcaccaggaagaacatgcagaccgaggaagccttcaaggctgtgcaggtggcgatcaagtgcaagaacagcgccggcgagtacgagagcaaggcggtgggcggcctcgacggcaccggcgccttcagcgtgcccctggctgccaacctccacggcgccgactgcgtcgctcagctccacagcgccgtctccaacgcgccctgccccggccaggagccgtccaagatcgtgccggtgtccgagggcaccacgtacggcgtcgtcgctggcgagaacgccgccacgccgtctgccgcatcgccggagtgtgcgtccatgaccctatgcgggccgatcaagaagcacatcatcgagcacttccaccacaagaagcctgtgccgccgaagccggagcccaagccccagccccacccggactacggccccgtgcccaagcccgagcccaagccgcagccccacccggactaccacccagtccctcccacccccacctacggcggaggcggcggtggtggataccacggacaccactgagtccagtctaccattgtactcctgcccagcgggttggttgtcagtgagtgatcgacgttgctatttatgatcggtttgcatgggtgggtgcattgtttggtcttctgccattcgctgccccattttagtatctgcactgcagtctgagagttcataataacagctctacgcgtgtgtatcaggcaagtgtgtgggtgtggttggtgtgtttgcttctgtaatttcggtgagttctcttgtagtacaaaggtttttatgaatcaagtaatttaaatcaagtcgattttgt

SEQ ID NO: 3587 - protein, 235 aa, Glycine max
  misc_feature (1)..(235): Ceres Seq. ID no. 12781941
SIHHSSISHFTPASGSSAIHTSLGMATPRALALCVLLAMAVANTEAASVVVGLAKCADCTRKNMQTEEAFKAVQVAIKCKNSAGEYESKAVGGLDGTGAFSVPLAANLHGADCVAQLHSAVSNAPCPGQEPSKIVPVSEGTTYGVVAGENAATPSAASPECASMTLCGPIKKHIIEHFHHKKPVPPKPEPKPQPHPDYGPVPKPEPKPQPHPDYHPVPPTPTYGGGGGGGYHGHH

SEQ ID NO: 3588 - protein, 211 aa, Glycine max
  misc_feature (1)..(211): Ceres Seq. ID no. 12781942
MATPRALALCVLLAMAVANTEAASVVVGLAKCADCTRKNMQTEEAFKAVQVAIKCKNSAGEYESKAVGGLDGTGAFSVPLAANLHGADCVAQLHSAVSNAPCPGQEPSKIVPVSEGTTYGVVAGENAATPSAASPECASMTLCGPIKKHIIEHFHHKKPVPPKPEPKPQPHPDYGPVPKPEPKPQPHPDYHPVPPTPTYGGGGGGGYHGHH

SEQ ID NO: 3589 - protein, 197 aa, Glycine max
  misc_feature (1)..(197): Ceres Seq. ID no. 12781943
MAVANTEAASVVVGLAKCADCTRKNMQTEEAFKAVQVAIKCKNSAGEYESKAVGGLDGTGAFSVPLAANLHGADCVAQLHSAVSNAPCPGQEPSKIVPVSEGTTYGVVAGENAATPSAASPECASMTLCGPIKKHIIEHFHHKKPVPPKPEPKPQPHPDYGPVPKPEPKPQPHPDYHPVPPTPTYGGGGGGGYHGHH

SEQ ID NO: 3590 - DNA, 491 bp, Glycine max
  misc_feature (1)..(491): Ceres Seq. ID no. 12782123
acttttccattcgttctcttttctgttttgctcttctctctgatttttgcttcaattcgttaattgtaattgttatttccccgatttcaatttttcagggtttcccctcgtctccgagctcgtttcgttctcgaagaatcgatctgcgataatgactcgcggtaaccagagggatcgtgatcgcgaaagggctcaggctagaaccggtggtaaaggcaagcagaaagatgatgggttgacccctgaacagcgcagggaaagagatgcgaaggcgctgcaggagaaggcggcaaagaaagcggcacaggatgcaggagggaataatgcaggtggaaccaaaaaataggcaataattcaatgagtggtttgagttcgacattgttgtttgtagacatggaatttatggaaaatttatgttgcgttattcgtggagtatgatgtgtttattaatgtaatttgtgacagatgaataaataagttgtgcttctttg

SEQ ID NO: 3591 - protein, 64 aa, Glycine max
  misc_feature (1)..(64): Ceres Seq. ID no. 12782124
MTRGNQRDRDRERAQARTGGKGKQKDDGLTPEQRRERDAKALQEKAAKKAAQDAGGNNAGGTKK

SEQ ID NO: 3592 - protein, 49 aa, Glycine max
  misc_feature (1)..(49): Ceres Seq. ID no. 12782125
FSIRSLFCFALLSDFCFNSLIVIVISPISIFQGFPSSPSSFRSRRIDLR

SEQ ID NO: 3593 - DNA, 504 bp, Glycine max
  misc_feature (1)..(504): Ceres Seq. ID no. 12782173
gtcacacattgattttgttttcgctgcttatctcaacgtctaatcatcatgggtttgaaggaggagttcgaggagcacgctgaggaagtcaagacgctcaccacgaaaccatctgacgcggacttgctcatcctctacggtctcttcaagcaagccaccgtcggcccagtcaccaccagccgtcctggaatgttcagcatgaaggaaagagccaagtgggatgcttggaaggccgttgaagcgaaatcgacggatgaggccatgagtgactacatcactaaggtgaagcaactcatggaagcagcagaggcttccgccgcttcaacttgatgaatttatatatgattcaccaaatgctccactccaataattccatctaaacttcaaataacttagcataagactttgttcttgttgcttcttgtgttttcatccttataaatctatcatttacattatgacctctgtcttgatttttaaaaattgatcctatggtttcgggtc

SEQ ID NO: 3594 - protein, 93 aa, Glycine max
  misc_feature (1)..(93): Ceres Seq. ID no. 12782174
MGLKEEFEEHAEEVKTLTTKPSDADLLILYGLFKQATVGPVTTSRPGMFSMKERAKWDAWKAVEAKSTDEAMSDYITKVKQLMEAAEASAAST

SEQ ID NO: 3595 - protein, 46 aa, Glycine max
  misc_feature (1)..(46): Ceres Seq. ID no. 12782175
MFSMKERAKWDAWKAVEAKSTDEAMSDYITKVKQLMEAAEASAAST

SEQ ID NO: 3596 - DNA, 1058 bp, Glycine max
  misc_feature (1)..(1058): Ceres Seq. ID no. 12782188
aaacttcaaagccctcctttgcctctctctcttcgcttattgttgcaccttcctcgtaaaagataactcccggtcggcgtgcatagccgccgattgaggcaaaaaaaaaacacaaaacacactgtagctcatcacagccaaacgcggcgtcaacgatgacgagcttctgaaattccaacttcgcccttcttctctgtgtatattcttttttatttatttattattatttctattattttttcggtgaggttagctccatgcctagtcccaagagcagccgcagcggccagatcgagagtcaccggaggggaaggtcgtcgtccttccacggccagtgcgcgatgtctgtcggtcagctccaccgtccgaagacggtttccgacctcccgtcgctcagaagcctcgccggaacggcgccggcgcctatgccggagggattgcctagacagccgccgaagatgctgctgaaggtgacggtgctgagaagcctcgcgcccgtgcaggtgctgatgacgccgggatccaccgtccgcgacctgatagcggcggcggtgcggcagtacgtgaaggaaggtcgccggccaatcttgccgtccagcgaagtctccgaattcgacctccattattcgcagtttagcctagaaagtttggataggaaggagaagctgctagagcttggatctaggaacttttttctatgtccgagaaagccagctacaacagtggaagatggcgtaacgacgtcgtttgcgtcttgtgcgaaagaggcagagaaagagagggagggatatggtggtggtggtggtgggtttgcttggttcaaactcatgcagttcatgatgtgattggttggttgattagtcattattgttattttatttcaattgaaatgtctttttatttgtcccagaatgaatggccggttacttgtaaaaaataataggttggcttggcaattaggtacagggtttgagatttgtgtgtaagcaaagcaaaattgtaaaatagcatgtatgatttttaaacacatacatggtaatgttaaagctttcaattgc

SEQ ID NO: 3597 - protein, 195 aa, Glycine max
  misc_feature (1)..(195): Ceres Seq. ID no. 12782189
MPSPKSSRSGQIESHRRGRSSSFHGQCAMSVGQLHRPKTVSDLPSLRSLAGTAPAPMPEGLPRQPPKMLLKVTVLRSLAPVQVLMTPGSTVRDLIAAAVRQYVKEGRRPILPSSEVSEFDLHYSQFSLESLDRKEKLLELGSRNFFLCPRKPATTVEDGVTTSFASCAKEAEKEREGYGGGGGGFAWFKLMQFMM

SEQ ID NO: 3598 - protein, 167 aa, Glycine max
  misc_feature (1)..(167): Ceres Seq. ID no. 12782190
MSVGQLHRPKTVSDLPSLRSLAGTAPAPMPEGLPRQPPKMLLKVTVLRSLAPVQVLMTPGSTVRDLIAAAVRQYVKEGRRPILPSSEVSEFDLHYSQFSLESLDRKEKLLELGSRNFFLCPRKPATTVEDGVTTSFASCAKEAEKEREGYGGGGGGFAWFKLMQFMM

SEQ ID NO: 3599 - protein, 139 aa, Glycine max
  misc_feature (1)..(139): Ceres Seq. ID no. 12782191
MPEGLPRQPPKMLLKVTVLRSLAPVQVLMTPGSTVRDLIAAAVRQYVKEGRRPILPSSEVSEFDLHYSQFSLESLDRKEKLLELGSRNFFLCPRKPATTVEDGVTTSFASCAKEAEKEREGYGGGGGGFAWFKLMQFMM

SEQ ID NO: 3600 - DNA, 673 bp, Glycine max
  misc_feature (1)..(673): Ceres Seq. ID no. 12783386
acatcgattccttcctgccactccttcctcgcatgccccctgagttcctgcaccgagactgctagctagctataatctcctcggcttctttctccgtcccctcggccggcctgccacccgatcgttcctgatgtccggcaccgtgtgctccatgtgcggcgacgtcggcttccaggacaagctcttccgctgcgcccgttgccgctgccgcttccaacactcctattgcacgaactactacggcgacgcggccccggctgacgcgggcgccggcgtgtgcgactggtgcctcagcgacgaccccctcgtgaagaacaggcgcccttcggcgccgccggccatgcagcaccgcggtccgccgaccgggatgggctgcggcaaggtcaaggtgaccggcggcggcgagcaggagggcggccggagagtggccaaggcggccgtccgcaggtacaagctcctcaaagacgtccttgctagctagctggtgcatgcatggtcctgggtcaccgcactcctttccttagatcgggacctcgtcatcatgtgtactaaaaaacgatgctgtttaattaagtagtcgatagtcgttgtacctagctagctggcgaggttctgcttccatatcgatccttgtgtgcaaatgtcggcatgtcacaatgagatctacttctgt

SEQ ID NO: 3601 - protein, 116 aa, Glycine max
  misc_feature (1)..(116): Ceres Seq. ID no. 12783387
MSGTVCSMCGDVGFQDKLFRCARCRCRFQHSYCTNYYGDAAPADAGAGVCDWCLSDDPLVKNRRPSAPPAMQHRGPPTGMGCGKVKVTGGGEQEGGRRVAKAAVRRYKLLKDVLAS

SEQ ID NO: 3602 - protein, 109 aa, Glycine max
  misc_feature (1)..(109): Ceres Seq. ID no. 12783388
MCGDVGFQDKLFRCARCRCRFQHSYCTNYYGDAAPADAGAGVCDWCLSDDPLVKNRRPSAPPAMQHRGPPTGMGCGKVKVTGGGEQEGGRRVAKAAVRRYKLLKDVLAS

SEQ ID NO: 3603 - DNA, 1233 bp, Glycine max
  misc_feature (1)..(1233): Ceres Seq. ID no. 13502622
acctagaacatcctaatcgaaaaaagcaagcaagcaacttgtattgttgctacaaggcatataaattttcatcattgcaagttgcaaccattttgaccaaaaaccaataataagctttcgaccaaaagaagaaagaagaacccatttatcatcgttggaaaaaatcccagatctcaaaaaatggaattttcgcagagtcacagggtagagatgataagcatggcagttgctcttgttgccattgttggtggcaccgcttactattactacgtcaccaagaagccaaaagggtgcttggatcctgagaacttcaaagaatttaaacttgttaaacgcactcaactcagccataatgttgccacgttccgatttgatcttcctactcctaagtcagtgttgggacttcctattggacaacatatcagctgcagagggaaggatagtcttggtgaagaagttgtgaaaccatatactcctacaacattggatactgatgttggatactttgaattggttgtgaagatgtatccacaaggacggatgtctcatcactttagggagatacgtgaaggtgattacatggctgtgaagggaccaaagggacgttttaagtaccagcccaaccaagtaagagctttgggtatgattgctggtggcactggcatcaccccaatgtttcaagttacaagagctatattagaaaaccaacaggacaaaaccaacataaatttgatatatgccaatgtcacatttgatgacattcttttgaaggaagagctggatgcctttgccattaagttccctaatcaattcaaagtttactatgttctaaatcagccaccagaaatatggggacggtggtgttggattcgtcactaaggaaatgatccaaacagatttccctgcaccagcatcagatattaagatattaaggtgtggaccacctcccatgaacaaggctatggctgctaatcttgaagctcttggatacagtccccaaatgcagtttcagttttatagtcttgaataaagctcatctatattaaattttttaaaatacacacagcattcgagtccgatatcaatgtttggacatttgttggtattctctttctagatttgacagaataagcgcgcctgtgttacactctaggttagacattttacattgtagtgatgttcaggtttatggaaagttttgatggcgtatgctgtaacattgcaggctgtttc

SEQ ID NO: 3604 - protein, 232 aa, Glycine max
  misc_feature (1)..(232): Ceres Seq. ID no. 15223184
MEFSQSHRVEMISMAVALVAIVGGTAYYYYVTKKPKGCLDPENFKEFKLVKRTQLSHNVATFRFDLPTPKSVLGLPIGQHISCRGKDSLGEEVVKPYTPTTLDTDVGYFELVVKMYPQGRMSHHFREIREGDYMAVKGPKGRFKYQPNQVRALGMIAGGTGITPMFQVTRAILENQQDKTNINLIYANVTFDDILLKEELDAFAIKFPNQFKVYYVLNQPPEIWGRWCWIRH

SEQ ID NO: 3605 - protein, 222 aa, Glycine max
  misc_feature (1)..(222): Ceres Seq. ID no. 15223185
MISMAVALVAIVGGTAYYYYVTKKPKGCLDPENFKEFKLVKRTQLSHNVATFRFDLPTPKSVLGLPIGQHISCRGKDSLGEEVVKPYTPTTLDTDVGYFELVVKMYPQGRMSHHFREIREGDYMAVKGPKGRFKYQPNQVRALGMIAGGTGITPMFQVTRAILENQQDKTNINLIYANVTFDDILLKEELDAFAIKFPNQFKVYYVLNQPPEIWGRWCWIRH

SEQ ID NO: 3606 - protein, 219 aa, Glycine max
  misc_feature (1)..(219): Ceres Seq. ID no. 15223186
MAVALVAIVGGTAYYYYVTKKPKGCLDPENFKEFKLVKRTQLSHNVATFRFDLPTPKSVLGLPIGQHISCRGKDSLGEEVVKPYTPTTLDTDVGYFELVVKMYPQGRMSHHFREIREGDYMAVKGPKGRFKYQPNQVRALGMIAGGTGITPMFQVTRAILENQQDKTNINLIYANVTFDDILLKEELDAFAIKFPNQFKVYYVLNQPPEIWGRWCWIRH

SEQ ID NO: 3607 - DNA, 599 bp, Glycine max
  misc_feature (1)..(599): Ceres Seq. ID no. 13503313
tcaacattgttcaatgttgggtcaatatcaagtccaattgggtcatacttgctcagtgtgagggttgcagggtatttatatgatatggaagcaagaaggcaattggaagctttggggcaaaagacaagtccaggggaggagctgaactgcaatggtgatgagtgctacaagttggcattcattacaatgactgcagtttgcttgtttggggcatgtttgtcactcattctggtctttaggaccatacaactttatagaagagacctatacaagaaattcaatggtgctacaactgatgtaactgaaacaactgatgtaactgaaacggctgtgtcttagaaatatattggaccatcagctgcaaatgaaggctaggtgactttggtatggaaatggcaacagaaaattcagaaccagagcaatagctatagcaactactttgcaatcactaacaaatttacagtttataatgagtagtccttgtaaatttgtaatgttatcttttctaccttagagacctatttcggctagtgggataacactttattgttatttgttttttactgtgacaacttggtaacatagtttctttccgcttc

SEQ ID NO: 3608 - protein, 112 aa, Glycine max
  misc_feature (1)..(112): Ceres Seq. ID no. 13503314
STLFNVGSISSPIGSYLLSVRVAGYLYDMEARRQLEALGQKTSPGEELNCNGDECYKLAFITMTAVCLFGACLSLILVFRTIQLYRRDLYKKFNGATTDVTETTDVTETAVS

SEQ ID NO: 3609 - protein, 84 aa, Glycine max
  misc_feature (1)..(84): Ceres Seq. ID no. 13503315
MEARRQLEALGQKTSPGEELNCNGDECYKLAFITMTAVCLFGACLSLILVFRTIQLYRRDLYKKFNGATTDVTETTDVTETAVS

SEQ ID NO: 3610 - DNA, 1003 bp, Glycine max
  misc_feature (1)..(1003): Ceres Seq. ID no. 13504028
ttgacaatgtgaaatccatataatgtagtgcttgatttgggatgcttgttattgttattccatactgaaaaggtgtgtccttgtggttaactttcattaactatgttgctattgccagatgaattgaagccttctaatgtgggtcttgaacaagaggcgcaattggtgcgtggatggaaaggttctttgaatggcaccaatggcaaaaaggggcgcaatggaagttatcagtatccaccctccattaagtacattcacttgcatgaatgtgacaaattctctatgggaatcttctgtatgtctcctggttccgttattccgcttcataaccatcccggaatgactgttttgagcaagcttctttatggttcattacttgtgaggtcatatgattggctggatttacctgggccagatgatccatctcaagctagaccagcaaaacttgtgaaagattgtcagatgagtgccccctgtaacaccacagttctttatccaagcaagggtggcaacattcattgtttcaaagccttaaccccttgcgctctctttgacgttctttcccctccttactcatcagaagatggaagacactgctcatatttcaggaagtcaactaggaaagatcttccaggtgttgagcttgatcagctgagtggtgtaaagccatctgaaataacctggctagaagagatccaagcacctgaaaacctggtggttagaagaggtgtttacaaaggccctactataagacgatgaaggatacaactaatttgtatttacataacattagccaggcatgactagaaactaaatatgatggggatataaattaaaggtggtatatcttgggaataattgaccatctgctttatatgattgttaactgtacatactgtgataaatgatggcagttaatgttgatcatgccttgtgtatccttgttctaactagcccctttttagattattagaggaatagcaccaacatggtgatctttggc

SEQ ID NO: 3611 - protein, 218 aa, Glycine max
  misc_feature (1)..(218): Ceres Seq. ID no. 13504029
MLLLPDELKPSNVGLEQEAQLVRGWKGSLNGTNGKKGRNGSYQYPPSIKYIHLHECDKFSMGIFCMSPGSVIPLHNHPGMTVLSKLLYGSLLVRSYDWLDLPGPDDPSQARPAKLVKDCQMSAPCNTTVLYPSKGGNIHCFKALTPCALFDVLSPPYSSEDGRHCSYFRKSTRKDLPGVELDQLSGVKPSEITWLEEIQAPENLVVRRGVYKGPTIRR

SEQ ID NO: 3612 - protein, 158 aa, Glycine max
  misc_feature (1)..(158): Ceres Seq. ID no. 13504030
MGIFCMSPGSVIPLHNHPGMTVLSKLLYGSLLVRSYDWLDLPGPDDPSQARPAKLVKDCQMSAPCNTTVLYPSKGGNIHCFKALTPCALFDVLSPPYSSEDGRHCSYFRKSTRKDLPGVELDQLSGVKPSEITWLEEIQAPENLVVRRGVYKGPTIRR

SEQ ID NO: 3613 - protein, 153 aa, Glycine max
  misc_feature (1)..(153): Ceres Seq. ID no. 13504031
MSPGSVIPLHNHPGMTVLSKLLYGSLLVRSYDWLDLPGPDDPSQARPAKLVKDCQMSAPCNTTVLYPSKGGNIHCFKALTPCALFDVLSPPYSSEDGRHCSYFRKSTRKDLPGVELDQLSGVKPSEITWLEEIQAPENLVVRRGVYKGPTIRR

SEQ ID NO: 3614 - DNA, 1375 bp, Glycine max
  misc_feature (1)..(1375): Ceres Seq. ID no. 13514389
acctagaacatcctaatcgaaaataaacacccacatgacatggaaaagacgctaacgccacccgtcttcgagcattaaaacccgcgaaacttccaagcagggttacacgccgcattgctctcagcttcacaacaccatggaccacgttagggaaacctctgcttgggtagctagccgctcctcccacgttctcgttgactctgcaggaattgagaaagtggtgagcaccattgattccattcccaaggttgagtgggatttcgaagggattcactactttgataatggaccactcaccgttcagtacctgtttgtgttggacgctttaaatttttgcttctggcctgataaggatttgaattatgatgatttggcatctgggctaaaggcagctcttcaaaatgataaatctgcatttgatgctgatcgtctgcaaaagtacactggtccacaactgcgtgagcttttgaggtggcctagaccccttcctctggaagatgaacgagttaggttactacatgaggttgggattgaattagaaagaaactttgagggtaaagcatccaatcttgtggagtgctgtggaaaatcagccatgaatcttgttgctcttgttgcacgccattttcctggttttagagaccatacagtgtacaaaggacgccaggtatttttatataaaagggctcagatatttgcagcagatttgtttggtgcatttaggggccaaggatatggtgagttcaaagacattggctctctaactataatggcagactatattgtcccagctgtgcttcgacagcttggtgttttaaaatatagtccaacacttgccagtactattgaggccagtggagaaataggtccagggactgaagaggaagttgaactgcgtgcttgctctgtacatgcagtggagaaaatgagggagctaataagtgtaaagtcaggaagacaggtgctcagtgtggagctggatctttggctctgggcttctggtgttcagtccacatctctgcagcaccaccgtacactttcaatatattactgagcacatgatatatggtaacttctagctatcaacaatttagttgttgaacaagaaaattttggctgttttaaggtaattatttaggataatgtgtgaataactacctccttttgcactaaagttttggaatcagcttttgtaattttggaaaagtgatacttaaccagatgctttcaaacttaattttgaatagccatggtattcggattttaggaccttaaatagtttacagggtgaacaattaggctcatggttgttttacaatgggaggttgttaatatttactttgtcaaatataactgttggtatagccgaggttgt

SEQ ID NO: 3615 - protein, 305 aa, Glycine max
  misc_feature (1)..(305): Ceres Seq. ID no. 13514390
MDHVRETSAWVASRSSHVLVDSAGIEKVVSTIDSIPKVEWDFEGIHYFDNGPLTVQYLFVLDALNFCFWPDKDLNYDDLASGLKAALQNDKSAFDADRLQKYTGPQLRELLRWPRPLPLEDERVRLLHEVGIELERNFEGKASNLVECCGKSAMNLVALVARHFPGFRDHTVYKGRQVFLYKRAQIFAADLFGAFRGQGYGEFKDIGSLTIMADYIVPAVLRQLGVLKYSPTLASTIEASGEIGPGTEEEVELRACSVHAVEKMRELISVKSGRQVLSVELDLWLWASGVQSTSLQHHRTLSIYY

SEQ ID NO: 3616 - protein, 152 aa, Glycine max
  misc_feature (1)..(152): Ceres Seq. ID no. 13514391
MNLVALVARHFPGFRDHTVYKGRQVFLYKRAQIFAADLFGAFRGQGYGEFKDIGSLTIMADYIVPAVLRQLGVLKYSPTLASTIEASGEIGPGTEEEVELRACSVHAVEKMRELISVKSGRQVLSVELDLWLWASGVQSTSLQHHRTLSIYY

SEQ ID NO: 3617 - DNA, 1478 bp, Glycine max
  misc_feature (1)..(1478): Ceres Seq. ID no. 13518411
cagctacgtaggccccccccccagatttgaatttatttaagagagaatcgtatgttgtggaattgggactattaagtaaggttccacatgcaagattggtcccaatcctgggccactgcttggacaatgaaaatgagaaattcatagtttacaagtacatgccaaatcgagatttagctacttccttgcacagagtcaccggttcagatggtaaattacagtccctggattggatcacgagattgaaaattgcaataggagctgctgaaggcatagcttacctacatgagtgcagccctccccttgtccacagagatatccaagctagcagtatactacttgatgataaatttgaagtgcgacttggaagtttgagtgaggttactgcccaaggagatcttcaacaaggagtcatctcaagggttttcagcaagccaccatcttccaatcaagcagattctggtaaatcatcagtgacatgtgcctatgatatctactgttttggcaagattttacttgagctcattaccggtaacattgaagtcagcaagttagatgatgcctctacaaaggagtggttagagcaaaccttgccttacatcactatatacgataaagaacgggtgactaagattattgacccatcattgatcgtggatgaggacctgttggaagaggtatgggctatggcaattgtggccaatgcatgcttgaatcccaagccttccaaacgccctcctatgaggcatgtcctgaaagcattggaaaatccattgaagattgtgagagaagaaaatactagctcagcaaggttgagatcaaactcttctaggaaatcttggagcactgcattctttggtagctggagacacagctcatcagacagtgttgttgccacaaacaaagagggttctagtgacactaaaaaatcaggaaaagtaggttctcaaagtagtggaaacgatcactcttcttccaataaaagatcgtccaatgaaattttccccgaaccattggaaatactagatgtggagacaggagtggcaagataagcacttgtgaaatggatttggttattctttagtctgtgaggttttttttttaccactttctcagataactggtggtgccatagcaattgcttgttattagcacatcaaactcactacccagcatccattatggtccgtattgaagcaatggaaaaccttaatactgctagtgatagcttttgctttccaaagctcagattaagcagtacagattgaaatgtctggtatgagaactccgaaaaaaactgaataattttactcattcaatagattgtttgaaacacacagccctcccctaggttaaaagttgtgtgacaaaatgtaaaataatgagagggttttcatttttacgagtaattgtaggtgggaaaaacgttgttactcactcgaggttttctttggtaggttatatgtatttagcattgt

SEQ ID NO: 3618 - protein, 297 aa, Glycine max
  misc_feature (1)..(297): Ceres Seq. ID no. 13518412
MPNRDLATSLHRVTGSDGKLQSLDWITRLKIAIGAAEGIAYLHECSPPLVHRDIQASSILLDDKFEVRLGSLSEVTAQGDLQQGVISRVFSKPPSSNQADSGKSSVTCAYDIYCFGKILLELITGNIEVSKLDDASTKEWLEQTLPYITIYDKERVTKIIDPSLIVDEDLLEEVWAMAIVANACLNPKPSKRPPMRHVLKALENPLKIVREENTSSARLRSNSSRKSWSTAFFGSWRHSSSDSVVATNKEGSSDTKKSGKVGSQSSGNDHSSSNKRSSNEIFPEPLEILDVETGVAR

SEQ ID NO: 3619 - DNA, 1372 bp, Glycine max
  misc_feature (1)..(1372): Ceres Seq. ID no. 13518893
accttaaacttttgcattgacattgcaaactgtttttctctcttagcttaaaagttctctcttgctatccctcctccattaaccccattaataataagcaccatcaatttccttaattgcttcatatataggaaaatacaatgaccaagatctttgtgctgttatgtctgctcttcttagcttcttctgggtttgtccatggctcttctaagaaggatcatattaggttatttgagctcaagaaaggtgatttttctataaaggtcaccaattggggtgcaacacttgtgtccgtaatacttcccgataagaatgggaagttgggtgatattgttcttggatatgattctcccaaggcatacacaaatgatacatcatactttggagctactgtgggccgggttgctaacagaattggaggagctcagttcactctaaatggaatccattacaaattagttgctaatgaaggaaacaacacacttcattctggacccaaagcattcagtgatgttctttggaaagtgacaaggtacataaaagatgatgacaaacccagaatcaccttcagttatcacagttatgatggtgaaggaggatttcctggggacctcctagtaactgtgagctacattcttgggaaaaactcattaagcataatcatgaaagcaaaagctctgaacaagcctaccccagtgaacatggtgaaccatgcttactggaacctaggaaaccacaacagtggcaacattctagatgaagtggttcagatctttggatcccaagtcacactatttgatgacaatctcattcccacaggccaatatgcctcagttagaggaaccccaaatgatttccttgagccacacattgttggagaaaggatcaaccaattgcctaagacaaatggctataacatcaactatgtgcttgatggtgaaaaaggcaatgcagagattaagctggcagctatagcggtggataagaagtcagggagagtgatgaagctcttcacaaatgctcctggtttgcagttttacactgctaattttgtcaagaatgacaagggaaaaggagggtttgtttatcagccacgttcagcactttgtttggagagtcaagcatttcctgactccgtgaatcaccctaattttccatcaactattgtgaccccagataagccttacaagcatgtcatgttgcttaagttttccaccaaagttccatatgctttttcacagttctaattagaattgtgtgctttgatgaaccactttttatgtgtttggtatcaatgtatagcacgactctttttgtgctcttgcaaaacttggcttgggttcattaaaatgaataatgagatattttaatt

SEQ ID NO: 3620 - protein, 368 aa, Glycine max
  misc_feature (1)..(368): Ceres Seq. ID no. 13518894
MTKIFVLLCLLFLASSGFVHGSSKKDHIRLFELKKGDFSIKVTNWGATLVSVILPDKNGKLGDIVLGYDSPKAYTNDTSYFGATVGRVANRIGGAQFTLNGIHYKLVANEGNNTLHSGPKAFSDVLWKVTRYIKDDDKPRITFSYHSYDGEGGFPGDLLVTVSYILGKNSLSIIMKAKALNKPTPVNMVNHAYWNLGNHNSGNILDEVVQIFGSQVTLFDDNLIPTGQYASVRGTPNDFLEPHIVGERINQLPKTNGYNINYVLDGEKGNAEIKLAAIAVDKKSGRVMKLFTNAPGLQFYTANFVKNDKGKGGFVYQPRSALCLESQAFPDSVNHPNFPSTIVTPDKPYKHVMLLKFSTKVPYAFSQF

SEQ ID NO: 3621 - protein, 194 aa, Glycine max
  misc_feature (1)..(194): Ceres Seq. ID no. 13518895
MKAKALNKPTPVNMVNHAYWNLGNHNSGNILDEVVQIFGSQVTLFDDNLIPTGQYASVRGTPNDFLEPHIVGERINQLPKTNGYNINYVLDGEKGNAEIKLAAIAVDKKSGRVMKLFTNAPGLQFYTANFVKNDKGKGGFVYQPRSALCLESQAFPDSVNHPNFPSTIVTPDKPYKHVMLLKFSTKVPYAFSQF

SEQ ID NO: 3622 - DNA, 809 bp, Glycine max
  misc_feature (1)..(809): Ceres Seq. ID no. 13521957
gagaagggaagatgatgatggctcattctcattatcttcttcacattccatcgttatcatctttatctgcatctctcacttccccgcctcgctcgcttcttcctgttcggacattacaacctaagacgctgtcgtgtcgtgtcccttcatttccaacacgcaccccgtggcacttcaagcctcttcattttgctctctctggggcactctcacttgggttattattcggaggaattggcgtggctgaggctgcaaaagttggtgtgaacaagccagagttgctccccaaggagtttagtactgtcattgatgttgctgggttcctatccgatggacaggaggaaagactagcagaagagattgctgctcttgaagcggatactggattcaagttaagagttttggcccagaactatcctgttacgccaggtttggctattaaagatttctggcaagtagatgacagaacagttgtttttgttgctgatcccacatttggcaatatattgaatttcaatgttggtgctacggttgatttggatgtcccacgtagcttttggaatcgcttggctgggaagtatgggaacattttctattggaaagaaaagggggaagatgcatctattgaagcagcagttatggcaatttctagttgcttgagagaaccagttgggcctaataattgttctgaggtgaattaatttcattgatcagtattatttggtcatgtgataccataggtgtacagatatgaactaaaatatttaggagaatctgtttcatgttttaagtatattattctgttctct

SEQ ID NO: 3623 - protein, 232 aa, Glycine max
  misc_feature (1)..(232): Ceres Seq. ID no. 13521958
EGKMMMAHSHYLLHIPSLSSLSASLTSPPRSLLPVRTLQPKTLSCRVPSFPTRTPWHFKPLHFALSGALSLGLLFGGIGVAEAAKVGVNKPELLPKEFSTVIDVAGFLSDGQEERLAEEIAALEADTGFKLRVLAQNYPVTPGLAIKDFWQVDDRTVVFVADPTFGNILNFNVGATVDLDVPRSFWNRLAGKYGNIFYWKEKGEDASIEAAVMAISSCLREPVGPNNCSEVN

SEQ ID NO: 3624 - protein, 229 aa, Glycine max
  misc_feature (1)..(229): Ceres Seq. ID no. 13521959
MMMAHSHYLLHIPSLSSLSASLTSPPRSLLPVRTLQPKTLSCRVPSFPTRTPWHFKPLHFALSGALSLGLLFGGIGVAEAAKVGVNKPELLPKEFSTVIDVAGFLSDGQEERLAEEIAALEADTGFKLRVLAQNYPVTPGLAIKDFWQVDDRTVVFVADPTFGNILNFNVGATVDLDVPRSFWNRLAGKYGNIFYWKEKGEDASIEAAVMAISSCLREPVGPNNCSEVN

SEQ ID NO: 3625 - protein, 228 aa, Glycine max
  misc_feature (1)..(228): Ceres Seq. ID no. 13521960
MMAHSHYLLHIPSLSSLSASLTSPPRSLLPVRTLQPKTLSCRVPSFPTRTPWHFKPLHFALSGALSLGLLFGGIGVAEAAKVGVNKPELLPKEFSTVIDVAGFLSDGQEERLAEEIAALEADTGFKLRVLAQNYPVTPGLAIKDFWQVDDRTVVFVADPTFGNILNFNVGATVDLDVPRSFWNRLAGKYGNIFYWKEKGEDASIEAAVMAISSCLREPVGPNNCSEVN

SEQ ID NO: 3626 - DNA, 1326 bp, Glycine max
  misc_feature (1)..(1326): Ceres Seq. ID no. 13528075
catggaggaccacaccccatttctctagcactgattaaacaataatctttgatttttttggtcctccggtcatccttgatgtgttcacaggaggtatgctctggtattttatatgacttaattagttcattttaaatgaatttaatttaatttaccaaattcagtaatgaaattgaatcagctaaattcaaccatgtatgaggtttcttgtagaattagcatgcagccaaccatatgcttcttagaatcttagtgacaacctgtagatgaagtgtgtcatatctttatcatttgttgtttctgttaactgatgatgatctactctgtaagttgtaactgtaatatagtaacattccttatttcatgttcctcttccaaccctaattgctttatctttctggtcatccagtggctagtatagaagaaccataagcactgagggaaaaagtgattagtactttagccaacaaattaaaaatggctgtcaccaaggtctacattgtgtattactccttatatggacatgtagacaccatggctagagaagtacacagaggggctgctacagttgaaggtgttgaagcaacactttggagggtacctgagatgctttcggaactaatattggataagttgaaggcccctcctaaaccaaatgatgtaccagacataatgccagaacaacttgtggaggctgatggtttgatatttggttttccttctcgttttgggatgatgccgagccagctcaaggccttctttgatgcaactagtgagctatgggcatcccaagcacttgccggcaaacctgctggaatcttctggagtactggtttttatggtggaggccaagaactatcagcattgacagctataactcaattagctcatcatggtatgctttttgttcctcttggatacacctttggaagtggcatgtttgagatagatgaggtaaaaggaggatctgcatatggtgctggaacttttgcaggagatggatctcgtcaacctacagaactagaactgcagcaggcattttaccagggtaaatatcttgccgaagtaacaaaaaagctgaaaagctaacttctctgcctaacaaatacatgacaggatactatgaactgtgatgtgctacattatctataacatttgattgaagactcgatgattatttttaccggtaagacaagatagaaagacctcatgtggcttttctttttctgggttctgttgttgcaacaatgtatatcttctgttatctctttcagaaaactctcaaattattccaatgaaatgataaacaagatattcagtatttcc

SEQ ID NO: 3627 - protein, 203 aa, Glycine max
  misc_feature (1)..(203): Ceres Seq. ID no. 13528076
MAVTKVYIVYYSLYGHVDTMAREVHRGAATVEGVEATLWRVPEMLSELILDKLKAPPKPNDVPDIMPEQLVEADGLIFGFPSRFGMMPSQLKAFFDATSELWASQALAGKPAGIFWSTGFYGGGQELSALTAITQLAHHGMLFVPLGYTFGSGMFEIDEVKGGSAYGAGTFAGDGSRQPTELELQQAFYQGKYLAEVTKKLKS

SEQ ID NO: 3628 - protein, 184 aa, Glycine max
  misc_feature (1)..(184): Ceres Seq. ID no. 13528077
MAREVHRGAATVEGVEATLWRVPEMLSELILDKLKAPPKPNDVPDIMPEQLVEADGLIFGFPSRFGMMPSQLKAFFDATSELWASQALAGKPAGIFWSTGFYGGGQELSALTAITQLAHHGMLFVPLGYTFGSGMFEIDEVKGGSAYGAGTFAGDGSRQPTELELQQAFYQGKYLAEVTKKLKS

SEQ ID NO: 3629 - protein, 160 aa, Glycine max
  misc_feature (1)..(160): Ceres Seq. ID no. 13528078
MLSELILDKLKAPPKPNDVPDIMPEQLVEADGLIFGFPSRFGMMPSQLKAFFDATSELWASQALAGKPAGIFWSTGFYGGGQELSALTAITQLAHHGMLFVPLGYTFGSGMFEIDEVKGGSAYGAGTFAGDGSRQPTELELQQAFYQGKYLAEVTKKLKS

SEQ ID NO: 3630 - DNA, 1457 bp, Glycine max
  misc_feature (1)..(1457): Ceres Seq. ID no. 13577044
gaggtcagtcaatcattcattcctattccttctttctcttccaattccaaatcacaacccttcgttttccctctctagaatcttcttctccattcaattcctactccttttttcctctctgtccctctctctctccctctctcatggcttccgatctcgaagcaaaagccaaagaggccttcgtcgaagaccacttcgaactcgccgtggaccttctctctcaggccattcatctcgaacccaacaaagccgaattctacgccgaccgcgcccaagccaacatcaaactcaacaacttcactgaggctgtggctgatgctaacaaagcaattgaattgaatccttctctaccaaaagcatatttgcggaaaggtactgcttgcatgaagcttgaggaatatgaaactgcaaaggctgctctggaggtgggtgcatcattgtctccagacaactcaaggtttgctactttgatcaaagaatgtgataagctcattgcagaatcttataccccacctattatagaggaaaaggccacaacagaagatgttactccaaaagatgttcagcaacaagatgatcttctagagaagccaacagttacagtgactaaacctaaatataggcatgaattctaccagaaacatgatcaggtggttgtgaccatatttgcaaagaaaatcccaaaggaaagcattactgttgacttcggtgaacaaatactaagtgttagtattaatgtcacaggagaagacacatatgtttttcaacctcgcttatttggaaagatcataccttccaattgtcaatatgaagttttgtccaccaaaattgaaattcgtcttgcaaaagcagaacctattcactggacatctctagaattcaccagagacatcgttgttcaacagagggttaatgcttcttcagttactggaagtcaaagaccttcttacccatcctcaaaacaaacaagagattgggacaagattgaagctcaagtcaagaaagaggagaaagatgaaaagcttgatggcgatgctgcattgaacaaatttttccgcgaaatatatcaagatgcagatgaggatacaagaagagcaatgaaaaagtcatttgttgagtctaatgggacagttctgtctacaaactggaaagaagtgggaacaaagaaggtagagggaagtcctcctgatggcatggagttgaagaaatgggaatattaagacattttctggatcagtgttgcatatatttttatgtgggattattatacttcgtttactttttttttggttagttaactactgaactgaagatactattttctttattttttttttaatgttcatgaggtgttgtgtccgtcttcgctagaacctgaattcatggttgttggttgaggacaaggctcttcactttggtgaatataattcatggttgttgacaaaaaaaaaaaaaaa

SEQ ID NO: 3631 - protein, 405 aa, Glycine max
  misc_feature (1)..(405): Ceres Seq. ID no. 13577045
GQSIIHSYSFFLFQFQITTLRFPSLESSSPFNSYSFFPLCPSLSPSLMASDLEAKAKEAFVEDHFELAVDLLSQAIHLEPNKAEFYADRAQANIKLNNFTEAVADANKAIELNPSLPKAYLRKGTACMKLEEYETAKAALEVGASLSPDNSRFATLIKECDKLIAESYTPPIIEEKATTEDVTPKDVQQQDDLLEKPTVTVTKPKYRHEFYQKHDQVVVTIFAKKIPKESITVDFGEQILSVSINVTGEDTYVFQPRLFGKIIPSNCQYEVLSTKIEIRLAKAEPIHWTSLEFTRDIVVQQRVNASSVTGSQRPSYPSSKQTRDWDKIEAQVKKEEKDEKLDGDAALNKFFREIYQDADEDTRRAMKKSFVESNGTVLSTNWKEVGTKKVEGSPPDGMELKKWEY

SEQ ID NO: 3632 - protein, 358 aa, Glycine max
  misc_feature (1)..(358): Ceres Seq. ID no. 13577046
MASDLEAKAKEAFVEDHFELAVDLLSQAIHLEPNKAEFYADRAQANIKLNNFTEAVADANKAIELNPSLPKAYLRKGTACMKLEEYETAKAALEVGASLSPDNSRFATLIKECDKLIAESYTPPIIEEKATTEDVTPKDVQQQDDLLEKPTVTVTKPKYRHEFYQKHDQVVVTIFAKKIPKESITVDFGEQILSVSINVTGEDTYVFQPRLFGKIIPSNCQYEVLSTKIEIRLAKAEPIHWTSLEFTRDIVVQQRVNASSVTGSQRPSYPSSKQTRDWDKIEAQVKKEEKDEKLDGDAALNKFFREIYQDADEDTRRAMKKSFVESNGTVLSTNWKEVGTKKVEGSPPDGMELKKWEY

SEQ ID NO: 3633 - protein, 278 aa, Glycine max
  misc_feature (1)..(278): Ceres Seq. ID no. 13577047
MKLEEYETAKAALEVGASLSPDNSRFATLIKECDKLIAESYTPPIIEEKATTEDVTPKDVQQQDDLLEKPTVTVTKPKYRHEFYQKHDQVVVTIFAKKIPKESITVDFGEQILSVSINVTGEDTYVFQPRLFGKIIPSNCQYEVLSTKIEIRLAKAEPIHWTSLEFTRDIVVQQRVNASSVTGSQRPSYPSSKQTRDWDKIEAQVKKEEKDEKLDGDAALNKFFREIYQDADEDTRRAMKKSFVESNGTVLSTNWKEVGTKKVEGSPPDGMELKKWEY

SEQ ID NO: 3634 - DNA, 1640 bp, Glycine max
  misc_feature (1)..(1640): Ceres Seq. ID no. 13579556
caactgccaccaacccttcgccgcacggtgggcgtggtgctttgccttctgaaggtggtagcccttcagacttgctcttcttagctggtggtggttctgctgtcttctagcttcttcttaactcttttttctttttactacttttaagctaccttgttttcaaaataacaaaaacaaacactttcttacttcataagatcaccttttcttcatcttctacttctccttcactaaaatgatgctcaaaatcaagagggttcccactgtcgtttccaacttccaaaaagacgacgctgcagactctcctcgtcccgtcggaggttgtggtcggaattgcctcaaagcttgttgcattccagatgcaaagctgcctttgtatggtttcaagaaggctaatattgggaaggatttggccctgcatgcatgcgccggggagcctcccctcgcattcctcgactctcttcttcttggagagtgggaagatcgcatgcagagaggactttttcgctatgatgttaccgcctgtgaaaccaaggtgattcctggtgaatatggtttcgttgcccagcttaacgagggtcgtcacctcaagaagaggccaactgagttccgagttgataaggtccttcaaccctttgatgaaaacaaattcaactttaccaaagtcgggcaagaagaggtcctcttccaatttgaagctagcgaggatggacaagtccagttctttccaaatgctccagttgatgttgacaattctcccagctttgttgccatcaatgtcagtcctattgagtatgggcatgttttgctgattccgcgcatatttgagtgtttgcctcaaaggattgaccgtgagagcttcctccttgcacttcagatggcagtggaagccgataatccttattttcgattgggttacaacagcttgggtgcttttgcaactatcaaccattcttcacttccaggcttattatttggctctgcccttcccaattgagaaggcccccactaagagaattgcaagtgtaaatggtggggtgaagatatctgaactgttgaagtatccggttagaggctttgtctttgagggcggcgaaatgctggaagatctatcmaacgttgtttcagatgcatgtatatgtcttcagaacaacaacatacctttcaatgttythatctctghctgtggaaascaagtgtatrcactgttaccacagtgttatgcagagaaacaagctcttggagaagtgaatgctgagcttcttgacacccaagtgaatcctgctgtgtgggaaattagtggrcacatggttttaaagaggaggaaggattatgatgaggcgtctgaaggcaatgcttggaggcttcttgctgaggtgtccctttctcaagagaggtttcaagaagtcaatgatcttgtttttgaagccattggctgtggtgaattggaggatgtcaatgttcaaagtgtcaaaaaagaagttgatgcagtcagcacaagcgaacaccctactgtggtggtggtggctggttcacaagaatgtgtggttctacagtaacaaggctcttgtattttgaacaaattcagaaaatctgcagtgttttaagaataattgctgaaatgtgtcaccgtttaagtc

SEQ ID NO: 3635 - protein, 253 aa, Glycine max
  misc_feature (1)..(253): Ceres Seq. ID no. 15222687
MMLKIKRVPTVVSNFQKDDAADSPRPVGGCGRNCLKACCIPDAKLPLYGFKKANIGKDLALHACAGEPPLAFLDSLLLGEWEDRMQRGLFRYDVTACETKVIPGEYGFVAQLNEGRHLKKRPTEFRVDKVLQPFDENKFNFTKVGQEEVLFQFEASEDGQVQFFPNAPVDVDNSPSFVAINVSPIEYGHVLLIPRIFECLPQRIDRESFLLALQMAVEADNPYFRLGYNSLGAFATINHSSLPGLLFGSALPN

SEQ ID NO: 3636 - protein, 252 aa, Glycine max
  misc_feature (1)..(252): Ceres Seq. ID no. 15222688
MLKIKRVPTVVSNFQKDDAADSPRPVGGCGRNCLKACCIPDAKLPLYGFKKANIGKDLALHACAGEPPLAFLDSLLLGEWEDRMQRGLFRYDVTACETKVIPGEYGFVAQLNEGRHLKKRPTEFRVDKVLQPFDENKFNFTKVGQEEVLFQFEASEDGQVQFFPNAPVDVDNSPSFVAINVSPIEYGHVLLIPRIFECLPQRIDRESFLLALQMAVEADNPYFRLGYNSLGAFATINHSSLPGLLFGSALPN

SEQ ID NO: 3637 - protein, 169 aa, Glycine max
  misc_feature (1)..(169): Ceres Seq. ID no. 15222689
MQRGLFRYDVTACETKVIPGEYGFVAQLNEGRHLKKRPTEFRVDKVLQPFDENKFNFTKVGQEEVLFQFEASEDGQVQFFPNAPVDVDNSPSFVAINVSPIEYGHVLLIPRIFECLPQRIDRESFLLALQMAVEADNPYFRLGYNSLGAFATINHSSLPGLLFGSALPN

SEQ ID NO: 3638 - DNA, 578 bp, Glycine max
  misc_feature (1)..(578): Ceres Seq. ID no. 13580953
aaagcttcatctgatatggaacaaatacrrtctaaagtttcatcgcaaaccytggctgttgaaaattttcttgccactgctgttcatgaagccaaggatgtaatatgcawcatscagaattctattgacgagcaaaagcagctgctagcattctcccttcarcawcaagaagaaggatttcaacaaagtctgacttcagcacgagtagtttcagaggcagccgtaaacttctttgatgacattcatctccgttcttctagagtcatgaaaattcttgaagaaagtcaaaatgagaggttccagcwgttaactaactttgagaagaagttcaaggaagaggttgagatagaggaggggcaggccttagagaaaattgcagcaattctggcagccttgacatcaaagagaactgcgatggtctcaggggcatcaagacatatgcaggacactagcatgcaacagtctaaaagattgcggctagagatgctcaacatgcaggaagtttcaaaagatggymctaaggaagttaatgagtmtgtagagaatgtgaaaaagtcattatgtggaacaaatattct

SEQ ID NO: 3639 - protein, 192 aa, Glycine max
  misc_feature (1)..(192): Ceres Seq. ID no. 13580954
  misc_feature (10)..(10): Xaa is any aa, unknown or other
  misc_feature (18)..(18): Xaa is any aa, unknown or other
  misc_feature (37)..(37): Xaa is any aa, unknown or other
  misc_feature (38)..(38): Xaa is any aa, unknown or other
  misc_feature (54)..(54): Xaa is any aa, unknown or other
  misc_feature (55)..(55): Xaa is any aa, unknown or other
  misc_feature (102)..(102): Xaa is any aa, unknown or other
  misc_feature (172)..(172): Xaa is any aa, unknown or other
  misc_feature (173)..(173): Xaa is any aa, unknown or other
  misc_feature (179)..(179): Xaa is any aa, unknown or other
KASSDMEQIXSKVSSQTXAVENFLATAVHEAKDVICXXQNSIDEQKQLLAFSLXXQEEGFQQSLTSARVVSEAAVNFFDDIHLRSSRVMKILEESQNERFQXLTNFEKKFKEEVEIEEGQALEKIAAILAALTSKRTAMVSGASRHMQDTSMQQSKRLRLEMLNMQEVSKDXXKEVNEXVENVKKSLCGTNI

SEQ ID NO: 3640 - protein, 187 aa, Glycine max
  misc_feature (1)..(187): Ceres Seq. ID no. 13580955
  misc_feature (5)..(5): Xaa is any aa, unknown or other
  misc_feature (13)..(13): Xaa is any aa, unknown or other
  misc_feature (32)..(32): Xaa is any aa, unknown or other
  misc_feature (33)..(33): Xaa is any aa, unknown or other
  misc_feature (49)..(49): Xaa is any aa, unknown or other
  misc_feature (50)..(50): Xaa is any aa, unknown or other
  misc_feature (97)..(97): Xaa is any aa, unknown or other
  misc_feature (167)..(167): Xaa is any aa, unknown or other
  misc_feature (168)..(168): Xaa is any aa, unknown or other
  misc_feature (174)..(174): Xaa is any aa, unknown or other
MEQIXSKVSSQTXAVENFLATAVHEAKDVICXXQNSIDEQKQLLAFSLXXQEEGFQQSLTSARVVSEAAVNFFDDIHLRSSRVMKILEESQNERFQXLTNFEKKFKEEVEIEEGQALEKIAAILAALTSKRTAMVSGASRHMQDTSMQQSKRLRLEMLNMQEVSKDXXKEVNEXVENVKKSLCGTNI

SEQ ID NO: 3641 - protein, 104 aa, Glycine max
  misc_feature (1)..(104): Ceres Seq. ID no. 13580956
  misc_feature (14)..(14): Xaa is any aa, unknown or other
  misc_feature (84)..(84): Xaa is any aa, unknown or other
  misc_feature (85)..(85): Xaa is any aa, unknown or other
  misc_feature (91)..(91): Xaa is any aa, unknown or other
MKILEESQNERFQXLTNFEKKFKEEVEIEEGQALEKIAAILAALTSKRTAMVSGASRHMQDTSMQQSKRLRLEMLNMQEVSKDXXKEVNEXVENVKKSLCGTNI

SEQ ID NO: 3642 - DNA, 1080 bp, Glycine max
  misc_feature (1)..(1080): Ceres Seq. ID no. 13581092
cagctacgtaggccccccccccaattgactagagagggaatagtgctgcacaatgggtctgaataaagctgtaaaattgcctgcttttttccctatggtggttgagctatcatagacttgggtttcacaaaaacaaaacccatggaaaaggaaatggaatcttggacaattcatgggtcttcagcataatatgtaggtacatttgtttgtgttaccatgccgatcatttaaattttgcatgcagtacacatcacaagttgcaagactttttaattgtactataaaataaaacttgaatccaaggttttaaatattggactgccgtggcaaacactgtcccaatttgcgttagaaaaccttgatgtcacggtccacgttaagatgcaaactgtttttttaaaaccttatttaaatcaaattcaacacaattgatttgattataatgttgtatatgtttttttttatgtgatcagatttttggtggatgaaacgccaataagggtgcacacgaacatggagcacaagggaattccatttcctaaggaccaacccatgggtgtgtacagttcattatggaatgctgatgattgggccacgcagggtggtcgtgtgaaaacagattggagccacgcacccttcattgccacatacaagaacttcgagataaatgcgtgtgagtgtcccgtgtcagtggctgcaatggataatgctaagaagtgcaccagcagtgaggggaataagtattggtgggatgagcctaatttggctgaactcaacttgcaccagagccaccagcttatgtgggttagggcaaggcacattttctatgactattgcactgacactgctaggttcccagtcacgcctgctgagtgtgtccatcaccgtcacacctgagcagacttagtgattagtctaaactttattttgttataacttatgggaagttatgaaaataggattggggcataagaaaaaaatggtgggtggtgaacaaagttgtggaacatgtccttcatgtttctgattgtaatatatattgccacaacattaatgtgaattgttggtttttcttcttgt

SEQ ID NO: 3643 - protein, 127 aa, Glycine max
  misc_feature (1)..(127): Ceres Seq. ID no. 13581093
MEHKGIPFPKDQPMGVYSSLWNADDWATQGGRVKTDWSHAPFIATYKNFEINACECPVSVAAMDNAKKCTSSEGNKYWWDEPNLAELNLHQSHQLMWVRARHIFYDYCTDTARFPVTPAECVHHRHT

SEQ ID NO: 3644 - protein, 114 aa, Glycine max
  misc_feature (1)..(114): Ceres Seq. ID no. 13581094
MGVYSSLWNADDWATQGGRVKTDWSHAPFIATYKNFEINACECPVSVAAMDNAKKCTSSEGNKYWWDEPNLAELNLHQSHQLMWVRARHIFYDYCTDTARFPVTPAECVHHRHT

SEQ ID NO: 3645 - protein, 79 aa, Glycine max
  misc_feature (1)..(79): Ceres Seq. ID no. 13581095
MRVSVPCQWLQWIMLRSAPAVRGISIGGMSLIWLNSTCTRATSLCGLGQGTFSMTIALTLLGSQSRLLSVSITVTPEQT

SEQ ID NO: 3646 - DNA, 530 bp, Glycine max
  misc_feature (1)..(530): Ceres Seq. ID no. 13581126
atcttgaatattgtgttcatcgattacataatgaaaatcctggaattcataacctgctactttctttatatgcaaaacaggaagatgatagttcacttctacgtttcctacaaagcaaatttgggaaaggaccagaaaatggtcctgagttcttctacgatcctaaatacgccttgcgtctttgcctcaaggaaaaacgaatgcgtgcatgtgttcatatatacagtatgatgtcaatgcatgaagaagcagttgctcttgccttacagattgattcagagcttgctatggccgaagctgataaggttgaagatgatgaggatttgagaaagaagctttggctcatgattgccaagcatgttgttgaacaagaaaaaggaactaagagggaaaacataaggaaggcaattgcatttcttaaagaaactgatggcctgctaaagatagaggatatattaccattctttccagattttgccctgattgacgacttcaaggaggctatctgctcatcattggaggattacaat

SEQ ID NO: 3647 - protein, 176 aa, Glycine max
  misc_feature (1)..(176): Ceres Seq. ID no. 13581127
LEYCVHRLHNENPGIHNLLLSLYAKQEDDSSLLRFLQSKFGKGPENGPEFFYDPKYALRLCLKEKRMRACVHIYSMMSMHEEAVALALQIDSELAMAEADKVEDDEDLRKKLWLMIAKHVVEQEKGTKRENIRKAIAFLKETDGLLKIEDILPFFPDFALIDDFKEAICSSLEDYN

SEQ ID NO: 3648 - protein, 110 aa, Glycine max
  misc_feature (1)..(110): Ceres Seq. ID no. 13581128
MRACVHIYSMMSMHEEAVALALQIDSELAMAEADKVEDDEDLRKKLWLMIAKHVVEQEKGTKRENIRKAIAFLKETDGLLKIEDILPFFPDFALIDDFKEAICSSLEDYN

SEQ ID NO: 3649 - protein, 101 aa, Glycine max
  misc_feature (1)..(101): Ceres Seq. ID no. 13581129
MMSMHEEAVALALQIDSELAMAEADKVEDDEDLRKKLWLMIAKHVVEQEKGTKRENIRKAIAFLKETDGLLKIEDILPFFPDFALIDDFKEAICSSLEDYN

SEQ ID NO: 3650 - DNA, 566 bp, Glycine max
  misc_feature (1)..(566): Ceres Seq. ID no. 13581144
atatatggagagaatggagtttcagacagcaataaattatattcagaggaagtgaagaaggataatatcattagccctaaaatgaagaatgtaactgtgaaatggaatccctgttctgagaaagagcatcagttttatatttcagaagctgaactgcaaatgcatcaagctaagacgccattgtggggaaagactgggatatattttcattcagtgggtaaagaggctactttgatgatggatgaagaagctgctctcgaaggggaatttgagatcgaaaagattccaactcgtgtgatacaagctaggtcaaaagacttggttccaatttttgactatattcagacctcaaaatttcaacaaataaggtctgctttgatgactaactaattaacttactaattatctattaggtaggtcaaaagatttaggctttcgacattttgctattaatttttttgtcataacgacattacctcactttcgaaggctagagaataccaaaattgattatgttcatattgcatgtactctttgctgcatgcaaggagacagtttatttatgg

SEQ ID NO: 3651 - protein, 129 aa, Glycine max
  misc_feature (1)..(129): Ceres Seq. ID no. 13581145
IYGENGVSDSNKLYSEEVKKDNIISPKMKNVTVKWNPCSEKEHQFYISEAELQMHQAKTPLWGKTGIYFHSVGKEATLMMDEEAALEGEFEIEKIPTRVIQARSKDLVPIFDYIQTSKFQQIRSALMTN

SEQ ID NO: 3652 - protein, 102 aa, Glycine max
  misc_feature (1)..(102): Ceres Seq. ID no. 13581146
MKNVTVKWNPCSEKEHQFYISEAELQMHQAKTPLWGKTGIYFHSVGKEATLMMDEEAALEGEFEIEKIPTRVIQARSKDLVPIFDYIQTSKFQQIRSALMTN

SEQ ID NO: 3653 - protein, 76 aa, Glycine max
  misc_feature (1)..(76): Ceres Seq. ID no. 13581147
MHQAKTPLWGKTGIYFHSVGKEATLMMDEEAALEGEFEIEKIPTRVIQARSKDLVPIFDYIQTSKFQQIRSALMTN

SEQ ID NO: 3654 - DNA, 824 bp, Glycine max
  misc_feature (1)..(824): Ceres Seq. ID no. 13581380
aattcctctgagccagatgttattcttctagaacctgatcaaattcatgaaaacactccatttgtttcttcgaaaacatatgattcatcttggttcgaaactgaaaagaatcccaaagacaactggcaattacctgcttacggtaattctcagtttaggagaagacttatgaatgatcttcaaaggccttatgaccaagaagaatgtgatagacttctgcttgaagtacgtcagaaaaaacaaaaggaacgtcatagagaaacacgtcatggggtggtcaagttttgtcgcactaggggtgtcagcgaatcatatcttgacttgtaccctgatctagctaaagcaattgccgaattcaaaaaaccggaaaaggttttgtttctcttgcgtggatttattttctggttgcaaaatgtgacccacgaaggaaaatttcgaccttggcttgacaagcattgtttggactttttacgacaaatgaaaaattggaatcttgctaaatttggaagcaagagtttaactaacatagtcaacaaagtttacatacgtacagttaaatctatcttggaactttgacctagttgtagaaagaaagatagctagagttgtggttctcatcaggagttctttcatttctgttaaaccgtggttctctttttgtccaccgttttttgtaccattgagaagatggtgataaactgataattgaggggcttaggtggctagcatatgctgtaatataatgttatattcttcctaagctagtttttgttgagcccaaatgcaagatatctaggactctgttcaaaaagactaatttttat

SEQ ID NO: 3655 - protein, 191 aa, Glycine max
  misc_feature (1)..(191): Ceres Seq. ID no. 13581381
NSSEPDVILLEPDQIHENTPFVSSKTYDSSWFETEKNPKDNWQLPAYGNSQFRRRLMNDLQRPYDQEECDRLLLEVRQKKQKERHRETRHGVVKFCRTRGVSESYLDLYPDLAKAIAEFKKPEKVLFLLRGFIFWLQNVTHEGKFRPWLDKHCLDFLRQMKNWNLAKFGSKSLTNIVNKVYIRTVKSILEL

SEQ ID NO: 3656 - protein, 135 aa, Glycine max
  misc_feature (1)..(135): Ceres Seq. ID no. 13581382
MNDLQRPYDQEECDRLLLEVRQKKQKERHRETRHGVVKFCRTRGVSESYLDLYPDLAKAIAEFKKPEKVLFLLRGFIFWLQNVTHEGKFRPWLDKHCLDFLRQMKNWNLAKFGSKSLTNIVNKVYIRTVKSILEL

SEQ ID NO: 3657 - DNA, 544 bp, Glycine max
  misc_feature (1)..(544): Ceres Seq. ID no. 13581409
attctcagtaccacccgcaccttgtagtgaaggtgagaatttttcaattaagttggagggaaaattgaagaaaaccaatgtttcttcagttgattacagtgaagattcaaaatctatggcaatcaatgatgggtcgtgccagatggcaagcctttgcaccaaggtgcaggattgtcctgaacaagcttgcttgggttctgttcttgcaaaagaacatgataaacgaattctgaacaagggtggtttgagtgtagaaaaatttaaacacaatattgttggccagagttcaaaatctttgattgttgatgagatggacattggtgtagatggggatgatggagttgttgaacgtaaccaccctacttcctcaagcttgacagactcatctaatgnnnctgggtcaatgatgcatagcaggtcatcaggctctcggagctttgagaaccaggatcagtccaaaggcaaatgaaccatcattgattgtgggtcgaaactaattnnnaaagctacctatagagaagacaccattcggttcaaggttgat

SEQ ID NO: 3658 - protein, 155 aa, Glycine max
  misc_feature (1)..(155): Ceres Seq. ID no. 13581410
  misc_feature (131)..(131): Xaa is any aa, unknown or other
  misc_feature (132)..(132): Xaa is any aa, unknown or other
FSVPPAPCSEGENFSIKLEGKLKKTNVSSVDYSEDSKSMAINDGSCQMASLCTKVQDCPEQACLGSVLAKEHDKRILNKGGLSVEKFKHNIVGQSSKSLIVDEMDIGVDGDDGVVERNHPTSSSLTDSSNXXGSMMHSRSSGSRSFENQDQSKGK

SEQ ID NO: 3659 - protein, 117 aa, Glycine max
  misc_feature (1)..(117): Ceres Seq. ID no. 13581411
  misc_feature (93)..(93): Xaa is any aa, unknown or other
  misc_feature (94)..(94): Xaa is any aa, unknown or other
MAINDGSCQMASLCTKVQDCPEQACLGSVLAKEHDKRILNKGGLSVEKFKHNIVGQSSKSLIVDEMDIGVDGDDGVVERNHPTSSSLTDSSNXXGSMMHSRSSGSRSFENQDQSKGK

SEQ ID NO: 3660 - protein, 108 aa, Glycine max
  misc_feature (1)..(108): Ceres Seq. ID no. 13581412
  misc_feature (84)..(84): Xaa is any aa, unknown or other
  misc_feature (85)..(85): Xaa is any aa, unknown or other
MASLCTKVQDCPEQACLGSVLAKEHDKRILNKGGLSVEKFKHNIVGQSSKSLIVDEMDIGVDGDDGVVERNHPTSSSLTDSSNXXGSMMHSRSSGSRSFENQDQSKGK

SEQ ID NO: 3661 - DNA, 1248 bp, Glycine max
  misc_feature (1)..(1248): Ceres Seq. ID no. 13581428
agctacgcagctacgtaggccccccccccccttaaagacgcgactgaatggcttatttttcaaagaattatagcaagagatcttagatttccagattacttttctgacgaagcaagagacctcattgaccgcctgttggatttggaccccagcaggagaccaggtgctgcacctgatggttatgctattttaaaaaggcacccatttttcaagggggttgactgggataacttgagggcacaaattcctccaaaacttgctccagaacctggggtatgacttccattgctttgctctttgaaatgttatttatggaggataagaaaaggaaccttcattcttatccttgttatttgttgaacataaagtttctaactcttttgtaattttcacttgtagactcagtcgcctgtggctgatgatgttcatgactcatcttggagtccttctcacattggggatggttctgcagcttcggttagacaacctgatggtgctacatcttccgaggggaccggtcacataactaggctagcttcaattgattccttcgattcaaaatggcaacaatttttggaacctggggaatctgttcttatgatctctatggtgaagaaattacaaaaactaacaagcaagaaggtgcagctcatccttaccaacaaaccaaagttgatctatgtggacccatcaaagctaattgtgaagggaaatataatatggtctgataatccaaatgatttaagcatccaagtggctagtccatcaaatttcaagatttgcacacctaaaaaggtaatgtcgtttgaggacgcaaagcaaagagcatgccagtggaaaaaggcaattgaaggactccaaaaccggtgaatttattctggttttgtgaacatattcttttagatatcctcttattgttcagcaagaagggataaaacagttgactgctcaacaatcaattattcattaaaagaaaacaaattggcagattttgctgaagctggttctagctaattcctcaacacaccttaattttgtgatgagttcttccgtcctctttcatgcttcgaagggatgataaaatgtggaagttctaattgtagctatgtcagaggatggagccaatactttgtaagaaaaaaaatttggttttttagttatatattaaatattatgagttggaagatgatatcattttggttgtcataatgtatgaatcgttgaattgttcaatttattgtttcttcc

SEQ ID NO: 3662 - protein, 90 aa, Glycine max
  misc_feature (1)..(90): Ceres Seq. ID no. 15222740
MISMVKKLQKLTSKKVQLILTNKPKLIYVDPSKLIVKGNIIWSDNPNDLSIQVASPSNFKICTPKKVMSFEDAKQRACQWKKAIEGLQNR

SEQ ID NO: 3663 - protein, 87 aa, Glycine max
  misc_feature (1)..(87): Ceres Seq. ID no. 15222741
MVKKLQKLTSKKVQLILTNKPKLIYVDPSKLIVKGNIIWSDNPNDLSIQVASPSNFKICTPKKVMSFEDAKQRACQWKKAIEGLQNR

SEQ ID NO: 3664 - protein, 55 aa, Glycine max
  misc_feature (1)..(55): Ceres Seq. ID no. 15222742
MATIFGTWGICSYDLYGEEITKTNKQEGAAHPYQQTKVDLCGPIKANCEGKYNMV

SEQ ID NO: 3665 - DNA, 603 bp, Glycine max
  misc_feature (1)..(603): Ceres Seq. ID no. 13581446
tggactttctctccgctgatcgttgrsataaatcatgacttgagccmaagtgatgggaaagaaataaatgacaactttttgctaagaagaaaaggtcagggagaaaatggacaaagtgtaggatcagcaatgttcttagctacagtttatgataaagaatccgaggcttggactggattatcacctagtggaatggaacttaaaaggttagttgcatatgcccgaagcagtgccaatttgttggcaaaactcacatttctggaagagattggtccatttagatgggagtgcctttttagaactcctttaaacaattatgatgcagtaatttttctccacaaggacaaactcccgtatccccaaaggcttctctttccatcagaagttaatcacggaacacatgtygctgaaggacaggccagcaagtgtttycaaccctttttgttgcctaaagatttgaagggcaggccagaggaacttaraaataagttgctggtagattttgatccatcaaagtgctttatcagagatttnaaagcaagarttctcaaccacattccaagtatggcatgattatctgggaggkgatgttattggcctaac

SEQ ID NO: 3666 - protein, 190 aa, Glycine max
  misc_feature (1)..(190): Ceres Seq. ID no. 13581447
  misc_feature (9)..(9): Xaa is any aa, unknown or other
  misc_feature (16)..(16): Xaa is any aa, unknown or other
  misc_feature (135)..(135): Xaa is any aa, unknown or other
  misc_feature (144)..(144): Xaa is any aa, unknown or other
  misc_feature (161)..(161): Xaa is any aa, unknown or other
  misc_feature (178)..(178): Xaa is any aa, unknown or other
  misc_feature (182)..(182): Xaa is any aa, unknown or other
WTFSPLIVXINHDLSXSDGKEINDNFLLRRKGQGENGQSVGSAMFLATVYDKESEAWTGLSPSGMELKRLVAYARSSANLLAKLTFLEEIGPFRWECLFRTPLNNYDAVIFLHKDKLPYPQRLLFPSEVNHGTHXAEGQASKCXQPFLLPKDLKGRPEELXNKLLVDFDPSKCFIRDXKARXLNHIPSMA

SEQ ID NO: 3667 - protein, 147 aa, Glycine max
  misc_feature (1)..(147): Ceres Seq. ID no. 13581448
  misc_feature (92)..(92): Xaa is any aa, unknown or other
  misc_feature (101)..(101): Xaa is any aa, unknown or other
  misc_feature (118)..(118): Xaa is any aa, unknown or other
  misc_feature (135)..(135): Xaa is any aa, unknown or other
  misc_feature (139)..(139): Xaa is any aa, unknown or other
MFLATVYDKESEAWTGLSPSGMELKRLVAYARSSANLLAKLTFLEEIGPFRWECLFRTPLNNYDAVIFLHKDKLPYPQRLLFPSEVNHGTHXAEGQASKCXQPFLLPKDLKGRPEELXNKLLVDFDPSKCFIRDXKARXLNHIPSMA

SEQ ID NO: 3668 - protein, 126 aa, Glycine max
  misc_feature (1)..(126): Ceres Seq. ID no. 13581449
  misc_feature (71)..(71): Xaa is any aa, unknown or other
  misc_feature (80)..(80): Xaa is any aa, unknown or other
  misc_feature (97)..(97): Xaa is any aa, unknown or other
  misc_feature (114)..(114): Xaa is any aa, unknown or other
  misc_feature (118)..(118): Xaa is any aa, unknown or other
MELKRLVAYARSSANLLAKLTFLEEIGPFRWECLFRTPLNNYDAVIFLHKDKLPYPQRLLFPSEVNHGTHXAEGQASKCXQPFLLPKDLKGRPEELXNKLLVDFDPSKCFIRDXKARXLNHIPSMA

SEQ ID NO: 3669 - DNA, 509 bp, Glycine max
  misc_feature (1)..(509): Ceres Seq. ID no. 13581508
aaaatgagctaggaggtttccccttgagagttgaaaaagcaaagcctcgacgtgataactggggtataggcagtggcagagatggacgtgataactggggtataggcagtggcagagatggtggtgatcatcagtttggtggaagggatggaagtggctataccagcagagtgggttgggggagaagtggtggtggtgggtggcattctcttcatttttctgatgaagactcggggaggaagaaccactcttactgatgacgattattgcagcagatgttgggaattttgggtgggttaattgcagtgtcaattggattgcttttgtggctacctcgtgattattgcagtgtcagttggaattggaaaattgggggtcggtgttaaaccgaactaaattgctgtagaacaacctcattttttttagtttggttcattttttggatcttgtacaaactgaacccaatcaaattgaaccgaacattatatatgcatttttacttaatatat

SEQ ID NO: 3670 - protein, 84 aa, Glycine max
  misc_feature (1)..(84): Ceres Seq. ID no. 13581509
NELGGFPLRVEKAKPRRDNWGIGSGRDGRDNWGIGSGRDGGDHQFGGRDGSGYTSRVGWGRSGGGGWHSLHFSDEDSGRKNHSY

SEQ ID NO: 3671 - protein, 60 aa, Glycine max
  misc_feature (1)..(60): Ceres Seq. ID no. 13581510
MVVIISLVEGMEVAIPAEWVGGEVVVVGGILFIFLMKTRGGRTTLTDDDYCSRCWEFWVG

SEQ ID NO: 3672 - protein, 50 aa, Glycine max
  misc_feature (1)..(50): Ceres Seq. ID no. 13581511
MEVAIPAEWVGGEVVVVGGILFIFLMKTRGGRTTLTDDDYCSRCWEFWVG

SEQ ID NO: 3673 - DNA, 1175 bp, Glycine max
  misc_feature (1)..(1175): Ceres Seq. ID no. 13581621
gacagtaccgaagagtttaacctattgttgggattgcttgttcctttgatatgaaggtcacaagtctcaagctttcaattgatcatttgacttcaactgagtccctgtttctgatctcttaagattcacttatttaattgttattgtacttcctgatgtttcatttcttcagattgagtctcttcaccattttttgcaactgagattttgggttttgttgatcgtgcctaggtgaaaagctgagatctttattttgagaatagcaattattcatctatttggacgctgggttttatcaaaatgaggaagcgtcaagtcttgaagcattcaattgctattgtaagcatgctggtgtgtgtttgctgcttttttattgtgtctgtgactgttttcaagctcccagaggccccaagaaaagataggcaaatggggttttacccaacaatcagatccagaaaagtttcccttcaagatttcaacttgggtaagtttggggaaatgatgattgacatgttgcctcaagatcttgcttttaccgtatttgttccgtccgaggatgctttcaagcgagatctgcgtctgtcggtgagtgatagtttgaaaccagacgagttcaatgatacttacgcgattgtgactcgtattttggggttttcagctgttcctaggatactttcttcggctaatgtgcaatcgggtgagcttgtgaactatgattcgttatctgggtttcccttgtatgtctcaaaagacatcgatggaatgcttgttgttaataggattcgatcagaaatagtagatgttaggaagaaggagattgttgtccatgtcatggatggggttattatggatgctgaatttgagcaatcggttttagctgaggatgatacagaggaggattgacttgacggtattcgggttttgccctttgattttggcttcatattttgttgtattcaacggtggcataacagaattaaaaaaaaaaaacaaacagtgccattgtcttttcacttgtacatgttacaatgtatctcttttcctgtacacggccctactgttggctagtcctacaaatcctggaacttgcccccatttcaaaataattgttaaaaaggtatcacgaattacttgtaacgatatatttaatggggatagtctcctcctttgctgtc

SEQ ID NO: 3674 - protein, 200 aa, Glycine max
  misc_feature (1)..(200): Ceres Seq. ID no. 13581622
MRKRQVLKHSIAIVSMLVCVCCFFIVSVTVFKLPEAPRKDRQMGFYPTIRSRKVSLQDFNLGKFGEMMIDMLPQDLAFTVFVPSEDAFKRDLRLSVSDSLKPDEFNDTYAIVTRILGFSAVPRILSSANVQSGELVNYDSLSGFPLYVSKDIDGMLVVNRIRSEIVDVRKKEIVVHVMDGVIMDAEFEQSVLAEDDTEED

SEQ ID NO: 3675 - protein, 185 aa, Glycine max
  misc_feature (1)..(185): Ceres Seq. ID no. 13581623
MLVCVCCFFIVSVTVFKLPEAPRKDRQMGFYPTIRSRKVSLQDFNLGKFGEMMIDMLPQDLAFTVFVPSEDAFKRDLRLSVSDSLKPDEFNDTYAIVTRILGFSAVPRILSSANVQSGELVNYDSLSGFPLYVSKDIDGMLVVNRIRSEIVDVRKKEIVVHVMDGVIMDAEFEQSVLAEDDTEED

SEQ ID NO: 3676 - protein, 158 aa, Glycine max
  misc_feature (1)..(158): Ceres Seq. ID no. 13581624
MGFYPTIRSRKVSLQDFNLGKFGEMMIDMLPQDLAFTVFVPSEDAFKRDLRLSVSDSLKPDEFNDTYAIVTRILGFSAVPRILSSANVQSGELVNYDSLSGFPLYVSKDIDGMLVVNRIRSEIVDVRKKEIVVHVMDGVIMDAEFEQSVLAEDDTEED

SEQ ID NO: 3677 - DNA, 995 bp, Glycine max
  misc_feature (1)..(995): Ceres Seq. ID no. 13581670
acacaagtacacagcatagtcaagcttcgaattgttgaatgtggaaggaggagaaggagaaggagggtgttgcgccacgaacacatgaattagaaaagaagcagctgcagcaacttttcttgttcaatacccatcaaatgcaaatacaaagacactctcttttttaattactactgttttatgttcctttcttccttctgaatctgaccaaccagtaggactccttcaaagggattttgagtattgtttgaattgctggagacctgagagtgaaaactaactccacaatccatggataaagatgctagggtggaagagactgttgatttgcgaaccaatgtggagttggtgagatcagtctctgataagcatcatgatcttttaaggccatctgctcggaactattcaagaggacaatcaacagatacaactggccgtggaaagggaaagtatgccttaattagagacccagaggacttccaaatgggagtttatgataagccccttccatgttttggatgtggaatcggatggttctcatttctttttggatttctatgccctcctatgtggttctatgctacaattctctattttggaaatcactatcggaaggatcctagggagcgagcagggctgggagcctctgcaattgctgcattagtgtgttctgtaacgtcgctgataattggagtaattcttgtgttgcggtacctctatttctaattcacgtgcaaaggtgaaaattgagaagcaaaagcatttggaatcaattctggcgggatattagaaacaattggacatatgtatataagaacttcaaatagatgggaaaaggcttgcatatattgctggtgaagtaattcacagcatgaaatctgtcgtctataccataagttgagagaagataatgcgtcatatcccttatttgtttattttctgaactgatgtatactcaaaaagaaaccttttgatgagtgtttatgaatttcccg

SEQ ID NO: 3678 - protein, 144 aa, Glycine max
  misc_feature (1)..(144): Ceres Seq. ID no. 13581671
MDKDARVEETVDLRTNVELVRSVSDKHHDLLRPSARNYSRGQSTDTTGRGKGKYALIRDPEDFQMGVYDKPLPCFGCGIGWFSFLFGFLCPPMWFYATILYFGNHYRKDPRERAGLGASAIAALVCSVTSLIIGVILVLRYLYF

SEQ ID NO: 3679 - protein, 80 aa, Glycine max
  misc_feature (1)..(80): Ceres Seq. ID no. 13581672
MGVYDKPLPCFGCGIGWFSFLFGFLCPPMWFYATILYFGNHYRKDPRERAGLGASAIAALVCSVTSLIIGVILVLRYLYF

SEQ ID NO: 3680 - DNA, 1092 bp, Glycine max
  misc_feature (1)..(1092): Ceres Seq. ID no. 13581686
attcttctgattttgtttaatcatgaacggtgctcccaagcacgaacgccgctgggcgtccgacaccgtgccggagatggcattcgtcagcgccgggacttcgccgggaactgagtacaactccgtcaccgacgagtacgttgaggtcactctcgatgttcacgacgatcacaccatcgttctccgcgacgttgagccggtgactgtcgttaacatcgacgacggcgtcgcaacaagtggaaacgaaactccgacgtcctccgcgtggtcgccgtcgatcaggaggagctctcctaaccggtggcggcagttctcgcaggagctgaaggccgaggcggttgcgaaggcgaggcagttttcgcaggagctcaaggcggagctgcggtggttctcgtggagccaaggcggatctgaaacggcgttggtggctcgagatctcaggaagcagcgcgctcagcttgaccgcaaccgctccggtacgaagaaagcgctccgtggactgaaatttattagcagtaaatccaatggcgctgacgcctggaacgaggtgcaaagcaatttctatagtcttgccaaggacggttatctttatcgcactgattttgcgcaatgcatagggatgaaggactctaaggagttcgctctggaactatttgacgcgctgagtcgtagacgtagactgaaggttgaaaagatcagcagagacgagcttaacgaattctggtcgcaaattaccgatcaaagctttgattcgcggcttcagatattctttgacatggtggacaagaatgaagatggtaggatcaccgaagaagaagtgaaagagatcattatgctaagcgcttcagcaaataaattatccagattgaaagagcaggccgaggaatacgcagctctgatcatggaagagttagaccctgaaagacttggctacatcgaggtgggagttctctacaaatgataacatatgaatttatcaagaatacatgcatatattttaattctctaacacatatgagtacgtcacaaaagaaaatctttgtaagtgatagacattaatgttaatccaatccatgattaatttggtttccg

SEQ ID NO: 3681 - protein, 312 aa, Glycine max
  misc_feature (1)..(312): Ceres Seq. ID no. 13581687
MNGAPKHERRWASDTVPEMAFVSAGTSPGTEYNSVTDEYVEVTLDVHDDHTIVLRDVEPVTVVNIDDGVATSGNETPTSSAWSPSIRRSSPNRWRQFSQELKAEAVAKARQFSQELKAELRWFSWSQGGSETALVARDLRKQRAQLDRNRSGTKKALRGLKFISSKSNGADAWNEVQSNFYSLAKDGYLYRTDFAQCIGMKDSKEFALELFDALSRRRRLKVEKISRDELNEFWSQITDQSFDSRLQIFFDMVDKNEDGRITEEEVKEIIMLSASANKLSRLKEQAEEYAALIMEELDPERLGYIEVGVLYK

SEQ ID NO: 3682 - protein, 294 aa, Glycine max
  misc_feature (1)..(294): Ceres Seq. ID no. 13581688
MAFVSAGTSPGTEYNSVTDEYVEVTLDVHDDHTIVLRDVEPVTVVNIDDGVATSGNETPTSSAWSPSIRRSSPNRWRQFSQELKAEAVAKARQFSQELKAELRWFSWSQGGSETALVARDLRKQRAQLDRNRSGTKKALRGLKFISSKSNGADAWNEVQSNFYSLAKDGYLYRTDFAQCIGMKDSKEFALELFDALSRRRRLKVEKISRDELNEFWSQITDQSFDSRLQIFFDMVDKNEDGRITEEEVKEIIMLSASANKLSRLKEQAEEYAALIMEELDPERLGYIEVGVLYK

SEQ ID NO: 3683 - DNA, 498 bp, Glycine max
  misc_feature (1)..(498): Ceres Seq. ID no. 13581730
atcctaatcgaaaaacatacacatttattccgctaaataataataataaaaaagaacgacacacaccaaagaaaaatttattagagcttttcgaagatatttgagatttgtgtttcatttgatatggagaagaagagtggtagcagctggtcctttaagaagatgagcaaagagttgtggccacggaggttgtcgtcgtcttttcgcagcaaacggcttcacttacccaccatgaccatcatcgttgacaacgttgttttcaagattgtctcggtggtagagggtgttgtaattgtttccacgctttgtgtattctacctttgttgtggttgtcacatttgaaatattctatgtatgtttgatgatcttcaaattcatttgttcgttcattttttgagggctagttaaagttcatcaataacagtctgagtttgtgttaagttgttaccatcctatgtagattgtccatgcaataaataacaattttgttttgttttt

SEQ ID NO: 3684 - protein, 72 aa, Glycine max
  misc_feature (1)..(72): Ceres Seq. ID no. 13581731
MEKKSGSSWSFKKMSKELWPRRLSSSFRSKRLHLPTMTIIVDNVVFKIVSVVEGVVIVSTLCVFYLCCGCHI

SEQ ID NO: 3685 - protein, 59 aa, Glycine max
  misc_feature (1)..(59): Ceres Seq. ID no. 13581732
MSKELWPRRLSSSFRSKRLHLPTMTIIVDNVVFKIVSVVEGVVIVSTLCVFYLCCGCHI

SEQ ID NO: 3686 - protein, 36 aa, Glycine max
  misc_feature (1)..(36): Ceres Seq. ID no. 13581733
MTIIVDNVVFKIVSVVEGVVIVSTLCVFYLCCGCHI

SEQ ID NO: 3687 - DNA, 512 bp, Glycine max
  misc_feature (1)..(512): Ceres Seq. ID no. 13581734
atttcatactacaacctcgcagttcaaaagttcaaaccccaaatcttcaaaatcctcacagcaaacccaaaataaaacaacaacaacataaaaaaaccttaacaaaaccaaaaccccaagagaaaaacaccacacttccaatcaaatgttcttcctctctttgcccttctcttcctgcttcagagcttcacaacccaaccacgatcccaccaccctctcaacgaacctcaccacctacatctaccacaccgaatacggcaccgtttcgctgacatggtcacgctccatgctaggccgctccctccacgtgaacctccacaaccactcctcctttcacctccacgtcaaaccctgaaggaaaaaagggtccaagaagctttctcacaacacnnnnttcctctggaacctctcctccgcgagattcgaatccggacgacccgaacctcgctcnnnnntctacctcgccatcgaggtagaacacagcctcagcctcctcgtgggggacttatccc

SEQ ID NO: 3688 - protein, 89 aa, Glycine max
  misc_feature (1)..(89): Ceres Seq. ID no. 13581735
FILQPRSSKVQTPNLQNPHSKPKIKQQQHKKTLTKPKPQEKNTTLPIKCSSSLCPSLPASELHNPTTIPPPSQRTSPPTSTTPNTAPFR

SEQ ID NO: 3689 - protein, 79 aa, Glycine max
  misc_feature (1)..(79): Ceres Seq. ID no. 13581736
  misc_feature (40)..(40): Xaa is any aa, unknown or other
  misc_feature (41)..(41): Xaa is any aa, unknown or other
  misc_feature (60)..(60): Xaa is any aa, unknown or other
  misc_feature (61)..(61): Xaa is any aa, unknown or other
MVTLHARPLPPREPPQPLLLSPPRQTLKEKRVQEAFSQHXXPLEPLLREIRIRTTRTSLXXLPRHRGRTQPQPPRGGLI

SEQ ID NO: 3690 - protein, 69 aa, Glycine max
  misc_feature (1)..(69): Ceres Seq. ID no. 13581737
MFFLSLPFSSCFRASQPNHDPTTLSTNLTTYIYHTEYGTVSLTWSRSMLGRSLHVNLHNHSSFHLHVKP

SEQ ID NO: 3691 - DNA, 1037 bp, Glycine max
  misc_feature (1)..(1037): Ceres Seq. ID no. 13581740
gaaaagagaattgagctggcttggtgatccctgctccatcagaggttagggtttggcagagaacagaaattgggaaattcctcaatcttttgaactcgtcaagtgcgtgcaacactgtacaataatcttcatcgtccttgaaattcccaatcccctgtagtggtagtaagttgctagcaatcgagaatgggagggcacggaggtctcaacattctcccccaaaagcgatggaacgtttacaatttcgacaacagagagaaggtccgtcgcgacgaagagcaagccgccagggaggagcagctcaagcgtgaagagacccggaagcgcgacgccgagctccgcctcgaccgactccgcgtcgctcgcggcttggcgccgtcgattccgccgcctcccgaatccgaacctcagccttcctcccgctccgaacccgtgccttcctccgaccctggccacatcaacctcttcgaggggatcaacatttttgacccaattcagaaggacggtgctgctgaaagggattgggcgaagaggaggaagaagattgagaagggaggaggacccaagcccaagcccacagtttctgtgggcccggaggatgagaagtataggctgggctatgggcttgcggggaagggggttcagttgccgtggtatcttcggaagcctgatggtgaaggtgtcggtgatgataataaggatgaaggtggtgacgtggataggagagaaaataagggtgagaagaagaggaagactatggaggaattgagggaagagaggttgaaaagggagaggaaagagaaggatagggagagggctttgagacacgagaagatgcagagtcacagagatggttctggttatggcagtaggaggaggttcaccagatgaacataggttttttgtgttctttttctgaactgatttttgtttctgaagtttcatgtaattggaagttatgcaatttggattcagtagtatattgtataagggaagataggtttatatagttaatcaaagtggtttggttttctttc

SEQ ID NO: 3692 - protein, 234 aa, Glycine max
  misc_feature (1)..(234): Ceres Seq. ID no. 13581741
MGGHGGLNILPQKRWNVYNFDNREKVRRDEEQAAREEQLKREETRKRDAELRLDRLRVARGLAPSIPPPPESEPQPSSRSEPVPSSDPGHINLFEGINIFDPIQKDGAAERDWAKRRKKIEKGGGPKPKPTVSVGPEDEKYRLGYGLAGKGVQLPWYLRKPDGEGVGDDNKDEGGDVDRRENKGEKKRKTMEELREERLKRERKEKDRERALRHEKMQSHRDGSGYGSRRRFTR

SEQ ID NO: 3693 - DNA, 1352 bp, Glycine max
  misc_feature (1)..(1352): Ceres Seq. ID no. 13581804
agttcacaccctagagggagtggatggattttgttgtttttcatataagggcaaagaaagatagaggagctagctagctagcgagcttcaaaactcaaaagcactgacacatacaaacaaaaagatctggctttcataaaattgagataaaagtgcaccgtctccgaatcatgtttataatattatcttcattagatcttgatctcatttttcatctgaaactaaaagaatatatatgtgcctttaccctatttagctatatgcacacacaacttgtcacatatcatattttgttcatcaagtttataattccttatctttgaacttacttacatccaagtaaggtctaagctagctggagttgattagatctagctagctagttttcgatctgcttaatttgttttccatgatctcttatatatagtaattttatttccctttaattaattaagaaagagttgaagaagaatgggaagggggaagatcgaaatcaaaaggattgagaacacaacaaatcggcaagtgaccttctgcaagagaagaaatgggcttctgaagaaagcttatgagctgtcagtgctgtgtgatgcagaagttgccctcatcgtcttctccagccgtggccgtctctatgagtattccaacaacaacataagatcaacaatagagaggtacaaaaaggcatgttctgatcactcaagcgcgagcactaccacagaaatcaatgctcagtattatcaacaagaatctgcaaagctgcgacagcaaatacagatgctgcaaaattctaacaggcacctgatgggtgatgccttaagcacactgactgtgaaggaacttaagcagttggagaatagacttgaaagaggaatcactagaatcagatctaagaaacatgagatgctactggctgaaattgaatacttccagaaaagggagattgaactggaaaatgaaaatctttgcctccgaactaagataactgacgtggagaggattcagcaagtaaacatggtttctgggccagaactgaatgccattcaggcattagcttcccgtaacttcttcaatccaaatatgttggaaggtggaactgtttaccctcactcagataagaagattcttcatcttgggtgatcaataatatatgatcttggctagcctatggcatgtctatccaattagccggtggctaaatgcattattattactactcttttggttgctcattaactagaccatgtgatctatatactacttatggattatggatacttatgtatgatgattgtatgatatcataacaatcagttagaaataataattaaaaaatagagttgtgtttgaag

SEQ ID NO: 3694 - protein, 222 aa, Glycine max
  misc_feature (1)..(222): Ceres Seq. ID no. 13581805
MGRGKIEIKRIENTTNRQVTFCKRRNGLLKKAYELSVLCDAEVALIVFSSRGRLYEYSNNNIRSTIERYKKACSDHSSASTTTEINAQYYQQESAKLRQQIQMLQNSNRHLMGDALSTLTVKELKQLENRLERGITRIRSKKHEMLLAEIEYFQKREIELENENLCLRTKITDVERIQQVNMVSGPELNAIQALASRNFFNPNMLEGGTVYPHSDKKILHLG

SEQ ID NO: 3695 - protein, 120 aa, Glycine max
  misc_feature (1)..(120): Ceres Seq. ID no. 13581806
MLQNSNRHLMGDALSTLTVKELKQLENRLERGITRIRSKKHEMLLAEIEYFQKREIELENENLCLRTKITDVERIQQVNMVSGPELNAIQALASRNFFNPNMLEGGTVYPHSDKKILHLG

SEQ ID NO: 3696 - protein, 111 aa, Glycine max
  misc_feature (1)..(111): Ceres Seq. ID no. 13581807
MGDALSTLTVKELKQLENRLERGITRIRSKKHEMLLAEIEYFQKREIELENENLCLRTKITDVERIQQVNMVSGPELNAIQALASRNFFNPNMLEGGTVYPHSDKKILHLG

SEQ ID NO: 3697 - DNA, 1283 bp, Glycine max
  misc_feature (1)..(1283): Ceres Seq. ID no. 13581848
agatggagagaaagtttaaaaattctaaagacccaatctcaatacctcaaactctaaacactgcatatttaattatcataccaccacccacccttctcccatccctcactctctcgacgaaaccctaagcttcccctttcaatctcatcagatcctttcgtggttgcgcgaaaccctaattttgaatctgcaaacatgtctgcagctatggatatgtcgctcgacgacataatcaagaacaacaaaaaatctggatccggaagttcccgtggccggatccgaccctccggttccggaccttctcgccggttccccaaccgtgccgccaaccgcgccgctccttatgccaccgctaaggcgccggaggcgacgtggcagcacgatttatatgcagatcagcaagtggctgcggcggggtaccctgctcaaggtggtcgtgcggcttccatagaaactgggactaagctttacatttcaaacttggattatggtgtttccagtgacgatattaaggaattgtttgctgaagttggtgacctgaaacggcatgcggttcattatgacaggagtggcagatcaaagggtacagcagaagtagtattttcacgacgagctgatgctgtagctgctgtaaagagatacaacaatgttcagttggatgggaaaccaatgaagattgagattgtgggaaccaacatttccacacctggtgtggctcctgctcgtaacggggctattggaaattttgatggagttcctcgaagtggacaaggaagaggtggggcattaagaaggccaggaggaagagggcagggcgttcgaagggatcggggacggggaagaggtcgtggcggagcaggtcgcggtgaaaaggtatctgctgatgatcttgatgcggatttggagaagtatcatgcagaggcaatgcaattgaactgaaggaattggccatattttattttcttgctattacatctatgatgtttattagggacttggtgctggaacaccatgtgtttatgtatctttcacgctggcctactttttagggaaagagaatggatttcctgagtgaaaacatttagacttgccatatggagtttgggcttctgttgtctatttttgattttccttgggtatgaaatatggattacgaaacagaagtcagcatgtaatatgcagtcaagtttgccttcactggcattaatttgttttaacgagtggattatggaagtgggaaccatgatttcatctatcaatgtacaaagaaatgtttggctgcc

SEQ ID NO: 3698 - protein, 247 aa, Glycine max
  misc_feature (1)..(247): Ceres Seq. ID no. 13581849
MSAAMDMSLDDIIKNNKKSGSGSSRGRIRPSGSGPSRRFPNRAANRAAPYATAKAPEATWQHDLYADQQVAAAGYPAQGGRAASIETGTKLYISNLDYGVSSDDIKELFAEVGDLKRHAVHYDRSGRSKGTAEVVFSRRADAVAAVKRYNNVQLDGKPMKIEIVGTNISTPGVAPARNGAIGNFDGVPRSGQGRGGALRRPGGRGQGVRRDRGRGRGRGGAGRGEKVSADDLDADLEKYHAEAMQLN

SEQ ID NO: 3699 - protein, 243 aa, Glycine max
  misc_feature (1)..(243): Ceres Seq. ID no. 13581850
MDMSLDDIIKNNKKSGSGSSRGRIRPSGSGPSRRFPNRAANRAAPYATAKAPEATWQHDLYADQQVAAAGYPAQGGRAASIETGTKLYISNLDYGVSSDDIKELFAEVGDLKRHAVHYDRSGRSKGTAEVVFSRRADAVAAVKRYNNVQLDGKPMKIEIVGTNISTPGVAPARNGAIGNFDGVPRSGQGRGGALRRPGGRGQGVRRDRGRGRGRGGAGRGEKVSADDLDADLEKYHAEAMQLN

SEQ ID NO: 3700 - protein, 241 aa, Glycine max
  misc_feature (1)..(241): Ceres Seq. ID no. 13581851
MSLDDIIKNNKKSGSGSSRGRIRPSGSGPSRRFPNRAANRAAPYATAKAPEATWQHDLYADQQVAAAGYPAQGGRAASIETGTKLYISNLDYGVSSDDIKELFAEVGDLKRHAVHYDRSGRSKGTAEVVFSRRADAVAAVKRYNNVQLDGKPMKIEIVGTNISTPGVAPARNGAIGNFDGVPRSGQGRGGALRRPGGRGQGVRRDRGRGRGRGGAGRGEKVSADDLDADLEKYHAEAMQLN

SEQ ID NO: 3701 - DNA, 502 bp, Glycine max
  misc_feature (1)..(502): Ceres Seq. ID no. 13581893
aacaaagaatttgatcagtgataaaaaaaaaagaaagacgaatagagagaacccaatatgtctaaactagccactctcttgactttggctcttctactgagcttcaatttaatctatgcctcccgtccaaacccttcacttatcagtgtctcttctttgcatggggatgttgcggctacaaaggcagaagagatagatggtgagagttgtgaagaagggacagaggaatgtttggcaagaaggacacttgctgcgcatctcgattatatctacactcagaaggataaactgggtcagcattcttaatggcatcacaggcatatgaattgcaatactataaataaattaatgtaccacacatatatgtatgtgtgtacttatttcattaacaaacaaatgctttgcttgaatgttcgcatattttctcctaattattccatgcgagagaaataacaatctaccgtactccattcgatttcaaatataagataaaattactgtt

SEQ ID NO: 3702 - protein, 82 aa, Glycine max
  misc_feature (1)..(82): Ceres Seq. ID no. 13581894
MSKLATLLTLALLLSFNLIYASRPNPSLISVSSLHGDVAATKAEEIDGESCEEGTEECLARRTLAAHLDYIYTQKDKLGQHS

SEQ ID NO: 3703 - protein, 43 aa, Glycine max
  misc_feature (1)..(43): Ceres Seq. ID no. 13581895
MNCNTINKLMYHTYMYVCTYFINKQMLCLNVRIFSPNYSMREK

SEQ ID NO: 3704 - protein, 42 aa, Glycine max
  misc_feature (1)..(42): Ceres Seq. ID no. 13581896
MVRVVKKGQRNVWQEGHLLRISIISTLRRINWVSILNGITGI

SEQ ID NO: 3705 - DNA, 683 bp, Glycine max
  misc_feature (1)..(683): Ceres Seq. ID no. 13581918
aactttacttttcaccgtcggagctaagttcgcgcgccggtcatcctaaacccatatcagcgatcagccggccaggaactcgccgtagtgccgtggcgtgttctggtagcgtggaaagagtacttctgtcatggaaccaagtcagcccgagctcgaggagttctcagctgccaccgcgggcgaggtgctgaaaccagtggaggccccatccgatggtgaaggatgccccatatgcttgggtcaagaggaggccacggagaccacttggatgaagacagcgtgcggacacatctttcatgggcggtgcgtggagaggtggctcaagatgaagggaagttgccccgtgtgccggcgccagctttcgataccgcatgttggtgcaaaacaagatgttccatttatacatccctttgacttgaggacgatagagtcaatgcggaggtttcctcacatattcccagatccagatggatatttctcaatgtatacgcaggatatgtttgaaggccattgaagatgatgttgccacgtacattatgctttcggtagctctacatataagaccggtgctaagaatgttatgtaaagtatggatctcttcactttcaaactaatagaacacgtgatttccgaaaaaaaaaataaaaaaaaaaaaaaaaaagctggacaataccgtcgactgt

SEQ ID NO: 3706 - protein, 127 aa, Glycine max
  misc_feature (1)..(127): Ceres Seq. ID no. 13581919
MEPSQPELEEFSAATAGEVLKPVEAPSDGEGCPICLGQEEATETTWMKTACGHIFHGRCVERWLKMKGSCPVCRRQLSIPHVGAKQDVPFIHPFDLRTIESMRRFPHIFPDPDGYFSMYTQDMFEGH

SEQ ID NO: 3707 - protein, 81 aa, Glycine max
  misc_feature (1)..(81): Ceres Seq. ID no. 13581920
MKTACGHIFHGRCVERWLKMKGSCPVCRRQLSIPHVGAKQDVPFIHPFDLRTIESMRRFPHIFPDPDGYFSMYTQDMFEGH

SEQ ID NO: 3708 - protein, 63 aa, Glycine max
  misc_feature (1)..(63): Ceres Seq. ID no. 13581921
MPHMLGSRGGHGDHLDEDSVRTHLSWAVRGEVAQDEGKLPRVPAPAFDTACWCKTRCSIYTSL

SEQ ID NO: 3709 - DNA, 1296 bp, Glycine max
  misc_feature (1)..(1296): Ceres Seq. ID no. 13581947
gacctttccaccacgcccccgtcctctttcccttcccgtcgctcgctccccccctacccgaaccttctcgactccctcttcgcatggccgacgccaaggccgaggcggcgaggcaggcgccgcagtcctcccaggaggaggaggaggactggaaggaggccgagggggacgtcgaggtcgcggacaggtccacgagcaatggcggcggcgccggcgaggggatcacggacaggccgatccgggtctacgccgacggcatctacgacctcttccacttcggccacgcgcgctcgctcgagcaggccaagaaatcgttccctaatgcatatcttcttgtcgggtgctgcaatgatgagctgacacatcaatacaaaggaagaactgtcatgacagaggacgagagatatgaatcacttcgccattgcaagtgggttgatgaagtcattcctgacgctccgtgggtagtaacagaagagttcttgaacaagcataacatcgattttgtcgcacatgattctctgccgtatcatgatgctagtggagctagtaatgatgtctatgaatttgtaaaaaagcttggtaaatttaaggagaccaagcgcacagaaggaatatcaacctcagacattataatgaggattgttaaagattataatgagtatgttatgcgcaatctggccagggggtacagcagaaatgatcttggtgtcagctatgtcaaggaaaaacgactaagagttaatatgggattgaaaaccctgcgtgacaaagtgaagcagcaccaagaaaaagtaggggagaagtggagtacggtggcaaaactccaagaagagtgggttgaaaacgcagatcgctgggttgttggttttctagagaaattcgaggaaggttgccattcaatgggaactgccattaaggaaagaatccaggaaaggctgaaggaggcgcagtctagggacttcagccttctacaatacgacagtgacgactttgacgactttgaagaagaagacgatgaagttgccaaagatgccaaatacgtgaaagaatagcgccactgtaaaattttacgtcaaaagtataatacaggcatgcaatgcatgttaacagtcttcgtcaaccacaatccttcaccatgtatctgtccctttgattgtgagcttcactgtcaaggtagatctgcgtgctgtgtttgtagctgtacttgatgtttttctaggcattagcgtacgctcatgtaaaagttctactgtgaggcataacactctttatttggaggatatcgatttcaattcc

SEQ ID NO: 3710 - protein, 349 aa, Glycine max
  misc_feature (1)..(349): Ceres Seq. ID no. 13581948
PFHHAPVLFPFPSLAPPLPEPSRLPLRMADAKAEAARQAPQSSQEEEEDWKEAEGDVEVADRSTSNGGGAGEGITDRPIRVYADGIYDLFHFGHARSLEQAKKSFPNAYLLVGCCNDELTHQYKGRTVMTEDERYESLRHCKWVDEVIPDAPWVVTEEFLNKHNIDFVAHDSLPYHDASGASNDVYEFVKKLGKFKETKRTEGISTSDIIMRIVKDYNEYVMRNLARGYSRNDLGVSYVKEKRLRVNMGLKTLRDKVKQHQEKVGEKWSTVAKLQEEWVENADRWVVGFLEKFEEGCHSMGTAIKERIQERLKEAQSRDFSLLQYDSDDFDDFEEEDDEVAKDAKYVKE

SEQ ID NO: 3711 - protein, 322 aa, Glycine max
  misc_feature (1)..(322): Ceres Seq. ID no. 13581949
MADAKAEAARQAPQSSQEEEEDWKEAEGDVEVADRSTSNGGGAGEGITDRPIRVYADGIYDLFHFGHARSLEQAKKSFPNAYLLVGCCNDELTHQYKGRTVMTEDERYESLRHCKWVDEVIPDAPWVVTEEFLNKHNIDFVAHDSLPYHDASGASNDVYEFVKKLGKFKETKRTEGISTSDIIMRIVKDYNEYVMRNLARGYSRNDLGVSYVKEKRLRVNMGLKTLRDKVKQHQEKVGEKWSTVAKLQEEWVENADRWVVGFLEKFEEGCHSMGTAIKERIQERLKEAQSRDFSLLQYDSDDFDDFEEEDDEVAKDAKYVKE

SEQ ID NO: 3712 - protein, 221 aa, Glycine max
  misc_feature (1)..(221): Ceres Seq. ID no. 13581950
MTEDERYESLRHCKWVDEVIPDAPWVVTEEFLNKHNIDFVAHDSLPYHDASGASNDVYEFVKKLGKFKETKRTEGISTSDIIMRIVKDYNEYVMRNLARGYSRNDLGVSYVKEKRLRVNMGLKTLRDKVKQHQEKVGEKWSTVAKLQEEWVENADRWVVGFLEKFEEGCHSMGTAIKERIQERLKEAQSRDFSLLQYDSDDFDDFEEEDDEVAKDAKYVKE

SEQ ID NO: 3713 - DNA, 1030 bp, Glycine max
  misc_feature (1)..(1030): Ceres Seq. ID no. 13581967
atcgctccaaaataaaaaagaatagctaaaagatggctctcgaagtctgcgtgaaagccgccgttggtgcccctgatgctctcggcgactgtaacttcccttctctctctctagctctttttttttatatcagattatgatctctgatgatcttcaaatgtaaaatttataatacatgatttgtctgtcgtttcaggccctttcagccaacgggttctcctcaccctcgaggagaagaatcttccctacaaaatgcatctgatcaacatctccgacaaacctcaatggtcattttctttctctcacccaaaaaccttagattcgatcttagcttgtttcacctgttctactcattgacaagaagctggctttggtttatatatgatacaggttcttagccattagtcctgaagggaaagtaccagtcctcaagaacgacgacaagtgggtgtctgattccgacgtcatcaccggcattctcgaggagaagtatcctgagccatctctcaagactcctcccgagctcgcctccgttggatccaaaatcttcggtaccttcgtgaccttcttgaagagcaaagactccagcgacggatccgagaaggccttgcttgatgagcttgaagctctcgagactcatctcaagactcatgacggtcctttcatcgccggagggaaagtcagtgctgtggatctaagcttagcaccgaagctttaccatctcaaggtcgctcttggccactacaaaagctggtctgtccccgagagcttgcctcatgttcatggctacatgaaggctttgttctctcttgactcgtttgagaaaacaaagactgaggagaggtatgttattgcaggatgggaacacaaggttaacccctaaaaactactactagtttcgtctgtttgtgtgtggtggtgatgatttggttcaatgtcttatctactctatcaactcttatcagtaaaataatgttcctggacctgttatgttttgttattgtatcaatcaaataataagcctcttttg

SEQ ID NO: 3714 - protein, 37 aa, Glycine max
  misc_feature (1)..(37): Ceres Seq. ID no. 13581968
MVIFFLSPKNLRFDLSLFHLFYSLTRSWLWFIYDTGS

SEQ ID NO: 3715 - protein, 35 aa, Glycine max
  misc_feature (1)..(35): Ceres Seq. ID no. 13581969
MALEVCVKAAVGAPDALGDCNFPSLSLALFFYIRL

SEQ ID NO: 3716 - protein, 34 aa, Glycine max
  misc_feature (1)..(34): Ceres Seq. ID no. 13581970
MHLINISDKPQWSFSFSHPKTLDSILACFTCSTH

SEQ ID NO: 3717 - DNA, 421 bp, Glycine max
  misc_feature (1)..(421): Ceres Seq. ID no. 13581998
taatttgagagcaaaagtttacaggaaagatatgtcacccattttaggaaactgcatctgctatacatgccagaatcatactaaagcatacatcaatcacctatttaatgttcatgaaatgctggcacagattctgttagaaatccataatacacaccactacttgacgttctttcatgtaataagagaatcaataaaggatggaaggtttgagaaatttagacagacattcatcgagagcaggcgtgcccatcaggaaagggaagctgtttgtgcttgaggtcatataagcttaggtgtattcatctgggttttaacttggatttctatgaagcgcgaaccaagtattgtacaaaaagacttcaattttagttgtgtaaactggttcgtttaaatgccaatagatacaatttatttgatt

SEQ ID NO: 3718 - protein, 92 aa, Glycine max
  misc_feature (1)..(92): Ceres Seq. ID no. 13581999
NLRAKVYRKDMSPILGNCICYTCQNHTKAYINHLFNVHEMLAQILLEIHNTHHYLTFFHVIRESIKDGRFEKFRQTFIESRRAHQEREAVCA

SEQ ID NO: 3719 - protein, 82 aa, Glycine max
  misc_feature (1)..(82): Ceres Seq. ID no. 13582000
MSPILGNCICYTCQNHTKAYINHLFNVHEMLAQILLEIHNTHHYLTFFHVIRESIKDGRFEKFRQTFIESRRAHQEREAVCA

SEQ ID NO: 3720 - protein, 53 aa, Glycine max
  misc_feature (1)..(53): Ceres Seq. ID no. 13582001
MLAQILLEIHNTHHYLTFFHVIRESIKDGRFEKFRQTFIESRRAHQEREAVCA

SEQ ID NO: 3721 - DNA, 961 bp, Glycine max
  misc_feature (1)..(961): Ceres Seq. ID no. 13582052
acaaaatagatttggctgtcgtttcgtccctccctcttccgttgaacgaacatcggcgttttcaccgacgaatccaactttctttccatttctctctacgattcaggtctttcacttggattcagaatagtacttttgtttcttctagattattagcgacagagatggatgattgggaagctgaagactttcaaccaactcctgctaaagttgaactgaaaagtaactgggatgatgaggatgttgatgagaatgacatcaaggactcttgggaggaagaggatgatgatgagcctactccggcagctgtagtaaagcctgctccaaagaaagcagcaaaagttgttgaaaagaaggctaaatctgttgaagaaccatcaaaggaagagccttttgatcctattgctgacaaacttcgcatgcagaggctagtggaggaagctgattaccaggcaactgctgaactctttggagcaaagactgaagcaaaaagcgttgatattttcattcccaagtctgaaagcgatttcttggaatatgctgagatgatatctcgtaagcttgtaccttatgagaaaagctttcactatattgggctgctcaaagcagtgatgagactttctgtggccaatatgaaagcagctgatgttaaagacgttgcttcctccatttcggcaataggaaacgaaaaactcaaggctgagaaagatgctgctgccggcaaaaagaagtcaggtaagaagaaacaactgcacgtggataagcctgatgatgatcttgtttcgggtccttatggcgccatggacgacgatgatttcatgtaaaagaaaatggcttggagattgcacttactacctatgtaggatattgcaactaagaagaggtttaaatcattttacgtttttttttaaattatctattgaagcaacacaaattagtaaaacagaattgcctttttctc

SEQ ID NO: 3722 - protein, 273 aa, Glycine max
  misc_feature (1)..(273): Ceres Seq. ID no. 13582053
KIDLAVVSSLPLPLNEHRRFHRRIQLSFHFSLRFRSFTWIQNSTFVSSRLLATEMDDWEAEDFQPTPAKVELKSNWDDEDVDENDIKDSWEEEDDDEPTPAAVVKPAPKKAAKVVEKKAKSVEEPSKEEPFDPIADKLRMQRLVEEADYQATAELFGAKTEAKSVDIFIPKSESDFLEYAEMISRKLVPYEKSFHYIGLLKAVMRLSVANMKAADVKDVASSISAIGNEKLKAEKDAAAGKKKSGKKKQLHVDKPDDDLVSGPYGAMDDDDFM

SEQ ID NO: 3723 - protein, 219 aa, Glycine max
  misc_feature (1)..(219): Ceres Seq. ID no. 13582054
MDDWEAEDFQPTPAKVELKSNWDDEDVDENDIKDSWEEEDDDEPTPAAVVKPAPKKAAKVVEKKAKSVEEPSKEEPFDPIADKLRMQRLVEEADYQATAELFGAKTEAKSVDIFIPKSESDFLEYAEMISRKLVPYEKSFHYIGLLKAVMRLSVANMKAADVKDVASSISAIGNEKLKAEKDAAAGKKKSGKKKQLHVDKPDDDLVSGPYGAMDDDDFM

SEQ ID NO: 3724 - DNA, 533 bp, Glycine max
  misc_feature (1)..(533): Ceres Seq. ID no. 13582088
ctatgttctgggcctaaccttgttccttgcgatatcaataccacaatattttgtcatgaacactgcaccggatggtcatggtccagttagaacaggtggtggatggtttaatgacattttgaacaccatattctcttctgccccaactgtggctataattgttgggactcttgttgacaacacacttgaaggcaaacaaacagctgtggacagaggacttccatggtggggtcctttccagaataggaagggagatgttagaaatgatgagttttaccgtcttcttctccggataaatgagtacatgcccaccagatttctctaaagtactctaatatatgctacctgtacttaaccccttctgcgaacttaattaaattctcatgtacaatgaaatgaccctgtaaaatatggatagacaaattttcatcattggccagccagcagccaaattttaccttgtataaatggattgacatagtaattctttggatgaattgctctctaaagatgccgaaattactcttaggtag

SEQ ID NO: 3725 - protein, 107 aa, Glycine max
  misc_feature (1)..(107): Ceres Seq. ID no. 13582089
YVLGLTLFLAISIPQYFVMNTAPDGHGPVRTGGGWFNDILNTIFSSAPTVAIIVGTLVDNTLEGKQTAVDRGLPWWGPFQNRKGDVRNDEFYRLLLRINEYMPTRFL

SEQ ID NO: 3726 - protein, 89 aa, Glycine max
  misc_feature (1)..(89): Ceres Seq. ID no. 13582090
MNTAPDGHGPVRTGGGWFNDILNTIFSSAPTVAIIVGTLVDNTLEGKQTAVDRGLPWWGPFQNRKGDVRNDEFYRLLLRINEYMPTRFL

SEQ ID NO: 3727 - DNA, 864 bp, Glycine max
  misc_feature (1)..(864): Ceres Seq. ID no. 13582138
atggaagagaagagatcgatggagcaacccaccgatcgattcgccatggccacctttctgatcttcctcatacttgccctcgccgccggcagcagcaaccaaggaggagcagctgctgccgccgccggagcccgacctgaccttatcgtcatgaagctgcacggtcacgaccccgagggcccctccgtggccttccagacccacgacctctccttcgccggcttcaccaacgggggcggccactggcaggctttcccaggcctcgcccacctgttcccgacgtccacgcccctcccgttcggcagcagctacgacgacctcatcggcggcctcgccaacctgccgagggtgcctctggggcggcaggccatggccgacgccgcccgggtgctctccgcctacgacccgtccgcggccgcggccgccgacgtcgagccagtcaagcgcgcactggcagcgctcaaggtgatgctaggcgatgcccagcggctgcagcccatccacgagacggtcgttcgggggtgggagagcgagtcccgcgtcgcgcccgagcacctgccctacattgaccactgggacaccatctcctacgagatcatccgcgccaaccggacgggcaagtggaacgggcccttcgccaagatgctggaaacccaagccaacatccgcagccaggaggaggcgctcgccgtcgtccgggtgctgctccatgccgacttcgagcaggtgctccaggctcacggcaccaagatcaacttccagtgaacatgcatgcatgcatgcatgcttgctggcttagacttcagatttgtgctccatctcctattcgagtccatgtttctttaattaaccatgttcgttgtt

SEQ ID NO: 3728 - protein, 254 aa, Glycine max
  misc_feature (1)..(254): Ceres Seq. ID no. 13582139
MEEKRSMEQPTDRFAMATFLIFLILALAAGSSNQGGAAAAAAGARPDLIVMKLHGHDPEGPSVAFQTHDLSFAGFTNGGGHWQAFPGLAHLFPTSTPLPFGSSYDDLIGGLANLPRVPLGRQAMADAARVLSAYDPSAAAAADVEPVKRALAALKVMLGDAQRLQPIHETVVRGWESESRVAPEHLPYIDHWDTISYEIIRANRTGKWNGPFAKMLETQANIRSQEEALAVVRVLLHADFEQVLQAHGTKINFQ

SEQ ID NO: 3729 - protein, 248 aa, Glycine max
  misc_feature (1)..(248): Ceres Seq. ID no. 13582140
MEQPTDRFAMATFLIFLILALAAGSSNQGGAAAAAAGARPDLIVMKLHGHDPEGPSVAFQTHDLSFAGFTNGGGHWQAFPGLAHLFPTSTPLPFGSSYDDLIGGLANLPRVPLGRQAMADAARVLSAYDPSAAAAADVEPVKRALAALKVMLGDAQRLQPIHETVVRGWESESRVAPEHLPYIDHWDTISYEIIRANRTGKWNGPFAKMLETQANIRSQEEALAVVRVLLHADFEQVLQAHGTKINFQ

SEQ ID NO: 3730 - protein, 239 aa, Glycine max
  misc_feature (1)..(239): Ceres Seq. ID no. 13582141
MATFLIFLILALAAGSSNQGGAAAAAAGARPDLIVMKLHGHDPEGPSVAFQTHDLSFAGFTNGGGHWQAFPGLAHLFPTSTPLPFGSSYDDLIGGLANLPRVPLGRQAMADAARVLSAYDPSAAAAADVEPVKRALAALKVMLGDAQRLQPIHETVVRGWESESRVAPEHLPYIDHWDTISYEIIRANRTGKWNGPFAKMLETQANIRSQEEALAVVRVLLHADFEQVLQAHGTKINFQ

SEQ ID NO: 3731 - DNA, 589 bp, Glycine max
  misc_feature (1)..(589): Ceres Seq. ID no. 13582142
ctttacgtaatctagatgaaatccagaacgagatgtggtgctcgatgctgcctgtgcttcgaccctttgtccatccaggacatgtcattcatcgtgttctattgctgccatgcgtatcaccagtcttgcctcgaaggcggactggactcgatgaaatcaaacagcaacgcccgggacagcgacgatgggtcggaggacgacgacggttccccctcgggcgagtctagaatgcggtgtgtgctgtgcaccacagccgccgcataagttatactccctcattgagctgtccatattctgatgtgttgtgttgtaagttttgagccctgtaattattgcattgcgctcttctggggttgatgcatatgtaacaacaataggttgttgattctttgagggggagctgtgtgcgtcctccgcatgggttttctgtaaatttggcgcgctacctgagtttgagcaaggttttaacggcatttcttttttcctcaatgccacgcttgccagatcatgcaatgttcatgaagacttgttgttttgaagaaagtgggatgagcaattttatttttggtgtaatatatatttgttttcc

SEQ ID NO: 3732 - protein, 82 aa, Glycine max
  misc_feature (1)..(82): Ceres Seq. ID no. 13582143
MKSRTRCGARCCLCFDPLSIQDMSFIVFYCCHAYHQSCLEGGLDSMKSNSNARDSDDGSEDDDGSPSGESRMRCVLCTTAAA

SEQ ID NO: 3733 - protein, 74 aa, Glycine max
  misc_feature (1)..(74): Ceres Seq. ID no. 13582144
LRNLDEIQNEMWCSMLPVLRPFVHPGHVIHRVLLLPCVSPVLPRRRTGLDEIKQQRPGQRRWVGGRRRFPLGRV

SEQ ID NO: 3734 - protein, 64 aa, Glycine max
  misc_feature (1)..(64): Ceres Seq. ID no. 13582145
MWCSMLPVLRPFVHPGHVIHRVLLLPCVSPVLPRRRTGLDEIKQQRPGQRRWVGGRRRFPLGRV

SEQ ID NO: 3735 - DNA, 580 bp, Glycine max
  misc_feature (1)..(580): Ceres Seq. ID no. 13582216
aacatcctaatcgaaaaatccatcacacaagctagctactagctactagaaagtacttactgctcaatcggtcgatgagggtgtcaagcatggcgtccaagggtctcgttgtgtttgctgtcctgcttgctgcggctttcctcgtggccacagctgaacaaactcaggccaagaaggaagaaactaaggccggtgttcagggttaccacggcggcggcagcggaggcggcggcggcggcggcggcggcagcggctgcaggtaccagtgctgtgggcacgggcatggtggctgccgctgctgcgcaagccccaacgagatcccggagcccatgtatcgggcggaggtccgcaactaagtgccagatgctccacacggacgttgctacttgcctgcacgtagtaactactcgtatatgtggtcaataagaaggtaggtgcatgtatgtatgtacgcgtacgtacagattgcacagttatgtttacccaataataccagaactctgttctgatcgtgtattcaccctgtaagacttctctttcttgcacaatatataatacatgcaactgtcatgcatgttat

SEQ ID NO: 3736 - protein, 93 aa, Glycine max
  misc_feature (1)..(93): Ceres Seq. ID no. 13582217
MRVSSMASKGLVVFAVLLAAAFLVATAEQTQAKKEETKAGVQGYHGGGSGGGGGGGGGSGCRYQCCGHGHGGCRCCASPNEIPEPMYRAEVRN

SEQ ID NO: 3737 - protein, 88 aa, Glycine max
  misc_feature (1)..(88): Ceres Seq. ID no. 13582218
MASKGLVVFAVLLAAAFLVATAEQTQAKKEETKAGVQGYHGGGSGGGGGGGGGSGCRYQCCGHGHGGCRCCASPNEIPEPMYRAEVRN

SEQ ID NO: 3738 - protein, 47 aa, Glycine max
  misc_feature (1)..(47): Ceres Seq. ID no. 13582219
MVAAAAAQAPTRSRSPCIGRRSATKCQMLHTDVATCLHVVTTRICGQ

SEQ ID NO: 3739 - DNA, 472 bp, Glycine max
  misc_feature (1)..(472): Ceres Seq. ID no. 13582224
cccaaaacccatggttggacccaaggatcaccagcgctttcaagcttcttatgcaactatattaaaggcccatatgactgctataaagaagagagaaaggaaagacaagaagaagcctgcaaaggcagataaaagagaaggaagttcaaagagactgaaaagattttggcttgttttgttttcattagtgttcctatcacaaatggactagatacctgtccttctaccaaagggtcttctgttcatagttccttgccaaagtctcgggtgtgtgagtattcggcagagcgaagggagatatctacaaaaggcacttcaatgctcaagtgaaggtgttacgactaacccttggatcatgaccagcgcacagactatgatttcgttagtctggctagcctaccctatattaaataacctgtaaaagaacacatgatatatctaggcaaatctatatatatatctcattccatcc

SEQ ID NO: 3740 - protein, 69 aa, Glycine max
  misc_feature (1)..(69): Ceres Seq. ID no. 13582225
PKPMVGPKDHQRFQASYATILKAHMTAIKKRERKDKKKPAKADKREGSSKRLKRFWLVLFSLVFLSQMD

SEQ ID NO: 3741 - protein, 66 aa, Glycine max
  misc_feature (1)..(66): Ceres Seq. ID no. 13582226
MVGPKDHQRFQASYATILKAHMTAIKKRERKDKKKPAKADKREGSSKRLKRFWLVLFSLVFLSQMD

SEQ ID NO: 3742 - protein, 45 aa, Glycine max
  misc_feature (1)..(45): Ceres Seq. ID no. 13582227
MTAIKKRERKDKKKPAKADKREGSSKRLKRFWLVLFSLVFLSQMD

SEQ ID NO: 3743 - DNA, 742 bp, Glycine max
  misc_feature (1)..(742): Ceres Seq. ID no. 13582260
agcttgggaggaaataatatcatttccgttctcaaaatcataacagtacttcgcgtgccctagctcactccgtcgctcctcacccttccggcagtgcttggtcgtggccgtcacggttcaaacttcaaaagcatttgttgtgttggagtaggctatggatgacttgtttgattcttcgctgaacttggaggacacccattacaaggaaggctatgacgaaggctacagccatggccttgtcactggcaaggaagaagctaggcaggttggcctcaaggttggctttgaggttggcgaggagcttggtttctataggggttgtgtcgaaatctggacttctgcgatccggctcgacccaacctgtttctctccacgggctaaaacatttatttgccagatggaggagttgatccagaaataccctctcatggatccagaaaatgcacaagtgcaagagatcatggatagcctcaggctcaagttcaagatggtttgttcttccttgcatgtcaaacttgagtataatgggtatcccaaatcttctacggaggtcaatgatattcaattctgagctagttatgatattttcagtctttagggatatccatgtgtagggaacctctgagttgggttagttgatgaacaaattacgtgttatcattttacaaacatttgtgcaagtcaatgtatcgaataattattttatattaaaaatgatgatatatacattgtttatgaacgt

SEQ ID NO: 3744 - protein, 138 aa, Glycine max
  misc_feature (1)..(138): Ceres Seq. ID no. 13582261
MDDLFDSSLNLEDTHYKEGYDEGYSHGLVTGKEEARQVGLKVGFEVGEELGFYRGCVEIWTSAIRLDPTCFSPRAKTFICQMEELIQKYPLMDPENAQVQEIMDSLRLKFKMVCSSLHVKLEYNGYPKSSTEVNDIQF

SEQ ID NO: 3745 - DNA, 1347 bp, Glycine max
  misc_feature (1)..(1347): Ceres Seq. ID no. 13582297
atccaatcttcactcactctctaatttactacagaaaaaaaaaaaagatgagtagtgttttttcagaacacaaattccaacttcaaccctctcaccaacttctctccctcaagaaatccctgagggacatagacatcccagtcccaccaaggaagctcctcacccgccgctccgccgccgtccacgacgtctccggcgacatgttttccgatgacaccctccggcacaagtaccttccccacaatggctccaccgactcctccgacgatgactccggcgacccctacgcctccgatcaattccgcatgtttgagttcaaggtccggcgctgtactcgcagccggagccatgactggacagactgtccatttgtacatcccggcgagaaggcccgccgtcgggaccctcgccggtttcattactctgcaacagtctgtccagagtttcgccgcggtcagtgtgaccgtggcgatgcatgtgagttttctcatggggtgtttgagtgctggttacacccttctaggtatagaaccgaggcttgcaaggatggtaggaattgcaagcgaaaagtttgcttctttgctcacacccctcgccaactcagggttttgcattccaatgaaaatagcaacaagaaaaagtgcaccaatatgagccctcataacaacaacaacaacaccaacaattgttgtttggtttgccattgctcttcttctactcgttcaccaacttcaaccttgttcggcatgtctcatttttctcctccattgtcaccaccttctccttcttccccttctaggtttgagaccaaccatcatcatggtgttgtgaaatataataaggatgtgctctctgagcttatgtgttccatggagggtttgaattttggtgaggcttcacttttgtctgctgcttctaagcctcacaacaatttgtcttcttggcttgatgtttctgaggatcacaatcaaaaacagttcagtactctttcaccaaccatcactgcttgtggaagcttttccaacaacggaaatgggagatttttgagagaagaaagtggggttgttgatgatgttatttccccagatctcgcatgggtgaatgaattactgatgtagattatatgcatttgaagatgatgatgacaaaaagtggttcgtggtgggaattgtgatgaggatttaccaagtgtaaatacatgttggagctagcaacatatattacatccttggcttcttttcttattattgttttaagaattttattgctttctgaatttgttttaagatttgtcaaattaaattctgtaatttttatgtccattaattagatttgatcttttattcc

SEQ ID NO: 3746 - protein, 371 aa, Glycine max
  misc_feature (1)..(371): Ceres Seq. ID no. 13582298
PIFTHSLIYYRKKKKMSSVFSEHKFQLQPSHQLLSLKKSLRDIDIPVPPRKLLTRRSAAVHDVSGDMFSDDTLRHKYLPHNGSTDSSDDDSGDPYASDQFRMFEFKVRRCTRSRSHDWTDCPFVHPGEKARRRDPRRFHYSATVCPEFRRGQCDRGDACEFSHGVFECWLHPSRYRTEACKDGRNCKRKVCFFAHTPRQLRVLHSNENSNKKKCTNMSPHNNNNNTNNCCLVCHCSSSTRSPTSTLFGMSHFSPPLSPPSPSSPSRFETNHHHGVVKYNKDVLSELMCSMEGLNFGEASLLSAASKPHNNLSSWLDVSEDHNQKQFSTLSPTITACGSFSNNGNGRFLREESGVVDDVISPDLAWVNELLM

SEQ ID NO: 3747 - protein, 356 aa, Glycine max
  misc_feature (1)..(356): Ceres Seq. ID no. 13582299
MSSVFSEHKFQLQPSHQLLSLKKSLRDIDIPVPPRKLLTRRSAAVHDVSGDMFSDDTLRHKYLPHNGSTDSSDDDSGDPYASDQFRMFEFKVRRCTRSRSHDWTDCPFVHPGEKARRRDPRRFHYSATVCPEFRRGQCDRGDACEFSHGVFECWLHPSRYRTEACKDGRNCKRKVCFFAHTPRQLRVLHSNENSNKKKCTNMSPHNNNNNTNNCCLVCHCSSSTRSPTSTLFGMSHFSPPLSPPSPSSPSRFETNHHHGVVKYNKDVLSELMCSMEGLNFGEASLLSAASKPHNNLSSWLDVSEDHNQKQFSTLSPTITACGSFSNNGNGRFLREESGVVDDVISPDLAWVNELLM

SEQ ID NO: 3748 - protein, 305 aa, Glycine max
  misc_feature (1)..(305): Ceres Seq. ID no. 13582300
MFSDDTLRHKYLPHNGSTDSSDDDSGDPYASDQFRMFEFKVRRCTRSRSHDWTDCPFVHPGEKARRRDPRRFHYSATVCPEFRRGQCDRGDACEFSHGVFECWLHPSRYRTEACKDGRNCKRKVCFFAHTPRQLRVLHSNENSNKKKCTNMSPHNNNNNTNNCCLVCHCSSSTRSPTSTLFGMSHFSPPLSPPSPSSPSRFETNHHHGVVKYNKDVLSELMCSMEGLNFGEASLLSAASKPHNNLSSWLDVSEDHNQKQFSTLSPTITACGSFSNNGNGRFLREESGVVDDVISPDLAWVNELLM

SEQ ID NO: 3749 - DNA, 1365 bp, Glycine max
  misc_feature (1)..(1365): Ceres Seq. ID no. 13582301
agagattagaaactaattactcttgtgatattctctcacaagggtgtgtaattaaggcatagaaaatatggcatcctttgccagcaataattatcctttggtgtttttctttgttctcttttcactggccatgcgcttagctcatgggactaattatgcaccaacattattcatatttggagactcaacttttgatgttggaaccaacaactttcttaattctaaagcaaaggccaacttcccctacaatggcattgatttttatcctccatttcccacaggaaggtttagtaatggcttcaacactgctgaccaaattgcgagacaattcggttataagcagagcccaccaccatttttaactttggagaaagaccaatacagcctaaagaagaacattctgaagggtgtaaattttgcttcagggggatctggaattcttagagaaacagggcactcagaatggggagaagtggttttctttgaaaggcaggtggaacaatttgcatcggttggtggaaacatcagtgagatgttgggacatgcacaagctgctaaatttgtttccaaggctttgtttctcattagcgttggaagcaacgacatcttcgattatgcacgtaacgacagtggctccattcatttgggcgcagaagaatacttagctgttgtacaactcacatattactctcatataaagaaactatatgagttgggggcaaggaaatttggcatcataagcgttgcaaccgtaggttgctgtcctgctgtaagctctctcaatggagggaagtgcgtggaaccactgaatgattttgcagttgcattttatttagctacacaagctcttctgcaaaagttgagttcagaattgaaagggttcaagtactcacttggcaactcttttgaaatgacctcgaccttgttaaagagtccatcgtccttcgggttgaagtatacacagtcagcatgctgcggaattggatatctgaatgggcaaggtggatgcataaaagcccaaaacgccaatctttgcacaaatcgcaatgagttcttgttttgggattggtttcatcccactgagatagcttctttgttggcagctaagacattatttgaaggagacaaagagtttgtaactccagtgaatttacgtcagctagcttattcctattgatcatgtctaagccataacataagtaaccaattactataatttgaagtgaaataacgtagctggcatctctcactagtgccggttttaggctctttttttcttttgttgagaaaaattctcatgcataatctaatgatatgctaataagagttgctatttataaaaaaaaaaaaaaaaaagcttatcga

SEQ ID NO: 3750 - protein, 369 aa, Glycine max
  misc_feature (1)..(369): Ceres Seq. ID no. 13582302
MASFASNNYPLVFFFVLFSLAMRLAHGTNYAPTLFIFGDSTFDVGTNNFLNSKAKANFPYNGIDFYPPFPTGRFSNGFNTADQIARQFGYKQSPPPFLTLEKDQYSLKKNILKGVNFASGGSGILRETGHSEWGEVVFFERQVEQFASVGGNISEMLGHAQAAKFVSKALFLISVGSNDIFDYARNDSGSIHLGAEEYLAVVQLTYYSHIKKLYELGARKFGIISVATVGCCPAVSSLNGGKCVEPLNDFAVAFYLATQALLQKLSSELKGFKYSLGNSFEMTSTLLKSPSSFGLKYTQSACCGIGYLNGQGGCIKAQNANLCTNRNEFLFWDWFHPTEIASLLAAKTLFEGDKEFVTPVNLRQLAYSY

SEQ ID NO: 3751 - protein, 348 aa, Glycine max
  misc_feature (1)..(348): Ceres Seq. ID no. 13582303
MRLAHGTNYAPTLFIFGDSTFDVGTNNFLNSKAKANFPYNGIDFYPPFPTGRFSNGFNTADQIARQFGYKQSPPPFLTLEKDQYSLKKNILKGVNFASGGSGILRETGHSEWGEVVFFERQVEQFASVGGNISEMLGHAQAAKFVSKALFLISVGSNDIFDYARNDSGSIHLGAEEYLAVVQLTYYSHIKKLYELGARKFGIISVATVGCCPAVSSLNGGKCVEPLNDFAVAFYLATQALLQKLSSELKGFKYSLGNSFEMTSTLLKSPSSFGLKYTQSACCGIGYLNGQGGCIKAQNANLCTNRNEFLFWDWFHPTEIASLLAAKTLFEGDKEFVTPVNLRQLAYSY

SEQ ID NO: 3752 - protein, 214 aa, Glycine max
  misc_feature (1)..(214): Ceres Seq. ID no. 13582304
MLGHAQAAKFVSKALFLISVGSNDIFDYARNDSGSIHLGAEEYLAVVQLTYYSHIKKLYELGARKFGIISVATVGCCPAVSSLNGGKCVEPLNDFAVAFYLATQALLQKLSSELKGFKYSLGNSFEMTSTLLKSPSSFGLKYTQSACCGIGYLNGQGGCIKAQNANLCTNRNEFLFWDWFHPTEIASLLAAKTLFEGDKEFVTPVNLRQLAYSY

SEQ ID NO: 3753 - DNA, 1193 bp, Glycine max
  misc_feature (1)..(1193): Ceres Seq. ID no. 13582317
aactcttgccactgcttttatctatcttctccatcggcaacaccttgcggaagataaaaaggatcgattcttcaatcaagaccagaaaaaaaaaagagcacgtacgtcacgttagactctgtatatcctgtgctgtgtcccattcggtacgcaagcctcaaaatatacatactccttcattttttcttcttctctttatggcggaaatccccaagttggatttgtcatcttcttgttttgacaatggagagcctttggattcggaacagaagagccagaaaatttttgtttcggatcacataaacgcatttcaatacgcagacgagaaagccgatagctttgtgattgacatggatgccttctcttccggccacaacaaagatgccaccaatgctaattcgagaattacgttgcagaggagtctttccaggaagggatctcagcgtctgggtgactggaagctgaataacaatgctacactttatgataaggataccgttcccgccatatgctctccaaaaggtacacttgttgggcctttcacgcccgaaaagccagcggggatggcagtagggcccatgggtcattccatgaacccacacgtccataatctaacagccgacaacatccccacagagagcaaatgtagtataactcggagaaatagttttagacgaccttcttcatgggccattgatcctaaaagggttctccttttctttgccaccttgtcaagcatgggaacaatgttgctgatatacttcactctgacaatcagtaagcaaagtgcagaagaatatggagggtgattggaagcattgactgaaggttttggattatgataacaaaaaaagaaaagaaaaaggacatgcattaattctggagcaaaacttacaagttaattagaagaagacaaccctgcagcaggagtagcaaagcaaaagctaaccaaatttccgccagcctgatgtcaaaatcagttaaaatcatctctttggcaactgcaagaggtaaatacaaagacacaatgtagtactatgacagagatcaggaagaaatcttccattatgtttttttttttttcatgtaaatggaagaaaaacaaacgatcacatggaggacattgccctttagtttatatgttgcgtgatcgcagggtttagtggaggatggatcataaatcaccttttgcc

SEQ ID NO: 3754 - protein, 268 aa, Glycine max
  misc_feature (1)..(268): Ceres Seq. ID no. 13582318
LLPLLLSIFSIGNTLRKIKRIDSSIKTRKKKEHVRHVRLCISCAVSHSVRKPQNIHTPSFFLLLFMAEIPKLDLSSSCFDNGEPLDSEQKSQKIFVSDHINAFQYADEKADSFVIDMDAFSSGHNKDATNANSRITLQRSLSRKGSQRLGDWKLNNNATLYDKDTVPAICSPKGTLVGPFTPEKPAGMAVGPMGHSMNPHVHNLTADNIPTESKCSITRRNSFRRPSSWAIDPKRVLLFFATLSSMGTMLLIYFTLTISKQSAEEYGG

SEQ ID NO: 3755 - protein, 203 aa, Glycine max
  misc_feature (1)..(203): Ceres Seq. ID no. 13582319
MAEIPKLDLSSSCFDNGEPLDSEQKSQKIFVSDHINAFQYADEKADSFVIDMDAFSSGHNKDATNANSRITLQRSLSRKGSQRLGDWKLNNNATLYDKDTVPAICSPKGTLVGPFTPEKPAGMAVGPMGHSMNPHVHNLTADNIPTESKCSITRRNSFRRPSSWAIDPKRVLLFFATLSSMGTMLLIYFTLTISKQSAEEYGG

SEQ ID NO: 3756 - protein, 152 aa, Glycine max
  misc_feature (1)..(152): Ceres Seq. ID no. 13582320
MDAFSSGHNKDATNANSRITLQRSLSRKGSQRLGDWKLNNNATLYDKDTVPAICSPKGTLVGPFTPEKPAGMAVGPMGHSMNPHVHNLTADNIPTESKCSITRRNSFRRPSSWAIDPKRVLLFFATLSSMGTMLLIYFTLTISKQSAEEYGG

SEQ ID NO: 3757 - DNA, 1479 bp, Glycine max
  misc_feature (1)..(1479): Ceres Seq. ID no. 13582321
aattactagttctttctggctctgccgctgtctgtttgcgaacgccattacgttatacttgcatctaaacagcatttcacaggtgacgatactgattgagaggtagaaatgcctggtttcagcagtgtaggaaccttcaagatatttgtcgggaacttggcagaaaaaacagtatctgctgatattagacccttattcgagaaatatggaaaagttatcgaatgtgatgtggttaaggattttggatttgtgcatatggaaaatgaagagtcaggcagagacgccattcaaaatctaaatggttatctggtccatggatcagcaatgaaagtggaagctgccaccagtaggaaggggccgaacacacccacaacgaaaattttcgtgggcaacctctcagataacacaagagcacctcaagttcgctcactctttactaaatacggcacagttgtggaatgtgacattgtcagaaactatggatttgtgcacattgattgtccagacgtaaacaaaatggtagaggaactgaatggtcaagtggttgatggacagccaatgaaagtacaaatatcaacaagcaaagttcgccaaaggcctggaatgggcaatccagaacaatgctacagaatgggcccagatcgtttccgtggaagaatgggctttggaagagacccttacccacccccaccaccacccccattcctgagagacaggatgcttagtggaggatttggcggaaaggacagttactacgaccgctattatgacaggccagctgcacgatttgatgaccgggactcatttgataggaggttgccccctcttcctccacgagacttaggaccacgcagagattttatgcctccccctcccatcccaccccgtgagccactccctccccttggtcttaggggcccaccctcctccctgagagactcctttgaacgttccatgtatagccgtcggtcaccaccaccgccttctgccagatatggccgcctctatgatgactattccagggactcatatgatgatcgcagaattggcctgcgaggggcgtcaccgcgccggttcacgccgtattaattactcgctcgggtaatgattggtgagcgagcggtaacggagcggtacgtatcaacagccgacgaccgttccatatgttgacgattacatcttattttatttaagaacctttattgatgtcacactgttggtgactgtcatcacgccatttaatttgtttactatagataatatgtataatgtagttgacgtacattaagtcaaatccgtgcggcttacaatgcattaaaagtcgtgctcggataactgttgtgtgttttgtatgagtcatgttttatatatgtagtaaccgagcaaatgttttgctttctgtcttattaaagaaataaaaccaaaaaaaaaaaaaaaaaagcttatcgataccgtcgacctcgagggggggcccggtac

SEQ ID NO: 3758 - protein, 326 aa, Glycine max
  misc_feature (1)..(326): Ceres Seq. ID no. 13582322
MPGFSSVGTFKIFVGNLAEKTVSADIRPLFEKYGKVIECDVVKDFGFVHMENEESGRDAIQNLNGYLVHGSAMKVEAATSRKGPNTPTTKIFVGNLSDNTRAPQVRSLFTKYGTVVECDIVRNYGFVHIDCPDVNKMVEELNGQVVDGQPMKVQISTSKVRQRPGMGNPEQCYRMGPDRFRGRMGFGRDPYPPPPPPPFLRDRMLSGGFGGKDSYYDRYYDRPAARFDDRDSFDRRLPPLPPRDLGPRRDFMPPPPIPPREPLPPLGLRGPPSSLRDSFERSMYSRRSPPPPSARYGRLYDDYSRDSYDDRRIGLRGASPRRFTPY

SEQ ID NO: 3759 - protein, 277 aa, Glycine max
  misc_feature (1)..(277): Ceres Seq. ID no. 13582323
MENEESGRDAIQNLNGYLVHGSAMKVEAATSRKGPNTPTTKIFVGNLSDNTRAPQVRSLFTKYGTVVECDIVRNYGFVHIDCPDVNKMVEELNGQVVDGQPMKVQISTSKVRQRPGMGNPEQCYRMGPDRFRGRMGFGRDPYPPPPPPPFLRDRMLSGGFGGKDSYYDRYYDRPAARFDDRDSFDRRLPPLPPRDLGPRRDFMPPPPIPPREPLPPLGLRGPPSSLRDSFERSMYSRRSPPPPSARYGRLYDDYSRDSYDDRRIGLRGASPRRFTPY

SEQ ID NO: 3760 - protein, 254 aa, Glycine max
  misc_feature (1)..(254): Ceres Seq. ID no. 13582324
MKVEAATSRKGPNTPTTKIFVGNLSDNTRAPQVRSLFTKYGTVVECDIVRNYGFVHIDCPDVNKMVEELNGQVVDGQPMKVQISTSKVRQRPGMGNPEQCYRMGPDRFRGRMGFGRDPYPPPPPPPFLRDRMLSGGFGGKDSYYDRYYDRPAARFDDRDSFDRRLPPLPPRDLGPRRDFMPPPPIPPREPLPPLGLRGPPSSLRDSFERSMYSRRSPPPPSARYGRLYDDYSRDSYDDRRIGLRGASPRRFTPY

SEQ ID NO: 3761 - DNA, 1572 bp, Glycine max
  misc_feature (1)..(1572): Ceres Seq. ID no. 13582332
gaacacaagacaacaacaacaaatcttaagttggctttcttctcttttgttcgaccgtgtcacgtgcgagaacaatgagaattgccattttccactccctatctaaacctttgaatcttattcgattcaatttcatcacaacttaaataccatcgcatgttcattcattgatggtcatgttcttcccttaaaccttcctcaaaaagtcaaaattgaaaacctttctctctcttaactccttctcgtcatcgccccaaagcttctcaacaacatgacggataatgaagaaccgatgatcgtacctggatcgatgtctgaattagcgtttaataaatataagcgatggcaatggtggtgtcttgtgacactcagcatagcctttcttatagttggccaatctgctgctgttatccttggaagattttattatgatcagggtggaaatagtaaatggatggctactctagttcaaactgctgccttcccgatcttgttcattccattatttacaattccttcacctccagaggcttcaacttctgcttcacctcccatcaaaattattcttttgatatattttggtcttggagtcttaattgctgctgacaatatgatgtactccactggactcttatacctctcggcttctacctattcgctgatttgtgcatcacagttagcttttaatgcagttttctcatattttatcaattctcaaaagttcactgccttgattataaactctacagtggttctcactttatctgctgcactccttgctgttaacgaagacacagatgaaccatctggtttctccaagggaaagtacattattggtttcctatgtacccttggagcttctgcagtgtactctcttttgctttccctcatgcagctgacctttgagaaggttctgaagaaggaaacattttctgttgttttggaaatgcaaatctacacatcattcgttgcctctggtgcttctgtcataggcctatttgcaagtggggaatggcgtactttgcatggagaaatggagggttttcagaaaggatatgttgcttatgttatgactttggtttggacttcaatagcctggcaggtatgctctgttggtgttgttggcttgatcttcctagtgtcttctctctactccaatgttataagcacagtttctttagccgtaactcctattgctgctgttatagtttttcatgataagatgaatggggtgaagataatttctatgcttttggctctatggggttttgcctcttatatttatcagaattatcttgatgattcaaagacaagacatgcacaagctgctactaagtcccaaaatgattcttcatgttgagaatattcaatttggtcatacctttgtcgaagtttccttttttctttttagatttaaatccttcagtacaccattcgctagctttagattttatttttccttcagtctcactgaacttgtgaggtagtatagttatgaagttattggtcattctagattattgctctctcatttaagaaatgaaaagtttattggtgtctcggactggttgg

SEQ ID NO: 3762 - protein, 362 aa, Glycine max
  misc_feature (1)..(362): Ceres Seq. ID no. 13582333
MTDNEEPMIVPGSMSELAFNKYKRWQWWCLVTLSIAFLIVGQSAAVILGRFYYDQGGNSKWMATLVQTAAFPILFIPLFTIPSPPEASTSASPPIKIILLIYFGLGVLIAADNMMYSTGLLYLSASTYSLICASQLAFNAVFSYFINSQKFTALIINSTVVLTLSAALLAVNEDTDEPSGFSKGKYIIGFLCTLGASAVYSLLLSLMQLTFEKVLKKETFSVVLEMQIYTSFVASGASVIGLFASGEWRTLHGEMEGFQKGYVAYVMTLVWTSIAWQVCSVGVVGLIFLVSSLYSNVISTVSLAVTPIAAVIVFHDKMNGVKIISMLLALWGFASYIYQNYLDDSKTRHAQAATKSQNDSSC

SEQ ID NO: 3763 - protein, 355 aa, Glycine max
  misc_feature (1)..(355): Ceres Seq. ID no. 13582334
MIVPGSMSELAFNKYKRWQWWCLVTLSIAFLIVGQSAAVILGRFYYDQGGNSKWMATLVQTAAFPILFIPLFTIPSPPEASTSASPPIKIILLIYFGLGVLIAADNMMYSTGLLYLSASTYSLICASQLAFNAVFSYFINSQKFTALIINSTVVLTLSAALLAVNEDTDEPSGFSKGKYIIGFLCTLGASAVYSLLLSLMQLTFEKVLKKETFSVVLEMQIYTSFVASGASVIGLFASGEWRTLHGEMEGFQKGYVAYVMTLVWTSIAWQVCSVGVVGLIFLVSSLYSNVISTVSLAVTPIAAVIVFHDKMNGVKIISMLLALWGFASYIYQNYLDDSKTRHAQAATKSQNDSSC

SEQ ID NO: 3764 - protein, 349 aa, Glycine max
  misc_feature (1)..(349): Ceres Seq. ID no. 13582335
MSELAFNKYKRWQWWCLVTLSIAFLIVGQSAAVILGRFYYDQGGNSKWMATLVQTAAFPILFIPLFTIPSPPEASTSASPPIKIILLIYFGLGVLIAADNMMYSTGLLYLSASTYSLICASQLAFNAVFSYFINSQKFTALIINSTVVLTLSAALLAVNEDTDEPSGFSKGKYIIGFLCTLGASAVYSLLLSLMQLTFEKVLKKETFSVVLEMQIYTSFVASGASVIGLFASGEWRTLHGEMEGFQKGYVAYVMTLVWTSIAWQVCSVGVVGLIFLVSSLYSNVISTVSLAVTPIAAVIVFHDKMNGVKIISMLLALWGFASYIYQNYLDDSKTRHAQAATKSQNDSSC

SEQ ID NO: 3765 - DNA, 1660 bp, Glycine max
  misc_feature (1)..(1660): Ceres Seq. ID no. 13582346
ctttcttctttttgttgtctcaaaatgatgagtgcaagtgcaggtgcaagaaataggtctccgttcacacaaactcagtggcaagagcttgagcaacaagctcttgtttttaagtacatggttacaggaacacctatcccaccagatctcatctactctattaaaagaagtctagacacttcaatttcttcaaggctcttcccacatcatccaagtaagtgctttttcagtttagctagcatattactaatatttttttttctaaggccatggatacttttctgttttttttaataaaatactctagtggttattattatatatgtcttacttttttatgagggacaaataaaatttagagcctggtttgttgtcataactctctctggctgcagttgggtggggatgttttgaaatgggatttggcagaaaagtagacccagagccagggaggtgcagaagaacagatggcaagaaatggagatgttcaaaggaggcatatccagactcaaagtactgtgaaagacacatgcacagaggcagaaaccgttcaagaaagcctgtggaagtttcttcagcaacaagcaccgccacaaacacctcccaaacaatcccatcatcttataccagaaacctttccttgaccaataacagtaaccccaacataacaccaccaccaccaccctcttctttccctttctctcatttgccctcttctatgcctattgatcagtcccaacccttttcccaatcctaccaaaactcttctctcaatcccttcttctactcccaatcaacctcctctagacccccagatgctgattttccaccccaagatgccaccacccaccacctattcatggactctgctggctcttattctcatgatgaaaagaattataggcatgttcatggaataagggaagatgtggatgagagagctttcttcccagaagcatcaggatcagctaggagctatacagactcgtaccaacaactatcaatgagctcctacaagtcctattcaaactccaactttcagaacattaataatgatgccaccaccaacccaagacagcaagagcagcaactacaacaacaacaacactgttttgttttagggacagacttcaaatcaacaaggccaagcaaagagaaagaagctgagacaacaacaggtcagagaccccttcaccgtttctttggggagtggccaccaaagaacacaacaacagattcctggctagatcttgcttccaactccagaatccaaaccgatgaatgatgttttttttctagttattattatgagctggtgcatacggccaagagagagagagagagagacttgttgttgataaagatcatcagtgttttgtggctggggtgattttcttttgcaaaaggtgtgatgttattgcgttatgtaggggaccacagtaggatttgtgcctttgcttttctagatatttatatttatatatttattatatatatgtttcttttctttcttccccttgaagaaatgttcaacaacaaaaaaaaaaaaaacatgtctcagatttgcacactatgtttgtttgactggaaagcatattaagttgctctgcagtctgctttataatgggtggtagcaaggacaatgcaaataagttctctg

SEQ ID NO: 3766 - protein, 289 aa, Glycine max
  misc_feature (1)..(289): Ceres Seq. ID no. 13582347
MGFGRKVDPEPGRCRRTDGKKWRCSKEAYPDSKYCERHMHRGRNRSRKPVEVSSATSTATNTSQTIPSSYTRNLSLTNNSNPNITPPPPPSSFPFSHLPSSMPIDQSQPFSQSYQNSSLNPFFYSQSTSSRPPDADFPPQDATTHHLFMDSAGSYSHDEKNYRHVHGIREDVDERAFFPEASGSARSYTDSYQQLSMSSYKSYSNSNFQNINNDATTNPRQQEQQLQQQQHCFVLGTDFKSTRPSKEKEAETTTGQRPLHRFFGEWPPKNTTTDSWLDLASNSRIQTDE

SEQ ID NO: 3767 - protein, 251 aa, Glycine max
  misc_feature (1)..(251): Ceres Seq. ID no. 13582348
MHRGRNRSRKPVEVSSATSTATNTSQTIPSSYTRNLSLTNNSNPNITPPPPPSSFPFSHLPSSMPIDQSQPFSQSYQNSSLNPFFYSQSTSSRPPDADFPPQDATTHHLFMDSAGSYSHDEKNYRHVHGIREDVDERAFFPEASGSARSYTDSYQQLSMSSYKSYSNSNFQNINNDATTNPRQQEQQLQQQQHCFVLGTDFKSTRPSKEKEAETTTGQRPLHRFFGEWPPKNTTTDSWLDLASNSRIQTDE

SEQ ID NO: 3768 - protein, 188 aa, Glycine max
  misc_feature (1)..(188): Ceres Seq. ID no. 13582349
MPIDQSQPFSQSYQNSSLNPFFYSQSTSSRPPDADFPPQDATTHHLFMDSAGSYSHDEKNYRHVHGIREDVDERAFFPEASGSARSYTDSYQQLSMSSYKSYSNSNFQNINNDATTNPRQQEQQLQQQQHCFVLGTDFKSTRPSKEKEAETTTGQRPLHRFFGEWPPKNTTTDSWLDLASNSRIQTDE

SEQ ID NO: 3769 - DNA, 425 bp, Glycine max
  misc_feature (1)..(425): Ceres Seq. ID no. 13582358
aaaaaaaattttttttttttttttttttttttaaaatttttttttttttttttttccttaaaaatttttttttttttttttttttttttttttttttttttttttttttttttttttttttttttttttagatcaaacacccattttattataattttataaatttacactacgtacaagaacagcgagtatatttcccatcattcttacagatgccagacccaaacccttctctcctacaacattgcatacaaaaatcattatggcctattatgcatttcagtggaccacagtcttgtgcaactgttgcgggtcctgaagtgagaacaaatgcaacaaatataattcccaaaagaagagcttgatcgaaacgagaagccatgtaagaaggattttattttctaattttggtctttgtttctcgt

SEQ ID NO: 3770 - protein, 53 aa, Glycine max
  misc_feature (1)..(53): Ceres Seq. ID no. 13582359
KKNFFFFFFFLKFFFFFFSLKIFFFFFFFFFFFFFFFFFFFFFRSNTHFIIIL

SEQ ID NO: 3771 - protein, 50 aa, Glycine max
  misc_feature (1)..(50): Ceres Seq. ID no. 13582360
MPDPNPSLLQHCIQKSLWPIMHFSGPQSCATVAGPEVRTNATNIIPKRRA

SEQ ID NO: 3772 - protein, 42 aa, Glycine max
  misc_feature (1)..(42): Ceres Seq. ID no. 13582361
KKFFFFFFFFKIFFFFFFLKNFFFFFFFFFFFFFFFFFFFFF

SEQ ID NO: 3773 - DNA, 552 bp, Glycine max
  misc_feature (1)..(552): Ceres Seq. ID no. 13582501
ngaaatgagagatgagccacaggttggtggcatctatgttaggctgtttctgaaagatcccaaattccctcttagaaaccctaaaaggttcttggaaggtctactagatcagtatttgtcgtccattgctgccacccattatgaggtgcaggttattgatccagagcttcctttgctcctgtcggctgcactggtttccttactgcgtgtgcatcctgcactagcagatcatgtnggatatcttggatatgtaccaaaactagttgctgctgttgcatttgagggaaggcgagaaacaatgtcatcaggtgaggtaaacaatgggagacatgcagaacaaacatatgacccagataaggaatcagcagagaacacacaaactcctcaagaacgtgtgcgcctgagttgtttgcgtgtcttgcatcaacttgcagctagtaccacctgtgcggaggccatggcagcaaccagtgttggaacacctcaggttgttccgctgctaatgaaagccatagggtggcaaggtggaagcatttnagctctngagactct

SEQ ID NO: 3774 - protein, 183 aa, Glycine max
  misc_feature (1)..(183): Ceres Seq. ID no. 13582502
  misc_feature (78)..(78): Xaa is any aa, unknown or other
  misc_feature (179)..(179): Xaa is any aa, unknown or other
  misc_feature (181)..(181): Xaa is any aa, unknown or other
EMRDEPQVGGIYVRLFLKDPKFPLRNPKRFLEGLLDQYLSSIAATHYEVQVIDPELPLLLSAALVSLLRVHPALADHXGYLGYVPKLVAAVAFEGRRETMSSGEVNNGRHAEQTYDPDKESAENTQTPQERVRLSCLRVLHQLAASTTCAEAMAATSVGTPQVVPLLMKAIGWQGGSIXAXET

SEQ ID NO: 3775 - protein, 182 aa, Glycine max
  misc_feature (1)..(182): Ceres Seq. ID no. 13582503
  misc_feature (77)..(77): Xaa is any aa, unknown or other
  misc_feature (178)..(178): Xaa is any aa, unknown or other
  misc_feature (180)..(180): Xaa is any aa, unknown or other
MRDEPQVGGIYVRLFLKDPKFPLRNPKRFLEGLLDQYLSSIAATHYEVQVIDPELPLLLSAALVSLLRVHPALADHXGYLGYVPKLVAAVAFEGRRETMSSGEVNNGRHAEQTYDPDKESAENTQTPQERVRLSCLRVLHQLAASTTCAEAMAATSVGTPQVVPLLMKAIGWQGGSIXAXET

SEQ ID NO: 3776 - DNA, 1540 bp, Glycine max
  misc_feature (1)..(1540): Ceres Seq. ID no. 13582534
aaaattttgcacaacaggttatgaaaatccacgagaagcaaccggtcgctgcctgtggatattgaggttccacaagtggtacttcctaatccggatcagcaactttcggatgatggcagcaccttggtttctaacggcggaacctttgagttgggtttcttcaatcccgggagttccaataaccgctatgtcggaatctggtacaaaaaaatctctattaaaacagtagtttgggttgccaaccgtgacaacccaatagtcagacacaactcaagcaagctggtcataaggcaagagggaaacctcgtactcctcagcaacaacaaccagtctcttctttggactacaaatgtaacaaaaaaggcttcgagttcgagtccaattgtgcaactcttggacactggaaacttggtaattaaagatggtatcaacgaagagagtgtttttctgtggcaaagctttgaccatccttgtgacacgctattgtcgggaatgaagcttgggtgggacttaagaactgggcttaaccggcgtcttacttcttggaaaagctgggatgatccgtcttcgggagacattgtttgggaggtagtgataggaaacaatcctgaattggtcatgtggaagagtaaagttgactactttaggactgggccttatactgggaatatgttcagtggagtatatgcgccgaggaataacccactttataattggaaatttgtgagtaacaaagatgaagtgtatttccaatacaccttgagtaatagttttgtggtttctataattgttttgaaccaaacccttaatcttcgtcaacgcctcacttggattcccgataccaagacttggacggtttaccaatccttgccactagatagttgtgatgtttataacacttgtgggccaaatggaaattgcatcattgctgggtcgccaatttgccagtgcttagacgggttcaagccgaaatcgccccaacagtggaacgcaatggattggaggcaagggtgtgtgcgcagtgaagagtggagttgtggggtaaaaaataaggatggttttcaaagacttgctagtatgaaactgccaaacactacattttcttgggttaacgaaagtataacacttgaggagtgtagggccaaatgtttggaaaactgttcgtgcacagcttattcgaacttggacacaaggggaggaggtagtgggtgctccatttgggttggtgaacttgttgacatgagagatgtaaaaagcggacaagatttatatgttcgaatagccacttcggatccagatggtaaacatgagcgtcaaaaaaaggtaatcttggtggttgcgatcactgtttcgctggtccttgtgatgttattagcattctgtgtttacatgatcaagaaaaaatataaaggtgagtttcttacctagaaatcttttttatttcacatacattttaaaatttaagagaacacctacaatgtcataaatagaatatttacgcacttgtgaatctcataaattcattcttcatgtttttctc

SEQ ID NO: 3777 - protein, 311 aa, Glycine max
  misc_feature (1)..(311): Ceres Seq. ID no. 13582535
MKLGWDLRTGLNRRLTSWKSWDDPSSGDIVWEVVIGNNPELVMWKSKVDYFRTGPYTGNMFSGVYAPRNNPLYNWKFVSNKDEVYFQYTLSNSFVVSIIVLNQTLNLRQRLTWIPDTKTWTVYQSLPLDSCDVYNTCGPNGNCIIAGSPICQCLDGFKPKSPQQWNAMDWRQGCVRSEEWSCGVKNKDGFQRLASMKLPNTTFSWVNESITLEECRAKCLENCSCTAYSNLDTRGGGSGCSIWVGELVDMRDVKSGQDLYVRIATSDPDGKHERQKKVILVVAITVSLVLVMLLAFCVYMIKKKYKGEFLT

SEQ ID NO: 3778 - protein, 269 aa, Glycine max
  misc_feature (1)..(269): Ceres Seq. ID no. 13582536
MWKSKVDYFRTGPYTGNMFSGVYAPRNNPLYNWKFVSNKDEVYFQYTLSNSFVVSIIVLNQTLNLRQRLTWIPDTKTWTVYQSLPLDSCDVYNTCGPNGNCIIAGSPICQCLDGFKPKSPQQWNAMDWRQGCVRSEEWSCGVKNKDGFQRLASMKLPNTTFSWVNESITLEECRAKCLENCSCTAYSNLDTRGGGSGCSIWVGELVDMRDVKSGQDLYVRIATSDPDGKHERQKKVILVVAITVSLVLVMLLAFCVYMIKKKYKGEFLT

SEQ ID NO: 3779 - protein, 252 aa, Glycine max
  misc_feature (1)..(252): Ceres Seq. ID no. 13582537
MFSGVYAPRNNPLYNWKFVSNKDEVYFQYTLSNSFVVSIIVLNQTLNLRQRLTWIPDTKTWTVYQSLPLDSCDVYNTCGPNGNCIIAGSPICQCLDGFKPKSPQQWNAMDWRQGCVRSEEWSCGVKNKDGFQRLASMKLPNTTFSWVNESITLEECRAKCLENCSCTAYSNLDTRGGGSGCSIWVGELVDMRDVKSGQDLYVRIATSDPDGKHERQKKVILVVAITVSLVLVMLLAFCVYMIKKKYKGEFLT

SEQ ID NO: 3780 - DNA, 540 bp, Glycine max
  misc_feature (1)..(540): Ceres Seq. ID no. 13582542
caatgaatttttgttatacaataaagaatatatatgatgatatacttatgtgttattgcgtgcatgtgtgtatggtattgataggagctagagaatccttccgttttcggagaaggtcaacatcagatgcgtacgagaagacaggccagaacagatcaagctcttcttctcctttcgatgtgtgagaaatgagcctgaccactatatatcctccatggatcgatgactgaaataaaatatatatagtagtttgtttttctctagcctttgcggatgatgctgtatccatttttgtttatgttaattttgtgcatatatatagtatatagtatatagcatatgtatgaatatgtttacgagttcatcagttgagcgattgaagtcctgaaacgatcgaggtagctgtgtgtggtttaacagcttggtcttgttttattgttgaactggtttatggttcggaagctgtaaataagtaataacgtagtataggtgtgtttttgttacgtgtactttgtatatatataaaagcctttccattcc

SEQ ID NO: 3781 - protein, 60 aa, Glycine max
  misc_feature (1)..(60): Ceres Seq. ID no. 13582543
MNFCYTIKNIYDDILMCYCVHVCMVLIGARESFRFRRRSTSDAYEKTGQNRSSSSSPFDV

SEQ ID NO: 3782 - protein, 45 aa, Glycine max
  misc_feature (1)..(45): Ceres Seq. ID no. 13582544
MCYCVHVCMVLIGARESFRFRRRSTSDAYEKTGQNRSSSSSPFDV

SEQ ID NO: 3783 - protein, 37 aa, Glycine max
  misc_feature (1)..(37): Ceres Seq. ID no. 13582545
MVLIGARESFRFRRRSTSDAYEKTGQNRSSSSSPFDV

SEQ ID NO: 3784 - DNA, 520 bp, Glycine max
  misc_feature (1)..(520): Ceres Seq. ID no. 13582595
atgacagtacttctccacgactagccaccttaaagtacaacaatgatgctcttcgtcgcctaattggaccaatgggtgctctaaagagaaaaatggaagaggaaacaggtgcacggatgtctgtaggtgatggaacacttacaatagttgctaagaatcaatctgtaatggacaaaatactagaaaagattgattttattgtgggccgtcaaattgaagttggaggcatctacacaggtattgtcaccactataaaagagtatggagcttttgtggagtttaatggtggccagcagggcctactccacatttctgagttgtcacatgaaccggtttcccaagtttcagaggttgtctctgttggccagaagctgtctttgatgtgcataggccaaaatgttcatggtaacattaaattatcccttaaagcaacttcgcctcgtcctggaggattggagactaatgatgcagttgaagaatctgttgcatctgcaaaagaaacagccaacatttgggcacc

SEQ ID NO: 3785 - protein, 172 aa, Glycine max
  misc_feature (1)..(172): Ceres Seq. ID no. 13582596
DSTSPRLATLKYNNDALRRLIGPMGALKRKMEEETGARMSVGDGTLTIVAKNQSVMDKILEKIDFIVGRQIEVGGIYTGIVTTIKEYGAFVEFNGGQQGLLHISELSHEPVSQVSEVVSVGQKLSLMCIGQNVHGNIKLSLKATSPRPGGLETNDAVEESVASAKETANIWA

SEQ ID NO: 3786 - protein, 149 aa, Glycine max
  misc_feature (1)..(149): Ceres Seq. ID no. 13582597
MGALKRKMEEETGARMSVGDGTLTIVAKNQSVMDKILEKIDFIVGRQIEVGGIYTGIVTTIKEYGAFVEFNGGQQGLLHISELSHEPVSQVSEVVSVGQKLSLMCIGQNVHGNIKLSLKATSPRPGGLETNDAVEESVASAKETANIWA

SEQ ID NO: 3787 - protein, 142 aa, Glycine max
  misc_feature (1)..(142): Ceres Seq. ID no. 13582598
MEEETGARMSVGDGTLTIVAKNQSVMDKILEKIDFIVGRQIEVGGIYTGIVTTIKEYGAFVEFNGGQQGLLHISELSHEPVSQVSEVVSVGQKLSLMCIGQNVHGNIKLSLKATSPRPGGLETNDAVEESVASAKETANIWA

SEQ ID NO: 3788 - DNA, 1493 bp, Glycine max
  misc_feature (1)..(1493): Ceres Seq. ID no. 13582609
atttctttgggattcttgcccttgttttggtgatgccatgggagttagctgtttttgtttcctttctctctgatagaaaaagaactaagaatgggcaaatctttattgatttacttaaaaaaatatcaatatcctttaaaatatacaggcaccagagaattttttattttttatttttaatgttaaaaggtcaatgaatatgattatgagatggaagggagtaccttctttggcttcttcctaagtcctaaccttgacgaggccaattccattcattttgatgtgtctctgttttcaacaaacgttcacaacaacacatttcgccgtttcaaatcactacttaacaccggggcacatagagagagagagacatcatggtctcttctaatggactagctacgagtcagccacttttttcttttggattgatttctgatgtccaatatgctgacattcctgatggccgttcattccttggtgttccacggtattatagacacagtcttctcatattgcagagagcagttaaagaatggaacactcatcagaagcacaagtttgtgattaattttggagattttgttgatgggttttgtcccaaagatcaatctcttgatactgtaaagaaagttgttgatgaatttgagatgttcacaggaggacctgtgtatcatatgattggcaatcactgcctatacaatcttcctcgcagcaagttaccttcattactgaagatccatactcttgatggccgtgcatactatgatttctcgccagtgcctgaatatagatttgttgttctggatgcctatgacatcagtgccattggttggcctcaagatcatccaaaaacactggaggccttgaaaatcctaagggagaagaatccaaatgaagataagaacagtccaacaaatttggagggtcctgaacgaaggtttgtaatgtttaatggagctgttggaaaggaacaggtcgaatggttagatggtgttctcttggagtcaacaaacttgaaacagaaggtggttgtctgctgccatctgcctctacatcctggtgcggcaactgaagagacactgttgtggaattacgatgaagtaatgaatttgatacacagatacaattgcgttaaggtctgtcttgcagggcatgatcataaaggcggatactctattgattctcatgggatacaccatagagtttttgaagctgctttggaatgccctcctggtacggatgcatttggatacattgatgtctatgatgacaggatatcacttgttggaactgacagaatgaaaagtacagagatggattttactcccccaagttaatttgtatgacaggatgtcttcacgtttgtaaaaatacctattattttttcactaatgtttgaaatagtacctatcatcttgttctagtcctacctacagggaagtttgtatttaaagttggaataacttaaattgagttggtactgttcatgaatc

SEQ ID NO: 3789 - protein, 320 aa, Glycine max
  misc_feature (1)..(320): Ceres Seq. ID no. 13582610
MVSSNGLATSQPLFSFGLISDVQYADIPDGRSFLGVPRYYRHSLLILQRAVKEWNTHQKHKFVINFGDFVDGFCPKDQSLDTVKKVVDEFEMFTGGPVYHMIGNHCLYNLPRSKLPSLLKIHTLDGRAYYDFSPVPEYRFVVLDAYDISAIGWPQDHPKTLEALKILREKNPNEDKNSPTNLEGPERRFVMFNGAVGKEQVEWLDGVLLESTNLKQKVVVCCHLPLHPGAATEETLLWNYDEVMNLIHRYNCVKVCLAGHDHKGGYSIDSHGIHHRVFEAALECPPGTDAFGYIDVYDDRISLVGTDRMKSTEMDFTPPS

SEQ ID NO: 3790 - protein, 229 aa, Glycine max
  misc_feature (1)..(229): Ceres Seq. ID no. 13582611
MFTGGPVYHMIGNHCLYNLPRSKLPSLLKIHTLDGRAYYDFSPVPEYRFVVLDAYDISAIGWPQDHPKTLEALKILREKNPNEDKNSPTNLEGPERRFVMFNGAVGKEQVEWLDGVLLESTNLKQKVVVCCHLPLHPGAATEETLLWNYDEVMNLIHRYNCVKVCLAGHDHKGGYSIDSHGIHHRVFEAALECPPGTDAFGYIDVYDDRISLVGTDRMKSTEMDFTPPS

SEQ ID NO: 3791 - protein, 220 aa, Glycine max
  misc_feature (1)..(220): Ceres Seq. ID no. 13582612
MIGNHCLYNLPRSKLPSLLKIHTLDGRAYYDFSPVPEYRFVVLDAYDISAIGWPQDHPKTLEALKILREKNPNEDKNSPTNLEGPERRFVMFNGAVGKEQVEWLDGVLLESTNLKQKVVVCCHLPLHPGAATEETLLWNYDEVMNLIHRYNCVKVCLAGHDHKGGYSIDSHGIHHRVFEAALECPPGTDAFGYIDVYDDRISLVGTDRMKSTEMDFTPPS

SEQ ID NO: 3792 - DNA, 1412 bp, Glycine max
  misc_feature (1)..(1412): Ceres Seq. ID no. 13582619
agtcacttctcaccgtcactttagtcttctcttgcggtggcacaaactatatcacgtttcgaaagagtaacttggtgaccggtgaggtgttcctagttaccatacgaaagaggattttggtgtaggatgggatcgatagagaacgcttccaaaccaaggaaggaaaatccgaaatttgaattgccagcgggttttagatttcatccaacagatgaagaactcataaatcaatacctcacaaagaaggttgttgacaactgtttctgtgctatagccattggtgaggttgatttgaacaagtgtgagccatgggatttgcctgggttggctaaaatgggtgaaactgagtggtattttttctgtgtgagggacagaaaattcccaactggtataaggactaatagggccactgatattggttattggaaagccacaggaaaagacaaggagataataatggagaatgcactcattgggatgaagaaaaccttggttttctacaagggaagagctcctaaaggtgaaaagacaaactgggttatgcatgaatataggttggaagggaaacataatcaacccaaacctggaaagagtgaatgggtgatttgtagagtctttgagaagagtcgttgtgggaagaaaatgcatgttccaaagtgtgggaggttcaacaacccctttggagaggaaccatcatcaggtgcttctctattgcctcctttgatggattcttctccatacaacagtgaaacaagaaccaccactgctggggagttgtctcaggtgacatgcttctctgatccaaatcaaactgaggatcagaacaacacacatgatgacattgttgatagcatggaaactcctattttgaacttctcacccttttcaaggcctgatgatgcatccactttggccaaagcaaccctttcttcagcctcaaaccaatcagcacagattgcacaccaaattggggaatcacagttcccagattattgttatgcgcctcaagaaccgtccatgttgaggatgctgatggaaaaccatgaaccctgtgcgaagcaaactcagaaagaagagtttcctgagggaagagactttgatggagatatctcatctatgatatacagcagtgacatgataaacagaatgtttgggaatcaagaacattcttcatcagcttctgcagggcctgtggacactgatttcctatggaattactgaaggttaaggaatattatttagtgttaagacagaaaatatgttaattatatttatattcatatgatacatacaggttggttacctgcaacttcatgaacttattgtaggaattatgggaaatgcatgaaattgaatttcccccctctggttgataactttgataaaaactagtgatgaatagtccatatgtt

SEQ ID NO: 3793 - protein, 364 aa, Glycine max
  misc_feature (1)..(364): Ceres Seq. ID no. 13582620
MGSIENASKPRKENPKFELPAGFRFHPTDEELINQYLTKKVVDNCFCAIAIGEVDLNKCEPWDLPGLAKMGETEWYFFCVRDRKFPTGIRTNRATDIGYWKATGKDKEIIMENALIGMKKTLVFYKGRAPKGEKTNWVMHEYRLEGKHNQPKPGKSEWVICRVFEKSRCGKKMHVPKCGRFNNPFGEEPSSGASLLPPLMDSSPYNSETRTTTAGELSQVTCFSDPNQTEDQNNTHDDIVDSMETPILNFSPFSRPDDASTLAKATLSSASNQSAQIAHQIGESQFPDYCYAPQEPSMLRMLMENHEPCAKQTQKEEFPEGRDFDGDISSMIYSSDMINRMFGNQEHSSSASAGPVDTDFLWNY

SEQ ID NO: 3794 - protein, 295 aa, Glycine max
  misc_feature (1)..(295): Ceres Seq. ID no. 13582621
MGETEWYFFCVRDRKFPTGIRTNRATDIGYWKATGKDKEIIMENALIGMKKTLVFYKGRAPKGEKTNWVMHEYRLEGKHNQPKPGKSEWVICRVFEKSRCGKKMHVPKCGRFNNPFGEEPSSGASLLPPLMDSSPYNSETRTTTAGELSQVTCFSDPNQTEDQNNTHDDIVDSMETPILNFSPFSRPDDASTLAKATLSSASNQSAQIAHQIGESQFPDYCYAPQEPSMLRMLMENHEPCAKQTQKEEFPEGRDFDGDISSMIYSSDMINRMFGNQEHSSSASAGPVDTDFLWNY

SEQ ID NO: 3795 - protein, 254 aa, Glycine max
  misc_feature (1)..(254): Ceres Seq. ID no. 13582622
MENALIGMKKTLVFYKGRAPKGEKTNWVMHEYRLEGKHNQPKPGKSEWVICRVFEKSRCGKKMHVPKCGRFNNPFGEEPSSGASLLPPLMDSSPYNSETRTTTAGELSQVTCFSDPNQTEDQNNTHDDIVDSMETPILNFSPFSRPDDASTLAKATLSSASNQSAQIAHQIGESQFPDYCYAPQEPSMLRMLMENHEPCAKQTQKEEFPEGRDFDGDISSMIYSSDMINRMFGNQEHSSSASAGPVDTDFLWNY

SEQ ID NO: 3796 - DNA, 570 bp, Glycine max
  misc_feature (1)..(570): Ceres Seq. ID no. 13582632
tgcttcatctactgtggtaatatctgaagcacttgctaaatttttgggcactgagggaagagagatgcaacaagctgaagccataagacttgtttgggagtacatcaagcttcaccatttggaggatcctttaaatgcaatggtgatattatgtgatgcaaagcttcaagagctacttggatgtgaaagcatttctgctttaggaataccagagatgttagcacgccatcatctatttaaacagtctgacacctgttagtgctgatcaattgttgccatataagggcatggtcagcccggaatgctggttatatgtttctgctcgctagatcgtataggaactttttacttattcatgtaacttcatttatctttttgttcactgatatgtgtaaactgtatgttgtctgacagttattaggttcgttgtttagaatgagaatgtataccttgagctaggcgagaagtatattgtatttaagatttgcccttgaggttactcgtgcattttatttttatcagttctaaatgtctaacctcaactgactgaaggaatctgaactcgaattt

SEQ ID NO: 3797 - protein, 85 aa, Glycine max
  misc_feature (1)..(85): Ceres Seq. ID no. 13582633
ASSTVVISEALAKFLGTEGREMQQAEAIRLVWEYIKLHHLEDPLNAMVILCDAKLQELLGCESISALGIPEMLARHHLFKQSDTC

SEQ ID NO: 3798 - protein, 64 aa, Glycine max
  misc_feature (1)..(64): Ceres Seq. ID no. 13582634
MQQAEAIRLVWEYIKLHHLEDPLNAMVILCDAKLQELLGCESISALGIPEMLARHHLFKQSDTC

SEQ ID NO: 3799 - DNA, 882 bp, Glycine max
  misc_feature (1)..(882): Ceres Seq. ID no. 13588995
cttcttcctagtgttacaacattccacaaacaactctttcttttaaattttataatattcttctgagtctgttttttttttttctcacaagaccattataccagatccagtttgaagagatcgagtagtatgagcagccagacgtcgaagccgaacgtggatggagtgcacatcgatgtgaaggttgtggagaggccaatgagagaaaggccctacgatctgttgctgcggtttcttggcctttcactcactcttgtggcagtcatcattgttggtgttgacaatgagaccaaagtcatctcctatgccgaaatgcagttcaaagccactgctaagtgggaatatgtctctgccattgtgtttttcttggtgataaacgcgatagcatgctcatacgcagctgcatcattggttatcacattgatggcaagaagcaatggaagaaaaaacgatgtgacactgttggggctaacagcgctagatcttgtgatgatggctttgttgttctcggccaatggtgcagcttgtgcagtgggagtgatagcacagaaggggaactcgcacgtgcaatggatgaaagtgtgcaacgtctttgatgcctattgtcgccacgtcactgcagcattggtcctctccatcattggatccacggtctttctcttgctcgtgctcctttctgttcttaaactccattacagaacaggaatttagatctcgatatgatatgatacacgctataatatatatttgtagggttaattaattaattgagggtgttcttgtacgtgtgaatcgtgtttttggcatagaccttgtgcacttgttgtggttgatgaagaacgccaaagcacttaaaagatatagatgctatatttaatttgg

SEQ ID NO: 3800 - protein, 193 aa, Glycine max
  misc_feature (1)..(193): Ceres Seq. ID no. 15220927
MSSQTSKPNVDGVHIDVKVVERPMRERPYDLLLRFLGLSLTLVAVIIVGVDNETKVISYAEMQFKATAKWEYVSAIVFFLVINAIACSYAAASLVITLMARSNGRKNDVTLLGLTALDLVMMALLFSANGAACAVGVIAQKGNSHVQWMKVCNVFDAYCRHVTAALVLSIIGSTVFLLLVLLSVLKLHYRTGI

SEQ ID NO: 3801 - protein, 170 aa, Glycine max
  misc_feature (1)..(170): Ceres Seq. ID no. 15220928
MRERPYDLLLRFLGLSLTLVAVIIVGVDNETKVISYAEMQFKATAKWEYVSAIVFFLVINAIACSYAAASLVITLMARSNGRKNDVTLLGLTALDLVMMALLFSANGAACAVGVIAQKGNSHVQWMKVCNVFDAYCRHVTAALVLSIIGSTVFLLLVLLSVLKLHYRTGI

SEQ ID NO: 3802 - protein, 132 aa, Glycine max
  misc_feature (1)..(132): Ceres Seq. ID no. 15220929
MQFKATAKWEYVSAIVFFLVINAIACSYAAASLVITLMARSNGRKNDVTLLGLTALDLVMMALLFSANGAACAVGVIAQKGNSHVQWMKVCNVFDAYCRHVTAALVLSIIGSTVFLLLVLLSVLKLHYRTGI

SEQ ID NO: 3803 - DNA, 644 bp, Glycine max
  misc_feature (1)..(644): Ceres Seq. ID no. 13593831
ggtgatttcattgcataatccattgactagaaatcccatattttccccccacattaactcacccaacccctctttctaaaaggcctcaaggatacactccggacttaattacgttattttgttagggtcaccgtttcgagatattctaaacttgtactgaaaaatatggagggaaaagaagaggacgtaagagttggagccaacaggtacggagagaggcagccaatagggaccgctgctcaggctaaagactacagagagccaccgtcggcgcctctcttcgaaccgggagagttgtcatcgtggtctttctatagggctggcatagcagagtttgtggccactttcttgttcctctacatcacagtgctgactgtgatgggtgtgttcaaatctaagagcaagtgttccactgtgggtatccaaggcattgcttgggcttttgggggaatgatctttgctcttgtttattccactgctggaatctcagggggtcatattaacccagcagtgacgtttgggctgttcttggcacgcaagctctctctgacaagggcaattttttacataatcatgcagtgcttgggagctatatgtggtgctggtgtagttaaggggttcgagccacacctctatgagaggct

SEQ ID NO: 3804 - protein, 159 aa, Glycine max
  misc_feature (1)..(159): Ceres Seq. ID no. 13593832
MEGKEEDVRVGANRYGERQPIGTAAQAKDYREPPSAPLFEPGELSSWSFYRAGIAEFVATFLFLYITVLTVMGVFKSKSKCSTVGIQGIAWAFGGMIFALVYSTAGISGGHINPAVTFGLFLARKLSLTRAIFYIIMQCLGAICGAGVVKGFEPHLYER

SEQ ID NO: 3805 - protein, 88 aa, Glycine max
  misc_feature (1)..(88): Ceres Seq. ID no. 13593833
MGVFKSKSKCSTVGIQGIAWAFGGMIFALVYSTAGISGGHINPAVTFGLFLARKLSLTRAIFYIIMQCLGAICGAGVVKGFEPHLYER

SEQ ID NO: 3806 - DNA, 920 bp, Glycine max
  misc_feature (1)..(920): Ceres Seq. ID no. 13593834
cccgtttcctacaagcatgcacttcctgcccaaattttgcatttgactggagcgtattgttagatatatatcttacctgcccctctactcagttctgggtttattacgcatgtttcatgtatccagccttcattggagcttgatcattatttgcatcccagacaaagaagatgaatcggggccaatcatacttcatttggattctttgggtcttcactctagtaaatcagtttttgataatattaaaagctatttgattgaagaaaagaactacatggatcgagaagacatggcttcagatgtttcaattgcggatagaatatggaagtgccttcctcgtagaatcgaatctcaaatcattcaggttccccaacagaagaatgactatgactgtggtctttttgtattgtacttcattgaacgtttcatggaggaggcaccggaaagactgaaaatgaaagatttagatatgtttggaaggcgatggttcaaacctcaagaggcgtccaatttgagagtgaaaatccgtaagttgcttgtagaaaaattacagaattcagtcacggataattgtaatttggaatcttctccttcatcatctgctggccctgcaactgattgtgttgagactgccagggattctcttactggccctgcaactgattgtgttgagaccaccgaggattctgtgacttaacatggcagaattgcaattgtcatttccttgaacgaacaatctgttgatattcgtatggttggtgccagttttttttttccttgtacagaagccagctattcagctggtaatttttggatagagttttcctatgacctggtaaatagtccatcagtctttaatccaagcaagggtggctaacagttggctgtgcagaaataacaaacaactctagttcctaacc

SEQ ID NO: 3807 - protein, 195 aa, Glycine max
  misc_feature (1)..(195): Ceres Seq. ID no. 13593835
MFHVSSLHWSLIIICIPDKEDESGPIILHLDSLGLHSSKSVFDNIKSYLIEEKNYMDREDMASDVSIADRIWKCLPRRIESQIIQVPQQKNDYDCGLFVLYFIERFMEEAPERLKMKDLDMFGRRWFKPQEASNLRVKIRKLLVEKLQNSVTDNCNLESSPSSSAGPATDCVETARDSLTGPATDCVETTEDSVT

SEQ ID NO: 3808 - protein, 140 aa, Glycine max
  misc_feature (1)..(140): Ceres Seq. ID no. 13593836
MDREDMASDVSIADRIWKCLPRRIESQIIQVPQQKNDYDCGLFVLYFIERFMEEAPERLKMKDLDMFGRRWFKPQEASNLRVKIRKLLVEKLQNSVTDNCNLESSPSSSAGPATDCVETARDSLTGPATDCVETTEDSVT

SEQ ID NO: 3809 - protein, 135 aa, Glycine max
  misc_feature (1)..(135): Ceres Seq. ID no. 13593837
MASDVSIADRIWKCLPRRIESQIIQVPQQKNDYDCGLFVLYFIERFMEEAPERLKMKDLDMFGRRWFKPQEASNLRVKIRKLLVEKLQNSVTDNCNLESSPSSSAGPATDCVETARDSLTGPATDCVETTEDSVT

SEQ ID NO: 3810 - DNA, 1030 bp, Glycine max
  misc_feature (1)..(1030): Ceres Seq. ID no. 13593846
gattgaaaatcacgaaaatgatgtcaggaaattacacctccatcgatagccaaaaggtttcaggatctgtacctgctgttgatcctccacccttccaattctcagattcaaatcttcagacatttcctccatctggagcacagggcaagattggtggtggctcgagacatccacgtgatgttgatgatacgttttcaaaaccagtgtctggttctgatgaaccccagcagcagagtggttggtttaaggctttctcacttgcttcttacaaaccatactttgatgttgacactatagatgttctagacaggattaaagactcactctatccattcaatggaacattcaatgaaaaaactgcttcccaccctgatttgtatggaccgttctggatttgcaccacattaatatttgtagcagcatctattggcacatttgtgacatacatagctcacaaactgaaggaccaggaatggaactatgacataaatctggtgacttggtctgccggcttgttctatggttatgtcaccattgttcctctttgtttgtatgtaatcctcaagtacttctctgtaccatcgggctttgtccaactactctgtctctatggatattccttgtttgtctttattccagcactgtgtatgtctgttgtgccattggagatattcagatggatggttgctggtgtggctgggttcatgtcagcaacttttgtggcactaaacctccgagcacatattatgtcagcaggtgaaagatgggttttgattgttgctagcatttttgtattgcagttggctctagctgtcgcattaaaggtctgcctcttcacagtaacagtatgagagtaaagtagtattatcatcattcagcatcaatgaattgtagataacgaagagagaactttttgctgttttaaatttagttatataatttgtaggtgaaatgcggttatcagattaaactgtcatttaattcattcatggcgatatagaggcaaataaaaatagtttgtacgttggat

SEQ ID NO: 3811 - protein, 282 aa, Glycine max
  misc_feature (1)..(282): Ceres Seq. ID no. 13593847
LKITKMMSGNYTSIDSQKVSGSVPAVDPPPFQFSDSNLQTFPPSGAQGKIGGGSRHPRDVDDTFSKPVSGSDEPQQQSGWFKAFSLASYKPYFDVDTIDVLDRIKDSLYPFNGTFNEKTASHPDLYGPFWICTTLIFVAASIGTFVTYIAHKLKDQEWNYDINLVTWSAGLFYGYVTIVPLCLYVILKYFSVPSGFVQLLCLYGYSLFVFIPALCMSVVPLEIFRWMVAGVAGFMSATFVALNLRAHIMSAGERWVLIVASIFVLQLALAVALKVCLFTVTV

SEQ ID NO: 3812 - protein, 277 aa, Glycine max
  misc_feature (1)..(277): Ceres Seq. ID no. 13593848
MMSGNYTSIDSQKVSGSVPAVDPPPFQFSDSNLQTFPPSGAQGKIGGGSRHPRDVDDTFSKPVSGSDEPQQQSGWFKAFSLASYKPYFDVDTIDVLDRIKDSLYPFNGTFNEKTASHPDLYGPFWICTTLIFVAASIGTFVTYIAHKLKDQEWNYDINLVTWSAGLFYGYVTIVPLCLYVILKYFSVPSGFVQLLCLYGYSLFVFIPALCMSVVPLEIFRWMVAGVAGFMSATFVALNLRAHIMSAGERWVLIVASIFVLQLALAVALKVCLFTVTV

SEQ ID NO: 3813 - protein, 276 aa, Glycine max
  misc_feature (1)..(276): Ceres Seq. ID no. 13593849
MSGNYTSIDSQKVSGSVPAVDPPPFQFSDSNLQTFPPSGAQGKIGGGSRHPRDVDDTFSKPVSGSDEPQQQSGWFKAFSLASYKPYFDVDTIDVLDRIKDSLYPFNGTFNEKTASHPDLYGPFWICTTLIFVAASIGTFVTYIAHKLKDQEWNYDINLVTWSAGLFYGYVTIVPLCLYVILKYFSVPSGFVQLLCLYGYSLFVFIPALCMSVVPLEIFRWMVAGVAGFMSATFVALNLRAHIMSAGERWVLIVASIFVLQLALAVALKVCLFTVTV

SEQ ID NO: 3814 - DNA, 1652 bp, Glycine max
  misc_feature (1)..(1652): Ceres Seq. ID no. 13593854
ccccccacacaccatcctctccccacaagaataagcccgttcatgttcctctaccaccgaacacaccccgccaccacctctcgctaacgtgcgccccttccttatcctgcgcttcgacaccccttcttttctttttttactttttcccttattccccttccttcataagctccgcgttctctctctctctctctctctctctctctctctctctctctcggatcggagcgaggctggcggttccggcgttggggacgttagggttagggtttccgagagatgtggtatgctccaggcattgatgaatctgttctcgctgtgttggaagccgtttggccgcgatgctgatcgaatcgattccatcggagttatcggaagagaaggcaaagacggcttgctctggttccgcgacttcggaaaatatggctccggtgatttctccatggctgtcgttcaggccaaccaggttctcgaagaccagagccagatcgagtctggtcctctcggcaccttcgtcggcatctacgacggtcacggaggacccgacgcatcaagatacgtttgcgatcacttgtttcgccattttcaagcaatatcagctgagtcacgcggggttgtgacaactgagacaatcgaaagagcatttcgccaaacagaagaggggtacatggccctcgtgtcaggctcgtggaatgctcgacctcatattgcaagtgctgggacctgttgtctagttggagtgatatttcagcagacactctttgtggcaaacgctggagattcccgtgttgtattgggtaagaaagttggcaacactggaggtatggctgcaattcagctgtctacagaacacaatgcaaatcttgaggctgttaggcaggaacttaaagaattacatcctcatgatccccaaattgttgtcctcaaacatggagtgtggagagtaaaaggcattattcaggtttctagatctataggtgatgtatatttgaagcatgcacagtttaaccgagaaccacttaatgcaaaattcagacttcctgaaccgatgaacatgcctatcttgagtgctaatcccactattctttctcatgctctccaaccaaatgattccttccttatatttgcatctgatggtttatgggagcatttgagtaacgagaaagctgtggatattgtaaacagcaatccacatgcgggtagtgccaagagacttatcaaggctgctctccatgaagcagcaagaaaacgagaaatgcgatattcagacctccgtaagattgacaagaaagttcgacgccattttcatgatgatatatccgttattgttttattcttaaatcacgaccttatttccagaggcacagtgctagacccgacactttcaattcgaagcgctctcgatcactgacttgtatcactgtaagcagtcttgtacgagtttttggcaactgtaccgatacctgaagcattggtaggtacctggctataatatgtcatttctatggcacatatggcttctggtaccgacatcattcttgaggcacgagaatttattaagttataacatattattagaaatttattcataaagaggaaaaaaataaataccaaaaaaaaaaaaaaaaaagaattcctgcagccccggggga

SEQ ID NO: 3815 - protein, 374 aa, Glycine max
  misc_feature (1)..(374): Ceres Seq. ID no. 15221241
MLQALMNLFSLCWKPFGRDADRIDSIGVIGREGKDGLLWFRDFGKYGSGDFSMAVVQANQVLEDQSQIESGPLGTFVGIYDGHGGPDASRYVCDHLFRHFQAISAESRGVVTTETIERAFRQTEEGYMALVSGSWNARPHIASAGTCCLVGVIFQQTLFVANAGDSRVVLGKKVGNTGGMAAIQLSTEHNANLEAVRQELKELHPHDPQIVVLKHGVWRVKGIIQVSRSIGDVYLKHAQFNREPLNAKFRLPEPMNMPILSANPTILSHALQPNDSFLIFASDGLWEHLSNEKAVDIVNSNPHAGSAKRLIKAALHEAARKREMRYSDLRKIDKKVRRHFHDDISVIVLFLNHDLISRGTVLDPTLSIRSALDH

SEQ ID NO: 3816 - protein, 369 aa, Glycine max
  misc_feature (1)..(369): Ceres Seq. ID no. 15221242
MNLFSLCWKPFGRDADRIDSIGVIGREGKDGLLWFRDFGKYGSGDFSMAVVQANQVLEDQSQIESGPLGTFVGIYDGHGGPDASRYVCDHLFRHFQAISAESRGVVTTETIERAFRQTEEGYMALVSGSWNARPHIASAGTCCLVGVIFQQTLFVANAGDSRVVLGKKVGNTGGMAAIQLSTEHNANLEAVRQELKELHPHDPQIVVLKHGVWRVKGIIQVSRSIGDVYLKHAQFNREPLNAKFRLPEPMNMPILSANPTILSHALQPNDSFLIFASDGLWEHLSNEKAVDIVNSNPHAGSAKRLIKAALHEAARKREMRYSDLRKIDKKVRRHFHDDISVIVLFLNHDLISRGTVLDPTLSIRSALDH

SEQ ID NO: 3817 - protein, 322 aa, Glycine max
  misc_feature (1)..(322): Ceres Seq. ID no. 15221243
MAVVQANQVLEDQSQIESGPLGTFVGIYDGHGGPDASRYVCDHLFRHFQAISAESRGVVTTETIERAFRQTEEGYMALVSGSWNARPHIASAGTCCLVGVIFQQTLFVANAGDSRVVLGKKVGNTGGMAAIQLSTEHNANLEAVRQELKELHPHDPQIVVLKHGVWRVKGIIQVSRSIGDVYLKHAQFNREPLNAKFRLPEPMNMPILSANPTILSHALQPNDSFLIFASDGLWEHLSNEKAVDIVNSNPHAGSAKRLIKAALHEAARKREMRYSDLRKIDKKVRRHFHDDISVIVLFLNHDLISRGTVLDPTLSIRSALDH

SEQ ID NO: 3818 - DNA, 1255 bp, Glycine max
  misc_feature (1)..(1255): Ceres Seq. ID no. 13593859
caataattaccttaaaagtgatgtctaacgtgatttctgattagttagacagtgtaaaatgtgacagttgagaatattaatgtaattaaacaatttccatttgattgcagagctctttgatatatgtgttctagagggtgagactattagggagtggctattctttgataagcctagaagggcatttgagagtggaaacagaaagcagaggtcactgccggattatagcgggcgtggatggcacgagtctagaaagcaagtgatgaacgaatttggagggctgaagagatcctattacatggaccctcaacctttgaacctttttgagtggcacctttatgagtatgaaattagcaagtgcgatgtgtgcgccttataccggttggaactaaagctggtcgatgggaagaagagctccaaggcaaagatagtaacaggtgattcagttgctgatcttcagaagcacatgggaagcctctctgccaaaggtagtagaaccaagcttggcataggaggtggtgtttattcagcttctaacagagttgctctactaaatgcaccttatcaatacggcttaacttcaccatatgatgactatgttgttcacaacacattagactattatgtgacatgattgatctctttttcttttcctctttttcttcttaggaacaagacaaggtgattttttatccttgtcaagacattgtgaatagctcattctcacacaagtgctgcattagaggcttgcttgggaagatcaccaacaattggtgagtgatagaatgaatcatcagcacaaagttgcagcaattcagtcctcttgactctttattttcttaatcatgctaatgtaagctacttatatggagggcacataatattggctgtgtaataaatgtttgtgtcccttcatgagaatttatccattgaaaaaaggaaaagaatcttcgaaagtcagcattcatgatgatatgccttgtttaatttttttcgttacgaggtgacttctctatctagacattacaatagggcatccgatacgattaattttggagtgatttaaaatatggttgtggaattgtggttgttgcaaatcaatttatctcaatccgcttttaattacaaatcaataaaatgccgactttgattaaaaaatgacaccgacaatatatctatatatatttaaatgttgttctaacaataatattaaaaatacacctgactaatatattaaggtttgtttggaaggagt

SEQ ID NO: 3819 - protein, 123 aa, Glycine max
  misc_feature (1)..(123): Ceres Seq. ID no. 15221244
MNEFGGLKRSYYMDPQPLNLFEWHLYEYEISKCDVCALYRLELKLVDGKKSSKAKIVTGDSVADLQKHMGSLSAKGSRTKLGIGGGVYSASNRVALLNAPYQYGLTSPYDDYVVHNTLDYYVT

SEQ ID NO: 3820 - protein, 111 aa, Glycine max
  misc_feature (1)..(111): Ceres Seq. ID no. 15221245
MDPQPLNLFEWHLYEYEISKCDVCALYRLELKLVDGKKSSKAKIVTGDSVADLQKHMGSLSAKGSRTKLGIGGGVYSASNRVALLNAPYQYGLTSPYDDYVVHNTLDYYVT

SEQ ID NO: 3821 - DNA, 1237 bp, Glycine max
  misc_feature (1)..(1237): Ceres Seq. ID no. 13593860
aacacacgtcatagaaatggagatggactacatcaacacttcccacccaaattttattggtggaagtaaggcaatagaagctgcagtgcaacaaaccaggtcttctagagttggtttaccagtttctagggtgaaggatgcactggaatctgataagggaccagctactgagagaagtgggaagtctcgatctattcttgcaagacatgcaaatggagtagtggctgatcagggtgttcgtgctacatcagatgttgaaaaagtagtgacctctggaaacacaggtggatcaagttgggggatctcatccattttcggtggaggtgataaccgtgtgtctgtgaaggaaatgacagctagtaaaccacatactactgaaccaatgcataatgtgcagtcattctctacaattcatttgagagagcccccttctgtcttgagaccattggagagcaattcagagaccgaagctgttgaaatcacagtaacaaagttgcttttgaaatcatactatgacattgtcaggaaaaatgttgaggatcttgtccccaaagcaattatgcacttcttggtaaataacacaaagagagagcttcacaatgtcttcattgaaaaactatacagagaggatctgtttgaagagatgttgcaagaacctgaagaggtagccaagaaaagaaaaaactgtcgagaactgctccgagcttatcaacaggcttttaaagacttgaacgaactgcctcttgaagctgaaacagttgaaaggggatacagtttgcctgaaattactaccggcttacctaaaattcgtggattgccaacttcatctatgtattctactagcagttcgggagactattatgaagcttctcccaagaacacaaagtctaaaaataaaaagtcttcacattctggggaactccaatctccatttcaggattcaaacggaaatggagggccatacacgtcaggttatccaatggctggtgaatgaactcgctgattgtgcttgttagtccaagaaatttgactcagcgtttaattatttgtttatgcttatgcaatttttgaggtttgcaactcctcctggagctggactgcattcagttactatttttcccattaaaatggtcctgagtgttggtgggtgctttctttatctaagttcccttttgttcgcatatagcgttatttaccaaggctccggaaagaataataggagcagatgatttttcag

SEQ ID NO: 3822 - protein, 330 aa, Glycine max
  misc_feature (1)..(330): Ceres Seq. ID no. 13593861
THVIEMEMDYINTSHPNFIGGSKAIEAAVQQTRSSRVGLPVSRVKDALESDKGPATERSGKSRSILARHANGVVADQGVRATSDVEKVVTSGNTGGSSWGISSIFGGGDNRVSVKEMTASKPHTTEPMHNVQSFSTIHLREPPSVLRPLESNSETEAVEITVTKLLLKSYYDIVRKNVEDLVPKAIMHFLVNNTKRELHNVFIEKLYREDLFEEMLQEPEEVAKKRKNCRELLRAYQQAFKDLNELPLEAETVERGYSLPEITTGLPKIRGLPTSSMYSTSSSGDYYEASPKNTKSKNKKSSHSGELQSPFQDSNGNGGPYTSGYPMAGE

SEQ ID NO: 3823 - protein, 325 aa, Glycine max
  misc_feature (1)..(325): Ceres Seq. ID no. 13593862
MEMDYINTSHPNFIGGSKAIEAAVQQTRSSRVGLPVSRVKDALESDKGPATERSGKSRSILARHANGVVADQGVRATSDVEKVVTSGNTGGSSWGISSIFGGGDNRVSVKEMTASKPHTTEPMHNVQSFSTIHLREPPSVLRPLESNSETEAVEITVTKLLLKSYYDIVRKNVEDLVPKAIMHFLVNNTKRELHNVFIEKLYREDLFEEMLQEPEEVAKKRKNCRELLRAYQQAFKDLNELPLEAETVERGYSLPEITTGLPKIRGLPTSSMYSTSSSGDYYEASPKNTKSKNKKSSHSGELQSPFQDSNGNGGPYTSGYPMAGE

SEQ ID NO: 3824 - protein, 323 aa, Glycine max
  misc_feature (1)..(323): Ceres Seq. ID no. 13593863
MDYINTSHPNFIGGSKAIEAAVQQTRSSRVGLPVSRVKDALESDKGPATERSGKSRSILARHANGVVADQGVRATSDVEKVVTSGNTGGSSWGISSIFGGGDNRVSVKEMTASKPHTTEPMHNVQSFSTIHLREPPSVLRPLESNSETEAVEITVTKLLLKSYYDIVRKNVEDLVPKAIMHFLVNNTKRELHNVFIEKLYREDLFEEMLQEPEEVAKKRKNCRELLRAYQQAFKDLNELPLEAETVERGYSLPEITTGLPKIRGLPTSSMYSTSSSGDYYEASPKNTKSKNKKSSHSGELQSPFQDSNGNGGPYTSGYPMAGE

SEQ ID NO: 3825 - DNA, 1249 bp, Glycine max
  misc_feature (1)..(1249): Ceres Seq. ID no. 13593886
attcactctcttctatcccttgcctcaccaccttaaatttgttatgcgcgaacacttgaaaaataatagtgaaaatgtggagtgctcccacagatgaacgatgtttggttgtttatctgaccttcttgaacaatatttgtggaagctgaatttctgttttcaaactggggtctgttgaaagatggactgtcttgagggagcacctgctggattcgttgatgacttgatggtcctctaaaggaagtccccaaactaatcatggctcccatctaatgtatcacccttggtagggactggtggaaatggtatcctataggtaaatacgctggaaagatcttaatgggctggtaatctgacttaccttcccacttctttcctctcccttgggtgtttccaacttcctgttgagagcatagcctgtgccacggttggctgttaaaattgaaattatctatttatttagtagtttctatattgccctacagagtttttagatattcaatcaaaactctgaagtaaataattgggtgttctaaggttgtggcataacatgactttctgatctggcaaaagattatccatccaggttcaattgagttcatgaatggtctggatttcactacatcaatgccctctggctatcaagaggctggagagcctgtattgttgatcagttaatttggaaagtgaatttcgaaaaagttaattatttttgcgtatgaatttactttggaaaagagagaactattttctgattattttttcgtcttccagcaggactctttaaggggtggtggtaaatggagcaatggagctgagatgactgaggaagaagcattagcagagcagcaaaggatgtttgcagaggcgcgtgctaggatgaacggtggagccattgcttccaagcagccagatgctgaccaaagtttagatagctaactttaggatcttcattgaagcatagacaaagcaccaccctgactcctgtctgtgcttccaatgagctcgatggtgtacaaaaaccattcactagtttgctggcccatgtggatgtgctcatttgtattctttcgataaatccatatttgtaagtcaatgtaattagtgagagatcatgaaaaccctcccgtttagcatttacttgtaattatttaatttacgtttttgtatcttctacatactaacaactcctagcttgattctgacagtagctactatgttagattgtaacaaattattaaatatgtag

SEQ ID NO: 3826 - protein, 39 aa, Glycine max
  misc_feature (1)..(39): Ceres Seq. ID no. 13593887
MTEEEALAEQQRMFAEARARMNGGAIASKQPDADQSLDS

SEQ ID NO: 3827 - protein, 31 aa, Glycine max
  misc_feature (1)..(31): Ceres Seq. ID no. 13593888
FTLFYPLPHHLKFVMREHLKNNSENVECSHR

SEQ ID NO: 3828 - DNA, 1283 bp, Glycine max
  misc_feature (1)..(1283): Ceres Seq. ID no. 13593902
aaaatcttctgcagcattgtcttatgttgaagcacaagcaaggatggatgatagtcgtttgatggatccaattactgctgatttgaggaatatgaatagtttagctaagaaaatgagattaaggcgtattgagagaggagctttgactcttgcatctgctgaagtcaaatttcagattgacacagagactcatgacccccttgatattggaatgtaccagatccgggaggccaatcaaatggtggaggagtttatgcttgctgctaatgtttccgttgcacaacaaattcttaatagttttccattggtctcattattaaggcgtcatccaacaccaactagagagatgcttgaacccttgttacagactgctgctgcagttggcttgcacttggatgtctcatcatcaaaagcgttggctgattctcttgaccatgctgtgggtgatgatccttacttcaataagttaatccgtatactggcaactaggtgcatgactcaggcagtttatttctgcagtggtgatcttagccctccagaatatcatcattatgggcttgcagctcctttgtatacccatttcacatcacctataagaagatatgcagatgtcattgtgcacaggctacttgctgcttctttaggaatatccaagttaccgtctgtatttcaagacagactccagctcactagtattgcagacaatttaaattatcggcacaggaatgcccagtatgctgggcgggcatctgtagagctacatactctaatttatttcaggaagaggcctacagacaccgaggctagaatagtgaaaataagatctaatggattttttgtgtttgttcccaaatatggcatagaaggacctgtatatttgacaaaagcagaaaagggaagtggagaatggtatgtagatgatcaacagcagaagattaaaaagatggacggtagcctttcatacagtgttttgcagacagtccaaattcacatggaggttgtggagcctcagccaaaccgaccaaaacttcagcttaccctcatctagagcatgaaaaaattgtcgaaggaaccaaacattgatggagatgttggctggagaatttttttgtagatggaacaaaagatttacggttgatgaggtaacttttagttagtccttttacaactatttacttttaaattgtgaagtgggacgtggaatttttatacatgtgatgctgtaagcaagtgtgaacagctcaggtaaaaaaaaaataaaattacgttagcttaaatgtgcc

SEQ ID NO: 3829 - protein, 348 aa, Glycine max
  misc_feature (1)..(348): Ceres Seq. ID no. 13593903
KSSAALSYVEAQARMDDSRLMDPITADLRNMNSLAKKMRLRRIERGALTLASAEVKFQIDTETHDPLDIGMYQIREANQMVEEFMLAANVSVAQQILNSFPLVSLLRRHPTPTREMLEPLLQTAAAVGLHLDVSSSKALADSLDHAVGDDPYFNKLIRILATRCMTQAVYFCSGDLSPPEYHHYGLAAPLYTHFTSPIRRYADVIVHRLLAASLGISKLPSVFQDRLQLTSIADNLNYRHRNAQYAGRASVELHTLIYFRKRPTDTEARIVKIRSNGFFVFVPKYGIEGPVYLTKAEKGSGEWYVDDQQQKIKKMDGSLSYSVLQTVQIHMEVVEPQPNRPKLQLTLI

SEQ ID NO: 3830 - protein, 334 aa, Glycine max
  misc_feature (1)..(334): Ceres Seq. ID no. 13593904
MDDSRLMDPITADLRNMNSLAKKMRLRRIERGALTLASAEVKFQIDTETHDPLDIGMYQIREANQMVEEFMLAANVSVAQQILNSFPLVSLLRRHPTPTREMLEPLLQTAAAVGLHLDVSSSKALADSLDHAVGDDPYFNKLIRILATRCMTQAVYFCSGDLSPPEYHHYGLAAPLYTHFTSPIRRYADVIVHRLLAASLGISKLPSVFQDRLQLTSIADNLNYRHRNAQYAGRASVELHTLIYFRKRPTDTEARIVKIRSNGFFVFVPKYGIEGPVYLTKAEKGSGEWYVDDQQQKIKKMDGSLSYSVLQTVQIHMEVVEPQPNRPKLQLTLI

SEQ ID NO: 3831 - protein, 328 aa, Glycine max
  misc_feature (1)..(328): Ceres Seq. ID no. 13593905
MDPITADLRNMNSLAKKMRLRRIERGALTLASAEVKFQIDTETHDPLDIGMYQIREANQMVEEFMLAANVSVAQQILNSFPLVSLLRRHPTPTREMLEPLLQTAAAVGLHLDVSSSKALADSLDHAVGDDPYFNKLIRILATRCMTQAVYFCSGDLSPPEYHHYGLAAPLYTHFTSPIRRYADVIVHRLLAASLGISKLPSVFQDRLQLTSIADNLNYRHRNAQYAGRASVELHTLIYFRKRPTDTEARIVKIRSNGFFVFVPKYGIEGPVYLTKAEKGSGEWYVDDQQQKIKKMDGSLSYSVLQTVQIHMEVVEPQPNRPKLQLTLI

SEQ ID NO: 3832 - DNA, 991 bp, Glycine max
  misc_feature (1)..(991): Ceres Seq. ID no. 13593910
atccattccatttctttccaacacacacttttctctctctatctctctctctctctctctctggttgtctttcattttgttcattgttgttgatgatgtcacgcgccgccgtgttattacacgcgcaggaggaggaggaggaggaggaggaggagtgtagtacttcgacgtcgtcgtcgatcgggaggaacagcgacgtgtcgtcggagagatcaatggaggaaggagaaaacgaggtggaaagtgcctaccatggacctttgcatgccatggaaactttggaagaggttcttcccatcaggagaggcatctcgaacttttataatggtaagtctaagtcattcacaaccctggctgatgcagtgtcttccccatcagtgaaagacatagcaaagccagagaatgcatacaccagaaggcgtaggaacttgatggcattgaaccatgtcttggacaagaataatagaaactaccctctaagaagcagtggtggtggcatttgcaagagatcaatcagcttgagtagaagttctctagctcttgcagttgccatgaacaactccgacagcagtagtagtatcacaagcgaagattccggttccagctcgaattcgttacactctccctctcctctaccgcctctccatccccgaaatagagtgtcttcttcttccggctcaggtccatcctctcctttgttgcggaatttctctccctggagatcattttccgtggctgatctacagcagcattgtgccattgctgcaacaataaagatttcaagtccctccgttggaaataaaacagctcatccatcatagtaaaaaaaaaaaaaaaacaaagaggataacaaactatatgttattaacttttagcttatttgaatgaatatcttgctctagtcctatttgtttgagggagcaaaaacttgtagaagcaatgcctttacgtacgtacgatcacttcagattaacttccgtaagatatgatg

SEQ ID NO: 3833 - protein, 272 aa, Glycine max
  misc_feature (1)..(272): Ceres Seq. ID no. 15221252
PFHFFPTHTFLSLSLSLSLSGCLSFCSLLLMMSRAAVLLHAQEEEEEEEEECSTSTSSSIGRNSDVSSERSMEEGENEVESAYHGPLHAMETLEEVLPIRRGISNFYNGKSKSFTTLADAVSSPSVKDIAKPENAYTRRRRNLMALNHVLDKNNRNYPLRSSGGGICKRSISLSRSSLALAVAMNNSDSSSSITSEDSGSSSNSLHSPSPLPPLHPRNRVSSSSGSGPSSPLLRNFSPWRSFSVADLQQHCAIAATIKISSPSVGNKTAHPS

SEQ ID NO: 3834 - protein, 242 aa, Glycine max
  misc_feature (1)..(242): Ceres Seq. ID no. 15221253
MMSRAAVLLHAQEEEEEEEEECSTSTSSSIGRNSDVSSERSMEEGENEVESAYHGPLHAMETLEEVLPIRRGISNFYNGKSKSFTTLADAVSSPSVKDIAKPENAYTRRRRNLMALNHVLDKNNRNYPLRSSGGGICKRSISLSRSSLALAVAMNNSDSSSSITSEDSGSSSNSLHSPSPLPPLHPRNRVSSSSGSGPSSPLLRNFSPWRSFSVADLQQHCAIAATIKISSPSVGNKTAHPS

SEQ ID NO: 3835 - protein, 241 aa, Glycine max
  misc_feature (1)..(241): Ceres Seq. ID no. 15221254
MSRAAVLLHAQEEEEEEEEECSTSTSSSIGRNSDVSSERSMEEGENEVESAYHGPLHAMETLEEVLPIRRGISNFYNGKSKSFTTLADAVSSPSVKDIAKPENAYTRRRRNLMALNHVLDKNNRNYPLRSSGGGICKRSISLSRSSLALAVAMNNSDSSSSITSEDSGSSSNSLHSPSPLPPLHPRNRVSSSSGSGPSSPLLRNFSPWRSFSVADLQQHCAIAATIKISSPSVGNKTAHPS

SEQ ID NO: 3836 - DNA, 933 bp, Glycine max
  misc_feature (1)..(933): Ceres Seq. ID no. 13593919
aaawtcaaaatawtgaaaagccgcgagggaggtttcgtttcgtttcgttcagttcacacattctattctctatcgattcctcttccctttttctcaatccactacaccacagttatgaggagccaacttgtgtgtaatgggtgtaggagcatcttggtttaccctagaggagcaaccaatgtttgctgtgcgttgtgcaacaccattacctctgttcctcctcctggaatggacatgtcacaactctattgtggaggctgtacgacattgctaatgtacacacgtggtgctacaagtgtgagatgttcctgctgtcacactattaaccttgtaccagaatctaatcaagtcattcattgtgcgaactgccggacaacactcatgtatccttatggagcttcctcagtcaaatgtgcaatttgttgctatattactaatatcagtatgaccaatggaaggctttcaattcctgtacagagaccaaatggaacagccaactctggaacagtatcttcaacttcatcgtcaatgccttattctcagagccaaactgtcgtagtagaaaatcctatgtctgttgattcgagtgggaaattggtgaggaatgtcgttgtgggcgttacaacagataagaaatgatacttgccacatgaaaatgttacacaagtgtaaagggaacatcatttgactcgtcaactgctggtgcttgaaaatattgttcgtgtatatgaaattgcagcttataagttaaagatatttttgttctaaatgagatttagactgatttaatttacatatatgtatacgaggaccagtggaaagggcacacaacttgtcatttattgaattgccaaggtcctctttttgctgcagttgtatcacagggtttttcgcatctcgaattacaagtcctagatgcacatttgattcctc

SEQ ID NO: 3837 - protein, 212 aa, Glycine max
  misc_feature (1)..(212): Ceres Seq. ID no. 15221255
  misc_feature (2)..(2): Xaa is any aa, unknown or other
  misc_feature (5)..(5): Xaa is any aa, unknown or other
KXKIXKSREGGFVSFRSVHTFYSLSIPLPFFSIHYTTVMRSQLVCNGCRSILVYPRGATNVCCALCNTITSVPPPGMDMSQLYCGGCTTLLMYTRGATSVRCSCCHTINLVPESNQVIHCANCRTTLMYPYGASSVKCAICCYITNISMTNGRLSIPVQRPNGTANSGTVSSTSSSMPYSQSQTVVVENPMSVDSSGKLVRNVVVGVTTDKK

SEQ ID NO: 3838 - protein, 174 aa, Glycine max
  misc_feature (1)..(174): Ceres Seq. ID no. 15221256
MRSQLVCNGCRSILVYPRGATNVCCALCNTITSVPPPGMDMSQLYCGGCTTLLMYTRGATSVRCSCCHTINLVPESNQVIHCANCRTTLMYPYGASSVKCAICCYITNISMTNGRLSIPVQRPNGTANSGTVSSTSSSMPYSQSQTVVVENPMSVDSSGKLVRNVVVGVTTDKK

SEQ ID NO: 3839 - protein, 136 aa, Glycine max
  misc_feature (1)..(136): Ceres Seq. ID no. 15221257
MDMSQLYCGGCTTLLMYTRGATSVRCSCCHTINLVPESNQVIHCANCRTTLMYPYGASSVKCAICCYITNISMTNGRLSIPVQRPNGTANSGTVSSTSSSMPYSQSQTVVVENPMSVDSSGKLVRNVVVGVTTDKK

SEQ ID NO: 3840 - DNA, 1515 bp, Glycine max
  misc_feature (1)..(1515): Ceres Seq. ID no. 13593942
  misc_feature (1501)..(1501): n is a, c, t, g, unknown, or other
ttttttttttttgctctttcctcatgcttgctgtctgagtcttgcagctaactatagcagatatcacagatgagatggagaaaacattacattggttgtcccccatggccactaacacatccaaagcacatcatggctttggttgggtaggggagtgggcaaacacagggtaagtttttgaattagaatttatacatttgtcccttttgtattttctatgcttttaatgtgtttttaatcctttccaattttaaatacttgcttggttcttgaagctctgaggtaaggaagaccggtgtaatgcagattgagacattccaccatgcagacaaagacaaagtggaatattatattcttgaacttctcttatggcttcatcgcttggctatcagaagtaaggctgtcagtgctgctggcaaagtaaggcctgccatcaagtctcctgttggcactgctttgcaaaatacaaatgagcaaatatcattgttaacaattgacgagcaaaacatgctgctggatttaaataagaaaataccaattagacggatcagtaaaagcttggattttgacagtttgaatatcagattcagggagaactgcagattggccaagagtagaagtcattcatcaagtagaagcaaggagatatcttttaataggattttgtctaagcttccagtcattgattttgatattgacaaagaaagagcattgaacgtgattgacagactggatgtggtcagataatttgaaagtttgcccgatcgcctttgaaatgaatggaaaggagaaataatacatgtagacatggtagtgggtttcctttctgtgcatatgcaacgttcttgctgcaagcgttgaatgccatatttttgccgcacctttggtactttggattctcattggcttcattagggtgctttgtttcggtgtagttccacttccaggtgatgtagatatctttatatggcaccaaggtaattgttgagacgataggcatttatgcttgtttcaatgtgactgcaaagccctctttagtattggagcggagtggaccggtccattctcgagtgtatatatatatattgaggtaatgaggatatagtgcccaccatcaccattttgcacagcttttatttttgtgggtttggctacccatgttcactgctgaatctagaattttttattaactatgatttttccacgtctcaatttttacatctactttatgctttttttttaatcgcattgtatatgacatctataaaaaaatttcctttcccacttgaggtgtatgcactcaagggggtgtcaactgtcaagtgattgttattctttcagaaacatagttcttaatattgtgataattgtagggcttgttttgtagtagrgatgamcmcgwtcagagttggatagatsccmgaagggdtwtgamcmakgaataamctyttgtwtcgggkgcttgatgytaatamctttgttaataytaatagaaattgtncgtaawtwtcmttc

SEQ ID NO: 3841 - protein, 148 aa, Glycine max
  misc_feature (1)..(148): Ceres Seq. ID no. 15221263
MQIETFHHADKDKVEYYILELLLWLHRLAIRSKAVSAAGKVRPAIKSPVGTALQNTNEQISLLTIDEQNMLLDLNKKIPIRRISKSLDFDSLNIRFRENCRLAKSRSHSSSRSKEISFNRILSKLPVIDFDIDKERALNVIDRLDVVR

SEQ ID NO: 3842 - protein, 79 aa, Glycine max
  misc_feature (1)..(79): Ceres Seq. ID no. 15221264
MLLDLNKKIPIRRISKSLDFDSLNIRFRENCRLAKSRSHSSSRSKEISFNRILSKLPVIDFDIDKERALNVIDRLDVVR

SEQ ID NO: 3843 - DNA, 2330 bp, Glycine max
  misc_feature (1)..(2330): Ceres Seq. ID no. 13593967
cagctacgtaggccccccccccgacacactatcctcttaacaaaacacaaaccagtgttcagtgttcagtgttcagtgttcagtgttacacttcacacagacaagaatccaagacaacaagggaaaccagacacatcattaacacacgacacaaacatcctcactactcttccatcttcattaagttaagtccttgtgggtcagggagcattcaagcagtgaggcccaactaattaacctgtttctctttactggatataaggcaattaaaccatgcaaacaccaaagacaagaaatggatcctctgatgtgcctcagaaggtgtctccacgtgctgtacgccaactcaagcctactactctggacattgattctgcatcttctttaagtcaggctactaaatcatcaaaagaaagaagccccaaagtcactgaccgcagatcacccagaagcccagttattgagaggaagcgccctagcaaaatatctgagttggaatctcaaatttctcaactccaaaatgatttgaagaaggtgagggaccagtttatcttgtccgaatcatgcaagaagcaagctcagcaagaagctgaggagtccaaggagcaactattggccctatctgcaaaacctgaagagtcacaaaaacaagttctggatctttgtgctactggagaagctcgtgttcttgagctccagaaaattgtagaagaacgtgatatggcatgccgatctgagcttgaggcctccaaaaagcagctctcagttgagtctgcttccctggcatctgcagcgaatgaaattcagttgctcaaggcgcaacttgaattggttgctaattgtgagagcgtgcaatctcaacatgcagaatcagcagacatggagctactaaaccttaagcagaacttgtcagaaactctttctcttgtggacgccttgaaaaaccaagtaagggattgcaaagagtctgaagctcaggcccaagcattggtcaatgaaactacggtgcaacttgaggccgcaaaaggaactgttgagttcctaagggctgatgttgcaagagctgttgatggctacaactccgttgctttagagttagaccagtctaaagctcgggtgaactcactagaggcacttgttagcaaaattgagaaagaccccatcaataataaatgcatcccttctgaaaatgttgcagatgaccataaatctgagcaccaacctgaaatattgaaagagggagaggatcctaatcagctggaagcagaagttgtttttttgaagtccgaggttgaacaattgagatctgctatagagactgctgagactaaataccaagaggaacagattcgaagcatggtgcagatcaggaatgcatatgagttagtagagcagataaaatctgaatcaggtaagagggaatgtgagctagaggctgagttgaaaaagaagaaagctgatattgaagagttgaaggctaacctaatggacaaggaaactgagttgcaaggcattgtggaggagaatgacaacttgaacctaaagcttgaagagagcatgtcatccaaaaatgagcacaaactcaaaagggaaattaaaagactatcagaatgtgtggcagaactgaaggcggatatgatggacaaggagacaacactgcaaagcatatctgaagagaacgaaatgctgaaatcggaaatcaacaacagtggcaaagcgagagaggaagttgctgctgaagtagagggagccaaggcggcagaacacgaggctctcatgaaacttgggattgtgatggaggaagcagataagagcaacaagaaggctgcaagagtggccgagcagctggaagcggcacaagctgcaaacttggaaatggaagctgaactgagaagactgaaggtgcagtctgatcagtggaggaaggctgcagaggcagctgctgctatgatttcaacagggaacaacaatgggaggctcacagagagaactgtgtctttggataacaacaactatatgtgctcaccctatgctgaagacatggatgatgatttccagaggaagaaaaatggcaacatgctgaagaagattggagtcttgtggaagaagcctcaaaaatagttgtgatgatgtctgatttatgaagtgttctgaaattgtagtccaataaatagtgtgttcatgtcatgtttattactatgtcttttgcaattgtctgacccctacattaccctctgcactgcactgtaaatcctgcccctatctgaaactgtttgtgaactgtacttgaaacattggcgtttaattattgaaygaactaagctyttaac

SEQ ID NO: 3844 - protein, 615 aa, Glycine max
  misc_feature (1)..(615): Ceres Seq. ID no. 15221271
MQTPKTRNGSSDVPQKVSPRAVRQLKPTTLDIDSASSLSQATKSSKERSPKVTDRRSPRSPVIERKRPSKISELESQISQLQNDLKKVRDQFILSESCKKQAQQEAEESKEQLLALSAKPEESQKQVLDLCATGEARVLELQKIVEERDMACRSELEASKKQLSVESASLASAANEIQLLKAQLELVANCESVQSQHAESADMELLNLKQNLSETLSLVDALKNQVRDCKESEAQAQALVNETTVQLEAAKGTVEFLRADVARAVDGYNSVALELDQSKARVNSLEALVSKIEKDPINNKCIPSENVADDHKSEHQPEILKEGEDPNQLEAEVVFLKSEVEQLRSAIETAETKYQEEQIRSMVQIRNAYELVEQIKSESGKRECELEAELKKKKADIEELKANLMDKETELQGIVEENDNLNLKLEESMSSKNEHKLKREIKRLSECVAELKADMMDKETTLQSISEENEMLKSEINNSGKAREEVAAEVEGAKAAEHEALMKLGIVMEEADKSNKKAARVAEQLEAAQAANLEMEAELRRLKVQSDQWRKAAEAAAAMISTGNNNGRLTERTVSLDNNNYMCSPYAEDMDDDFQRKKNGNMLKKIGVLWKKPQK

SEQ ID NO: 3845 - protein, 466 aa, Glycine max
  misc_feature (1)..(466): Ceres Seq. ID no. 15221272
MACRSELEASKKQLSVESASLASAANEIQLLKAQLELVANCESVQSQHAESADMELLNLKQNLSETLSLVDALKNQVRDCKESEAQAQALVNETTVQLEAAKGTVEFLRADVARAVDGYNSVALELDQSKARVNSLEALVSKIEKDPINNKCIPSENVADDHKSEHQPEILKEGEDPNQLEAEVVFLKSEVEQLRSAIETAETKYQEEQIRSMVQIRNAYELVEQIKSESGKRECELEAELKKKKADIEELKANLMDKETELQGIVEENDNLNLKLEESMSSKNEHKLKREIKRLSECVAELKADMMDKETTLQSISEENEMLKSEINNSGKAREEVAAEVEGAKAAEHEALMKLGIVMEEADKSNKKAARVAEQLEAAQAANLEMEAELRRLKVQSDQWRKAAEAAAAMISTGNNNGRLTERTVSLDNNNYMCSPYAEDMDDDFQRKKNGNMLKKIGVLWKKPQK

SEQ ID NO: 3846 - protein, 413 aa, Glycine max
  misc_feature (1)..(413): Ceres Seq. ID no. 15221273
MELLNLKQNLSETLSLVDALKNQVRDCKESEAQAQALVNETTVQLEAAKGTVEFLRADVARAVDGYNSVALELDQSKARVNSLEALVSKIEKDPINNKCIPSENVADDHKSEHQPEILKEGEDPNQLEAEVVFLKSEVEQLRSAIETAETKYQEEQIRSMVQIRNAYELVEQIKSESGKRECELEAELKKKKADIEELKANLMDKETELQGIVEENDNLNLKLEESMSSKNEHKLKREIKRLSECVAELKADMMDKETTLQSISEENEMLKSEINNSGKAREEVAAEVEGAKAAEHEALMKLGIVMEEADKSNKKAARVAEQLEAAQAANLEMEAELRRLKVQSDQWRKAAEAAAAMISTGNNNGRLTERTVSLDNNNYMCSPYAEDMDDDFQRKKNGNMLKKIGVLWKKPQK

SEQ ID NO: 3847 - DNA, 1463 bp, Glycine max
  misc_feature (1)..(1463): Ceres Seq. ID no. 13593976
cccaaagcctttgccatgcagttatcacttgaagagacattgttgacaactcagacaatgtatttacaagtagcattgctatatactgcatcttgtggtgaaaggcgaataagagtacacacaatggcagttccagtagttacagagttagcagatatatatcggctggctgatactggtgcaattgtatcactgttaagtaggctagcaattgagaaaacattgtcccaaaaactggaagatgcacggagtgctgttcaactaagagttgtaaaagccctcagggaatatcgaaatctttatgctgtgcaacatcgcttggcaaacagaatgatatatcctgagtctttaaagttcttaatgttgtatggattagccctttgtagatcaacagctttacgtggagggtatggtgatgttccactggatgaacgatgtgcagcaggacacataatgatgactgtatcaataagaagactgttgaaacttctctatcctagcttgattcgacttgatgaatatcttctgaaggcatctgtacaggctaatgacttaaaaagtgttgagagaaggttacctttgactggggagagcttagactctagaggtctttatatttatgatgatggcatccggttcattatatggtttggtagggtgatttcacctgatatagcaaagaatttacttggggcagactttgctgcagaattatcaaagactactctcagtgagcatgataatgaaatgtcaaggaggctggtgaaggtacttgagaagttgagaaatacagatcgtgcatattaccagttgtgccaccttgtgaggcaaggtgaacagcccaaagagggattcctccttcttgcaaaccttgttgaggaccagatgggtggtaacagtgggtatgctgaatggatgctgcagatatctcgacaagtgcagcaatcataatatatagcttccctggctaaataagcaagtcagatctgctatttgtctcacaagtgacgaccatttctttctgcattggaggtatattaaatctgtcctttggggtgcttggagaagcattcttgacctggctaattgatcgtgacctgtgagaagcatgcttttgagagattgttgattcatcctgggatatatccgttaggtgaattctaccacagattgaatttaaacgtgtgttcatgtttttgatatagagggaagaaagaaacacttttttggttactttaccttgtgagataagttgtcactttctgtcttatatttccttttgtcgtcgtcttatggttgattctttcattgtagaaaaagtagacagagaactaagaagagatggcatgtcaaattggtcttgcaaaatcttagattttgtttgttgacaattatttattctggtatttaatgttgaaactttgttttctttcaacttgaaatttaatttatttttttggtcc

SEQ ID NO: 3848 - protein, 316 aa, Glycine max
  misc_feature (1)..(316): Ceres Seq. ID no. 13593977
PKAFAMQLSLEETLLTTQTMYLQVALLYTASCGERRIRVHTMAVPVVTELADIYRLADTGAIVSLLSRLAIEKTLSQKLEDARSAVQLRVVKALREYRNLYAVQHRLANRMIYPESLKFLMLYGLALCRSTALRGGYGDVPLDERCAAGHIMMTVSIRRLLKLLYPSLIRLDEYLLKASVQANDLKSVERRLPLTGESLDSRGLYIYDDGIRFIIWFGRVISPDIAKNLLGADFAAELSKTTLSEHDNEMSRRLVKVLEKLRNTDRAYYQLCHLVRQGEQPKEGFLLLANLVEDQMGGNSGYAEWMLQISRQVQQS

SEQ ID NO: 3849 - protein, 311 aa, Glycine max
  misc_feature (1)..(311): Ceres Seq. ID no. 13593978
MQLSLEETLLTTQTMYLQVALLYTASCGERRIRVHTMAVPVVTELADIYRLADTGAIVSLLSRLAIEKTLSQKLEDARSAVQLRVVKALREYRNLYAVQHRLANRMIYPESLKFLMLYGLALCRSTALRGGYGDVPLDERCAAGHIMMTVSIRRLLKLLYPSLIRLDEYLLKASVQANDLKSVERRLPLTGESLDSRGLYIYDDGIRFIIWFGRVISPDIAKNLLGADFAAELSKTTLSEHDNEMSRRLVKVLEKLRNTDRAYYQLCHLVRQGEQPKEGFLLLANLVEDQMGGNSGYAEWMLQISRQVQQS

SEQ ID NO: 3850 - protein, 297 aa, Glycine max
  misc_feature (1)..(297): Ceres Seq. ID no. 13593979
MYLQVALLYTASCGERRIRVHTMAVPVVTELADIYRLADTGAIVSLLSRLAIEKTLSQKLEDARSAVQLRVVKALREYRNLYAVQHRLANRMIYPESLKFLMLYGLALCRSTALRGGYGDVPLDERCAAGHIMMTVSIRRLLKLLYPSLIRLDEYLLKASVQANDLKSVERRLPLTGESLDSRGLYIYDDGIRFIIWFGRVISPDIAKNLLGADFAAELSKTTLSEHDNEMSRRLVKVLEKLRNTDRAYYQLCHLVRQGEQPKEGFLLLANLVEDQMGGNSGYAEWMLQISRQVQQS

SEQ ID NO: 3851 - DNA, 836 bp, Glycine max
  misc_feature (1)..(836): Ceres Seq. ID no. 13593980
gtaggccccccccccggcattcttcacttgaatcctttctcttctttctctctcgctctttcttcaattccaagctttattcctcatgtctttcagaggcctcagccggccaaatgcctcatcaggcatgggtgttgctgatcacagcaagaacaccttcatggaattgaagcagaagaaggttcaccgttatctgatctttaaggttgatgagaagaaaagggaagttgtggttgagaagactggtgacccggctgagagctatgaggatttcgctgcatctttgcctgagaatgattgcagatatgctgtctttgactatgatttcgtcacttctgagaactgtcaaaagagcaaaatcttcttcattgcatggtccccttcaacgtctcgaatccgagccaagatgctctatgccactactaaagacaggtttagacgagagctagatggtgtccattatgaaattcaggctactgaccccacagaaatggatcttgaagtactgagagaccgtgcacattgaaatgtttaagcactgaattcattttcttatcagaatctactaggttttaaagttttacttttaatgaattacctcttcatgctttgtcatcaatagaacccatcttgccacaggaatatacctccactaatatgaatctgaaggctgatgggtttaaagcttttggcagttattgttgtaaatcccagtgttctggacttgtattgtgtatgagcgtgactctatggatcctgatagatttcttggataaaaaagtcccttgttctaactttggcaaggtatctaaaaaacttcaaaacttgcattatcg

SEQ ID NO: 3852 - protein, 146 aa, Glycine max
  misc_feature (1)..(146): Ceres Seq. ID no. 13593981
MSFRGLSRPNASSGMGVADHSKNTFMELKQKKVHRYLIFKVDEKKREVVVEKTGDPAESYEDFAASLPENDCRYAVFDYDFVTSENCQKSKIFFIAWSPSTSRIRAKMLYATTKDRFRRELDGVHYEIQATDPTEMDLEVLRDRAH

SEQ ID NO: 3853 - protein, 132 aa, Glycine max
  misc_feature (1)..(132): Ceres Seq. ID no. 13593982
MGVADHSKNTFMELKQKKVHRYLIFKVDEKKREVVVEKTGDPAESYEDFAASLPENDCRYAVFDYDFVTSENCQKSKIFFIAWSPSTSRIRAKMLYATTKDRFRRELDGVHYEIQATDPTEMDLEVLRDRAH

SEQ ID NO: 3854 - protein, 121 aa, Glycine max
  misc_feature (1)..(121): Ceres Seq. ID no. 13593983
MELKQKKVHRYLIFKVDEKKREVVVEKTGDPAESYEDFAASLPENDCRYAVFDYDFVTSENCQKSKIFFIAWSPSTSRIRAKMLYATTKDRFRRELDGVHYEIQATDPTEMDLEVLRDRAH

SEQ ID NO: 3855 - DNA, 937 bp, Glycine max
  misc_feature (1)..(937): Ceres Seq. ID no. 13593987
ttacctccaggtcgccctcctgctccatctcaaatgatacctcatccaaatgttggtgcatatatgtcaagccaacagccaactgttggatatactaatttaattagttctctaatgtcgcaaggtgtgatctcattggctaaccagctgcctgcacaggattctgttggaactgagtttaatccagatattctgaaggttcgtcatgagtctgcagtcaatgccttatatggtgatctccctagacaatgcacaacttgtgggctgagattcaaatgccaagaggaacacagtagtcatatggattggcatgtgactaagaatcggatgtctaaaacccgtaagcagaaaccctctcggaagtggtttgttagtgacaggatgtggctcagtggtgcagaggcattgggaacagaatcagctccaggttttttgccaacagaaaccatagaagaaaggaaagatgatgaagagttggcagtgcctgcagaagaagaccagaatacatgtgcattatgcggagagccttttgatgagttttacagtgatgaaatggaggaatggatgtatcgaggagcagtatacctcaatgcacctacgggaacaacagcaggcatggataggactcagttaggccccataattcatgctaaatgcagatcagaatctaatatggccacctctgaagatcttggaccagatgaaaagggtgccgatgaagagggttcccaaaggaaacgaatgcgaagttgatcaatgttgaccagttttgtgcattgtaacttatgattttccgttggtgtatctcatagagttgaatcttgcaataccatggccattctgccaaagtcatgtacatgtatagttggactagtaacgttcatattttcttgcagccaacggttacattttaacttaaaattatttcgtcccttgc

SEQ ID NO: 3856 - protein, 250 aa, Glycine max
  misc_feature (1)..(250): Ceres Seq. ID no. 13593988
LPPGRPPAPSQMIPHPNVGAYMSSQQPTVGYTNLISSLMSQGVISLANQLPAQDSVGTEFNPDILKVRHESAVNALYGDLPRQCTTCGLRFKCQEEHSSHMDWHVTKNRMSKTRKQKPSRKWFVSDRMWLSGAEALGTESAPGFLPTETIEERKDDEELAVPAEEDQNTCALCGEPFDEFYSDEMEEWMYRGAVYLNAPTGTTAGMDRTQLGPIIHAKCRSESNMATSEDLGPDEKGADEEGSQRKRMRS

SEQ ID NO: 3857 - protein, 239 aa, Glycine max
  misc_feature (1)..(239): Ceres Seq. ID no. 13593989
MIPHPNVGAYMSSQQPTVGYTNLISSLMSQGVISLANQLPAQDSVGTEFNPDILKVRHESAVNALYGDLPRQCTTCGLRFKCQEEHSSHMDWHVTKNRMSKTRKQKPSRKWFVSDRMWLSGAEALGTESAPGFLPTETIEERKDDEELAVPAEEDQNTCALCGEPFDEFYSDEMEEWMYRGAVYLNAPTGTTAGMDRTQLGPIIHAKCRSESNMATSEDLGPDEKGADEEGSQRKRMRS

SEQ ID NO: 3858 - protein, 229 aa, Glycine max
  misc_feature (1)..(229): Ceres Seq. ID no. 13593990
MSSQQPTVGYTNLISSLMSQGVISLANQLPAQDSVGTEFNPDILKVRHESAVNALYGDLPRQCTTCGLRFKCQEEHSSHMDWHVTKNRMSKTRKQKPSRKWFVSDRMWLSGAEALGTESAPGFLPTETIEERKDDEELAVPAEEDQNTCALCGEPFDEFYSDEMEEWMYRGAVYLNAPTGTTAGMDRTQLGPIIHAKCRSESNMATSEDLGPDEKGADEEGSQRKRMRS

SEQ ID NO: 3859 - DNA, 1777 bp, Glycine max
  misc_feature (1)..(1777): Ceres Seq. ID no. 13594023
acaatcgctctcaatctttccagattttctcccaaaccgttcaaacccgtatcgcgtgtcaaattgttcttctgattttctcattgatcgcgattatcgcatctcaaatcgaacttgaatcagagaagacgttgaatttttgaaaagtgagaaaagagggattctggaacgtctctatcgtggtttgtcagtaccctatctcaaacgaaaatgtcatctttatatggaggggaatccaagaggtacaataatatacccagaggacaccatcatttgacaacacagaagaaacaggagattagggaagcctttgaattattcaatactgatggctcaggtactattgatgccaaggatctgaatgttgccatgagggccattggatttgaaatgacagaagagctcattaatcaaatgaaagcagatttggacaaggatggaagtggagcaattgattatgaagaatttgagtacatgatgacaaccaaaataggagagcgggacagtaaagagggaaagatatctgcatcagacatcaagtgcattgcgaaagagccaggtcaaaatttcactaacagagacattcaggagatggttgacgaagcagaccaagatagtaagttattccaatcttatccttgtcaacattctaattttacagcaaaacttttacttctaatactgtggatttttattctgaggtttactgggtgtggatgcatgggagtgatgggaccatggacttcagatcttgctgacataatgtgtgtatataaaaaaaatactatcatttctttgaaattcaaattggccgttttctgcattaaaataaataaatggacaatacagaggccaaaagattaaaaaaaaaagtattcatgaatcattatgataagaggtcactaaattgtatacaagactcactggaaaaataagtagtttgtagttttacctcagtaacactaatcagtttaccaaaaaaatgatacaaagtggtatatatgtttgaaaaattaaataggaatatttcttattcaaaagttatttttcaatgtagtttttaaaagtatattgggatgtttgcattggaatcataatgctcaggggaggtcaatgtattatacactcttgtctgttggatgacaaattctattatataaatgataaaggaacactatatttgccattattttatttttaatgatagatttagtgatcaaccttgacttgttttatttgttcgacattgcataggtttaatgtctgttaatttattattcatgttaattaccatagaattgaaaatatcacagcctgaggtcttaaaaggaaaaggaagaaaacattaccttttgcgaaaagtattttaaagcttgctaggatagaggcttaatcgtggttcaattataatttataacaggggtgcctcattttttattttgcttccccattagtgtactatttcttctcatgattatcagatgttatatctatttttaagttataaaatatgcagattgtcctgaagttagtgcagaggagtttataaggatgttgttcgatcccccctactacggccactaatcgtacagaaattaatgcagtcatattttcataaatttaaattggagatgctagttatgatcaaacaacctcgaacctcgaagttatcgtgtgtaatttttaatttcttttatcaatctatatattgttcattttcataaatttaaattggagatcctagttatgatcaaacaacctcgaagttctcgtgttt

SEQ ID NO: 3860 - protein, 217 aa, Glycine max
  misc_feature (1)..(217): Ceres Seq. ID no. 13594024
MSSLYGGESKRYNNIPRGHHHLTTQKKQEIREAFELFNTDGSGTIDAKDLNVAMRAIGFEMTEELINQMKADLDKDGSGAIDYEEFEYMMTTKIGERDSKEGKISASDIKCIAKEPGQNFTNRDIQEMVDEADQDSKLFQSYPCQHSNFTAKLLLLILWIFILRFTGCGCMGVMGPWTSDLADIMCVYKKNTIISLKFKLAVFCIKINKWTIQRPKD

SEQ ID NO: 3861 - protein, 164 aa, Glycine max
  misc_feature (1)..(164): Ceres Seq. ID no. 13594025
MRAIGFEMTEELINQMKADLDKDGSGAIDYEEFEYMMTTKIGERDSKEGKISASDIKCIAKEPGQNFTNRDIQEMVDEADQDSKLFQSYPCQHSNFTAKLLLLILWIFILRFTGCGCMGVMGPWTSDLADIMCVYKKNTIISLKFKLAVFCIKINKWTIQRPKD

SEQ ID NO: 3862 - protein, 157 aa, Glycine max
  misc_feature (1)..(157): Ceres Seq. ID no. 13594026
MTEELINQMKADLDKDGSGAIDYEEFEYMMTTKIGERDSKEGKISASDIKCIAKEPGQNFTNRDIQEMVDEADQDSKLFQSYPCQHSNFTAKLLLLILWIFILRFTGCGCMGVMGPWTSDLADIMCVYKKNTIISLKFKLAVFCIKINKWTIQRPKD

SEQ ID NO: 3863 - DNA, 1191 bp, Glycine max
  misc_feature (1)..(1191): Ceres Seq. ID no. 13594037
cccccatgtttttattaatttgattttctctttcgtggttttttttttatacataacttgagagaattgttttttgttttggcattatgtggctttaaattgtttgacatgacaataattgagtggtaattaaatttgatgtgaacgagtgtagatttgtgatacacataaaagccggggcatacttcgagaatgtggaggtaatcaggaagaagaccaatctgatgttcgtcggagatgggattggaaagactgttgtgaaggccagtaggaatgttgtggatggctggaccactttccaatcagccactgttgctgtggttggagacggattcatagcaaagggtataacctttgaaaattctgctgggccaagcaaacaccaagccgtggccctaaggagtggttctgatttctcagccttctataaatgcagcttcgttgcctaccaagatactctctatgtccactccctgcgccaattctaccgcgattgtgacgtttatggcacagtcgacttcatcttcggcaatgcagcaacagtgctccagaactgcaacttgtacgcacgcaagcccaatgaaaaccaaaggaacttgttcactgcacaaggaagagaagaccctaaccaaaacaccggcatttccatcttgaactgcaaggttgcagcagctgctgatttaatcccggtcaaatctcagttcaagaactacttgggtcgtccttggaagaagtattcgagaactgtttatcttaattcttacatggaggatctgatagaccccaaagggtggttggagtggaatggcacgtttgcattggatacgttgtattatggagagtacaacaataggggtcccggttcaaacacaagtgcaagagttacgtggcctggttatagggttatcaagaacgccactgaggcaaaccagttcacagttcgcaatttcattcaagggaatgaatggttgagttccaccgacattccattcttctctgatttcagttgaatacgttatggttattagtggcttcatgctcttttggtatccccatttaataaagtattagatgtttgttgtggaaatagaattcaaggaatgttattgttccttgcgacaaaagcactaactaaaataaaaaagtattttatattaattttttatcgataaawawtaatttattaatttt

SEQ ID NO: 3864 - protein, 261 aa, Glycine max
  misc_feature (1)..(261): Ceres Seq. ID no. 15221289
MFVGDGIGKTVVKASRNVVDGWTTFQSATVAVVGDGFIAKGITFENSAGPSKHQAVALRSGSDFSAFYKCSFVAYQDTLYVHSLRQFYRDCDVYGTVDFIFGNAATVLQNCNLYARKPNENQRNLFTAQGREDPNQNTGISILNCKVAAAADLIPVKSQFKNYLGRPWKKYSRTVYLNSYMEDLIDPKGWLEWNGTFALDTLYYGEYNNRGPGSNTSARVTWPGYRVIKNATEANQFTVRNFIQGNEWLSSTDIPFFSDFS

SEQ ID NO: 3865 - DNA, 614 bp, Glycine max
  misc_feature (1)..(614): Ceres Seq. ID no. 13594048
tgtctcaactctatcaaacttcaaagttcacacacacaaaagaatcagcatggctttcaatcaagagttagaagctgtaacccaagctttctcagggcatggagtggatgagaaatcattggtaacattactgggaaaatgggatcctctggagagagaatctttcaggaagaagacaccacatttgttcagtgaagatcatgaacgccattttcagaggtgggatgatcaatatgtccgtcttctcaagcatgaattcgtgcgttttaagaatgctgtggtgctttggtccatgcacccttgggaaagagatgcccgtttagtaaaagaggccctaaagaagggtccaaatgcatatggagtgctgattgaggtttcatgcactagatcctcagaagagctattgggagctaggaaggcataccattccctctttgaccactccattgaagaagatgttgcctctcacatccatggcattgaaagaaagctattggttgccctactaagtgcctatagatacgaaggaacaaaggttaaagatgacactgcaaaatcagaagccaaaatcctttccaatggcattaagaatgctcataagaagcctattaatg

SEQ ID NO: 3866 - protein, 204 aa, Glycine max
  misc_feature (1)..(204): Ceres Seq. ID no. 13594049
VSTLSNFKVHTHKRISMAFNQELEAVTQAFSGHGVDEKSLVTLLGKWDPLERESFRKKTPHLFSEDHERHFQRWDDQYVRLLKHEFVRFKNAVVLWSMHPWERDARLVKEALKKGPNAYGVLIEVSCTRSSEELLGARKAYHSLFDHSIEEDVASHIHGIERKLLVALLSAYRYEGTKVKDDTAKSEAKILSNGIKNAHKKPIN

SEQ ID NO: 3867 - protein, 188 aa, Glycine max
  misc_feature (1)..(188): Ceres Seq. ID no. 13594050
MAFNQELEAVTQAFSGHGVDEKSLVTLLGKWDPLERESFRKKTPHLFSEDHERHFQRWDDQYVRLLKHEFVRFKNAVVLWSMHPWERDARLVKEALKKGPNAYGVLIEVSCTRSSEELLGARKAYHSLFDHSIEEDVASHIHGIERKLLVALLSAYRYEGTKVKDDTAKSEAKILSNGIKNAHKKPIN

SEQ ID NO: 3868 - protein, 107 aa, Glycine max
  misc_feature (1)..(107): Ceres Seq. ID no. 13594051
MHPWERDARLVKEALKKGPNAYGVLIEVSCTRSSEELLGARKAYHSLFDHSIEEDVASHIHGIERKLLVALLSAYRYEGTKVKDDTAKSEAKILSNGIKNAHKKPIN

SEQ ID NO: 3869 - DNA, 959 bp, Glycine max
  misc_feature (1)..(959): Ceres Seq. ID no. 13594067
ttttcaattttgagagaagggaagagaagaggaagaagacgaagaagaatccaaaagcaatcccatctgtgtgtttgcacatcagaagggagggctatcaaactcaaaggattgctctgaatcggtttagtcttcttcgtttttcttcaaattcctcgtgacagatctaatctaatcaggcttttgggggtgtttcagacattgcatgcatatgggagcagtggttgtgttggatgctataaaaggcctacactgagtgctactgtggatgtgccatcgaaagggttggcaacacaaggtaacggagtgaggaaaccaagttcatcagaggatttttggaccactagcacgcatgatatggacaacagcgctgtccagtcacaggggagcatctcttcagccagtctaacaaaccaagctgtggttcttcatgctggttcttccaaaagcagcaccaaccccactgaatttgtaaatcacggtgtaattctttggaatcagactcggcaacgatgggttggaaataaaaagctcgagaaccgaacacaacaattacgagaacctaaattgaattggaatgcaacatatgaaagtttacttgggagcaacaagccattccatcagcctatccctcttgctgaaatggtagattttcttgtggacatatgggagcaggatggcctatacgactgagatgttgaagcttgaggaagtgctgaaaataattctagttcttgcttgtaggaagaactattgggcatatactgcagtttgtatatcagttgtcacatgcctatgaatatgaggaaaatttctctcggaaacatgagataactgtattatactttatttaatcgattaccttggctgcctctactatctcaagaggcaagtttttggaaaaaaaaaaaaaaaaaaaaaaaatgtttaaacacaataaagtnnnaactggagggggg

SEQ ID NO: 3870 - protein, 111 aa, Glycine max
  misc_feature (1)..(111): Ceres Seq. ID no. 15221296
MDNSAVQSQGSISSASLTNQAVVLHAGSSKSSTNPTEFVNHGVILWNQTRQRWVGNKKLENRTQQLREPKLNWNATYESLLGSNKPFHQPIPLAEMVDFLVDIWEQDGLYD

SEQ ID NO: 3871 - DNA, 1710 bp, Glycine max
  misc_feature (1)..(1710): Ceres Seq. ID no. 13594068
aaatttggacagtgaggccattttggtcatggtgtgatcattttctctgctcttattcttaatgaggcttatatccaagtttggccggttgcatattgcacaaggcgtctataaaagtaacatcactgaaatcattgtcaaattgacactgcttttctctaaaaggacttcaaagttctgttagatatacagtgttattctgctttcgatcgctctattattcatttgctaagaccttagagaagacagaggatgggtaccctgcttccagatgaaaaatcagagaatccaaatgctttggaacaacttcaacaccaaaaagatgtggatgcaggcgctctctttgtcctcaaatccaaaggttcttggatgcattgtgggtaccacttgacaacttcgatcgtggcaccacctcttctaagtcttccttatgcattcaccttccttggatggacggctgggatcttaagcttagtgattggagctttggtcactttctattcatacaatttaatatctagggttcttgaacaccacgctcagatgggtatgcgtcagctacgctttagagacatggctcgcgatattttaggtccagggtggggtcgttattttgtcggcccaattcaattcgcagtctgttatggtgctgtagtagcttgtactctcttgggaggacaatgcatgaaggcaatttacttgctgtcaaatccaaacgggaccatgaagctttacgagtttgtaattatatttggatgcttcatgctgattttggctcaaatcccatctttccactctttgaggcacattaatctagtgtccttggttctgtgcttagcctatagtgccggtgctactattggttccatttacattggagactcatcaaaaggaccagaaaaggattattctttgaaaggtgattcagtgaatcgcttatttggaatcttcaatgcaattgctatcattgccacgacttatggaaatggaatcattccagaaattcaggcaacattagcaccacccgtaaaagggaagatgctcaagggactatgtgtttgttatcttgttcttatagttaccttctttagtgtatctgtatccggttattgggcatttggtaatgaatcagaaggcctcatcttaagcaacttcgtggacaatgggaagcctctggtgcccaagtggttcatttacatgaccaacattttcactataacacaattatctgcggttggtgtggtttatttgcaaccaacaaatgaagtgctagagcaaacatttggagacccaaaaagccccgagttctccaaacgcaatgtaatccctagagtgatatctcggtcattagctattgctatttcaaccactatagcagccatgcttccattttttggagacataaactctcttataggagcttttggctttatcccacttgacttcatcttgccaatggttttctacaatttgacatttaagccatctaagcgaagccctgttttctggttgaatgtgataattgttgtggctttctccgcattgggagctatagcagcagttgcagcagttaggcagatagttcttgatgctaaaaattattaattatttgctaatgtatgatcatgttggaccatccaatgaagttttgttgttctatgtatcatggttcatactctagtagtttaaaaccaatcattgagttatttc

SEQ ID NO: 3872 - protein, 450 aa, Glycine max
  misc_feature (1)..(450): Ceres Seq. ID no. 13594069
MGTLLPDEKSENPNALEQLQHQKDVDAGALFVLKSKGSWMHCGYHLTTSIVAPPLLSLPYAFTFLGWTAGILSLVIGALVTFYSYNLISRVLEHHAQMGMRQLRFRDMARDILGPGWGRYFVGPIQFAVCYGAVVACTLLGGQCMKAIYLLSNPNGTMKLYEFVIIFGCFMLILAQIPSFHSLRHINLVSLVLCLAYSAGATIGSIYIGDSSKGPEKDYSLKGDSVNRLFGIFNAIAIIATTYGNGIIPEIQATLAPPVKGKMLKGLCVCYLVLIVTFFSVSVSGYWAFGNESEGLILSNFVDNGKPLVPKWFIYMTNIFTITQLSAVGVVYLQPTNEVLEQTFGDPKSPEFSKRNVIPRVISRSLAIAISTTIAAMLPFFGDINSLIGAFGFIPLDFILPMVFYNLTFKPSKRSPVFWLNVIIVVAFSALGAIAAVAAVRQIVLDAKNY

SEQ ID NO: 3873 - protein, 411 aa, Glycine max
  misc_feature (1)..(411): Ceres Seq. ID no. 13594070
MHCGYHLTTSIVAPPLLSLPYAFTFLGWTAGILSLVIGALVTFYSYNLISRVLEHHAQMGMRQLRFRDMARDILGPGWGRYFVGPIQFAVCYGAVVACTLLGGQCMKAIYLLSNPNGTMKLYEFVIIFGCFMLILAQIPSFHSLRHINLVSLVLCLAYSAGATIGSIYIGDSSKGPEKDYSLKGDSVNRLFGIFNAIAIIATTYGNGIIPEIQATLAPPVKGKMLKGLCVCYLVLIVTFFSVSVSGYWAFGNESEGLILSNFVDNGKPLVPKWFIYMTNIFTITQLSAVGVVYLQPTNEVLEQTFGDPKSPEFSKRNVIPRVISRSLAIAISTTIAAMLPFFGDINSLIGAFGFIPLDFILPMVFYNLTFKPSKRSPVFWLNVIIVVAFSALGAIAAVAAVRQIVLDAKNY

SEQ ID NO: 3874 - protein, 353 aa, Glycine max
  misc_feature (1)..(353): Ceres Seq. ID no. 13594071
MGMRQLRFRDMARDILGPGWGRYFVGPIQFAVCYGAVVACTLLGGQCMKAIYLLSNPNGTMKLYEFVIIFGCFMLILAQIPSFHSLRHINLVSLVLCLAYSAGATIGSIYIGDSSKGPEKDYSLKGDSVNRLFGIFNAIAIIATTYGNGIIPEIQATLAPPVKGKMLKGLCVCYLVLIVTFFSVSVSGYWAFGNESEGLILSNFVDNGKPLVPKWFIYMTNIFTITQLSAVGVVYLQPTNEVLEQTFGDPKSPEFSKRNVIPRVISRSLAIAISTTIAAMLPFFGDINSLIGAFGFIPLDFILPMVFYNLTFKPSKRSPVFWLNVIIVVAFSALGAIAAVAAVRQIVLDAKNY

SEQ ID NO: 3875 - DNA, 1414 bp, Glycine max
  misc_feature (1)..(1414): Ceres Seq. ID no. 13594080
ggggggggggsagctacgtaggccccccccccccatctctttcatactctcacgtcattatattaagctagctttgctaatattggacccttcttcaaccccaaaaatataaaaaactaaaaaaacatcaaccgaaggggtcatttctcccaatccgtttctgtttctgtcttccaggaacactgtcagtgagtgaaggatacgatgaacatcatgtctacccaccagtgtagttggcctgtgagaattcaggatcatcctgacaaaggaagtattaatagggctccattttccagaggatcagacttccttaatgttggataccatactcaaaaatatggtcatagtgccagaaaatgtaggcccgttttttccagttcagtgagcaacattacggatccttcagattcagataacactgataagaaaaaacctcagaatggtgaaatgggaggagtgaatagtgaaatgcttagagagagtctcgagaaaatagttggaaaagatgattccacgtttagtggatttgaccttgctacccttatcaggaacaaatatgggaggtcttatgatgttcagttgataaagaaggagttcatgggaagaaatctccttgcgatgaatgtcatgtggaagtacatggagcagagatccttcccattgaccgaagaagagtatattttgaggcttgatgatattgcaaacaacttaaaatgttggggagctgtgtctcatattcggaacagcctagaaaagtcgaaggaacgacctcggatagggaaggcagtaagcatttttatagatatggatgagtcgggtgctcgttccaacgagtggatctacaaatagaatgtgttactgatttgaaatcctaaagttagtcactggtttccagataacagtgaaggaaaagtccataggcagcaggtccaccacttttagtgaatttcgttagtttggaatttattacacttggatcttaacatctacagaagcttttctgacgtttctgttggcaacttggcatcaggcctaggcaactatatttttggttctgcccttctttttttcctttgttcatattgatgtaaaatgagttaatataagaaaaagcattcatattaaatttctaacaaactttctcttcaaattagaggagacactaatattaaaggtgttgtcctaagtgcatgcacattcctcgtgggaattacttgaaacatgagagaaatttgaatcctttgccagcaagtatgattatagccagctgatgctataactgcttggatagagaatacgatttttcagtgtagcttttatcaaagtagaaatttctttcgatgccaaaaaaaaaaaaaaaaaaaaaaaaaaaaaaaaagaaaaaaaaaaaaaaaaaagaattcctgcagcccgg

SEQ ID NO: 3876 - protein, 214 aa, Glycine max
  misc_feature (1)..(214): Ceres Seq. ID no. 15221297
MNIMSTHQCSWPVRIQDHPDKGSINRAPFSRGSDFLNVGYHTQKYGHSARKCRPVFSSSVSNITDPSDSDNTDKKKPQNGEMGGVNSEMLRESLEKIVGKDDSTFSGFDLATLIRNKYGRSYDVQLIKKEFMGRNLLAMNVMWKYMEQRSFPLTEEEYILRLDDIANNLKCWGAVSHIRNSLEKSKERPRIGKAVSIFIDMDESGARSNEWIYK

SEQ ID NO: 3877 - protein, 211 aa, Glycine max
  misc_feature (1)..(211): Ceres Seq. ID no. 15221298
MSTHQCSWPVRIQDHPDKGSINRAPFSRGSDFLNVGYHTQKYGHSARKCRPVFSSSVSNITDPSDSDNTDKKKPQNGEMGGVNSEMLRESLEKIVGKDDSTFSGFDLATLIRNKYGRSYDVQLIKKEFMGRNLLAMNVMWKYMEQRSFPLTEEEYILRLDDIANNLKCWGAVSHIRNSLEKSKERPRIGKAVSIFIDMDESGARSNEWIYK

SEQ ID NO: 3878 - protein, 133 aa, Glycine max
  misc_feature (1)..(133): Ceres Seq. ID no. 15221299
MGGVNSEMLRESLEKIVGKDDSTFSGFDLATLIRNKYGRSYDVQLIKKEFMGRNLLAMNVMWKYMEQRSFPLTEEEYILRLDDIANNLKCWGAVSHIRNSLEKSKERPRIGKAVSIFIDMDESGARSNEWIYK

SEQ ID NO: 3879 - DNA, 814 bp, Glycine max
  misc_feature (1)..(814): Ceres Seq. ID no. 13594085
cccccccccaatggaccttggccttaatccatctgcaacaatgtcacaggatgggaagtttggtgccaatgcttctatgataggaggggagactgaggcactgcagaggctcaaaaaatttgcagctgagtgtgcagctcagccaaacaaggggtttaaggatgggacacagagtatatatggtgccaacttctcctgcaagatttctccgtggttggcaatgggatgcctctcccctcgcacgatgtatgaagaactaaagaagactaccagcagagccatttctgcttcggcggacaagaacgatggtggtaatggctcgtccagaaacggtacaaattggttgatgtttgagttgctatggagggacttctttaggtttataacaaaaaaatacagttctgcaaagaaacagctggaagctgctccggtcactgcatgtgctggagcatatgcttaagctggaagttctagtgggcattaaagagtttgtttcagggtgtgggttggttccctacgcagacatggcagtagggtgctcgatgaacaagatttggttccccttctgaagttctgttgtaactgacagatacattatatttcaatatggaagctttacattattttctcgaaggcaagtgttggtattcttagagtaacatttcgtctgcatcgggcatcttttgagtagatctttgagtccaaaattcatgtctttgtctctcccccagtaactcgatattgtgggtgaaatttgaaaattaaaaatggatgtaattactacggcatctatatttttaataataccaggatg

SEQ ID NO: 3880 - protein, 152 aa, Glycine max
  misc_feature (1)..(152): Ceres Seq. ID no. 13594086
PPPMDLGLNPSATMSQDGKFGANASMIGGETEALQRLKKFAAECAAQPNKGFKDGTQSIYGANFSCKISPWLAMGCLSPRTMYEELKKTTSRAISASADKNDGGNGSSRNGTNWLMFELLWRDFFRFITKKYSSAKKQLEAAPVTACAGAYA

SEQ ID NO: 3881 - protein, 149 aa, Glycine max
  misc_feature (1)..(149): Ceres Seq. ID no. 13594087
MDLGLNPSATMSQDGKFGANASMIGGETEALQRLKKFAAECAAQPNKGFKDGTQSIYGANFSCKISPWLAMGCLSPRTMYEELKKTTSRAISASADKNDGGNGSSRNGTNWLMFELLWRDFFRFITKKYSSAKKQLEAAPVTACAGAYA

SEQ ID NO: 3882 - protein, 139 aa, Glycine max
  misc_feature (1)..(139): Ceres Seq. ID no. 13594088
MSQDGKFGANASMIGGETEALQRLKKFAAECAAQPNKGFKDGTQSIYGANFSCKISPWLAMGCLSPRTMYEELKKTTSRAISASADKNDGGNGSSRNGTNWLMFELLWRDFFRFITKKYSSAKKQLEAAPVTACAGAYA

SEQ ID NO: 3883 - DNA, 1078 bp, Glycine max
  misc_feature (1)..(1078): Ceres Seq. ID no. 13594108
gttatatacagctttttctttgttcgcaaaatcatcgcccacatggtcaccttcttcttctactgtgttgtgattccccttacaatcctggtccctgaggttcatgttccaatctggggagctgtttatattccttctgtcatcaccattctcaattcagttggaacaccaaggtccattcaccttctgttctattggatcctctttgagaatgtgatgtctttgcaccgtaccaaggcaacatttataggtctcttagagtatgggagggctaatgaatgggttgtgactgaaaaacttggtgactctgtcaacaataataataagaataaatcaggagatgctgccaagaagaataatgccatcaaggccacccccaaaaagactcgatccaaatttgttgaaagacttaatttactggagctgggatttgctgtcttcctcttcgtatgtggatgctatgattatgttcatgggaaacacaactacttcatctatctcttccttcagaccttaacattctcaattgtaggatttggctacgttggcaccatcgtgtaaacctcattgagccaaatttctcaagttacttaagtttcaccaatgttgtgtccatatttttctagtttctcctaaaaaaaatacatcaagggaggctgatttcttcaagcaacaaacgcagtaccaaaatcatctacagctagtttagctcaaatcattttcaattcggaaagaaaaaagtcctttccaagatttcattgccatccatcatcaagaagatacaaatcatcacagacaaagtgctgttattactagaattgcattatacaggcttaagtgcagctatgaagaagtacccaaaaaaagtggttaaattagagccttagaaattaagtagacagtgtgattttgtttgcatagattgttttgtgagattttatagttatatatttcgtgagtccttttattttaggtttgcttagtctgagcccaataatgtggtggataaaaatgcgcttctaattcatgttatttgtcattttttcaccacgaaatgaattttattttccatagatgc

SEQ ID NO: 3884 - protein, 186 aa, Glycine max
  misc_feature (1)..(186): Ceres Seq. ID no. 13594109
VIYSFFFVRKIIAHMVTFFFYCVVIPLTILVPEVHVPIWGAVYIPSVITILNSVGTPRSIHLLFYWILFENVMSLHRTKATFIGLLEYGRANEWVVTEKLGDSVNNNNKNKSGDAAKKNNAIKATPKKTRSKFVERLNLLELGFAVFLFVCGCYDYVHGKHNYFIYLFLQTLTFSIVGFGYVGTIV

SEQ ID NO: 3885 - protein, 172 aa, Glycine max
  misc_feature (1)..(172): Ceres Seq. ID no. 13594110
MVTFFFYCVVIPLTILVPEVHVPIWGAVYIPSVITILNSVGTPRSIHLLFYWILFENVMSLHRTKATFIGLLEYGRANEWVVTEKLGDSVNNNNKNKSGDAAKKNNAIKATPKKTRSKFVERLNLLELGFAVFLFVCGCYDYVHGKHNYFIYLFLQTLTFSIVGFGYVGTIV

SEQ ID NO: 3886 - protein, 114 aa, Glycine max
  misc_feature (1)..(114): Ceres Seq. ID no. 13594111
MSLHRTKATFIGLLEYGRANEWVVTEKLGDSVNNNNKNKSGDAAKKNNAIKATPKKTRSKFVERLNLLELGFAVFLFVCGCYDYVHGKHNYFIYLFLQTLTFSIVGFGYVGTIV

SEQ ID NO: 3887 - DNA, 1335 bp, Glycine max
  misc_feature (1)..(1335): Ceres Seq. ID no. 13594117
gaatttgctctagacaagtttggtgattgacgatgtcgggcttgaagcttggcacgactgcttccatctacgttcgaacagcgaaaaccaaaagcaaacccctcttatcatggagaagcccaccccaacacccccgcagccgcaggtacatgctttccccttccaaaaatcaaatcctagggttcacacctagaaacaaattcccatgctattctttgggaagggctggtcttgtcacagattttggttcgtcagtgccccaacctcaacctcaacctcagccaaagccagagccagaaccagaacctgaaccttccaaattgcttacgttgccaacaattttgactctaggccgtgtcgccgctgtcccacttcttgttgctactttctacatggacggttggcgtggaactgctgctactaccagcattttcgtcgctgcatcaatcactgattggcttgatggctatcttgctcgcaagatgaagttaaaatcttcattcggtgcattcttagatccagttgctgacaagcttatggttgctgctacactggtcttattatgtactagacctttggatggtggtgtgtttggacaagcgccgtggctactcactatacctgcaattgccataattggtagagagataaccatgtctgcagtcagggagtgggctgcttcccaggatagcaagcttttagaggctgttgctgtaaataacttggggaagtggaaaacagccacacagatgacagcattaaccatccttcttgcgacccgggactggagccatggaggaggagctgccattgtagtaggctctggtgttgctttgctttatacttcagcagggcttgccttatggtcgttggttgtatatatgaagaaaatatggagggtgttgttgaggtagcttgcgaacatttaccaatgtcacgaaagggggctgcaattttagtggcatgcaaatgtttttttttttcctgcgcaatctctaaccccatgcagtgtcatttctcctactcgtgtattttctgcgcatttttttggtcctctaaaaaagataagggccactagccatgcttaagcgttacagcagtgattgtgttgggaaaacgttgtgttgtaagttgtaacccacgttttccccaaatccatgaaggcacttgcttctccgtttgatgctttggaaagtgtgaacacacgcattttgttttaggccctaactcaatttagagtcattgaaagtttgagaattgcgaccagagaaaattcacaacaggtcaggaattattgtataatggttgatttgttctgatatagttcaacgatgc

SEQ ID NO: 3888 - protein, 293 aa, Glycine max
  misc_feature (1)..(293): Ceres Seq. ID no. 13594118
MSGLKLGTTASIYVRTAKTKSKPLLSWRSPPQHPRSRRYMLSPSKNQILGFTPRNKFPCYSLGRAGLVTDFGSSVPQPQPQPQPKPEPEPEPEPSKLLTLPTILTLGRVAAVPLLVATFYMDGWRGTAATTSIFVAASITDWLDGYLARKMKLKSSFGAFLDPVADKLMVAATLVLLCTRPLDGGVFGQAPWLLTIPAIAIIGREITMSAVREWAASQDSKLLEAVAVNNLGKWKTATQMTALTILLATRDWSHGGGAAIVVGSGVALLYTSAGLALWSLVVYMKKIWRVLLR

SEQ ID NO: 3889 - protein, 254 aa, Glycine max
  misc_feature (1)..(254): Ceres Seq. ID no. 13594119
MLSPSKNQILGFTPRNKFPCYSLGRAGLVTDFGSSVPQPQPQPQPKPEPEPEPEPSKLLTLPTILTLGRVAAVPLLVATFYMDGWRGTAATTSIFVAASITDWLDGYLARKMKLKSSFGAFLDPVADKLMVAATLVLLCTRPLDGGVFGQAPWLLTIPAIAIIGREITMSAVREWAASQDSKLLEAVAVNNLGKWKTATQMTALTILLATRDWSHGGGAAIVVGSGVALLYTSAGLALWSLVVYMKKIWRVLLR

SEQ ID NO: 3890 - protein, 173 aa, Glycine max
  misc_feature (1)..(173): Ceres Seq. ID no. 13594120
MDGWRGTAATTSIFVAASITDWLDGYLARKMKLKSSFGAFLDPVADKLMVAATLVLLCTRPLDGGVFGQAPWLLTIPAIAIIGREITMSAVREWAASQDSKLLEAVAVNNLGKWKTATQMTALTILLATRDWSHGGGAAIVVGSGVALLYTSAGLALWSLVVYMKKIWRVLLR

SEQ ID NO: 3891 - DNA, 837 bp, Glycine max
  misc_feature (1)..(837): Ceres Seq. ID no. 13594121
acttaccacacacacctcctaaaccaaaattatccaaaaccatgtccagcttcactcatgccaccacactcctccatgcccacatcaaaaccaagcacaaaaaaccctccaccaccaccaccaccaccaccccattaccccataaccattcccccaacagaaggaagctgatttcaacttttctagccacttcaacagcagcactactagtgcatggagtcaccagcaccccacaagcactggcccagagctggggcacgcactccttcatcaaggagcacttcttcgagccggggctctccccggaagacgcggtggcgaggataaagcagactgcggaggggctgcacagcattcgggaggcgctggagaccatgtcttggaggtatatcatgttctacatacgcatcaagcaggcctatcttgaccaggacttgaggactgccttcaccaccttgcctgagagtagacgcaaggagtatgtcaaaactgctaatgagttggtgtctaactttggtgagtttgataggcatattcggacgccaaaggtatatgaatcatacctatactacgagaagacattgaagtcaatagatcaacttgtggccatactagcatagcacaaggaggaagctgcagggtataacggtcttaatttgcaattcttatttttatggtataaagcctcttgttacgttttttttccttccattttaattccgaattgaaatagaaggtattatagcacgaagttcaagcatatattatgtacatgtttgtatgcaacttcaaattcatgaacacaaagaaggttctaaaatgagaagcttcaatctc

SEQ ID NO: 3892 - protein, 205 aa, Glycine max
  misc_feature (1)..(205): Ceres Seq. ID no. 15221309
LPHTPPKPKLSKTMSSFTHATTLLHAHIKTKHKKPSTTTTTTTPLPHNHSPNRRKLISTFLATSTAALLVHGVTSTPQALAQSWGTHSFIKEHFFEPGLSPEDAVARIKQTAEGLHSIREALETMSWRYIMFYIRIKQAYLDQDLRTAFTTLPESRRKEYVKTANELVSNFGEFDRHIRTPKVYESYLYYEKTLKSIDQLVAILA

SEQ ID NO: 3893 - protein, 192 aa, Glycine max
  misc_feature (1)..(192): Ceres Seq. ID no. 15221310
MSSFTHATTLLHAHIKTKHKKPSTTTTTTTPLPHNHSPNRRKLISTFLATSTAALLVHGVTSTPQALAQSWGTHSFIKEHFFEPGLSPEDAVARIKQTAEGLHSIREALETMSWRYIMFYIRIKQAYLDQDLRTAFTTLPESRRKEYVKTANELVSNFGEFDRHIRTPKVYESYLYYEKTLKSIDQLVAILA

SEQ ID NO: 3894 - DNA, 1401 bp, Glycine max
  misc_feature (1)..(1401): Ceres Seq. ID no. 13594128
aaaatcattaaaatcttttttttgcccttatgaacaccttcgtaaagaagactagaggcatcatctcccttgccaccagaggtttcgccagctcttccggagccatcaaagttaaacttctcccctccgatacttacaacctcgaaggcagaaagatccccactgaaactgaaaccaacgctgaggaacttatgcactacttcaaggaaatgtccatgatgagaagaatggaaatcgctctcgacaacctctacaaggctcgtgaaatcagaggtttctgccatttgtacgatggtcaggaatctattgccatgggtatcgaagctgccgttacttttgaagattgtttgatcactgcttacagagaccattgccaagcttactgcagaggtgattccgtccatcaaattatcgctgaattgatgggtaagagaaccggttcaaccaacggtaagggtggttctatgcatttctacagaaagaagaccaacttctatggtggtcacggtattgtcggtgctcaatgtgccctcggtactggtttgggcttcgctttgaagtaccaaaagaagcccaatgttgccattactatgtacggtgatggtgctgccaaccaaggacaattgttcgaagctgccaatatggctgctttgtggaagctccccgtcctctacgtctgtgaaaacaaccattacgccatgggtacctccaccgccagaggtgctgccagtactgaatactataaaagacttatgcccgtccccggtattagatttgctgccaacaacgtctttgccgttagagaagtcaccaaattcgccaaggaatactccatcaaagaaggtcccatctgcctcgaaatgcaaacatacagataccacggtcactctatgtctgatcccggtgttacttacagaaagaagcaagaaatcgatgaatacagaaagactaaggattgtatcacccttgtcaagcaactcatcattgacaataaggtcgccactgaggaggatcttaaggaagttgaaagagccatcaagaaggaagtcgatgaaaccgtcgaaaaggtccgtgaagatgcttatcccgatgccaaggatctcctcaaggatgtgtatattgaagaccccaaggaaccccaacacatcagaggtgttgaatacgacaagtctttcgcccccagaggattgccttaagagatttccgcatactagaaatagtagaaattttataagtctataaatgaatttaatgccttgattaaaaatttcttgttaaagaaatctggaaaaagggatttcaaaatgatttattaaatgcgtatttattttatatgacttatattcgctatatagcttggacagcatacatcatcctcatataaaaaattcctcttaactc

SEQ ID NO: 3895 - protein, 388 aa, Glycine max
  misc_feature (1)..(388): Ceres Seq. ID no. 13594129
MNTFVKKTRGIISLATRGFASSSGAIKVKLLPSDTYNLEGRKIPTETETNAEELMHYFKEMSMMRRMEIALDNLYKAREIRGFCHLYDGQESIAMGIEAAVTFEDCLITAYRDHCQAYCRGDSVHQIIAELMGKRTGSTNGKGGSMHFYRKKTNFYGGHGIVGAQCALGTGLGFALKYQKKPNVAITMYGDGAANQGQLFEAANMAALWKLPVLYVCENNHYAMGTSTARGAASTEYYKRLMPVPGIRFAANNVFAVREVTKFAKEYSIKEGPICLEMQTYRYHGHSMSDPGVTYRKKQEIDEYRKTKDCITLVKQLIIDNKVATEEDLKEVERAIKKEVDETVEKVREDAYPDAKDLLKDVYIEDPKEPQHIRGVEYDKSFAPRGLP

SEQ ID NO: 3896 - protein, 334 aa, Glycine max
  misc_feature (1)..(334): Ceres Seq. ID no. 13594130
MHYFKEMSMMRRMEIALDNLYKAREIRGFCHLYDGQESIAMGIEAAVTFEDCLITAYRDHCQAYCRGDSVHQIIAELMGKRTGSTNGKGGSMHFYRKKTNFYGGHGIVGAQCALGTGLGFALKYQKKPNVAITMYGDGAANQGQLFEAANMAALWKLPVLYVCENNHYAMGTSTARGAASTEYYKRLMPVPGIRFAANNVFAVREVTKFAKEYSIKEGPICLEMQTYRYHGHSMSDPGVTYRKKQEIDEYRKTKDCITLVKQLIIDNKVATEEDLKEVERAIKKEVDETVEKVREDAYPDAKDLLKDVYIEDPKEPQHIRGVEYDKSFAPRGLP

SEQ ID NO: 3897 - protein, 328 aa, Glycine max
  misc_feature (1)..(328): Ceres Seq. ID no. 13594131
MSMMRRMEIALDNLYKAREIRGFCHLYDGQESIAMGIEAAVTFEDCLITAYRDHCQAYCRGDSVHQIIAELMGKRTGSTNGKGGSMHFYRKKTNFYGGHGIVGAQCALGTGLGFALKYQKKPNVAITMYGDGAANQGQLFEAANMAALWKLPVLYVCENNHYAMGTSTARGAASTEYYKRLMPVPGIRFAANNVFAVREVTKFAKEYSIKEGPICLEMQTYRYHGHSMSDPGVTYRKKQEIDEYRKTKDCITLVKQLIIDNKVATEEDLKEVERAIKKEVDETVEKVREDAYPDAKDLLKDVYIEDPKEPQHIRGVEYDKSFAPRGLP

SEQ ID NO: 3898 - DNA, 1518 bp, Glycine max
  misc_feature (1)..(1518): Ceres Seq. ID no. 13594151
attcacccaacacttcaactccatcttcttccatccatttcctctttctcgatctgttccaaattcacttcacacacaggaaagaagatggagactcgcgccgccgcaaagagaaaggcaaatgccgccaccatagtctttgtcgaaaaacaataccccaacaagaggcagcgggttgtgttgggtgaacttcccaatttacaaaaccttattgtctccgaaactcaaaattcgcgcaaagagaagctcctatgtcggaagaatcccaatgagaagaaaccatcacccacaaacaacaacacctttccttcccctcagatcaacgaatcttatgattcggatatccacgggtatcttcgtgaaatggagatgcagaataagagaagaccaatggttgactacattgaaaaggttcagaaaattgttaccccaaccatgagagcaatattggtggattggttagtggaggtagctgtggagtacaagcttctatcggatactcttcatctctctgtatcatacatcgataggtttttatcagttaatccagtcagtaaatccagacttcagttactgggtgtttcgtccatgctcattgctgcaaaatatgaggagatggatccacctggtgtggacgagttttgcagcatcactgatcacacttatgacaagacagaggttgtgaagatggaagctgacatacttaagtccctaatgtttgaaatgggaaatcctactgtaagcacctttctaaggaggtatgctgatgttgcttctaatgaccaaaaaactccaaatttgcagattgaatttttgggcagctatattggcgagctaagtttgttggactatgattgtttaagattcttgccttctattgtggctgcctcggttatatttcttgccaagttcattatctgtcctgaagtgcatccatggacttcttccttgtgtgaatgctcgggttacaagccagctgagttgaaagaatgtgtccttatcttgcatgacttgtatttgtcaagaaaggcagcatccttcaaagctgttcgggcaaaatacaagcagcaaaagttcgaatgtgtggcaaacctgcctacccctccatatgtaccgagttgttactttgaagaccagtggtgcagtgaattccttgataaatgatcaaaccgaccattgcttgcatgggcatggcttagaaatttgatgcgtaggtttttgtctttgaattgcaagagcaacaggatttcattagataccaaagttcaattcccattcctgatgaactatcagggagaagacctttaaataaggatcaaataacaagatcttagaatgtacaactgcatacttgcaacatgtattaggagaattacggtgtaggatgaaccgaaaattgcattgttcttacagagaatttttatcttagtgaagtagtttttagacatatttgttaggaattttataatttttaattaattaatatggattatatattataaaaaaaaaaaaaaaaaa

SEQ ID NO: 3899 - protein, 387 aa, Glycine max
  misc_feature (1)..(387): Ceres Seq. ID no. 13594152
IHPTLQLHLLPSISSFSICSKFTSHTGKKMETRAAAKRKANAATIVFVEKQYPNKRQRVVLGELPNLQNLIVSETQNSRKEKLLCRKNPNEKKPSPTNNNTFPSPQINESYDSDIHGYLREMEMQNKRRPMVDYIEKVQKIVTPTMRAILVDWLVEVAVEYKLLSDTLHLSVSYIDRFLSVNPVSKSRLQLLGVSSMLIAAKYEEMDPPGVDEFCSITDHTYDKTEVVKMEADILKSLMFEMGNPTVSTFLRRYADVASNDQKTPNLQIEFLGSYIGELSLLDYDCLRFLPSIVAASVIFLAKFIICPEVHPWTSSLCECSGYKPAELKECVLILHDLYLSRKAASFKAVRAKYKQQKFECVANLPTPPYVPSCYFEDQWCSEFLDK

SEQ ID NO: 3900 - protein, 358 aa, Glycine max
  misc_feature (1)..(358): Ceres Seq. ID no. 13594153
METRAAAKRKANAATIVFVEKQYPNKRQRVVLGELPNLQNLIVSETQNSRKEKLLCRKNPNEKKPSPTNNNTFPSPQINESYDSDIHGYLREMEMQNKRRPMVDYIEKVQKIVTPTMRAILVDWLVEVAVEYKLLSDTLHLSVSYIDRFLSVNPVSKSRLQLLGVSSMLIAAKYEEMDPPGVDEFCSITDHTYDKTEVVKMEADILKSLMFEMGNPTVSTFLRRYADVASNDQKTPNLQIEFLGSYIGELSLLDYDCLRFLPSIVAASVIFLAKFIICPEVHPWTSSLCECSGYKPAELKECVLILHDLYLSRKAASFKAVRAKYKQQKFECVANLPTPPYVPSCYFEDQWCSEFLDK

SEQ ID NO: 3901 - protein, 266 aa, Glycine max
  misc_feature (1)..(266): Ceres Seq. ID no. 13594154
MEMQNKRRPMVDYIEKVQKIVTPTMRAILVDWLVEVAVEYKLLSDTLHLSVSYIDRFLSVNPVSKSRLQLLGVSSMLIAAKYEEMDPPGVDEFCSITDHTYDKTEVVKMEADILKSLMFEMGNPTVSTFLRRYADVASNDQKTPNLQIEFLGSYIGELSLLDYDCLRFLPSIVAASVIFLAKFIICPEVHPWTSSLCECSGYKPAELKECVLILHDLYLSRKAASFKAVRAKYKQQKFECVANLPTPPYVPSCYFEDQWCSEFLDK

SEQ ID NO: 3902 - DNA, 451 bp, Glycine max
  misc_feature (1)..(451): Ceres Seq. ID no. 13594155
acaaatgaactgctatcactgtggtcttgaatccagacatttgaaatatacttccttctttcacaatataaatgccagtgccctccggacaatgaaggatatgtttgctgaaagttccttcgataagcttttgaatcttgtggagatgaaccatcagttggcttgtgatctagaagctggtggctgtggcaagctcaaccacatccatcacttactttcaactccaccccatgtttttatgacagtcctaggttggcaaaatacatgtgagagtgccaatgatataacagagactctggcagccctgagcaccaatatagatatcagtgtcctttatcctggtttagatcctaaatgcatccataacttggtgtcagtggtttgctactacgnnnagcattatcattgctttgcttatagccataaccatgaacagtggattatgtatgat

SEQ ID NO: 3903 - protein, 150 aa, Glycine max
  misc_feature (1)..(150): Ceres Seq. ID no. 13594156
  misc_feature (131)..(131): Xaa is any aa, unknown or other
  misc_feature (132)..(132): Xaa is any aa, unknown or other
QMNCYHCGLESRHLKYTSFFHNINASALRTMKDMFAESSFDKLLNLVEMNHQLACDLEAGGCGKLNHIHHLLSTPPHVFMTVLGWQNTCESANDITETLAALSTNIDISVLYPGLDPKCIHNLVSVVCYYXXHYHCFAYSHNHEQWIMYD

SEQ ID NO: 3904 - protein, 149 aa, Glycine max
  misc_feature (1)..(149): Ceres Seq. ID no. 13594157
  misc_feature (130)..(130): Xaa is any aa, unknown or other
  misc_feature (131)..(131): Xaa is any aa, unknown or other
MNCYHCGLESRHLKYTSFFHNINASALRTMKDMFAESSFDKLLNLVEMNHQLACDLEAGGCGKLNHIHHLLSTPPHVFMTVLGWQNTCESANDITETLAALSTNIDISVLYPGLDPKCIHNLVSVVCYYXXHYHCFAYSHNHEQWIMYD

SEQ ID NO: 3905 - protein, 120 aa, Glycine max
  misc_feature (1)..(120): Ceres Seq. ID no. 13594158
  misc_feature (101)..(101): Xaa is any aa, unknown or other
  misc_feature (102)..(102): Xaa is any aa, unknown or other
MKDMFAESSFDKLLNLVEMNHQLACDLEAGGCGKLNHIHHLLSTPPHVFMTVLGWQNTCESANDITETLAALSTNIDISVLYPGLDPKCIHNLVSVVCYYXXHYHCFAYSHNHEQWIMYD

SEQ ID NO: 3906 - DNA, 1041 bp, Glycine max
  misc_feature (1)..(1041): Ceres Seq. ID no. 13594163
ataaaatggagccacaacatgtgactgatcagaatatagaaactaaaaaatcatcaacaaaaaggctagctgataaggtggcagttataactggtggtgcaagaggaattggtgcagctgcagctaaactgtttgctgaaaatggagcacatgtggtcattgctgatgtgcttgatgaactaggcaccaccgtggccaagtccattggcggccactacatacactgtgatgtgtcgaaggaagatgatgttgaatcagccataaaccttgcactatcatggaagggccatctagacatcatgctcagcaatgctggaattggaggcccagagggaagaagcatcacaacccttgaaatggaccgagtgaggcacttgttctccatcaatctttatggaacaatacatggaatcaagcatgctgcaagggcaatgatcaaaggtaacaacaaaggaggatccatcatatgtacttcaagtgctgcatccatcatgggtggattggccttgcatggatataccatgacaaaagcagcaattgatgggttggtgagaagtgctgcttgtgagttgggagagcatttgattcgtgttaactgcatttccccacatggagtcccctctgagatgcttctcagtgcttgtagaagatttggacatgatgatattacccctcaaggggtgaaggaaatgattgggagcagggcaagtttgcttaaggggaaaggtgcaaccattgaagatgtggcacatgctgctttgttcttggctagtgatgagtctggcttcattacagcacacaatcttcttattgatgggggacacacatctgctgatagcagaatgagttacatgtaccaagacccaaaatgatgagaattatgtaactatcgtttgtagaggaaacacaagaacttgatgatagaatataaaagatttacaataattacatatattctatcacttgatactcttaactttatctactatagttctttaatttccattcgaggaataatatatcgtttcttctttgggcctt

SEQ ID NO: 3907 - protein, 289 aa, Glycine max
  misc_feature (1)..(289): Ceres Seq. ID no. 13594164
KMEPQHVTDQNIETKKSSTKRLADKVAVITGGARGIGAAAAKLFAENGAHVVIADVLDELGTTVAKSIGGHYIHCDVSKEDDVESAINLALSWKGHLDIMLSNAGIGGPEGRSITTLEMDRVRHLFSINLYGTIHGIKHAARAMIKGNNKGGSIICTSSAASIMGGLALHGYTMTKAAIDGLVRSAACELGEHLIRVNCISPHGVPSEMLLSACRRFGHDDITPQGVKEMIGSRASLLKGKGATIEDVAHAALFLASDESGFITAHNLLIDGGHTSADSRMSYMYQDPK

SEQ ID NO: 3908 - protein, 288 aa, Glycine max
  misc_feature (1)..(288): Ceres Seq. ID no. 13594165
MEPQHVTDQNIETKKSSTKRLADKVAVITGGARGIGAAAAKLFAENGAHVVIADVLDELGTTVAKSIGGHYIHCDVSKEDDVESAINLALSWKGHLDIMLSNAGIGGPEGRSITTLEMDRVRHLFSINLYGTIHGIKHAARAMIKGNNKGGSIICTSSAASIMGGLALHGYTMTKAAIDGLVRSAACELGEHLIRVNCISPHGVPSEMLLSACRRFGHDDITPQGVKEMIGSRASLLKGKGATIEDVAHAALFLASDESGFITAHNLLIDGGHTSADSRMSYMYQDPK

SEQ ID NO: 3909 - protein, 190 aa, Glycine max
  misc_feature (1)..(190): Ceres Seq. ID no. 13594166
MLSNAGIGGPEGRSITTLEMDRVRHLFSINLYGTIHGIKHAARAMIKGNNKGGSIICTSSAASIMGGLALHGYTMTKAAIDGLVRSAACELGEHLIRVNCISPHGVPSEMLLSACRRFGHDDITPQGVKEMIGSRASLLKGKGATIEDVAHAALFLASDESGFITAHNLLIDGGHTSADSRMSYMYQDPK

SEQ ID NO: 3910 - DNA, 1325 bp, Glycine max
  misc_feature (1)..(1325): Ceres Seq. ID no. 13594168
atttttcactacttcacttgactagtccaattatctgatgccatatcaaaaccatgtctgacccttctaccctcttaccctcctcccaccaccaccacaaccaccatgtgccactcatccaaggcggcgccaccgcaccctcctcctcctccaccaccctagcccgagaataccgcaagggcaactggaccatccaagagaccctcattctcaccactgcaaaaaagctcgacgacgagcgcaggctcaaaacccctgctgcatgtagcacctccaccaccaccaccagaaccagcggcgagctccggtggaaatgggtggagaactattgctggagccatggctgcttgcgaagccagaaccaatgcaacgacaaatgggacaacctcctccgcgattacaaaaaggttcgcgactacgagtccaaatcaaacgacaacgacaacaacaacaacaaacacttcccttcttattggaccctcaacaaacaacaacgtaaggaacagaacctcccctccaacatggtcttcgaagtctaccaaaccatcgccgatgtcctccaacgaaaacaaacacaatcccaaagacaacatcaacaacctctggctattccattagttacttcctcaccctcaccacttcaaacacttccaccacctcctctaccaccaccgccgcctccgccacctcctcctccgccagttagctccaccactccggtaggctcagagagatcggaatcatcaggaactgagcacagtgaggatgatgatgatgggtcggaatcaaaacgtaggaaagttaagaaccttggttcaagaataatgcaaagtgcatcggtgttggcacgagctcttaggagttgtgaggagaagaaggagaaacggcaccgtgaaatgattgagctggagcaaaggaggattcagatggaggaagctcggaatgaggttcaccggcaaggcatcgcgacccttgtcgccgccgtcaccaacctttccggtgccattgagtcactcattaataattctgaacgccatggccaaagataattaattaatatggcaccatataataataataatatatgcttcctcgcctagctagcagtttattattattatgtgattgatcagaaaatcatataatatctatcggccattctttccctcttcaaattcaattgttgtctaatatttttgagtcggttttaccaccaattgatttctcatgattatatgtcagcagctgatatgtgatcgatccatatggtatatgtttcattattctttggtggagatcaaaccaagccctaacattgattgttt

SEQ ID NO: 3911 - protein, 331 aa, Glycine max
  misc_feature (1)..(331): Ceres Seq. ID no. 13594169
MSDPSTLLPSSHHHHNHHVPLIQGGATAPSSSSTTLAREYRKGNWTIQETLILTTAKKLDDERRLKTPAACSTSTTTTRTSGELRWKWVENYCWSHGCLRSQNQCNDKWDNLLRDYKKVRDYESKSNDNDNNNNKHFPSYWTLNKQQRKEQNLPSNMVFEVYQTIADVLQRKQTQSQRQHQQPLAIPLVTSSPSPLQTLPPPPLPPPPPPPPPPPPVSSTTPVGSERSESSGTEHSEDDDDGSESKRRKVKNLGSRIMQSASVLARALRSCEEKKEKRHREMIELEQRRIQMEEARNEVHRQGIATLVAAVTNLSGAIESLINNSERHGQR

SEQ ID NO: 3912 - protein, 175 aa, Glycine max
  misc_feature (1)..(175): Ceres Seq. ID no. 13594170
MVFEVYQTIADVLQRKQTQSQRQHQQPLAIPLVTSSPSPLQTLPPPPLPPPPPPPPPPPPVSSTTPVGSERSESSGTEHSEDDDDGSESKRRKVKNLGSRIMQSASVLARALRSCEEKKEKRHREMIELEQRRIQMEEARNEVHRQGIATLVAAVTNLSGAIESLINNSERHGQR

SEQ ID NO: 3913 - DNA, 1256 bp, Glycine max
  misc_feature (1)..(1256): Ceres Seq. ID no. 13594176
cattacctagaaaatcctaatcgaaaaaattctgttgattcgcaattcaaattattcgtctcgctctcaatagagaagaaaaaaaaaactgcgtttttcaaatcggtaaattggctgacacatagtaaagaatcatattaatgtcgtcaagaacattgaggagaagactctatcatggggatgttgatggcaaaaggcaggagcatttggagacttcgggattggattctttgagtgagcccttgctggcagacgatgattatattgagaataagaagatatgtactcttgaagatctatgggatgatgagaagaagaaggcgcagtttcattggacattcatattctcaaaccttattgtgcaatgggctcagtggttagcaaatttggtattaggatctggatctattcttgggcgtcttttatcttttccttctgctgcactaaatatgcaaaacaataggatgtttcctccatctctaagccctctgcaggaagaaagactaagaaatctacgacaacggcttgaagttccctttgatggttctaaagcagagcaccaagacgcacttaaacaattgtggaaattggcttacccggacagggagcttccttcacttaaatcagacctttggaaggaaatgggatggcaaggttctgacccttcaacagattttaggggtggaggatttatttcattagagaatctcatcttctttgcgatgaagtatcctgattcattccagcgattattgcataaacaagatggaaccagagctgagtgggaatacccatttgcagtagctggaatcaatatttcttttatgttagcacagatgctggatcttcaagcagggcttccatcttctttgtccggaattcgttttctcaaattgcttgaagaagatgaaatggcatttgatatccttttttgtgttgcctttcaaatgatggatgctcagtggctagcaaagcgtgcgtcatatatggaatttaatgatgttttgagatccacaagaacgcagttagagcgtgagcttggtcttgaagacatcttcagcgtgaaagatttacctgcttacaacatgttgagatgattgacaattgcctttcagttcaacatttctcttcctttttttttttgtttcttttggcggagaatgttacatgaaatgtatctaaagcatttgtcattttatctctatatagaaacgtgaaaatcaaatatcagatcaatctttctgctgatttccatc

SEQ ID NO: 3914 - protein, 318 aa, Glycine max
  misc_feature (1)..(318): Ceres Seq. ID no. 13594177
MSSRTLRRRLYHGDVDGKRQEHLETSGLDSLSEPLLADDDYIENKKICTLEDLWDDEKKKAQFHWTFIFSNLIVQWAQWLANLVLGSGSILGRLLSFPSAALNMQNNRMFPPSLSPLQEERLRNLRQRLEVPFDGSKAEHQDALKQLWKLAYPDRELPSLKSDLWKEMGWQGSDPSTDFRGGGFISLENLIFFAMKYPDSFQRLLHKQDGTRAEWEYPFAVAGINISFMLAQMLDLQAGLPSSLSGIRFLKLLEEDEMAFDILFCVAFQMMDAQWLAKRASYMEFNDVLRSTRTQLERELGLEDIFSVKDLPAYNMLR

SEQ ID NO: 3915 - protein, 215 aa, Glycine max
  misc_feature (1)..(215): Ceres Seq. ID no. 13594178
MQNNRMFPPSLSPLQEERLRNLRQRLEVPFDGSKAEHQDALKQLWKLAYPDRELPSLKSDLWKEMGWQGSDPSTDFRGGGFISLENLIFFAMKYPDSFQRLLHKQDGTRAEWEYPFAVAGINISFMLAQMLDLQAGLPSSLSGIRFLKLLEEDEMAFDILFCVAFQMMDAQWLAKRASYMEFNDVLRSTRTQLERELGLEDIFSVKDLPAYNMLR

SEQ ID NO: 3916 - protein, 210 aa, Glycine max
  misc_feature (1)..(210): Ceres Seq. ID no. 13594179
MFPPSLSPLQEERLRNLRQRLEVPFDGSKAEHQDALKQLWKLAYPDRELPSLKSDLWKEMGWQGSDPSTDFRGGGFISLENLIFFAMKYPDSFQRLLHKQDGTRAEWEYPFAVAGINISFMLAQMLDLQAGLPSSLSGIRFLKLLEEDEMAFDILFCVAFQMMDAQWLAKRASYMEFNDVLRSTRTQLERELGLEDIFSVKDLPAYNMLR

SEQ ID NO: 3917 - DNA, 1411 bp, Glycine max
  misc_feature (1)..(1411): Ceres Seq. ID no. 13594180
aaaagcgtcgatttagcttcatccctagctactagctagcactttcacttccgttaatttaacagtagaccattaacttgaaaatttcaaaacaccgcatcaaaattttcttctgaaggcactaccgaagaatggctgtttttgcatcttcatcatctttacaaacccatttgcattcctcgctcttggcaccttcttttgaaggtgcacatgatcacaactcgtggtgggtgcgagcgagatcacagaaacgcattggtcaaagattacacacacaggacatagctagagggctgagaataaaagtccagagtgcagcaacaaaaccagcaaaatctccagctgaagaagattggaaggttaagcgagaatttctgcttcagaaaagggtaagaagtgtggaagtaaaggaagctctgcgccttcagaaagaaaacagttttgtattacttgatgtaagaccagaagcagagttcaaggaggcacatcctccaggtgcaatcaatgtgcaaatatataggctcataaaagagtggacagcatgggacattgcaagacgtgctgcatttttgttttttggtattttttctgggacagaagagaaccctgagttcatcaagaatgttgaagcaaaaatagataaagatgcaaagataatagtagcttgcacatcagggggtacattgagaccatcacaaaatttgcccgaaggtcaacaatcaaggtactaaattttctctctctcacccgaacatccggaatatatttatatagggctatttttatatgatactaagtggaagaaataaattttgatcctagatggataatctagattgaaggttaatatgacttttttgtttaatttctccattcatttaaatgtttaatgtttattgcagaccatactaataaattgttaatcattaaagtctgataatagtatctatcaatgtacatagagatgcaaaatcatggagtattgtaaagttgtataactgcttgatctaaactgcatcaattccatctacagaccgcaatttacaagtagctcttaaatctaaattattctgcaacagctaaaatacgccaccgcatttgtccatttgatattaccaagaatgtttactttcatgtcaaaagcttaaattgtcagtgaaaacacaactcttgacattaaacacatggaaacatgtcaaacctagaatatgaaccaaaacaccatctaaagccaaatgatatgaccaagagcgtttaccattatgttaaaaatttaagttgttaacagggacaaaatagttgagatataacactatgttctaaacataggcttttttctatttaagctattgggcatggaccactaaattgaacttgagttgggtttaagactgaaaaatatgaaatagat

SEQ ID NO: 3918 - protein, 199 aa, Glycine max
  misc_feature (1)..(199): Ceres Seq. ID no. 15221316
MAVFASSSSLQTHLHSSLLAPSFEGAHDHNSWWVRARSQKRIGQRLHTQDIARGLRIKVQSAATKPAKSPAEEDWKVKREFLLQKRVRSVEVKEALRLQKENSFVLLDVRPEAEFKEAHPPGAINVQIYRLIKEWTAWDIARRAAFLFFGIFSGTEENPEFIKNVEAKIDKDAKIIVACTSGGTLRPSQNLPEGQQSRY

SEQ ID NO: 3919 - DNA, 1343 bp, Glycine max
  misc_feature (1)..(1343): Ceres Seq. ID no. 13594185
gccttagtctgtgttgagacttgagagtaaggtttcaaattgaaaccttttttttcagtagtttttcacttgcgtatatcactatattcgttgtgttctgtaggttgtgtgcataacacaatcaattaagaagctgtgattctgattcagaatcagaatgttgcgaagatggagcaaagcagttactccaatctccaaatttggatcgcagcagagtcatttgaatttcgtgaaggacgtcacgcgccaaagctacgccggggttgcacccgcgccaacaacgatagaggataaacctcaaccccccgtggttaaacttgacaaaatgttttggtctaagccctgttcgctggccctgccccgggactcacccctcaaagctgaagaacctgattatcagggcatcaagcgtttcatgctcaagctcatgctgttttatagtaagcagagcaagtcaattcgaggcgctaatgttgtgtaccgaagaattgtttctcaaattgataaacctcccatttatgaagtgtttaacttggagaaaacattcaaaacaacattctctttacttgtacttcatatgtggttatgtttgcgtcgcttgaagcaagagggaaatgagggtgttgaatttggccagtacctttatgagatttacaatcatgatgtggagctaagagtctctaaagctggagttaacctactactgactaagtggatgaaagagctcgagaagattttttatgggaacattgttgcttatgatactgccatacttccagaagctaaaccgggtgatttttctaatgttatatggaggaatatattctctgaagatggttcttcaacaccagatgctgctgcatctcaatcagtacaggcgatggccagatatgctcgccgtgaagtaagttgcatgaccttaacagataaagaagcactatattcagggaattttatgttcacctctttgaagcatgagaacagaagcggaaaggggcctcaatgatgaagtggtgatttctaaatttgtgatttagcaaattgaaaatacacgctgttcttattttatttattttttacaaaaaaattgttgaataattatgacataaagctcatgtccttctccgtaaggcttttattatacttgattagcttggtgcccagaaactagaactctcatattcttgccctgtaaaatgagaaaagaaaaagggcagaagtgactgaaaaatgttgttctttctcatttttggtcatctgttcctctttactttgctttaacggcttcaatggtttgcctttgttatttgagacattacaaattttcaatacaatgcaatatt

SEQ ID NO: 3920 - protein, 282 aa, Glycine max
  misc_feature (1)..(282): Ceres Seq. ID no. 13594186
MLRRWSKAVTPISKFGSQQSHLNFVKDVTRQSYAGVAPAPTTIEDKPQPPVVKLDKMFWSKPCSLALPRDSPLKAEEPDYQGIKRFMLKLMLFYSKQSKSIRGANVVYRRIVSQIDKPPIYEVFNLEKTFKTTFSLLVLHMWLCLRRLKQEGNEGVEFGQYLYEIYNHDVELRVSKAGVNLLLTKWMKELEKIFYGNIVAYDTAILPEAKPGDFSNVIWRNIFSEDGSSTPDAAASQSVQAMARYARREVSCMTLTDKEALYSGNFMFTSLKHENRSGKGPQ

SEQ ID NO: 3921 - protein, 226 aa, Glycine max
  misc_feature (1)..(226): Ceres Seq. ID no. 13594187
MFWSKPCSLALPRDSPLKAEEPDYQGIKRFMLKLMLFYSKQSKSIRGANVVYRRIVSQIDKPPIYEVFNLEKTFKTTFSLLVLHMWLCLRRLKQEGNEGVEFGQYLYEIYNHDVELRVSKAGVNLLLTKWMKELEKIFYGNIVAYDTAILPEAKPGDFSNVIWRNIFSEDGSSTPDAAASQSVQAMARYARREVSCMTLTDKEALYSGNFMFTSLKHENRSGKGPQ

SEQ ID NO: 3922 - protein, 196 aa, Glycine max
  misc_feature (1)..(196): Ceres Seq. ID no. 13594188
MLKLMLFYSKQSKSIRGANVVYRRIVSQIDKPPIYEVFNLEKTFKTTFSLLVLHMWLCLRRLKQEGNEGVEFGQYLYEIYNHDVELRVSKAGVNLLLTKWMKELEKIFYGNIVAYDTAILPEAKPGDFSNVIWRNIFSEDGSSTPDAAASQSVQAMARYARREVSCMTLTDKEALYSGNFMFTSLKHENRSGKGPQ

SEQ ID NO: 3923 - DNA, 731 bp, Glycine max
  misc_feature (1)..(731): Ceres Seq. ID no. 13594213
agcatcaattaataaaactattcaactcacttaagcctgcacaaaaacaacttaatagaagatgccttccaagaggcttcaatggagatccttagtacttggttgtttcaaggccaccaagaaccaatccttggaatctccaaacatagtttccaagaaatcatcttcaagtagaatcttcctttctgatttaagcctaagcgattattcatcagtttctatcatgagtgatttgtccaattctctcgtgggatcaaatcttcgtattttcacctaccaagagctctctgaggttacacacaacttcagcaaatccaactatcttggggaaggtgggtttgggaaggtgtataaaggatttattgatgacaatcttaaacgtggattgaaagctcagactgtggcagttaaggccttaaacttggatggaaaacaaggccacagagagtggttggctgaagtaatctttctggggcaattgaaacatcgccatctggttaacttaattggctactgctgtgaagatgagcataggcttcttgtgtatgagtacatggagaggggcaatctagaggaaaagcttttnnnnggttatttagcagccttgccttggctaacaagaatcaaaatagcaattggggccgcaaagggacttatgtttcttcatgaagaagagaaaccagtcatatatagagatatcaaggcctcaaacattctattagactctgatt

SEQ ID NO: 3924 - protein, 223 aa, Glycine max
  misc_feature (1)..(223): Ceres Seq. ID no. 13594214
  misc_feature (175)..(175): Xaa is any aa, unknown or other
  misc_feature (176)..(176): Xaa is any aa, unknown or other
MPSKRLQWRSLVLGCFKATKNQSLESPNIVSKKSSSSRIFLSDLSLSDYSSVSIMSDLSNSLVGSNLRIFTYQELSEVTHNFSKSNYLGEGGFGKVYKGFIDDNLKRGLKAQTVAVKALNLDGKQGHREWLAEVIFLGQLKHRHLVNLIGYCCEDEHRLLVYEYMERGNLEEKLXXGYLAALPWLTRIKIAIGAAKGLMFLHEEEKPVIYRDIKASNILLDSD

SEQ ID NO: 3925 - protein, 169 aa, Glycine max
  misc_feature (1)..(169): Ceres Seq. ID no. 13594215
  misc_feature (121)..(121): Xaa is any aa, unknown or other
  misc_feature (122)..(122): Xaa is any aa, unknown or other
MSDLSNSLVGSNLRIFTYQELSEVTHNFSKSNYLGEGGFGKVYKGFIDDNLKRGLKAQTVAVKALNLDGKQGHREWLAEVIFLGQLKHRHLVNLIGYCCEDEHRLLVYEYMERGNLEEKLXXGYLAALPWLTRIKIAIGAAKGLMFLHEEEKPVIYRDIKASNILLDSD

SEQ ID NO: 3926 - DNA, 1031 bp, Glycine max
  misc_feature (1)..(1031): Ceres Seq. ID no. 13594220
atcatgatcaataacagtcttaaaaaaagaagtttgaagacctatttagaaaatttcaaatcgtttagggccagttgagtagtttaacgatttttgaattacacctgaacaccaggtacgtaaaaaataaaacaaaacaaaaacacttcctcttcctcctttcccccgaaaaacccttaaaccacgaccttcatatttgcagtgctagtctgtttatttcttcagctatgtttttgtcaagaacacttggacgaacactctttgctgctgctgccagatcaaaacaatatgccactacagcagctgctgctagcagagaaggacacaacccccttcaggagttttttgaggcagacaggagccctgaagatgacaaacctgttgtttatggtcggagttggaaggcgtgtgaactgcgtctgaagtcttgggatgaccttcataagttgtggtatgtgttgttaaaggaaaagaacatgttgatgactcaacgtcaaatgcttaatgcacagaacctgcgttttcctaacccagagcgcatccctaaggtgaggaagtcaatgtgtcgcatcaagcatgtacttactgagagagcaattgaagaaccagatccgaggaggtctgctgagatgaagagaatgataaatgctctttgatggcttaaaatggacctgttcctttagtagcattactgggtatgttgttagaataggacctctacatttgcggatgtaaggttgctaacttgaagcattgtcctaatatattgtttacgaaggagtttacctgtgaatgatttctatttcttgataaagtgttaagtgggttacatcccaaatattttgctgtcctaatttctatttcctacttttagatgtatcaagcaaacaagtgttatcatattatcgtgttagaggttatgcaaaatgttagggaggaagggttgttcctgctttcatgtaataaaaatgtttttccctgttactttaaagggcaacctttgaaaaatgaatagtataattttacctgcc

SEQ ID NO: 3927 - protein, 142 aa, Glycine max
  misc_feature (1)..(142): Ceres Seq. ID no. 13594221
MFLSRTLGRTLFAAAARSKQYATTAAAASREGHNPLQEFFEADRSPEDDKPVVYGRSWKACELRLKSWDDLHKLWYVLLKEKNMLMTQRQMLNAQNLRFPNPERIPKVRKSMCRIKHVLTERAIEEPDPRRSAEMKRMINAL

SEQ ID NO: 3928 - DNA, 966 bp, Glycine max
  misc_feature (1)..(966): Ceres Seq. ID no. 13594228
gggtacactcaccacacactacacactagtttgtgtttttcgcgccactcagttattcatttagaaagctactgctgagttcacaagtttctcaagcttgatggggacacaaaagtctaatatgtttgatgcacctttcaaatacatggtgcctgaagataaggaaattcccgacagacctttgccatcacattggactccttctatgcaggcatataacacttctgggtctactccaactccctttttaaatcaacaggcagctggttctcacatgcctctctacatgtgggtaaatcaggtaaacaacacactacttcaatccgatgctttgcatgatccaaggatgctctccagtaaacccacagtagctggggattttccttcaactaagaagcagcactgtaatttgatgcttgaaaatgcaagttcaaccaaactgaatcaggatttggagacaggcctagatgcatctgacgctaatgctcaacttgtaaatttggaaaaggatgaaataagaagagaaagaaaaagacagtcaaacagggaatcggcgaggagatcaaggatgcggaaagagaaagaatgtgaagagctacataaacaaatggaaatgcttaaggatgaaaactccgtgctcacacagaggctcaagagtctttctgaggagtgcctggagatctgcaatgaaaacgatgccatcgaggaagagctgattaaaatgtatggaccagaatcaatagcagatctattgctcttcaagcctacctgaccctgttgctggttaaggaagaaagcatcttacaactaatcagaatatattgtttcattttttattagggccagttgaattctgaacttgcttatgtcggcttaggttaaggaaggaaatgtaaggttacaaaaaatagggattattataataaaggatttatgaatgaaaattgtagctaaaaaaaaaaaaaa

SEQ ID NO: 3929 - protein, 223 aa, Glycine max
  misc_feature (1)..(223): Ceres Seq. ID no. 13594229
MGTQKSNMFDAPFKYMVPEDKEIPDRPLPSHWTPSMQAYNTSGSTPTPFLNQQAAGSHMPLYMWVNQVNNTLLQSDALHDPRMLSSKPTVAGDFPSTKKQHCNLMLENASSTKLNQDLETGLDASDANAQLVNLEKDEIRRERKRQSNRESARRSRMRKEKECEELHKQMEMLKDENSVLTQRLKSLSEECLEICNENDAIEEELIKMYGPESIADLLLFKPT

SEQ ID NO: 3930 - protein, 216 aa, Glycine max
  misc_feature (1)..(216): Ceres Seq. ID no. 13594230
MFDAPFKYMVPEDKEIPDRPLPSHWTPSMQAYNTSGSTPTPFLNQQAAGSHMPLYMWVNQVNNTLLQSDALHDPRMLSSKPTVAGDFPSTKKQHCNLMLENASSTKLNQDLETGLDASDANAQLVNLEKDEIRRERKRQSNRESARRSRMRKEKECEELHKQMEMLKDENSVLTQRLKSLSEECLEICNENDAIEEELIKMYGPESIADLLLFKPT

SEQ ID NO: 3931 - protein, 208 aa, Glycine max
  misc_feature (1)..(208): Ceres Seq. ID no. 13594231
MVPEDKEIPDRPLPSHWTPSMQAYNTSGSTPTPFLNQQAAGSHMPLYMWVNQVNNTLLQSDALHDPRMLSSKPTVAGDFPSTKKQHCNLMLENASSTKLNQDLETGLDASDANAQLVNLEKDEIRRERKRQSNRESARRSRMRKEKECEELHKQMEMLKDENSVLTQRLKSLSEECLEICNENDAIEEELIKMYGPESIADLLLFKPT

SEQ ID NO: 3932 - DNA, 1655 bp, Glycine max
  misc_feature (1)..(1655): Ceres Seq. ID no. 13594232
atttcctgcttctctctcatctattgactcatccattacctgaacaaacacctagaattttgtcctgttcccttcatttcattttcattggatttatatagcattgcaacgatcggatagctatttgctacttgattgattctttgccagcgtgggatttgagaaagaaaaaaaaaacagtaacaggaaaggagggtagcattaagggaagaactcaggttgcgggaagaggtaaaaaaaatggagcatggggatggagaagcggtgataattgggggtatggtattggacattcatgctacaccttcaatgctagcaaatcctggaaccactacccctggcaaggtctattatgtccaaggaggtgtggcaaggaatgtagccgagtgcatgtcaaaactaggagcaaagccatacatgattagtgctcttgggtttgacatggcaggaaatctgctgttgaatcagtggaaatctgctggcctatctatagaaggtattttgaaggataaagatattgagactccagtagtatgcaatatatttgatgttaatggtgaggtagcagctggtgttgctagtgtggaagcttttgaaaaatatctgacacctgactggatctttcgcttcaaaaacactttactatctgctccagtgttaatggttgatgcaaatctgagtcatccttctcttgaagctgcttgtaaaatggcgattgacatggagtgtcctgtatggtttgagccagtatcagttactaaatcccgaagaatcagttctattgtcgagtatgtaacttttgcttctccaaatgaagatgaacttattgcgatggcgaatgctttatctggcagtgatgagtttcatccacttaaagaaagtcagaagaaaaatatttcagtattatctttgtttcaaatgctgaaaccagcaatatgggttttgctagaaaaaggcattaaagtggtcctagtgacctttggctctaatggagtgtttttatgcaataaaggatggcctagacaatttaaaatgcctgcagagaaaacaaatcagtgtggcttcagaggacaattattcaagactgttatgcaaaaatgtccacctagtcgttattctggtttttcagaacttgatagaagctctcatctctttgctgtgcattttccctctcttcctgcatcagttgtgaggcttactggcgctggtgattgcttagttggtggaacactcacatcaatttgtgcaggattagatattatgcaaagtgtgtctgttggcattgcagtggctaaagctgtagtggaggttgaggctaatgtcccatctactttcagtttatctgctatcacaggtgctaaagttctcttcccccaatcgatgttgtaaattttgaatgaggatgactggtagataaacagcttgagttgcgatacaaccaccacctttgcccagaaaaaatgataacatcttacaaaggcttgtggcattgaaatatgaattaataactatatttttttagtttttatttcatatttttctataagagtttaattgatacacttttttttaaacattgatatgcacttttgcactaacatgttatacttgatcatgtcatgatgtcggtctttgtagtgaatatttttccccct

SEQ ID NO: 3933 - protein, 382 aa, Glycine max
  misc_feature (1)..(382): Ceres Seq. ID no. 15221325
MEHGDGEAVIIGGMVLDIHATPSMLANPGTTTPGKVYYVQGGVARNVAECMSKLGAKPYMISALGFDMAGNLLLNQWKSAGLSIEGILKDKDIETPVVCNIFDVNGEVAAGVASVEAFEKYLTPDWIFRFKNTLLSAPVLMVDANLSHPSLEAACKMAIDMECPVWFEPVSVTKSRRISSIVEYVTFASPNEDELIAMANALSGSDEFHPLKESQKKNISVLSLFQMLKPAIWVLLEKGIKVVLVTFGSNGVFLCNKGWPRQFKMPAEKTNQCGFRGQLFKTVMQKCPPSRYSGFSELDRSSHLFAVHFPSLPASVVRLTGAGDCLVGGTLTSICAGLDIMQSVSVGIAVAKAVVEVEANVPSTFSLSAITGAKVLFPQSML

SEQ ID NO: 3934 - protein, 369 aa, Glycine max
  misc_feature (1)..(369): Ceres Seq. ID no. 15221326
MVLDIHATPSMLANPGTTTPGKVYYVQGGVARNVAECMSKLGAKPYMISALGFDMAGNLLLNQWKSAGLSIEGILKDKDIETPVVCNIFDVNGEVAAGVASVEAFEKYLTPDWIFRFKNTLLSAPVLMVDANLSHPSLEAACKMAIDMECPVWFEPVSVTKSRRISSIVEYVTFASPNEDELIAMANALSGSDEFHPLKESQKKNISVLSLFQMLKPAIWVLLEKGIKVVLVTFGSNGVFLCNKGWPRQFKMPAEKTNQCGFRGQLFKTVMQKCPPSRYSGFSELDRSSHLFAVHFPSLPASVVRLTGAGDCLVGGTLTSICAGLDIMQSVSVGIAVAKAVVEVEANVPSTFSLSAITGAKVLFPQSML

SEQ ID NO: 3935 - protein, 359 aa, Glycine max
  misc_feature (1)..(359): Ceres Seq. ID no. 15221327
MLANPGTTTPGKVYYVQGGVARNVAECMSKLGAKPYMISALGFDMAGNLLLNQWKSAGLSIEGILKDKDIETPVVCNIFDVNGEVAAGVASVEAFEKYLTPDWIFRFKNTLLSAPVLMVDANLSHPSLEAACKMAIDMECPVWFEPVSVTKSRRISSIVEYVTFASPNEDELIAMANALSGSDEFHPLKESQKKNISVLSLFQMLKPAIWVLLEKGIKVVLVTFGSNGVFLCNKGWPRQFKMPAEKTNQCGFRGQLFKTVMQKCPPSRYSGFSELDRSSHLFAVHFPSLPASVVRLTGAGDCLVGGTLTSICAGLDIMQSVSVGIAVAKAVVEVEANVPSTFSLSAITGAKVLFPQSML

SEQ ID NO: 3936 - DNA, 499 bp, Glycine max
  misc_feature (1)..(499): Ceres Seq. ID no. 13594233
ctagaacatcctaatcgaaaaattgttttgtataaaagcgaagtttgtgctataaggtattttgacctcgtaagcttttcagttttcaccgccgtcactcatggcttcccaatctcaggttcagatcagcaagctccgtgtttcggttttaccggaaagtgacagtggaacgacgtcgtcgcccaaagggcagtgcctctgttctccaacgacacatgaaggctccttccggtgccgttttcatcgatcagtcgcagcttcatcatctccaccttcttggatgaaacgctccgacaacaattagcaaccctgtcgtttatgtctctctctcgatccattggttcgtgtctatgttgttagtccttatgtttatccatcaataactacgtagtactttcagaatttgcacagttaattaatttatcatgtgctaaattctatgtaagtgcttatatactctaaagagaggtaataattaatgcttgtgttgtgtagctcc

SEQ ID NO: 3937 - protein, 67 aa, Glycine max
  misc_feature (1)..(67): Ceres Seq. ID no. 13594234
MASQSQVQISKLRVSVLPESDSGTTSSPKGQCLCSPTTHEGSFRCRFHRSVAASSSPPSWMKRSDNN

SEQ ID NO: 3938 - protein, 53 aa, Glycine max
  misc_feature (1)..(53): Ceres Seq. ID no. 13594235
LEHPNRKIVLYKSEVCAIRYFDLVSFSVFTAVTHGFPISGSDQQAPCFGFTGK

SEQ ID NO: 3939 - DNA, 931 bp, Glycine max
  misc_feature (1)..(931): Ceres Seq. ID no. 13594252
ctctttcctcttgtgcgtgcagtagtgactagtgagcaaaaacgaaagaaagagccaccgtaaccgtaatcgcactgttagtaatatcaattctatagtttgttactgacgctgcacccaccgctaaactaaacttccccaatcaccatgggagattctaaacatatttccgttcaccgtcttctcggcgaaggcttaattgctgatgtggtgctgtggaagaattggcgcggagcggttgcggtgcttgtatctgccaccgcattgtggtacctcttcgagcgagccggttacaatttcttgtccttcgtcgccaatgtagtgttgcttcttgttgttattctctttttctgggccaaagctgctaaccttctcaatagacctcttcctcctctccccgatctggagatctcagaggaaactattgccagggttgctgatgcactgcaaatttggatgaatcgggctttgtccgttgcacatgacatagcaattgagaggaatttgctgctttgcctccaggttgttggtgtattgtgggtaatatcttacattggtagtttgttcaactttttgactttgatctattttggtgttcttctttgcttgtctcttcctgtgttgtatgacaagtaccaggaccaagttgatgacaggctgtgtgtgattcatgggattattcagacacagtatacaaaagttcacagtactgttttaagcaagattccaaaactctcaaacaaagaaaagaaggtgcagtaggaacatggtaagagcattctataatttggcatgtatttgatgcaaatagttactcaaaagcatattatcttacttatgtttgtagccaacttgtctattgaatgattaaatgtccatgattctactgttaatagcaatgtaacttattttagttctgcctgtggaagag

SEQ ID NO: 3940 - protein, 204 aa, Glycine max
  misc_feature (1)..(204): Ceres Seq. ID no. 13594253
MGDSKHISVHRLLGEGLIADVVLWKNWRGAVAVLVSATALWYLFERAGYNFLSFVANVVLLLVVILFFWAKAANLLNRPLPPLPDLEISEETIARVADALQIWMNRALSVAHDIAIERNLLLCLQVVGVLWVISYIGSLFNFLTLIYFGVLLCLSLPVLYDKYQDQVDDRLCVIHGIIQTQYTKVHSTVLSKIPKLSNKEKKVQ

SEQ ID NO: 3941 - DNA, 932 bp, Glycine max
  misc_feature (1)..(932): Ceres Seq. ID no. 13594254
aacttattcagccaacatagtaaggtgcaacagatagtaaccaagtgaagattccattcaagatgaaactctttgctcactttttctttatgttgttgttcttggtggccttttccaacatccaagtttgtttgggggactgtgataatcttcaggacacttgtccagcagttccacccaataagcagaccatattcatcaatggtcttcaatgcaaaaacccagttaatgtaacagctcaagatttcaggaccacagaactaagcaaaactggccctagagacatttttggtgcatctttgaaaattgtgagtgctgctgagttcattggcctcaatactcttggcctctccattggaagaactgaccttgatgggaatggcctggtgaacttccactatcatcctagggctactgagataatctatgtcaccaaaggggtgttgttggctggttttgttgacaccaaaaaccagtatttccagaagtttcttaaagtaggtgatgtctttgtgttccccaaggctttgttccacttctttctaaatactgattttgaagaagccactgttttctcagtgtacaacagccagaatcctggctttgtgtcccttagtcctacaacttttgacacaacattggagtcattggacaagatcaagaagagactcatctcactctctgcctctgaagctcaagctcaagctcaagatgtcaacagtttcatctctccagaattggaaaccatttacagttagccatttcaaattgcgtcaaattttgttatttacagcatttatttttcaaatatatagcgcttatccaaaaaagcgctgtatatattctccataacagcacttcaggcagtacatatatagcatttttttaaggagaagcgctatatattctggtatatatacagcacctgtttg

SEQ ID NO: 3942 - protein, 231 aa, Glycine max
  misc_feature (1)..(231): Ceres Seq. ID no. 13594255
MKLFAHFFFMLLFLVAFSNIQVCLGDCDNLQDTCPAVPPNKQTIFINGLQCKNPVNVTAQDFRTTELSKTGPRDIFGASLKIVSAAEFIGLNTLGLSIGRTDLDGNGLVNFHYHPRATEIIYVTKGVLLAGFVDTKNQYFQKFLKVGDVFVFPKALFHFFLNTDFEEATVFSVYNSQNPGFVSLSPTTFDTTLESLDKIKKRLISLSASEAQAQAQDVNSFISPELETIYS

SEQ ID NO: 3943 - protein, 222 aa, Glycine max
  misc_feature (1)..(222): Ceres Seq. ID no. 13594256
MLLFLVAFSNIQVCLGDCDNLQDTCPAVPPNKQTIFINGLQCKNPVNVTAQDFRTTELSKTGPRDIFGASLKIVSAAEFIGLNTLGLSIGRTDLDGNGLVNFHYHPRATEIIYVTKGVLLAGFVDTKNQYFQKFLKVGDVFVFPKALFHFFLNTDFEEATVFSVYNSQNPGFVSLSPTTFDTTLESLDKIKKRLISLSASEAQAQAQDVNSFISPELETIYS

SEQ ID NO: 3944 - DNA, 1438 bp, Glycine max
  misc_feature (1)..(1438): Ceres Seq. ID no. 13594269
agttaaacctctggtcttcggcatgaacgaaaacctgttcgaacgaatgttgtgctccttcaaagcttctagtgttcttccaatttcgctccttcaacacttcggccccaattgctgttagtggtcgtcttctttgttcaaccacgcttctctctagtctctatgaatagcgcgcatttgtagaatctgttctggagatacgagtaagcccacagattttttttttgtttttcctgtgggtgtgcatggtttacatgtgatgcaaggtttctgttaagctagcttggcaatcatttggctggcatggacatagcacattgctatttaaagggtaatgctgatgctgtggagttttgtccacatgatccctaccataatgttttagcagtatccacttacacattacaagaaggttctcagccctgtcgacatggaagcatttcactcttcaatgttgatgtggaaccaggtcaccttgacatggtttttagtgaggaaactgctgggatttttgacataaagtggaatccacctggcgggcatgcaagtccttttctagctcaagcagatgctgatggatacttgagaattaaaatgctggagggttgctgtaatggagtggaaggggttaatctaaaggagatcacaaatgaaaaaatcagtaactctatgtgcttgtacctggattggaacccttcagccacatccatcacagtggggctttctgacggctctgtgtctattgtttcttttcttgaatccaagctggaaattcaagaagagtggaaagctcatgattatgaactttggacaacctcctttgatatccaccaaccaaatttggtatacactggctctgatgattgtaaattcagttgttgggatttgcgagataaacctcccaatgtggtatttcagagctctaaagtccacaaaatgggtgtttgttgcattgagaagagtccacatgacccaaataccttgttaactggcagttatgatgaattcctaagggtatgggatttaagatcaatctcaaaaccccttaattcaattaacttggggggaggagtttggagggttaagcaccaccccttcattccaggcttggttttggctgcttgtatgcacaatggttttgctattgtcgccattaaaggcaacaatgccgaagtgtcggaaacttacaagaagcatgattctcttgcctatggagcagattggcagaaaggagaagcaaatcacataggtgggaataccaaaccactggtggctacttgctcattctacgacaaacttgttcgggtgtggaggccaggaaatgatcttatcttgtagaatgtagattgatgcttaacgttaagtcatgaacccacttgaaaatgtgatacgtagtttatttattgaattatggttgaattacatgacactttcattt

SEQ ID NO: 3945 - protein, 344 aa, Glycine max
  misc_feature (1)..(344): Ceres Seq. ID no. 13594270
MDIAHCYLKGNADAVEFCPHDPYHNVLAVSTYTLQEGSQPCRHGSISLFNVDVEPGHLDMVFSEETAGIFDIKWNPPGGHASPFLAQADADGYLRIKMLEGCCNGVEGVNLKEITNEKISNSMCLYLDWNPSATSITVGLSDGSVSIVSFLESKLEIQEEWKAHDYELWTTSFDIHQPNLVYTGSDDCKFSCWDLRDKPPNVVFQSSKVHKMGVCCIEKSPHDPNTLLTGSYDEFLRVWDLRSISKPLNSINLGGGVWRVKHHPFIPGLVLAACMHNGFAIVAIKGNNAEVSETYKKHDSLAYGADWQKGEANHIGGNTKPLVATCSFYDKLVRVWRPGNDLIL

SEQ ID NO: 3946 - protein, 285 aa, Glycine max
  misc_feature (1)..(285): Ceres Seq. ID no. 13594271
MVFSEETAGIFDIKWNPPGGHASPFLAQADADGYLRIKMLEGCCNGVEGVNLKEITNEKISNSMCLYLDWNPSATSITVGLSDGSVSIVSFLESKLEIQEEWKAHDYELWTTSFDIHQPNLVYTGSDDCKFSCWDLRDKPPNVVFQSSKVHKMGVCCIEKSPHDPNTLLTGSYDEFLRVWDLRSISKPLNSINLGGGVWRVKHHPFIPGLVLAACMHNGFAIVAIKGNNAEVSETYKKHDSLAYGADWQKGEANHIGGNTKPLVATCSFYDKLVRVWRPGNDLIL

SEQ ID NO: 3947 - protein, 247 aa, Glycine max
  misc_feature (1)..(247): Ceres Seq. ID no. 13594272
MLEGCCNGVEGVNLKEITNEKISNSMCLYLDWNPSATSITVGLSDGSVSIVSFLESKLEIQEEWKAHDYELWTTSFDIHQPNLVYTGSDDCKFSCWDLRDKPPNVVFQSSKVHKMGVCCIEKSPHDPNTLLTGSYDEFLRVWDLRSISKPLNSINLGGGVWRVKHHPFIPGLVLAACMHNGFAIVAIKGNNAEVSETYKKHDSLAYGADWQKGEANHIGGNTKPLVATCSFYDKLVRVWRPGNDLIL

SEQ ID NO: 3948 - DNA, 632 bp, Glycine max
  misc_feature (1)..(632): Ceres Seq. ID no. 13594276
gctctttgcagtacatgtttagttgtttgctgaagccaaaccaaataattcttcatttgatcactgtgtctttattttgattcaaaggctacaagacttcataactacctactaaatgcttatcttgttcctcatttcctggatcataacccaacctcttcattttgcctcatcaattcctcttcttagagatggcttgtgaaaccaagacatggttggttatggttcttcttttcttggctgctaactacttgcaagattgtgttcatggggtatcccaagttccttgccttttcatctttggggactctttatctgacagtggaaacaacaatgaacttccaacctctgcaaaatctaattacagaccatatgggatcgactttccattaggaccaacaggaagatttaccaatggcagaacagaaattgacataattactcaacttctgggatttgagaaattcatcccaccctttgcaaacactagtggttcagacatacttaaaggtgtgaactatgcatcaggtggagctggaatacgcgttgaaaccagctcgcatttgggtgctactatcagctttggattacagttagcaaatcacagagtcatagtttctcaaattgctagc

SEQ ID NO: 3949 - protein, 147 aa, Glycine max
  misc_feature (1)..(147): Ceres Seq. ID no. 13594277
MACETKTWLVMVLLFLAANYLQDCVHGVSQVPCLFIFGDSLSDSGNNNELPTSAKSNYRPYGIDFPLGPTGRFTNGRTEIDIITQLLGFEKFIPPFANTSGSDILKGVNYASGGAGIRVETSSHLGATISFGLQLANHRVIVSQIAS

SEQ ID NO: 3950 - protein, 137 aa, Glycine max
  misc_feature (1)..(137): Ceres Seq. ID no. 13594278
MVLLFLAANYLQDCVHGVSQVPCLFIFGDSLSDSGNNNELPTSAKSNYRPYGIDFPLGPTGRFTNGRTEIDIITQLLGFEKFIPPFANTSGSDILKGVNYASGGAGIRVETSSHLGATISFGLQLANHRVIVSQIAS

SEQ ID NO: 3951 - DNA, 1199 bp, Glycine max
  misc_feature (1)..(1199): Ceres Seq. ID no. 13594298
acaaccaataccatcaacacttcatttcttactctcactgaaaaaaaatagcttgttcacaccatcctattttttcaactcatatatacaaatatatataacatggcttctaccttctctcgaagcctagcacttgtaagcttttacattgtcgtttgtgctgccggtaacttgaaccaagactttcagcttacgtggggagatggtcgtgctaaaatactcaacaacgaaaatcttctcactctctcccttgacaaggcctctggctctggcttccaatccaaaaacgaatacttatatggcaagattgacatgcagctcaagctcgttcctggaaactctgctggcactgtcaccgcctattatctgtcttcaaaaggatcaacatgggatgagattgacttcgagttcttggggaatctgagtggcgatccatacattctacacaccaatgtgttcagccaaggcaagggcaacagagagcaacaattctatctctggtttgacccaactgcagatttccacacttattcaattctttggaatccccaacgcattgttttttctgtggatggcacccccatcagggaattcaagaatttggaatcaataggagttccttttccaaagagccaaccgatgaggatatactcaagcctatggaacgctgatgattgggccacaaggggtggactcatcaagactgactggtccaaagctcctttcactgcatcctacagaaacttcaacgccaatgcttgtgtttggaactctggaaaatcctcatgcaaatcaaattcttcaccttcctctgcatctcccactaatgcatggttatcacaagagcttgattccactgctcagcagaggttgcgttgggtgcagaagaactacttgatttacaattactgcaccgacaacaagagatttcctcaaggccttccactcgaatgcaaacactcctagagcctataggactcacatctcgcactacccataacaagtgttgcaatataatcttatgaaccattcttttaatttttgtattcctttttttttttttgttcgatgcttgagtgctatagtgctgttattatacaaatatacaatgtaaaaatatcccatgtaaaataatgcttctgtttttttttttaaaaaaaaaataatgcttctcttgtttgtatgactgaattttgtgt

SEQ ID NO: 3952 - protein, 287 aa, Glycine max
  misc_feature (1)..(287): Ceres Seq. ID no. 13594299
MASTFSRSLALVSFYIVVCAAGNLNQDFQLTWGDGRAKILNNENLLTLSLDKASGSGFQSKNEYLYGKIDMQLKLVPGNSAGTVTAYYLSSKGSTWDEIDFEFLGNLSGDPYILHTNVFSQGKGNREQQFYLWFDPTADFHTYSILWNPQRIVFSVDGTPIREFKNLESIGVPFPKSQPMRIYSSLWNADDWATRGGLIKTDWSKAPFTASYRNFNANACVWNSGKSSCKSNSSPSSASPTNAWLSQELDSTAQQRLRWVQKNYLIYNYCTDNKRFPQGLPLECKHS

SEQ ID NO: 3953 - protein, 217 aa, Glycine max
  misc_feature (1)..(217): Ceres Seq. ID no. 13594300
MQLKLVPGNSAGTVTAYYLSSKGSTWDEIDFEFLGNLSGDPYILHTNVFSQGKGNREQQFYLWFDPTADFHTYSILWNPQRIVFSVDGTPIREFKNLESIGVPFPKSQPMRIYSSLWNADDWATRGGLIKTDWSKAPFTASYRNFNANACVWNSGKSSCKSNSSPSSASPTNAWLSQELDSTAQQRLRWVQKNYLIYNYCTDNKRFPQGLPLECKHS

SEQ ID NO: 3954 - DNA, 1304 bp, Glycine max
  misc_feature (1)..(1304): Ceres Seq. ID no. 13594301
gcaatttttttgtcaatttagctgttgcaactgatactctaacagtgttttattctatgcatctctttaccaaattgcccctgctcaaagttgaaattctatagtcactttttaatttttttttttgttctgggtgtttttcttatctgtgttttgtttcaattgcgcgaggtgggtttttctagggtttggaggctatgccgaaagcgggttgaataagctcaggtgaagaaaatgattctcacaaagcagtaccgatgcatacactcagctagctgtcaatgtactaaagggcatttaagtgaagatgtgatattcttagtatttcataatttgaattggaatcccaagctaattgctactctatcatgtgtgtgcaaatggtttgatgatcttgccaagcgagttctatggaaagagttttgtagaacaagagctccgaaaatgttgtgtgatctgcaatctaatgggagccacattgttgatgggaactggagggccctagggaagcttcttatatactgttcaggatgcacaaaaggtggcttgttcaatagcattcagatccctggtcactttgtttatcagacacgattttctagaacatcaggaaagagctttcttttgccacaatgcagaactgatgttttgtatgtgtctgatccttgtgagcatcttgaccaaggtgaagaaggagatgtaggattcttccgtggcattttcaagtcatttgcaacctcaaaggtcaggaagatgcttattaataaaggtgccaagctccatccaacagaagtctgcccttattgtaaggcaaagttgtggagcatgctgcaagccaaaatgatccctcaaagtgctagttgcaggttgggttcttatgatgattgtattgagtattatgtgtgcctcaacggccacatgcttgggatatgtacactgttaccattgtctgattcagaagaggcatctgaattggagtaatacctaaatgattttcaggttggcagtaaatcttcacaagttggctaaacactgctggtatactccaggctcaattcaactaatcagcacctaaaatatgccattaacttaccctcaagcttgatgctgcaatctcacccaacccaagccacaatttccaaggaaggacggagatgatcaatttttagtatgaatcgttatactgaagtttgttactgtgaactatgtgatatcccatgtagattgatacgcggtgtctctacctgtgacaaatatgcgtgtgtaataattcatacttgttcaatataatcaggattcattct

SEQ ID NO: 3955 - protein, 248 aa, Glycine max
  misc_feature (1)..(248): Ceres Seq. ID no. 13594302
MILTKQYRCIHSASCQCTKGHLSEDVIFLVFHNLNWNPKLIATLSCVCKWFDDLAKRVLWKEFCRTRAPKMLCDLQSNGSHIVDGNWRALGKLLIYCSGCTKGGLFNSIQIPGHFVYQTRFSRTSGKSFLLPQCRTDVLYVSDPCEHLDQGEEGDVGFFRGIFKSFATSKVRKMLINKGAKLHPTEVCPYCKAKLWSMLQAKMIPQSASCRLGSYDDCIEYYVCLNGHMLGICTLLPLSDSEEASELE

SEQ ID NO: 3956 - protein, 178 aa, Glycine max
  misc_feature (1)..(178): Ceres Seq. ID no. 13594303
MLCDLQSNGSHIVDGNWRALGKLLIYCSGCTKGGLFNSIQIPGHFVYQTRFSRTSGKSFLLPQCRTDVLYVSDPCEHLDQGEEGDVGFFRGIFKSFATSKVRKMLINKGAKLHPTEVCPYCKAKLWSMLQAKMIPQSASCRLGSYDDCIEYYVCLNGHMLGICTLLPLSDSEEASELE

SEQ ID NO: 3957 - DNA, 1294 bp, Glycine max
  misc_feature (1)..(1294): Ceres Seq. ID no. 13594308
attcaaccaaataaccactccccccttcgtagtagtgggtgcacccatccacgcaccacaaaattaataacccaaaaaatacaaaaacaactttgcaatttcgtaggagatgctcaggagcagcacgctaacacagagtgttacagtcacctgtgttcgtcacagtcacagacaatggttccaatcaattcccgtaaattatagattctttgacgctgctcggaactctctatcatcacccaactccgcgatcttcaaatggaaaagaaaggccaattataaccgtcatagttctggaatggggaccttcaccactcgcgcgttggcgcagccgcttcagaacgccgacgaactcatcgactccgtcgagacatttatcttcgattgtgacggagttatatggaaaggtgataaattaatagacggagtgcctgaaacgcttgacatgcttcggtcaaagggcaaaagattagtttttgtcaccaataactcaacaaagtctaggaagcaatatggaaagaagtttgaaacacttggcctgaatgtcagcgaggaggagattttcgcatcattctttgcagctgctgcatatctgaagtccattgatttcccaaaagataaaaaggtttatgtcatcggagaagatggcatcttgaaggagcttgagcttgctggataccagtaccttggtgggccggaagatggtgggaaaaaaatagaactgaagccaggatttttgatggagcatgatgaagatgttggagcagttgttgttgggtttgatcgctacttcaactactataaaatccagtatgggacactctgtatacgtgaaaaccctggatgtcttttcattgctacaaaccgagatgctgttactcatctcacagatgctcaagaatgggcaggtgggggctcaatggttggcgctctcagtggatctactcaacgtgagccattagttgttggaaaaccctcaacgtttatgatggattacttggcaaacaaatttggcatttcgaagtcacagatatgtatggttggggacagattagacactgatatcttgtttggacaaaatggtggttgcaaaactcttcttgtgctctcaggggtcaccacactggccatgcttcagagccctaacaactccatacagccagacttttataccaataaaatttcagattttctttccctgaaagctgcagctgtatgactataatatttatacattatccccacacgatggtgggaaaagccatgtatttaagaagtaagttgaattttatcc

SEQ ID NO: 3958 - protein, 369 aa, Glycine max
  misc_feature (1)..(369): Ceres Seq. ID no. 13594309
MLRSSTLTQSVTVTCVRHSHRQWFQSIPVNYRFFDAARNSLSSPNSAIFKWKRKANYNRHSSGMGTFTTRALAQPLQNADELIDSVETFIFDCDGVIWKGDKLIDGVPETLDMLRSKGKRLVFVTNNSTKSRKQYGKKFETLGLNVSEEEIFASFFAAAAYLKSIDFPKDKKVYVIGEDGILKELELAGYQYLGGPEDGGKKIELKPGFLMEHDEDVGAVVVGFDRYFNYYKIQYGTLCIRENPGCLFIATNRDAVTHLTDAQEWAGGGSMVGALSGSTQREPLVVGKPSTFMMDYLANKFGISKSQICMVGDRLDTDILFGQNGGCKTLLVLSGVTTLAMLQSPNNSIQPDFYTNKISDFLSLKAAAV

SEQ ID NO: 3959 - protein, 306 aa, Glycine max
  misc_feature (1)..(306): Ceres Seq. ID no. 13594310
MGTFTTRALAQPLQNADELIDSVETFIFDCDGVIWKGDKLIDGVPETLDMLRSKGKRLVFVTNNSTKSRKQYGKKFETLGLNVSEEEIFASFFAAAAYLKSIDFPKDKKVYVIGEDGILKELELAGYQYLGGPEDGGKKIELKPGFLMEHDEDVGAVVVGFDRYFNYYKIQYGTLCIRENPGCLFIATNRDAVTHLTDAQEWAGGGSMVGALSGSTQREPLVVGKPSTFMMDYLANKFGISKSQICMVGDRLDTDILFGQNGGCKTLLVLSGVTTLAMLQSPNNSIQPDFYTNKISDFLSLKAAAV

SEQ ID NO: 3960 - protein, 257 aa, Glycine max
  misc_feature (1)..(257): Ceres Seq. ID no. 13594311
MLRSKGKRLVFVTNNSTKSRKQYGKKFETLGLNVSEEEIFASFFAAAAYLKSIDFPKDKKVYVIGEDGILKELELAGYQYLGGPEDGGKKIELKPGFLMEHDEDVGAVVVGFDRYFNYYKIQYGTLCIRENPGCLFIATNRDAVTHLTDAQEWAGGGSMVGALSGSTQREPLVVGKPSTFMMDYLANKFGISKSQICMVGDRLDTDILFGQNGGCKTLLVLSGVTTLAMLQSPNNSIQPDFYTNKISDFLSLKAAAV

SEQ ID NO: 3961 - DNA, 522 bp, Glycine max
  misc_feature (1)..(522): Ceres Seq. ID no. 13594313
aacaaaaatcatttacatcctaaagaatttggagctcaaaaacttccatcttctttacaagtcttatttgacactctcttcataagtttgaacacatacaacaatgggttttcgcttacctggaatcaggaagacatcgttttctgcaaacaaatttgcatcttcaaaagtcatggatgtgccgaagggctaccttgcagtctatgttggagagaaaatgaggcggtttgtgattccagtatcatacttgaaccaaccattattccaggacttgttaagtcaagctgaggaagattttggatatcatcatccaatgggcggcctcacaattccttgcagtgaagatgtattccaacatataacttcttgcttgaattgacaacaaagctcacactaggagactgacatagattaattaagacattttgtacacaatagggtgttgtcaacttgtaaagatattcctttctcgagaaagagggaaaagaaacattatagaatgacaaaagttacagtatttcc

SEQ ID NO: 3962 - protein, 95 aa, Glycine max
  misc_feature (1)..(95): Ceres Seq. ID no. 13594314
NKNHLHPKEFGAQKLPSSLQVLFDTLFISLNTYNNGFSLTWNQEDIVFCKQICIFKSHGCAEGLPCSLCWRENEAVCDSSIILEPTIIPGLVKSS

SEQ ID NO: 3963 - protein, 91 aa, Glycine max
  misc_feature (1)..(91): Ceres Seq. ID no. 13594315
MGFRLPGIRKTSFSANKFASSKVMDVPKGYLAVYVGEKMRRFVIPVSYLNQPLFQDLLSQAEEDFGYHHPMGGLTIPCSEDVFQHITSCLN

SEQ ID NO: 3964 - protein, 68 aa, Glycine max
  misc_feature (1)..(68): Ceres Seq. ID no. 13594316
MDVPKGYLAVYVGEKMRRFVIPVSYLNQPLFQDLLSQAEEDFGYHHPMGGLTIPCSEDVFQHITSCLN

SEQ ID NO: 3965 - DNA, 566 bp, Glycine max
  misc_feature (1)..(566): Ceres Seq. ID no. 13594336
aatttgtctcttttattcgacctcaactcagtctccttcactccatatccatatcttcctctctcacactctctaagtgatggctttcaattccaaaagggcaccgatctcaagttcaaaagccatagctgatgcagcctcatggtgctgtgcatgttttcttgtgtccctcttattgctatgcatattcagagacatctctgcccttcatgatgatcaagggaacttgatgatgagaagcagccatgtcttgtccaagccatcatgtgatgaaatatatgtggttggagaaggtgagacacttcatacaatcagtgacaagtgtggtgatccctttattgtggaaaagaaccctcatatccatgaccctgatgatgtcttcccaggacttgttctcaagattacacgctcacaaacaacatagcttgaataattgaaagttaattcctatacatgtatgtatctttcttcaatatagaacaaggaaaaaaaacttccttatgggcatcctctaaagtttttagttttggtttgcttgttgtatgtactacactttgcctagcaag

SEQ ID NO: 3966 - protein, 114 aa, Glycine max
  misc_feature (1)..(114): Ceres Seq. ID no. 13594337
MAFNSKRAPISSSKAIADAASWCCACFLVSLLLLCIFRDISALHDDQGNLMMRSSHVLSKPSCDEIYVVGEGETLHTISDKCGDPFIVEKNPHIHDPDDVFPGLVLKITRSQTT

SEQ ID NO: 3967 - protein, 64 aa, Glycine max
  misc_feature (1)..(64): Ceres Seq. ID no. 13594338
MMRSSHVLSKPSCDEIYVVGEGETLHTISDKCGDPFIVEKNPHIHDPDDVFPGLVLKITRSQTT

SEQ ID NO: 3968 - protein, 63 aa, Glycine max
  misc_feature (1)..(63): Ceres Seq. ID no. 13594339
MRSSHVLSKPSCDEIYVVGEGETLHTISDKCGDPFIVEKNPHIHDPDDVFPGLVLKITRSQTT

SEQ ID NO: 3969 - DNA, 914 bp, Glycine max
  misc_feature (1)..(914): Ceres Seq. ID no. 13594341
acccagttgcttccttttattcctgtaatccatgaaataaaattgctagcttaatagtgatccgtatagaagactagggaacttgtttgctatggcaactctgagcaattcaactaatatcttttggcaagattgtcaaataggaaggcctgaaaggcagaagctacttaaccaaaagggatgtgttgtatggattactggactcagcggatcaggaaaaagcacattggcatgctccctaagcagagaactgcactcaaggggaaagttatcttatgtccttgatggagataaccttcggcatggactaaacaaggatcttggttttaaagctgaagatcgcactgaaaatattcgcagaactggagaagtggcaaaactcttcgctgatgctggtttaatatgtgttgctagtctgatatctccttacagaagagatcgagacacttgccgtgccatgttacctgatgcaaattttattgaggttttcatgaacatgcctctagaattgtgcgaggcacgagatccaaaaggcctctataagcttgctcgtgcagggaaaatcaaaggttttaccggcattgatgatccttatgaaccgcccataaattgtgagattgaaataaagcaggaaaatgggaattgtccaacacctactatgatggctggacaagtagttacttacttggagaataaaggatttcttgaatcttagagtttttaagtttaattattctctaataatggtgtttcttctaaatgaagttaaaaaggaatcctaggaagtgcaggtaggagagtggtgagaggataaatggacttgtaaagttcatcaagtataaataataattaataattgttgcaattcattctataggttgatcaagaatttcagtatattttatcggcgtttg

SEQ ID NO: 3970 - protein, 207 aa, Glycine max
  misc_feature (1)..(207): Ceres Seq. ID no. 15221336
MATLSNSTNIFWQDCQIGRPERQKLLNQKGCVVWITGLSGSGKSTLACSLSRELHSRGKLSYVLDGDNLRHGLNKDLGFKAEDRTENIRRTGEVAKLFADAGLICVASLISPYRRDRDTCRAMLPDANFIEVFMNMPLELCEARDPKGLYKLARAGKIKGFTGIDDPYEPPINCEIEIKQENGNCPTPTMMAGQVVTYLENKGFLES

SEQ ID NO: 3971 - DNA, 656 bp, Glycine max
  misc_feature (1)..(656): Ceres Seq. ID no. 13594349
gaggaagtgagtccagagacagggatcagttatggctccgtgttcagtttttttcaattttcttcttctgcttcttctttctttcaccaaagaagctttaggtgtttcagagcaagaagctgacagagtgcatggactacccggacagcctccggtgaagttcaaacaatattctggttatatcactgtcaatgaaacccatggaagagcactcttctattggttctttgaggccactcataaaccagaagaaaagcctcttctcttatggctcaatggaggccctggttgttcctcaattggttatggagaagcagaggagctaggacccttctttcctcaggacagcagccaaccaaagctaaagttaaatccttattcttggaataacgctgccaatcttttgtttttggaatcccctgttggggtggggttctcctacaccaacaccagcagtgatataagtgagcttggtgacaccattaccgctaaagattcacacacctttatcatcaagtggtttagaagatttccacaattcagatcacacgaattctacatttccggtgaaagctatgcagggcactatgttccgcaactttcagagctcattttcgataataatcgcaatcctgtcgagaaagactacattaact

SEQ ID NO: 3972 - protein, 208 aa, Glycine max
  misc_feature (1)..(208): Ceres Seq. ID no. 13594350
MAPCSVFFNFLLLLLLSFTKEALGVSEQEADRVHGLPGQPPVKFKQYSGYITVNETHGRALFYWFFEATHKPEEKPLLLWLNGGPGCSSIGYGEAEELGPFFPQDSSQPKLKLNPYSWNNAANLLFLESPVGVGFSYTNTSSDISELGDTITAKDSHTFIIKWFRRFPQFRSHEFYISGESYAGHYVPQLSELIFDNNRNPVEKDYIN

SEQ ID NO: 3973 - DNA, 505 bp, Glycine max
  misc_feature (1)..(505): Ceres Seq. ID no. 13594351
acaagggaggcttggagatttctttattcttctggtcttaccaatcaaattgacctttttttgctttgccccggtatgattccttgtgatcaacgtcacttgttaatggtgcatgcaatatgaataagtagtgtatggaacagtgccaccataaggtttcttttgttgtattctttcttataacatggtagcagcggaggatttctgcacctttacggcatttttcttatgtccatagagcatggatgctacatcctcaccgtttgtttcctcaagaagaatgggtgtatatgatcctatccaccaaattagcacgtgggaagaaaatttcaaaagtaatgatactaataatttaactgtatccacatccataattggggaggtggacatgaagttagataatcagtttcaggtgcaatcagaggatgatactcatggaatatttggcacatctgtgaagtacgaccaagacactaacagacttactgataagacacaacgacgt

SEQ ID NO: 3974 - protein, 88 aa, Glycine max
  misc_feature (1)..(88): Ceres Seq. ID no. 13594352
MDATSSPFVSSRRMGVYDPIHQISTWEENFKSNDTNNLTVSTSIIGEVDMKLDNQFQVQSEDDTHGIFGTSVKYDQDTNRLTDKTQRR

SEQ ID NO: 3975 - protein, 75 aa, Glycine max
  misc_feature (1)..(75): Ceres Seq. ID no. 13594353
MGVYDPIHQISTWEENFKSNDTNNLTVSTSIIGEVDMKLDNQFQVQSEDDTHGIFGTSVKYDQDTNRLTDKTQRR

SEQ ID NO: 3976 - DNA, 921 bp, Glycine max
  misc_feature (1)..(921): Ceres Seq. ID no. 13594354
aaattcctcgacttagctatcaattcattcataaagaaataaaaacaaaagagaagcacgaacagtaactttagaagatcgatcatcatcaatggctgtccaagtttatattgtgtactactctatgtacgggcatgtggagagattagcagaagaaataaagaaaggagctgattcggtggaaggcgttgaggccaaactatggcaggtagctgagatattgccagaagaggttcttggcaaaatgggagcaccaccaaagagtgacgtaccaatcattacccctaatgagctctctgaggctgatgggtttgtctttggcttcccaacaagatttggaatgatggctgctcagttcaaagcttttatagatgcaactggaggtttgtggaaaacacaacaacttgcagggaagccggctggaatcttctatagcactagttcccagggtggtggacaagagactacagcgctaactgctataactcagttggttcatcatggaatgctatttgttccaattggatacacatttggtgctggaatgtttgagatggaggaactcaaaggtggaagcccatatggttcaggaacttatgctggtgatggttcaagacagccaactaagcttgaactggagcaagcattccaccaaggcaagtatattgccggcatcacaaagaagctcaaggaagctgcataatgttgaatcaattaagatttagaattaaatatatgtttgagaatcgttcattatattttagtcctagaatgttctgagttctgtttctttaggtgcttgcatgttatagttttcttatctttcaaaaagaaaatactatgtattgagttatatttttatgttacactacggtgtagtgattattgaaatttattgaataaaggaagtttgttttgtcg

SEQ ID NO: 3977 - protein, 203 aa, Glycine max
  misc_feature (1)..(203): Ceres Seq. ID no. 15221337
MAVQVYIVYYSMYGHVERLAEEIKKGADSVEGVEAKLWQVAEILPEEVLGKMGAPPKSDVPIITPNELSEADGFVFGFPTRFGMMAAQFKAFIDATGGLWKTQQLAGKPAGIFYSTSSQGGGQETTALTAITQLVHHGMLFVPIGYTFGAGMFEMEELKGGSPYGSGTYAGDGSRQPTKLELEQAFHQGKYIAGITKKLKEAA

SEQ ID NO: 3978 - protein, 192 aa, Glycine max
  misc_feature (1)..(192): Ceres Seq. ID no. 15221338
MYGHVERLAEEIKKGADSVEGVEAKLWQVAEILPEEVLGKMGAPPKSDVPIITPNELSEADGFVFGFPTRFGMMAAQFKAFIDATGGLWKTQQLAGKPAGIFYSTSSQGGGQETTALTAITQLVHHGMLFVPIGYTFGAGMFEMEELKGGSPYGSGTYAGDGSRQPTKLELEQAFHQGKYIAGITKKLKEAA

SEQ ID NO: 3979 - protein, 152 aa, Glycine max
  misc_feature (1)..(152): Ceres Seq. ID no. 15221339
MGAPPKSDVPIITPNELSEADGFVFGFPTRFGMMAAQFKAFIDATGGLWKTQQLAGKPAGIFYSTSSQGGGQETTALTAITQLVHHGMLFVPIGYTFGAGMFEMEELKGGSPYGSGTYAGDGSRQPTKLELEQAFHQGKYIAGITKKLKEAA

SEQ ID NO: 3980 - DNA, 876 bp, Glycine max
  misc_feature (1)..(876): Ceres Seq. ID no. 13594355
agtttatcaatggcacttctccacccaaatcttcttcccactttcaattccaacactcttacctttccttccatcaaactcaaaccctcactctcgcacgtgccttctccaacccccacacgcttcagtctctctgtttccgcggcggaaaccaccgcttttgccgcccctcccactccccaacctgagaagcttggagttgtagttaagccaacggagaagccgagacttgtgttgaagttcatatggatggagaagaacattggaattgcgcttgaccagatggtaccgggccatggcaccattcctctgagcccatattacttttggccccgaaaagatgcctgggaagagctcaaggagttgcttgagaacaagccttggcatatgccttctcccatcagtggaggccaaactgtagccagtattttggtcaggcttcttatagccttggtaaggaaagttggggttggagctggaccgagcgttgggttgcggcacgtccttgggaagttcgggttcgaggtcagaccaccaaaacaacaaaactcaacggccatgggcaggtgcaaaaaaccaaattagacaagatgaaccaaaatgaaagcaaagtagccttggctaaacctacactatcaaacgggaaggaaaggaaaacggtacttcagggctgtcaaagaacaatgtatccaaatagcccattctaatttgatggtttatggtttcttcttgcacttctttgggggtttattttccatattttgcttggtgagaatctaccttttggtgtgtacgttccactaggagagacttcacttattgtctgcttttgcatggtgcatatgattatgaatatgaattccctagttttggttg

SEQ ID NO: 3981 - protein, 194 aa, Glycine max
  misc_feature (1)..(194): Ceres Seq. ID no. 13594356
SLSMALLHPNLLPTFNSNTLTFPSIKLKPSLSHVPSPTPTRFSLSVSAAETTAFAAPPTPQPEKLGVVVKPTEKPRLVLKFIWMEKNIGIALDQMVPGHGTIPLSPYYFWPRKDAWEELKELLENKPWHMPSPISGGQTVASILVRLLIALVRKVGVGAGPSVGLRHVLGKFGFEVRPPKQQNSTAMGRCKKPN

SEQ ID NO: 3982 - protein, 191 aa, Glycine max
  misc_feature (1)..(191): Ceres Seq. ID no. 13594357
MALLHPNLLPTFNSNTLTFPSIKLKPSLSHVPSPTPTRFSLSVSAAETTAFAAPPTPQPEKLGVVVKPTEKPRLVLKFIWMEKNIGIALDQMVPGHGTIPLSPYYFWPRKDAWEELKELLENKPWHMPSPISGGQTVASILVRLLIALVRKVGVGAGPSVGLRHVLGKFGFEVRPPKQQNSTAMGRCKKPN

SEQ ID NO: 3983 - protein, 111 aa, Glycine max
  misc_feature (1)..(111): Ceres Seq. ID no. 13594358
MEKNIGIALDQMVPGHGTIPLSPYYFWPRKDAWEELKELLENKPWHMPSPISGGQTVASILVRLLIALVRKVGVGAGPSVGLRHVLGKFGFEVRPPKQQNSTAMGRCKKPN

SEQ ID NO: 3984 - DNA, 904 bp, Glycine max
  misc_feature (1)..(904): Ceres Seq. ID no. 13594363
aatgactcacacgctggcaagaaacaacacgatgtgcacattagagaagagaggacccctcttcgtcctaaccctaaccagcgaattcgacgaccagcaccgcctcaaccccaccctcctatcttccctcctcgctgcgctctccgaagtcaagtcccaagccaccgccggctccgccctcctcaccgccgcgcacggcagattcttctgcaacggcttcgacttccgctgggcccaggccgccggcgaccagccctccgcccgcctccgcctccgccgcatgtccgacgccctccgccccgtcctcgccgcgctcctctccctccccatccccaccgttgccgccgtctccggccacgccgccgctgccggagcaatcttcgccctcgcgcacgactacgtcctcatgcgcgccgaccgcggtgtgatctactttccggaggtggacctgggaatcactcttccagaatacttcgccgccgtcgccggggcgaagatcccggcggcggcgctgcgtgacgttgtgttggccggaaggaaggttagggcggagggggcggtggagatggggatcgtgcactcggcgcacgatagcgcggagggcaccgtggaggctgcgatgcgcctgggggaggagttagcacggagaaagtgggttggggacgcttatgcggaaatcagaaagagtttgtaccctgaagtgtgtgctgctttgggattaacacccaaaaccatcgtttctaagatctgattacttgtaatttgaattgcacaaacaacaatttaacagtatgagaaaacaaaaaataaaaaatctatgttcgaagaatgaatttgaaatgtgatcaataatacagtgtgtatggttctacaatcatatgatacaagcatttatatttcttgt

SEQ ID NO: 3985 - protein, 249 aa, Glycine max
  misc_feature (1)..(249): Ceres Seq. ID no. 13594364
MTHTLARNNTMCTLEKRGPLFVLTLTSEFDDQHRLNPTLLSSLLAALSEVKSQATAGSALLTAAHGRFFCNGFDFRWAQAAGDQPSARLRLRRMSDALRPVLAALLSLPIPTVAAVSGHAAAAGAIFALAHDYVLMRADRGVIYFPEVDLGITLPEYFAAVAGAKIPAAALRDVVLAGRKVRAEGAVEMGIVHSAHDSAEGTVEAAMRLGEELARRKWVGDAYAEIRKSLYPEVCAALGLTPKTIVSKI

SEQ ID NO: 3986 - protein, 239 aa, Glycine max
  misc_feature (1)..(239): Ceres Seq. ID no. 13594365
MCTLEKRGPLFVLTLTSEFDDQHRLNPTLLSSLLAALSEVKSQATAGSALLTAAHGRFFCNGFDFRWAQAAGDQPSARLRLRRMSDALRPVLAALLSLPIPTVAAVSGHAAAAGAIFALAHDYVLMRADRGVIYFPEVDLGITLPEYFAAVAGAKIPAAALRDVVLAGRKVRAEGAVEMGIVHSAHDSAEGTVEAAMRLGEELARRKWVGDAYAEIRKSLYPEVCAALGLTPKTIVSKI

SEQ ID NO: 3987 - protein, 172 aa, Glycine max
  misc_feature (1)..(172): Ceres Seq. ID no. 13594366
NDSHAGKKQHDVHIREERTPLRPNPNQRIRRPAPPQPHPPIFPPRCALRSQVPSHRRLRPPHRRARQILLQRLRLPLGPGRRRPALRPPPPPPHVRRPPPRPRRAPLPPHPHRCRRLRPRRRCRSNLRPRARLRPHARRPRCDLLSGGGPGNHSSRILRRRRRGEDPGGGAA

SEQ ID NO: 3988 - DNA, 663 bp, Glycine max
  misc_feature (1)..(663): Ceres Seq. ID no. 13594381
tatttgataggcatcaggattatgtaaagcggcaaactcgttttgtctcccgtaaaccagcaaaagttataatttcttcaattgaagctgttgcagagtcaatgggtcttaaggtccattctcgcaattacaaggtgaggcttgaaggcgtttctgcaaacagggttggacaatttgcagtggtcttggaggtgtttgaagttgcgccatcccttttcatggttgatgttcggaaggccactggggatacttttgactaccacaagttttacaagaatttttgtggcaaactaggaaacattatttggagaccggcagggactatgccaaattctaatctgcgcaagcaaatgactttataatccaattcttgcgggtatgatgcaaatctaattagaagagcactgaaaggctgaaagcttcagctggtccccgaacatactaaaaagttagcatgcttcttctagctatcacaatgcacagcatacgctgtcaacttacaacatggcttaataatcttggaagaaggaagtaaaaaacctattgcaatgcatcttgtagcaaatctacccccacaatggtatacgaaaacaatccattatttggttggggcagaaatatatactaaggaataacagaaaagaaacgatgatattgtttttc

SEQ ID NO: 3989 - protein, 119 aa, Glycine max
  misc_feature (1)..(119): Ceres Seq. ID no. 13594382
FDRHQDYVKRQTRFVSRKPAKVIISSIEAVAESMGLKVHSRNYKVRLEGVSANRVGQFAVVLEVFEVAPSLFMVDVRKATGDTFDYHKFYKNFCGKLGNIIWRPAGTMPNSNLRKQMTL

SEQ ID NO: 3990 - protein, 86 aa, Glycine max
  misc_feature (1)..(86): Ceres Seq. ID no. 13594383
MGLKVHSRNYKVRLEGVSANRVGQFAVVLEVFEVAPSLFMVDVRKATGDTFDYHKFYKNFCGKLGNIIWRPAGTMPNSNLRKQMTL

SEQ ID NO: 3991 - DNA, 871 bp, Glycine max
  misc_feature (1)..(871): Ceres Seq. ID no. 13594385
gaacatcctaatcgaaaagaggaaacatttgcaatggctaacaacgtcgttgttgttcttaaggtagctcctgtttctctgcctccatttcccataacaaacaatgctctcactttcaagagccaaagacacacacttcatctgaattgcttccaaaccaaaaacagaacaacctcattcccttcttcctcgtcaatcctcagaaacaaagctagttgctctgtgttggcgtgtctccctcctgaatcctcaacctcatcttccactgctaaaccctcttttccttctcctcaaactaagctttatgtcagtgggctatcatttcgtaccactgaagagagtttgcgaaatgcatttaagaattttggtcaacttgtggaagtcaagctggtgatggatagaattgctaatagaccaagagggtttgcttttcttcgttatgcaactgaagaagagtcgcagaaggctattgagggaatgcatggaaagttcttggatggaagggtcatatttgtggaagttgccaaaccgagatcagagttagcgccaaggaaacaggaagacactagattgtaatgaagatccaatcaaaggatacagtagccatatgttcatcttggattcttggtgtgcaataggaagaatcattgcagcattgtacttgacattttataaaagacccctacttgattaaagttttttgcctcccttattttccaccccactgacactcttaggattcagcaatgaaaactcttttaagcaccacggccatttctgcaatatattgccaaatttatgccatttgtgcataatgtactcgttgacaatgttacaaatgtcaatggcgtttcttgaagtagttgttatc

SEQ ID NO: 3992 - protein, 191 aa, Glycine max
  misc_feature (1)..(191): Ceres Seq. ID no. 13594386
EHPNRKEETFAMANNVVVVLKVAPVSLPPFPITNNALTFKSQRHTLHLNCFQTKNRTTSFPSSSSILRNKASCSVLACLPPESSTSSSTAKPSFPSPQTKLYVSGLSFRTTEESLRNAFKNFGQLVEVKLVMDRIANRPRGFAFLRYATEEESQKAIEGMHGKFLDGRVIFVEVAKPRSELAPRKQEDTRL

SEQ ID NO: 3993 - protein, 180 aa, Glycine max
  misc_feature (1)..(180): Ceres Seq. ID no. 13594387
MANNVVVVLKVAPVSLPPFPITNNALTFKSQRHTLHLNCFQTKNRTTSFPSSSSILRNKASCSVLACLPPESSTSSSTAKPSFPSPQTKLYVSGLSFRTTEESLRNAFKNFGQLVEVKLVMDRIANRPRGFAFLRYATEEESQKAIEGMHGKFLDGRVIFVEVAKPRSELAPRKQEDTRL

SEQ ID NO: 3994 - DNA, 1324 bp, Glycine max
  misc_feature (1)..(1324): Ceres Seq. ID no. 13594402
ctaatcgaaaaaaccaaaatctggtaattaagatcttctcttcagaagatgtgtaacaccctcaagttcaacccctttaagaaccgtttgctaataatgttcatgctggttctttctctccccttcaatgttcaatcccaagccaaagatagtgaagaacagaacctggcagaactccctcaaacggttcatccaagcaagggaatagtaatagcagttctctccacaatgtttgccataacattactcttacttctctatgttaaattctgccgaactatccctcatgaactccttagtcaaaactcaaatctccaaaactttcagggcctaactcgatcaaggtctagagtttctgggattgacaaacaagtagttgaaacacttcctttcttcaagttctcttccctcaagggttccaaagaaggcctagaatgcaccgtttgtctctccaaattcgaggacacagagactctaagacttcttccaaagtgcaagcacgctttccacatgaattgcattgacaagtggtttgaaagccactctacgtgccctctttgtagacgcagggttgaagcaggggacattaaaaacctcaacttttcattaagctcgcggttcctccgagttccttcaaatctcacggaggatccaaaccttgaaatctttgttcacagagagccatctcatggagggtcagcatcgatccaaaggtcatatttacccttagaccagcggtgtcgaggatcatcgagaagaggcttttgggacgtgggcaagtgcaagaaacaagaactactgcttattgatgatagcagttctattggtgggacaagaaagtggaacaaaccggtgcacgtgatgaatcataagatagttatctctaatgtttttacgaggagcaggtggagtgatcttaatgcttcggacctgttgtcattgaacagtgagatgcttaatgatgtttgcagtgggagattctgtttgtgtcctttggaatccagcgacgacagcggaaattttcatgggatttcgagttctaatgaggaagaaaactcgtttacggcactgaatagtcctgcggagaagaggtgcatgtctgagaggtttacacaaaaggggaaggagaataggatcagagaatgtgtgacatctaatggggccagtgagaggctgtggaaggtttggttgccaattgcgcgaagaacggtccaatggtttgcgatacaagaaaggaattcggttgaattagaacacaaaaccttagcttcaaatgtctgatcaatgcgactaaattgttggtaacgtgtatgtttgtgcattc

SEQ ID NO: 3995 - protein, 410 aa, Glycine max
  misc_feature (1)..(410): Ceres Seq. ID no. 13594403
MCNTLKFNPFKNRLLIMFMLVLSLPFNVQSQAKDSEEQNLAELPQTVHPSKGIVIAVLSTMFAITLLLLLYVKFCRTIPHELLSQNSNLQNFQGLTRSRSRVSGIDKQVVETLPFFKFSSLKGSKEGLECTVCLSKFEDTETLRLLPKCKHAFHMNCIDKWFESHSTCPLCRRRVEAGDIKNLNFSLSSRFLRVPSNLTEDPNLEIFVHREPSHGGSASIQRSYLPLDQRCRGSSRRGFWDVGKCKKQELLLIDDSSSIGGTRKWNKPVHVMNHKIVISNVFTRSRWSDLNASDLLSLNSEMLNDVCSGRFCLCPLESSDDSGNFHGISSSNEEENSFTALNSPAEKRCMSERFTQKGKENRIRECVTSNGASERLWKVWLPIARRTVQWFAIQERNSVELEHKTLASNV

SEQ ID NO: 3996 - protein, 394 aa, Glycine max
  misc_feature (1)..(394): Ceres Seq. ID no. 13594404
MFMLVLSLPFNVQSQAKDSEEQNLAELPQTVHPSKGIVIAVLSTMFAITLLLLLYVKFCRTIPHELLSQNSNLQNFQGLTRSRSRVSGIDKQVVETLPFFKFSSLKGSKEGLECTVCLSKFEDTETLRLLPKCKHAFHMNCIDKWFESHSTCPLCRRRVEAGDIKNLNFSLSSRFLRVPSNLTEDPNLEIFVHREPSHGGSASIQRSYLPLDQRCRGSSRRGFWDVGKCKKQELLLIDDSSSIGGTRKWNKPVHVMNHKIVISNVFTRSRWSDLNASDLLSLNSEMLNDVCSGRFCLCPLESSDDSGNFHGISSSNEEENSFTALNSPAEKRCMSERFTQKGKENRIRECVTSNGASERLWKVWLPIARRTVQWFAIQERNSVELEHKTLASNV

SEQ ID NO: 3997 - protein, 392 aa, Glycine max
  misc_feature (1)..(392): Ceres Seq. ID no. 13594405
MLVLSLPFNVQSQAKDSEEQNLAELPQTVHPSKGIVIAVLSTMFAITLLLLLYVKFCRTIPHELLSQNSNLQNFQGLTRSRSRVSGIDKQVVETLPFFKFSSLKGSKEGLECTVCLSKFEDTETLRLLPKCKHAFHMNCIDKWFESHSTCPLCRRRVEAGDIKNLNFSLSSRFLRVPSNLTEDPNLEIFVHREPSHGGSASIQRSYLPLDQRCRGSSRRGFWDVGKCKKQELLLIDDSSSIGGTRKWNKPVHVMNHKIVISNVFTRSRWSDLNASDLLSLNSEMLNDVCSGRFCLCPLESSDDSGNFHGISSSNEEENSFTALNSPAEKRCMSERFTQKGKENRIRECVTSNGASERLWKVWLPIARRTVQWFAIQERNSVELEHKTLASNV

SEQ ID NO: 3998 - DNA, 669 bp, Glycine max
  misc_feature (1)..(669): Ceres Seq. ID no. 13594406
aattagaaactggagaatactttttaagtaacaaaaggaaatcagcaaagatatggcaagagaagcaagagaagcaggctgagaaaactgctgaaaacaaaaggaaaagagaagaggcctttatcccacccaaggagcctgcaaatctggtggataaatctgaggatgctaacaataatgtagctgacatggcaatttccttaaagaaaaaaacaaagaagtttgggaagcgtaaatctgaagaaaatatagatgccgagacatatattgtaggatcatcagaacaagcatcgggaaagaaacccaagaagcaaaggtcttaaacataatcttcattttggagacgaaagatgagcatgtgatgtggatgtgaatttaatcaagatcttctgtatccaatgctttggcagtaacagttttgacataaatgtatgaggcgtagttgttcgttccatttgtcatggaggatgagtgcgtggcattctgtatcttatttgtagttgccaatagacattaagtcagtaacgtgtacaacacttctagtcctctaagttttacatcttttcccttttaaaaacgttgtccgacacatgttgatactatagctatagttttgacattgagatttatttgttaaaaaaaaaaaaaagaaaaatacatgaaccccac

SEQ ID NO: 3999 - protein, 106 aa, Glycine max
  misc_feature (1)..(106): Ceres Seq. ID no. 13594407
LETGEYFLSNKRKSAKIWQEKQEKQAEKTAENKRKREEAFIPPKEPANLVDKSEDANNNVADMAISLKKKTKKFGKRKSEENIDAETYIVGSSEQASGKKPKKQRS

SEQ ID NO: 4000 - protein, 44 aa, Glycine max
  misc_feature (1)..(44): Ceres Seq. ID no. 13594408
MAISLKKKTKKFGKRKSEENIDAETYIVGSSEQASGKKPKKQRS

SEQ ID NO: 4001 - DNA, 904 bp, Glycine max
  misc_feature (1)..(904): Ceres Seq. ID no. 13594411
ctagaacatcctaatcgaaaaataacaccacattacattggcttgggagctatggcggcaaggatgttgcagaggcgattcatttcaatcttctcaagacaaacccatcaccccattactcaagaatcttggtattctcctaccagtgcaatattaaacagttatggattccatcaacggggggtcatgacccatacaaatccaatcaaacctgtctgtgaagatgtagagaataatgaagcagacaccttaaaatcaagtccaaacccagatgaagttgctacatctattagtgttaatgaaacctcttctgtaaagttttctgccaagtccagtttgaagacatcctcaaggcatgatcttgctatggttttcacctgcaaggtctgtgaaacgagatccattaagacggcttgtcgcgaatcgtatgagaaaggtgtagtggtggcaagatgtggggggtgtaataaccttcacctgattgcagatcaccttgggtggtttggtgaaccaggaagcgttgaggacttcctggctgctcgtggagaagaagtgaaaagaggttcagttgacacactgaatcttacattggaagatttagctggaaggaaaccttgaaagatagaatttgaccaagtgtatgttctgcaatagggtgtcactgagagtttggaagtgcaagggaggtaacaatagttggttttgtaaactcggctcttctgtctataattatgctagtaatattaaaaagcaacatattcaatgtactgtttgctttatcaattatttttggtgcctgccaaaggaatgtttttagaccatgatacaccttcatgtgcaaaacttagccaagaaaggaatttatgaaaaaaaaaaaaaaaaaagctyatcgataccgtcgacc

SEQ ID NO: 4002 - protein, 205 aa, Glycine max
  misc_feature (1)..(205): Ceres Seq. ID no. 15221345
LEHPNRKITPHYIGLGAMAARMLQRRFISIFSRQTHHPITQESWYSPTSAILNSYGFHQRGVMTHTNPIKPVCEDVENNEADTLKSSPNPDEVATSISVNETSSVKFSAKSSLKTSSRHDLAMVFTCKVCETRSIKTACRESYEKGVVVARCGGCNNLHLIADHLGWFGEPGSVEDFLAARGEEVKRGSVDTLNLTLEDLAGRKP

SEQ ID NO: 4003 - protein, 188 aa, Glycine max
  misc_feature (1)..(188): Ceres Seq. ID no. 15221346
MAARMLQRRFISIFSRQTHHPITQESWYSPTSAILNSYGFHQRGVMTHTNPIKPVCEDVENNEADTLKSSPNPDEVATSISVNETSSVKFSAKSSLKTSSRHDLAMVFTCKVCETRSIKTACRESYEKGVVVARCGGCNNLHLIADHLGWFGEPGSVEDFLAARGEEVKRGSVDTLNLTLEDLAGRKP

SEQ ID NO: 4004 - protein, 184 aa, Glycine max
  misc_feature (1)..(184): Ceres Seq. ID no. 15221347
MLQRRFISIFSRQTHHPITQESWYSPTSAILNSYGFHQRGVMTHTNPIKPVCEDVENNEADTLKSSPNPDEVATSISVNETSSVKFSAKSSLKTSSRHDLAMVFTCKVCETRSIKTACRESYEKGVVVARCGGCNNLHLIADHLGWFGEPGSVEDFLAARGEEVKRGSVDTLNLTLEDLAGRKP

SEQ ID NO: 4005 - protein, 143 aa, Glycine max
  misc_feature (1)..(143): Ceres Seq. ID no. 15221348
MTHTNPIKPVCEDVENNEADTLKSSPNPDEVATSISVNETSSVKFSAKSSLKTSSRHDLAMVFTCKVCETRSIKTACRESYEKGVVVARCGGCNNLHLIADHLGWFGEPGSVEDFLAARGEEVKRGSVDTLNLTLEDLAGRKP

SEQ ID NO: 4006 - DNA, 1228 bp, Glycine max
  misc_feature (1)..(1228): Ceres Seq. ID no. 13594412
attttaactcaaaacatagaattgttgaaggaacaaaacgtgtgtgtctgtcttacaaggtttagtagtgactatggagcagagcattggtggacaatctagcatacaatgcatatttctacgcaaggactgcttctcctcaaagctcgcgtctcttccaacttctccttccgagatgccctttggtcacaaccgttggtttcgcaggttgtcggtttttccacgtttgcaactatgtcaagggctgagaaagggtttctccaaaaacatggcttgcagtgtcagtgtggataattgtgatacggttcatccagcaacagatgcttatgctggagaggcagttgaagctttgaaagctgggaaagtcattgcagtaccaactgatacactctatggatttgcttgtgatgcttgctcaatggaagcagttaacagaatttatgagattaaaggccgtagacatacaagcccagtggctatttgtgtcggtgacgtatcagatatagcccgttttgctgtcactgaccatttacctcatggtctgcttgattccctcctacctgggcctgttacagttgttctaaaacgaggggattcaagtattcttgaacgatctttgaacccaggatttgatagtataggagttagagtgcctgattgcaatttcatcaggatcattgcccgtggttcaggaactgccctagcccttaccagtgcaaacctaagtggccagccaagtagtctttccatcaaagattttgagaacctctgggaacactgtgcttttgtttatgatggtggtttgattccatcaagtcgtgcaggttcaacaattgtggacctcaccacaccacacaaatacagaatacttagacctggaagtgcaaaggaagagacagttgccatcttggagaagcattctttcgttgaggcagagaccacgtaacataagttgtgattcatttgcagtgtcacgttctagctaggcctaatgtttcacttgcaaaaaaaaaaacgcgttataaatgtatggtcattatgcttcaactaagttattctattctatttccattaatagcatagcaatacattcatataaaacttctatctagagcacgtgctatggaattgttgagaaactagtaaaatccaattctatgaatcatttgatgtatggatagcattattgttataatgaaaaaccaatcattactgcagggaatatttg

SEQ ID NO: 4007 - protein, 290 aa, Glycine max
  misc_feature (1)..(290): Ceres Seq. ID no. 13594413
MEQSIGGQSSIQCIFLRKDCFSSKLASLPTSPSEMPFGHNRWFRRLSVFPRLQLCQGLRKGFSKNMACSVSVDNCDTVHPATDAYAGEAVEALKAGKVIAVPTDTLYGFACDACSMEAVNRIYEIKGRRHTSPVAICVGDVSDIARFAVTDHLPHGLLDSLLPGPVTVVLKRGDSSILERSLNPGFDSIGVRVPDCNFIRIIARGSGTALALTSANLSGQPSSLSIKDFENLWEHCAFVYDGGLIPSSRAGSTIVDLTTPHKYRILRPGSAKEETVAILEKHSFVEAETT

SEQ ID NO: 4008 - protein, 256 aa, Glycine max
  misc_feature (1)..(256): Ceres Seq. ID no. 13594414
MPFGHNRWFRRLSVFPRLQLCQGLRKGFSKNMACSVSVDNCDTVHPATDAYAGEAVEALKAGKVIAVPTDTLYGFACDACSMEAVNRIYEIKGRRHTSPVAICVGDVSDIARFAVTDHLPHGLLDSLLPGPVTVVLKRGDSSILERSLNPGFDSIGVRVPDCNFIRIIARGSGTALALTSANLSGQPSSLSIKDFENLWEHCAFVYDGGLIPSSRAGSTIVDLTTPHKYRILRPGSAKEETVAILEKHSFVEAETT

SEQ ID NO: 4009 - protein, 225 aa, Glycine max
  misc_feature (1)..(225): Ceres Seq. ID no. 13594415
MACSVSVDNCDTVHPATDAYAGEAVEALKAGKVIAVPTDTLYGFACDACSMEAVNRIYEIKGRRHTSPVAICVGDVSDIARFAVTDHLPHGLLDSLLPGPVTVVLKRGDSSILERSLNPGFDSIGVRVPDCNFIRIIARGSGTALALTSANLSGQPSSLSIKDFENLWEHCAFVYDGGLIPSSRAGSTIVDLTTPHKYRILRPGSAKEETVAILEKHSFVEAETT

SEQ ID NO: 4010 - DNA, 805 bp, Glycine max
  misc_feature (1)..(805): Ceres Seq. ID no. 13594418
agaaaatgtaaagatttcttaatggagaagtgagcggtgagaggaaacagaagagagaagagcaatcggtgagtgaatggaatggattcaggtcctccggcgaacgatttgtgttcagtgtgccatggcaactttcatattccatgccaagccaattgttctcactggttttgcggaaattgcataatgcttgtgtggcagcacggatcagtgggttgttcatgcaagtgcccactgtgtcgtcgagccatcagtctcttagtccccacagaagagtctctgaggcaacagcaggaccccgaagtttcccagattctgtcaaagattcatgcctataaccgtttcttcggtggccaacccaccactctctatcagagactgcgagatcttccctttctcttgcacaggctgctcagggaattcctccaccctcacagatcccttcctcttctcattcgcgctcgcgtctttgttgttatgatagcgagtgttatatacctcttcagccctattgacatcattcctgaagggatattaggagtagttggtttcttagatgatctcctaattgtgctcatctgcttcctacatgttgctgccctttatagatcagtactctacctccgtcatgggggttcctgaacatgttctacaattttacaggtaaaatgagatgatgatgcctagataggtgccggatatggatagtgggcattattctttcattttcaaaattgaactactttgttttctatgtacatagacaagttcaatttcaaatagtggaattagtaatggaaattac

SEQ ID NO: 4011 - protein, 186 aa, Glycine max
  misc_feature (1)..(186): Ceres Seq. ID no. 13594419
MDSGPPANDLCSVCHGNFHIPCQANCSHWFCGNCIMLVWQHGSVGCSCKCPLCRRAISLLVPTEESLRQQQDPEVSQILSKIHAYNRFFGGQPTTLYQRLRDLPFLLHRLLREFLHPHRSLPLLIRARVFVVMIASVIYLFSPIDIIPEGILGVVGFLDDLLIVLICFLHVAALYRSVLYLRHGGS

SEQ ID NO: 4012 - protein, 151 aa, Glycine max
  misc_feature (1)..(151): Ceres Seq. ID no. 13594420
MLVWQHGSVGCSCKCPLCRRAISLLVPTEESLRQQQDPEVSQILSKIHAYNRFFGGQPTTLYQRLRDLPFLLHRLLREFLHPHRSLPLLIRARVFVVMIASVIYLFSPIDIIPEGILGVVGFLDDLLIVLICFLHVAALYRSVLYLRHGGS

SEQ ID NO: 4013 - DNA, 732 bp, Glycine max
  misc_feature (1)..(732): Ceres Seq. ID no. 13594425
acacaattaagctcaaatcaaaagtccctttgcatactatctatcacttatcagttatcacaaagcaaattcattaagtcttttgccatggcctccaacagctgcttcatcttggcttttttcattgctatttccttctcatgcatggattttggcctagcagctcgccatcttatgcaaacaagtactgcaccaaatttgcctttgccaaaaccaacattgccacctttgccttcacttccaacactgcctcagggcaatgttccacctttgcctacaatcccatctcttccaaccattccaactgttccacaggtcactcttccaccacttgctgccactttacttccaaacttccccacagtcccaaccactattccttccttccccttcttctccccaccaccttcagccaccactccctaaatgaagctactctgcttattggatacataggcactcgtatccttggagtttggttctggctttcagtgatcgttggctgcatttcgtgttgtttttatgttatacatgtgatggtgatatatattgtacgttgtccatttattgccggggaatatttatagtaatctttcattttcctttgttcttccatcttgtattgtatggataggattattgttttttcttcctcctccttacttcatgtacttggggatcatctattgttataggatatacgctatatataataaataatccatgttccct

SEQ ID NO: 4014 - protein, 148 aa, Glycine max
  misc_feature (1)..(148): Ceres Seq. ID no. 13594426
MHGFWPSSSPSYANKYCTKFAFAKTNIATFAFTSNTASGQCSTFAYNPISSNHSNCSTGHSSTTCCHFTSKLPHSPNHYSFLPLLLPTTFSHHSLNEATLLIGYIGTRILGVWFWLSVIVGCISCCFYVIHVMVIYIVRCPFIAGEYL

SEQ ID NO: 4015 - protein, 141 aa, Glycine max
  misc_feature (1)..(141): Ceres Seq. ID no. 13594427
TQLSSNQKSLCILSITYQLSQSKFIKSFAMASNSCFILAFFIAISFSCMDFGLAARHLMQTSTAPNLPLPKPTLPPLPSLPTLPQGNVPPLPTIPSLPTIPTVPQVTLPPLAATLLPNFPTVPTTIPSFPFFSPPPSATTP

SEQ ID NO: 4016 - protein, 112 aa, Glycine max
  misc_feature (1)..(112): Ceres Seq. ID no. 13594428
MASNSCFILAFFIAISFSCMDFGLAARHLMQTSTAPNLPLPKPTLPPLPSLPTLPQGNVPPLPTIPSLPTIPTVPQVTLPPLAATLLPNFPTVPTTIPSFPFFSPPPSATTP

SEQ ID NO: 4017 - DNA, 1294 bp, Glycine max
  misc_feature (1)..(1294): Ceres Seq. ID no. 13594429
cctagaacatcataatcgaaaaaaatcactgagtctcacaccaaccaacaatcaacaacaagaacttagccacatacatacagaatacagattaataacccaaccacatgccaaacaccactgaagaattccataacaacaactgcttcgagtctctccatgtttcccttcgcaacctctcccaactcagcacccgaatggattcccttcaaagcttcctgtcccattccatccaatcccacactctcctcactcaccaccaaatgagcacagtctccaacgagatcctaaccgccattcgccacgtcatcaccaacagcgccgccctcgtcgccgcctcgggaaacgtgctccctctctcggagactccgactttggactctccgaacctcaacaacaacaacagcaacgacaacgtggtggagctcgacgcgatggagctgctggcgaagcaccttcacttctgcgaggtgtgcgggaaaggcttcacgcgcgacgcgaatctgagaatgcacatgcgcgcgcacggggacgagttcaagaccccggaggcactcgccaacaaggcgcgtggggagacgcgcctcaaggcggcgcggttttcgtgccccttggaggggtgcaaccgtaacaagacgcacaagaagttcaggccgttgaagtcggtgttctgtctgaggaaccacttcaagaggagccactgtcccaaaacgctgtcgtgccagcggtgtcggaagaagagcttcgcggtgctgtcggacttgaggagccacgtcaagcagtgtcggggagaggccacgtggaagtgctcatgcgggactacgttttcgaggaaggacaagctgttgggacacgtggcgctgttcgaggggcattcgccgatgcttgaagaggaggccccagtggcagtggcggtgaaggaaagtgagggtggtttggatgggttacctgaagggttctttgatggtttggatgaatttggatttggatccattcaaaacaactgttcacatgcaggagcaagcttagccttagggcttccctcaaataatttatatgcatgggaactctctttttctaatttaatctagaagctaaataatcaaattcaacactgaaaagtgtcatataatgcaatcaattctttataaatttaatttataaatatattaaaaatgkgatagattagctttwttwtttaaaaaaaaaaaaaaaaaaaaaaaaaaaaaaaaaaaaaaaaaaycmmaaaaaaaaaaaaaaaagsttwttcratmccgycgaccctcgagggggg

SEQ ID NO: 4018 - protein, 327 aa, Glycine max
  misc_feature (1)..(327): Ceres Seq. ID no. 15221349
MPNTTEEFHNNNCFESLHVSLRNLSQLSTRMDSLQSFLSHSIQSHTLLTHHQMSTVSNEILTAIRHVITNSAALVAASGNVLPLSETPTLDSPNLNNNNSNDNVVELDAMELLAKHLHFCEVCGKGFTRDANLRMHMRAHGDEFKTPEALANKARGETRLKAARFSCPLEGCNRNKTHKKFRPLKSVFCLRNHFKRSHCPKTLSCQRCRKKSFAVLSDLRSHVKQCRGEATWKCSCGTTFSRKDKLLGHVALFEGHSPMLEEEAPVAVAVKESEGGLDGLPEGFFDGLDEFGFGSIQNNCSHAGASLALGLPSNNLYAWELSFSNLI

SEQ ID NO: 4019 - protein, 297 aa, Glycine max
  misc_feature (1)..(297): Ceres Seq. ID no. 15221350
MDSLQSFLSHSIQSHTLLTHHQMSTVSNEILTAIRHVITNSAALVAASGNVLPLSETPTLDSPNLNNNNSNDNVVELDAMELLAKHLHFCEVCGKGFTRDANLRMHMRAHGDEFKTPEALANKARGETRLKAARFSCPLEGCNRNKTHKKFRPLKSVFCLRNHFKRSHCPKTLSCQRCRKKSFAVLSDLRSHVKQCRGEATWKCSCGTTFSRKDKLLGHVALFEGHSPMLEEEAPVAVAVKESEGGLDGLPEGFFDGLDEFGFGSIQNNCSHAGASLALGLPSNNLYAWELSFSNLI

SEQ ID NO: 4020 - protein, 275 aa, Glycine max
  misc_feature (1)..(275): Ceres Seq. ID no. 15221351
MSTVSNEILTAIRHVITNSAALVAASGNVLPLSETPTLDSPNLNNNNSNDNVVELDAMELLAKHLHFCEVCGKGFTRDANLRMHMRAHGDEFKTPEALANKARGETRLKAARFSCPLEGCNRNKTHKKFRPLKSVFCLRNHFKRSHCPKTLSCQRCRKKSFAVLSDLRSHVKQCRGEATWKCSCGTTFSRKDKLLGHVALFEGHSPMLEEEAPVAVAVKESEGGLDGLPEGFFDGLDEFGFGSIQNNCSHAGASLALGLPSNNLYAWELSFSNLI

SEQ ID NO: 4021 - DNA, 1255 bp, Glycine max
  misc_feature (1)..(1255): Ceres Seq. ID no. 13594430
aaaaattgaataagaccataaaagttcgacatagttggtgttcactgctttttctcttttttcccgtggatcatcccaaagctctctgctttttggtggcacagatcccttgctgggtttaagttcctcactttggattctcccccaaatgggttcctttgatcgattgtttaaccgccaaagaggtcttcatgagatccttggtggtggtcaagttgcagatttaattctgtggaggcgtaagaaccttactgtggggatattgttggtcacactaggtgtttgggttgtgtttgagagatctggttatactcttctgtctcttatttctaatgttctccttctcctcattgtcattctctttctttgggccaaatcagcagatattctcaacagacctgctccacctctaccacagctgcgtctctcagaggaaatggcaaatgaagcgaagacttttatctgcacaagagttaatgatctgttgtcagtttctcaagatattgctctcggaaaagactcgaggctgtttctcaaagtagctgcatacctctggttaatttctattattggtggcttaactgatttccttaccctggcatacaccagtcttcttttggttcttacagtaccagcaatctatgaaagatatgaagattacatagatatgtatatcttgaagggttacagaaaattatgcctattgcatgttaaaataaatgagggatatgtcagcaaagtccacaactggattctggagaagaaaaagctaagctgagtttgtgtttttcgcattcattttgataagttctcttattattcttctaaagtatttcttacaggatcactggtgagattgtaattgtgagtttgagggacaacaatagtgatcttctccccccaaaaatgagtgtcttcctttttgcattttccatcttcaatgatggatcccttttttggtacataatgatgaaactcttacgttggactggttcatgtagtccactaagtatttaagatttcttcttaggttaacaaagaaaaaatataggtgtcactacctatacacaatataaaatgtgtttgccaagtatttgtacatgtaaataatataggtacaattattattnnnnaaaaaaaaaaaaaaaaaaaaaaaaaaaaaaaaaaaaaaaaaaaaaaaaaaaatttaaaaaaaaaaaaaaaagggtttttcgttcccgccaccctcgggggggggcccggaccccatttcccc

SEQ ID NO: 4022 - protein, 209 aa, Glycine max
  misc_feature (1)..(209): Ceres Seq. ID no. 15221352
MGSFDRLFNRQRGLHEILGGGQVADLILWRRKNLTVGILLVTLGVWVVFERSGYTLLSLISNVLLLLIVILFLWAKSADILNRPAPPLPQLRLSEEMANEAKTFICTRVNDLLSVSQDIALGKDSRLFLKVAAYLWLISIIGGLTDFLTLAYTSLLLVLTVPAIYERYEDYIDMYILKGYRKLCLLHVKINEGYVSKVHNWILEKKKLS

SEQ ID NO: 4023 - protein, 113 aa, Glycine max
  misc_feature (1)..(113): Ceres Seq. ID no. 15221353
MANEAKTFICTRVNDLLSVSQDIALGKDSRLFLKVAAYLWLISIIGGLTDFLTLAYTSLLLVLTVPAIYERYEDYIDMYILKGYRKLCLLHVKINEGYVSKVHNWILEKKKLS

SEQ ID NO: 4024 - DNA, 562 bp, Glycine max
  misc_feature (1)..(562): Ceres Seq. ID no. 13594431
atattttagtcacccgtctctccttccacacttcgcaattcaatctctttctcttcctcttcctctctctctctgtctgtctttgtcgtacctttccttcatcctcagggcgttttgtctcattttgttattcaagaatcaattaaaaaaaatgactcgcggtaaccagagggaacgagatcgtgaaagggctcaggcaagagctggtggaaagacaaagcagcctaagaatgatgggttgacccctgaacagcgaagggaaagggatgcaaaagcattgcaggagaaaacggcaaagaaagcagctcaggctgcaggagggaataatgcaggtggtggaggcaaaaaataggcaaaaatcattgacttgaggaatgtaaatggagtgtagacatgggaaaaattatattgcttattatttgtgatatgggtttttggtttagagtcatctgcttatgtcatttcagaataactagtgttctgtgaggagggcattgttgttggcttatgaacctttgatttctatataatttggaatgcaatttgtctctagcttgttgtg

SEQ ID NO: 4025 - protein, 116 aa, Glycine max
  misc_feature (1)..(116): Ceres Seq. ID no. 13594432
YFSHPSLLPHFAIQSLSLPLPLSLCLSLSYLSFILRAFCLILLFKNQLKKMTRGNQRERDRERAQARAGGKTKQPKNDGLTPEQRRERDAKALQEKTAKKAAQAAGGNNAGGGGKK

SEQ ID NO: 4026 - protein, 66 aa, Glycine max
  misc_feature (1)..(66): Ceres Seq. ID no. 13594433
MTRGNQRERDRERAQARAGGKTKQPKNDGLTPEQRRERDAKALQEKTAKKAAQAAGGNNAGGGGKK

SEQ ID NO: 4027 - DNA, 610 bp, Glycine max
  misc_feature (1)..(610): Ceres Seq. ID no. 13594434
cacagaaatatgtgggtttgtgaccattctatcaggaacttttcttcttcacaaaactaaggatatggctgatggtttacaaccatctttatctgttagacttcctaagcattcagaagaggatggctttgatggtggtgaaggcattcctcttagacggcaagaagccatgagatcgccatgatatattctttgcatcacatcttgcttttctaaatgagcttgaggcgctggggagggattttgccaaggtcgtctgtaatttactgattatttccctccccatcatattttttacctgatacagttggagtcgaaggatgtgagtttcctatcactgttcttttggtctcccgatgattatgctttctgatcttgcctagcatgcccctctacactccatagcggagacaaaggccaatgtaattttctgcacattgattatatatagtgtacctcagttaaatgaaaatattcatcatcaaattttgaactggacagcattgcaatgttattatcagtgtctgctgccatttgaactcgagctgacctcaatattttgtgcttgttggagctaaatataaaaattaggatgtgtagattccaggtc

SEQ ID NO: 4028 - protein, 60 aa, Glycine max
  misc_feature (1)..(60): Ceres Seq. ID no. 15221354
TEICGFVTILSGTFLLHKTKDMADGLQPSLSVRLPKHSEEDGFDGGEGIPLRRQEAMRSP

SEQ ID NO: 4029 - protein, 39 aa, Glycine max
  misc_feature (1)..(39): Ceres Seq. ID no. 15221355
MADGLQPSLSVRLPKHSEEDGFDGGEGIPLRRQEAMRSP

SEQ ID NO: 4030 - protein, 33 aa, Glycine max
  misc_feature (1)..(33): Ceres Seq. ID no. 15221356
MVYNHLYLLDFLSIQKRMALMVVKAFLLDGKKP

SEQ ID NO: 4031 - DNA, 1535 bp, Glycine max
  misc_feature (1)..(1535): Ceres Seq. ID no. 13594435
attcacttctgatttgattcttttccccactttcagaacatcaacaaagtagagagagagaaccaaaaaaaaaaaactactactcaacaaaaagagctagagagaagataccccttaaatcctaatttctacctcaaagaaagtactcttcaaacattttgtattcactgaagaaggatctttgcacttgcacctgcagccatctaccatggttaagtcagaacacaagatcaaaaccgaaccatcatcaaaggcaatgcggttatcttcaccctcatcatcaacatcagattgcaagaagaagaagtacaagggagtgagaatgaggagctggggatcatgggtttctgagattagagcaccaaatcagaaaacaagaatatggttaggctcttattcaaccccagaagctgcagctagagcctatgatgctgcacttctatgccttaaaggctcctcagcaaatctcaatttccctttaagctcttcacaacaatacattcctggagatgctgtcatgtcccccaaatcaatccaaagagttgctgcggccgccgcaaatagtttcatcgacaatgccaccactcccccttccccacctccggcttcgaccccatcatcatcatcattggcctcatccccctcattggtttcttctccctcggatcaaatcgatgacgacgccttgctgatatcgtctttccaagcctacactagttgtggtcaagcaaatcaatcaatggctgtgaatgtgatggagccttggtacacctttggtgatggtcttcaatcccccaagtatgctgatcagatgctaagtggtgatttcttccatgtcgattcttcccatctgcttgatgatctatacgaagaaagtgacattcgtttgtggagcttctgctgagaaaaaaaatcaattcaagccacctacaatatttcttcttttctcaaaaattcaattcgtttgtcttcagtggtatagcttaagatgttactgactgtgaccaaattaaaatttgtataccctatgctacataaatggtgcattttagatgaaattcatatagagataagacaattttcggcctctcatgtgaatttctaagagtttgaaattatgtatcatcgatacaaatcttggtatgtcaatgtcatgaatggtttcccatgtgtcacagaatataagggagaaaaaaaaatgtagtcaccaaaatccttaggtataagcaattcgtttcactgtttttggaatgtaactatgggaggagacttttgctattgtgagtatctttggaaggcctttgttgcatgggaaggtatcagagatgcttatttccaattcagtgagaatagggaaccatgtacagagcgtggtaacttgaaaccattggaaaaattgcatcttttctaagccttgtctgctctcccgcgtgcccaaagaacaaagagtgttcccttgttttgatgtttaagtttggtattttataccctattctattcttcttttagatggaaataaatcctggttaattttc

SEQ ID NO: 4032 - protein, 231 aa, Glycine max
  misc_feature (1)..(231): Ceres Seq. ID no. 15221357
MVKSEHKIKTEPSSKAMRLSSPSSSTSDCKKKKYKGVRMRSWGSWVSEIRAPNQKTRIWLGSYSTPEAAARAYDAALLCLKGSSANLNFPLSSSQQYIPGDAVMSPKSIQRVAAAAANSFIDNATTPPSPPPASTPSSSSLASSPSLVSSPSDQIDDDALLISSFQAYTSCGQANQSMAVNVMEPWYTFGDGLQSPKYADQMLSGDFFHVDSSHLLDDLYEESDIRLWSFC

SEQ ID NO: 4033 - protein, 215 aa, Glycine max
  misc_feature (1)..(215): Ceres Seq. ID no. 15221358
MRLSSPSSSTSDCKKKKYKGVRMRSWGSWVSEIRAPNQKTRIWLGSYSTPEAAARAYDAALLCLKGSSANLNFPLSSSQQYIPGDAVMSPKSIQRVAAAAANSFIDNATTPPSPPPASTPSSSSLASSPSLVSSPSDQIDDDALLISSFQAYTSCGQANQSMAVNVMEPWYTFGDGLQSPKYADQMLSGDFFHVDSSHLLDDLYEESDIRLWSFC

SEQ ID NO: 4034 - protein, 193 aa, Glycine max
  misc_feature (1)..(193): Ceres Seq. ID no. 15221359
MRSWGSWVSEIRAPNQKTRIWLGSYSTPEAAARAYDAALLCLKGSSANLNFPLSSSQQYIPGDAVMSPKSIQRVAAAAANSFIDNATTPPSPPPASTPSSSSLASSPSLVSSPSDQIDDDALLISSFQAYTSCGQANQSMAVNVMEPWYTFGDGLQSPKYADQMLSGDFFHVDSSHLLDDLYEESDIRLWSFC

SEQ ID NO: 4035 - DNA, 499 bp, Glycine max
  misc_feature (1)..(499): Ceres Seq. ID no. 13594436
cactggaatctccattcaacattgcaacatttcaccctttggaaacttgagttctgtccagacataccttggaagaccctggaagaactactcaaccacagtgtacatgagatcaaggatggatggctttgtgagccccaaaggctggttgccgtggaccgggaactcagcaccagacaccattttctatgctgaatttcagaatgttggaccaggtgcttcaacaaagaatagggtgaagtggaagggtttgagaaccattactagtaaacaagccagcaagtttactattaaggcttttctacaaggagataaatggatttctgcatcaggtgctccatttaagtctgatctatgacaacagccataatatgctaatgcaatttgcaaagctccctcagtgaaaattgtttgtactttttttattttttctttctttcccatgatcttcttgatttgtattattaatttgacattgtataatgattcttttgatttg

SEQ ID NO: 4036 - protein, 118 aa, Glycine max
  misc_feature (1)..(118): Ceres Seq. ID no. 13594437
TGISIQHCNISPFGNLSSVQTYLGRPWKNYSTTVYMRSRMDGFVSPKGWLPWTGNSAPDTIFYAEFQNVGPGASTKNRVKWKGLRTITSKQASKFTIKAFLQGDKWISASGAPFKSDL

SEQ ID NO: 4037 - protein, 83 aa, Glycine max
  misc_feature (1)..(83): Ceres Seq. ID no. 13594438
MRSRMDGFVSPKGWLPWTGNSAPDTIFYAEFQNVGPGASTKNRVKWKGLRTITSKQASKFTIKAFLQGDKWISASGAPFKSDL

SEQ ID NO: 4038 - protein, 79 aa, Glycine max
  misc_feature (1)..(79): Ceres Seq. ID no. 13594439
MDGFVSPKGWLPWTGNSAPDTIFYAEFQNVGPGASTKNRVKWKGLRTITSKQASKFTIKAFLQGDKWISASGAPFKSDL

SEQ ID NO: 4039 - DNA, 557 bp, Glycine max
  misc_feature (1)..(557): Ceres Seq. ID no. 13594455
ataattaacttgtcagcattggcgttacagagagagagagagagttattatggtgactatggaagagagtccaaggagcccagaggcgaagctggggttgcgagtggaggatctatgggacattcaggaaccacagctaagtcctgatgagaagttcaatgcttgctttgaaagcatacctgtctctgccttccctccacctccttcaaatcaaggtaccgtttcattctgtattatcataccttatacagttgacttggcggttgaaggaagaaatatgaagagaaagtcgtggattttaatctctcccactaacaaaaactaacaacaaaccgataaaaaaaaactggattatcaccctcatatcacatatcaattctcagcaaggttttaaaaaatagtttgctattgtaattttggctgtcaaggttgttgaagttattacgactgcaattgttgctgtattgactgtatttgtttgcagttttctgcaatatcaagcatcgcgacaaaactgtaactacaatcacaatttaaaagcttggttcttagggatg

SEQ ID NO: 4040 - protein, 91 aa, Glycine max
  misc_feature (1)..(91): Ceres Seq. ID no. 15221360
MVTMEESPRSPEAKLGLRVEDLWDIQEPQLSPDEKFNACFESIPVSAFPPPPSNQGTVSFCIIIPYTVDLAVEGRNMKRKSWILISPTNKN

SEQ ID NO: 4041 - protein, 88 aa, Glycine max
  misc_feature (1)..(88): Ceres Seq. ID no. 15221361
MEESPRSPEAKLGLRVEDLWDIQEPQLSPDEKFNACFESIPVSAFPPPPSNQGTVSFCIIIPYTVDLAVEGRNMKRKSWILISPTNKN

SEQ ID NO: 4042 - protein, 48 aa, Glycine max
  misc_feature (1)..(48): Ceres Seq. ID no. 15221362
IINLSALALQRERESYYGDYGRESKEPRGEAGVASGGSMGHSGTTAKS

SEQ ID NO: 4043 - DNA, 994 bp, Glycine max
  misc_feature (1)..(994): Ceres Seq. ID no. 13594464
atattgagttcttgaccaactgcgcgcacctcatcgagcctgcctaaccccgcccgcccgctaaaccctaccctactcaccggcggcagaggttttcgtgagctcgtccgacaatggcgtccctttgagaactcgtgcgaggtcggggtgttcgcgaggctcaccaacgcctactgcctcgtcccggccggtggggcggagaatttcaccagtgtgtttgaggccgagctcgccgacaccgtcccggtggtcaaggcatccatcggcggcatgaggatcctcaggacattgtgcgtgggcaacaagaagggccttcttctaccacacaccactaacgaccaagagctccagcacctcaagaatagcctgcctgatgaggtggtcgtccagcgtgtcgacgagcggctctccgccctcggcaactgcattgcctgcaacgaccacgtggctctcacaaaaccagatctcaccaaggaaaccgaggagatcatctcggacgttcttggggtggaggtgttcaggcagaccatcgcagggagcatcctggtcggcagctcctgcgccttctccaacaaagggggacttgttcacccgcagacgtcggtggaggacctggacgagctgtcgacgctgctgcaggtgcccctcgtcgccggcaccgtcaaccgggggagcgatggcatcgcggccggcatggtggtcaacgactgggcggccttctgcggttccgacaccacggccaccgagctctcagtggtggagagcgtcttcaggctgagggacgcccggccgggggcattgggcgccgacgtcaggaaatccttggttgaaagctgctttctttaggggaattttgccttcccttgctgtatctgtgtttgtcatgaaatattctcaactagtactccctccgcaaaaaaaaaaaaaaaaaagcttatcgataccgtcgacctstttaaacacaataaagttggaacgggaggggggaaaggat

SEQ ID NO: 4044 - protein, 191 aa, Glycine max
  misc_feature (1)..(191): Ceres Seq. ID no. 15221366
MRILRTLCVGNKKGLLLPHTTNDQELQHLKNSLPDEVVVQRVDERLSALGNCIACNDHVALTKPDLTKETEEIISDVLGVEVFRQTIAGSILVGSSCAFSNKGGLVHPQTSVEDLDELSTLLQVPLVAGTVNRGSDGIAAGMVVNDWAAFCGSDTTATELSVVESVFRLRDARPGALGADVRKSLVESCFL

SEQ ID NO: 4045 - protein, 134 aa, Glycine max
  misc_feature (1)..(134): Ceres Seq. ID no. 15221367
MRWSSSVSTSGSPPSATALPATTTWLSQNQISPRKPRRSSRTFLGWRCSGRPSQGASWSAAPAPSPTKGDLFTRRRRWRTWTSCRRCCRCPSSPAPSTGGAMASRPAWWSTTGRPSAVPTPRPPSSQWWRASSG

SEQ ID NO: 4046 - DNA, 926 bp, Glycine max
  misc_feature (1)..(926): Ceres Seq. ID no. 13594474
aacatcctaatcgaaaacttttctttcttgaggccaaagccgcagacagcacgcacgcacagcccaccgtcgccgctccaaatctcgcccgctcgcccgccgctctccgccgccatggacgccgcctcctcgctcatgggcgggccctcctccgccgacgcccccaccgacggcgagcaccggatgggcaccaccatcgtcggggtatgctacgccggcggggtcgtcctcgccgccgactccaggaccagcaccggaatgtatgtggcaaaccgtgcttcggacaagattagtcagctcactgataatgtctatgtctgccgttctggatctgccgctgatacacaagttatttcagattatgtgcgctattttctccaccagcacacaattcagcttgggcaaccagctaccgtgaaagtcgcatccaacttggttaggttgctggcctatcagaacaagagcatgttgcaagctggtatgatagttggtggatgggataagtacgaaggaggccaaatttactcggtccctcttggtggaacgattctgaggcaaccattcgcaattggaggatctggttccagctatctgtatggattgatggatcatgaatggaaagaggggatgacccaggaagaagctgagaaatttgtggtgaaggtggtttcccttgccattgcacgtgatggtgctagtggaggggttgttcgcaccgttactataaatgaggagggcgtgaagaggagcttccatcctggcgacaagctgccactgtggcatgaggagatggagccccagaactcgctcctcgacattctcgcggccgtgagctctgatgccatggtccagtgagccgtgcttcctactggttcttcctactgtgtctgatgatgacttgttctgaatttgagcttaatgttgtt

SEQ ID NO: 4047 - protein, 284 aa, Glycine max
  misc_feature (1)..(284): Ceres Seq. ID no. 13594475
NILIENFSFLRPKPQTARTHSPPSPLQISPARPPLSAAMDAASSLMGGPSSADAPTDGEHRMGTTIVGVCYAGGVVLAADSRTSTGMYVANRASDKISQLTDNVYVCRSGSAADTQVISDYVRYFLHQHTIQLGQPATVKVASNLVRLLAYQNKSMLQAGMIVGGWDKYEGGQIYSVPLGGTILRQPFAIGGSGSSYLYGLMDHEWKEGMTQEEAEKFVVKVVSLAIARDGASGGVVRTVTINEEGVKRSFHPGDKLPLWHEEMEPQNSLLDILAAVSSDAMVQ

SEQ ID NO: 4048 - protein, 246 aa, Glycine max
  misc_feature (1)..(246): Ceres Seq. ID no. 13594476
MDAASSLMGGPSSADAPTDGEHRMGTTIVGVCYAGGVVLAADSRTSTGMYVANRASDKISQLTDNVYVCRSGSAADTQVISDYVRYFLHQHTIQLGQPATVKVASNLVRLLAYQNKSMLQAGMIVGGWDKYEGGQIYSVPLGGTILRQPFAIGGSGSSYLYGLMDHEWKEGMTQEEAEKFVVKVVSLAIARDGASGGVVRTVTINEEGVKRSFHPGDKLPLWHEEMEPQNSLLDILAAVSSDAMVQ

SEQ ID NO: 4049 - protein, 239 aa, Glycine max
  misc_feature (1)..(239): Ceres Seq. ID no. 13594477
MGGPSSADAPTDGEHRMGTTIVGVCYAGGVVLAADSRTSTGMYVANRASDKISQLTDNVYVCRSGSAADTQVISDYVRYFLHQHTIQLGQPATVKVASNLVRLLAYQNKSMLQAGMIVGGWDKYEGGQIYSVPLGGTILRQPFAIGGSGSSYLYGLMDHEWKEGMTQEEAEKFVVKVVSLAIARDGASGGVVRTVTINEEGVKRSFHPGDKLPLWHEEMEPQNSLLDILAAVSSDAMVQ

SEQ ID NO: 4050 - DNA, 1091 bp, Glycine max
  misc_feature (1)..(1091): Ceres Seq. ID no. 13594503
gtaaagtatagtcccgcggtgctgctctgttcattactcgggcgatcggcgatcggtagtgcacttgccgtagctgtatattgatagcgggctgattgaggtagctgcctgccatgtctggaaaatcgcttgcagtggcgccgcggtctgacccggacaacggggcggagcggcagccgtcgtcggcgatgctcgggggcgtcatgggctcgctccgcgtcatcgagctccagctcgtcgccttcatcatggtcttctcgatgtcaggcctcgtcccgctcatcgacctcgccttcccggtcgtcaccactctctacctcctcgccctctcccgcctcgccttcccttcgctccacagcaaggtcgacgacgaggccgccgccgtccactccgccgcgtcccaggagatcttccgcggaagcaagctgtttcaggtgtacgtggtgatgggcaccacggtggggctgttcctgccgctggcgcacgtcctgggtgggttcgcgcgcggcgacgatgccgccgtgcgctccgcgacgccgcacctgttcctgctctcctgccagatcctcacggagaacatcgtcggctcgctcggcgtcttctcgccgccgctgagggcgctggtgccgcttctctacaccgtgcgccgcgtcttcgtcatcgtcgactgggtctatgacgtgtggaccaacaagctcatcacccgcaccgcccccgttcaggataaggcctgggtgtggttcggcaggtacctcgcggtggcgaacctggtctacttctccatcaacctgttcgtcttcctgatccccaagttcctcccccgcgcgttcgagaagtacttccacacgcgcaacgaggtgtacgccaagacggcggaggacaagcgggcaagggatctatcctcgctcgatgatgacagtgcgccaaaatcggaggtctgcaagaaggccgactgagatcgatgatcgtgttcgttgcgcggcgtttgagctgcgctcgtagtgtgctctctagcttcaactttgcttacctgtatgtggaccggtgtttgtacatttgggtcttcgcttctcaattctgaaattccgtgc

SEQ ID NO: 4051 - protein, 280 aa, Glycine max
  misc_feature (1)..(280): Ceres Seq. ID no. 13594504
MSGKSLAVAPRSDPDNGAERQPSSAMLGGVMGSLRVIELQLVAFIMVFSMSGLVPLIDLAFPVVTTLYLLALSRLAFPSLHSKVDDEAAAVHSAASQEIFRGSKLFQVYVVMGTTVGLFLPLAHVLGGFARGDDAAVRSATPHLFLLSCQILTENIVGSLGVFSPPLRALVPLLYTVRRVFVIVDWVYDVWTNKLITRTAPVQDKAWVWFGRYLAVANLVYFSINLFVFLIPKFLPRAFEKYFHTRNEVYAKTAEDKRARDLSSLDDDSAPKSEVCKKAD

SEQ ID NO: 4052 - protein, 255 aa, Glycine max
  misc_feature (1)..(255): Ceres Seq. ID no. 13594505
MLGGVMGSLRVIELQLVAFIMVFSMSGLVPLIDLAFPVVTTLYLLALSRLAFPSLHSKVDDEAAAVHSAASQEIFRGSKLFQVYVVMGTTVGLFLPLAHVLGGFARGDDAAVRSATPHLFLLSCQILTENIVGSLGVFSPPLRALVPLLYTVRRVFVIVDWVYDVWTNKLITRTAPVQDKAWVWFGRYLAVANLVYFSINLFVFLIPKFLPRAFEKYFHTRNEVYAKTAEDKRARDLSSLDDDSAPKSEVCKKAD

SEQ ID NO: 4053 - protein, 250 aa, Glycine max
  misc_feature (1)..(250): Ceres Seq. ID no. 13594506
MGSLRVIELQLVAFIMVFSMSGLVPLIDLAFPVVTTLYLLALSRLAFPSLHSKVDDEAAAVHSAASQEIFRGSKLFQVYVVMGTTVGLFLPLAHVLGGFARGDDAAVRSATPHLFLLSCQILTENIVGSLGVFSPPLRALVPLLYTVRRVFVIVDWVYDVWTNKLITRTAPVQDKAWVWFGRYLAVANLVYFSINLFVFLIPKFLPRAFEKYFHTRNEVYAKTAEDKRARDLSSLDDDSAPKSEVCKKAD

SEQ ID NO: 4054 - DNA, 1061 bp, Glycine max
  misc_feature (1)..(1061): Ceres Seq. ID no. 13594515
ctagaacatcctaatcgaaaaatttttcaactttgcattcgtctagttgtggaatccttcttaatagtactgttttagaattgctaagatgaagtcaagttttgaagaattgaagaagaagaagaagaaaggcgaaggagagcattcgaaggcataaacataaagaaattgaagataatgcgaaccctttgcgacgtatgcgagagcgccgctgccattctcttctgcgccgctgatgaggccgctctctgctccgcttgtgaccacaagatccatatgtgtaacaaacttgctagtaggcatgttcgagttggccttgctgaccccactgatgttccacgctgtgacatatgtgaaaatgcacctgctttcttttactgtgagatagatggtagttcgctgtgtctgcaatgtgatatgattgtgcatgttggtggtaaaagaacccatggaagatatcttctattgaggcaaagagctcagtttccaggtgataaacctgcccaaatggaagaactagagctgcaacctatggatcaaaatgaatcgagaagggatgaaagtcagtcactcaagctaaaaacaagagatagtcagcagaatcacagtgtctcaccttttccaaggcaagaaaataatattgatggtcatggaaaaatggataaaaagttaattgatcttaataccaggccactgcggttaaatggatcagcaccaaacaaccaggaacaatgcatggatattttaagaggcaataatcatgaatctgccagtgtgccaccagtagaatccttcaaacaagagtctgagaagtaacaaaggtacaacatatagggtgtgccagtgtgggcagaggctacagaaatattatgtttactcaaatttcttttacactgttgaccttgtttatgtgaatcttgtttttttttttgcttaaaatttgaattgtttggctgcagacctaattaatgacggaaaatagttgctttcatatggatgagctgcataaacaaggttactactgcataaattcgagggtataacataaattgttgtccagg

SEQ ID NO: 4055 - protein, 212 aa, Glycine max
  misc_feature (1)..(212): Ceres Seq. ID no. 15221370
MRTLCDVCESAAAILFCAADEAALCSACDHKIHMCNKLASRHVRVGLADPTDVPRCDICENAPAFFYCEIDGSSLCLQCDMIVHVGGKRTHGRYLLLRQRAQFPGDKPAQMEELELQPMDQNESRRDESQSLKLKTRDSQQNHSVSPFPRQENNIDGHGKMDKKLIDLNTRPLRLNGSAPNNQEQCMDILRGNNHESASVPPVESFKQESEK

SEQ ID NO: 4056 - protein, 179 aa, Glycine max
  misc_feature (1)..(179): Ceres Seq. ID no. 15221371
MCNKLASRHVRVGLADPTDVPRCDICENAPAFFYCEIDGSSLCLQCDMIVHVGGKRTHGRYLLLRQRAQFPGDKPAQMEELELQPMDQNESRRDESQSLKLKTRDSQQNHSVSPFPRQENNIDGHGKMDKKLIDLNTRPLRLNGSAPNNQEQCMDILRGNNHESASVPPVESFKQESEK

SEQ ID NO: 4057 - protein, 132 aa, Glycine max
  misc_feature (1)..(132): Ceres Seq. ID no. 15221372
MIVHVGGKRTHGRYLLLRQRAQFPGDKPAQMEELELQPMDQNESRRDESQSLKLKTRDSQQNHSVSPFPRQENNIDGHGKMDKKLIDLNTRPLRLNGSAPNNQEQCMDILRGNNHESASVPPVESFKQESEK

SEQ ID NO: 4058 - DNA, 686 bp, Glycine max
  misc_feature (1)..(686): Ceres Seq. ID no. 13594525
ttttttttttgttacaaataactgatttcatcattcatgcaagagcaaattggacagtactacgagggaaactgatacaggagcatagggttctagattcagaagcaacatttaactgaaactaagactcgaaccaaactttgaattcccagttaatccagctatagaatgccactttgttatgtttccaacgctttagtgggggcgcagcttctccttgggcctgatgtcattgctgtggccgcacttcttcttgcggcagttggcagccctgaggggcaggcgtgcatagcacttgcggcacacaagcctgtgctgcatgtacttgagcgcaagcacgcgcaggttaggctccatcctgctggggtagaccccgcccttgccaccgccgacgaggcgcagcgcgaggtgaagcgtggactccttgtggatgctgtagtcggccagggtgcggccatcgtcgagctgcttccccgcgaagatgaggcgctgctggtccggctggataccttccttgtcgtggatcttggccttgacgctgtcgacggccgcgcaactctcgacctcgagcgtcatggtctccccggtcggcgtcttcacgaagatctgcatcatctcgccgccggttgctcgctccccctctgctctcctctcgccgggcggtggtggtagtggtggtggaagtg

SEQ ID NO: 4059 - protein, 167 aa, Glycine max
  misc_feature (1)..(167): Ceres Seq. ID no. 13594526
MPLCYVSNALVGAQLLLGPDVIAVAALLLAAVGSPEGQACIALAAHKPVLHVLERKHAQVRLHPAGVDPALATADEAQREVKRGLLVDAVVGQGAAIVELLPREDEALLVRLDTFLVVDLGLDAVDGRATLDLERHGLPGRRLHEDLHHLAAGCSLPLCSPLAGRWW

SEQ ID NO: 4060 - DNA, 946 bp, Glycine max
  misc_feature (1)..(946): Ceres Seq. ID no. 13594527
aacatcatcagcttgagccaccgatcctcctgatccaccctcgccttacgagactctttcagagcagctcgcgccacctttcgccagctagccatggccgccgcacggacctacgtcgacttcgtgccgtcgcacgacctcgtcgaggacgccgccaagcagaccttcgtcgtcaacctccccgggttcaagaaggagcacctgagggtgcagatcgacaactacggccggctgagggtcagcggcgagcggccgctcgagggcggccagtggagccgcttccgcaaggagttccaggtccccgagggctgcaacgccggcggcatccgcgccaggttcgagaaggacggcgtcctccacgtcatcatgcccaggctcacgcccctcgaggacgcctcaaagtcagcggcagaccacgaggcggaagctgcgcggcacgccgctgccgcagaagagaagaagcgccacgaggagatggaggaggacgctaggaagcgtcgtgcgggtgacgaggacgactacgccagcgacgacggggaaggcgcacgccagccggcgtctgccggccggcaggcgtacggcttcgccagggaccggagcaggagtgggatggtgagggcactgctcctcgccgtggcggtggccttggttggcgttgctggcctgtatgctcggtacaggtggatggacccgtcggctgaggcggcgccggcagatggtgccaccgtcggcctctctgactattgatcaccagcaccaagcattcattcacaccgctgaagataagatcattcggtaaagaaaaacagtggacaagatacgggactgactacacgagctgcctgaaatactacgtgtaaatatgatctcactactgtaacttatacacactaataagcttgcacgtgcaatgcacgtctcatttgacttaaaagtttgaatatgc

SEQ ID NO: 4061 - protein, 217 aa, Glycine max
  misc_feature (1)..(217): Ceres Seq. ID no. 15221376
MAAARTYVDFVPSHDLVEDAAKQTFVVNLPGFKKEHLRVQIDNYGRLRVSGERPLEGGQWSRFRKEFQVPEGCNAGGIRARFEKDGVLHVIMPRLTPLEDASKSAADHEAEAARHAAAAEEKKRHEEMEEDARKRRAGDEDDYASDDGEGARQPASAGRQAYGFARDRSRSGMVRALLLAVAVALVGVAGLYARYRWMDPSAEAAPADGATVGLSDY

SEQ ID NO: 4062 - protein, 162 aa, Glycine max
  misc_feature (1)..(162): Ceres Seq. ID no. 15221377
HHQLEPPILLIHPRLTRLFQSSSRHLSPASHGRRTDLRRLRAVARPRRGRRQADLRRQPPRVQEGAPEGADRQLRPAEGQRRAAARGRPVEPLPQGVPGPRGLQRRRHPRQVREGRRPPRHHAQAHAPRGRLKVSGRPRGGSCAARRCRRREEAPRGDGGGR

SEQ ID NO: 4063 - protein, 126 aa, Glycine max
  misc_feature (1)..(126): Ceres Seq. ID no. 15221378
MPRLTPLEDASKSAADHEAEAARHAAAAEEKKRHEEMEEDARKRRAGDEDDYASDDGEGARQPASAGRQAYGFARDRSRSGMVRALLLAVAVALVGVAGLYARYRWMDPSAEAAPADGATVGLSDY

SEQ ID NO: 4064 - DNA, 1111 bp, Glycine max
  misc_feature (1)..(1111): Ceres Seq. ID no. 13594544
acccccccccagctccgcctcccttctgctctacccgcttctaacaaacgcgcgcacactccctctcgctctcgcggcgcaggtcggaggctaaaaccctagacacaggcgactatgacggcgccggcggacaaggggaagaaggccaagaccgacaccgacgtcggcgaggagaacgagcagatcgacggtgccctcgtcctctccatcgagaggctccaggagatccaggacgagctcgagaaggttaatgaagaagcaagtgataaggttttggaggttgagcagaagtacagtgagattcgcagacctgtctatcttcggaggtgtgacatcatcaaaacaattccagacttttggctgacagcgtttctaagtcatcctcttctcagtgagcttttgactgaagaggatcaaaagatgttcaagtacttggaatctgttgatgttgatgattctaaagatgtcaagtcaggctactccatcactcttaacttctctgagaatccgtactttgaagacagaaagcttaccaagtcatatgcctttgctgatgatggaacaaccacaataaatgccacttccattaagtggaaggagggaatggaaattaatgggaatgccattaagaagaaaggaagcaagcgcccattggttgaagaaagtttcttcacctggttcactgatacagagcacaagagccttgctgatggggtgcaagatgaggtggcagagatcatcaaagaagatttgtggccgaacccattgaaatatttcaacaatgaggttgaagagtttgaaggagatgacgaggatgaagagggatctgatggggaggatgctgaggaggacgacgacgaggagaactgaggccttggttggctttggtgggtcctgatgaatcgttgtctgcagatgctatgggtgtctgaagggtgaagtcatgtgaccgtttcgagactgtttcgttttgtgtttgacttagctggaacttagccttaggagctgttgaatgcgttatcgagtacgtactgtcgtattttcgacttaaaggagacctcgatatatcataatctggcgatatctatgacaacaatttaacttgctggcg

SEQ ID NO: 4065 - protein, 251 aa, Glycine max
  misc_feature (1)..(251): Ceres Seq. ID no. 13594545
MTAPADKGKKAKTDTDVGEENEQIDGALVLSIERLQEIQDELEKVNEEASDKVLEVEQKYSEIRRPVYLRRCDIIKTIPDFWLTAFLSHPLLSELLTEEDQKMFKYLESVDVDDSKDVKSGYSITLNFSENPYFEDRKLTKSYAFADDGTTTINATSIKWKEGMEINGNAIKKKGSKRPLVEESFFTWFTDTEHKSLADGVQDEVAEIIKEDLWPNPLKYFNNEVEEFEGDDEDEEGSDGEDAEEDDDEEN

SEQ ID NO: 4066 - protein, 149 aa, Glycine max
  misc_feature (1)..(149): Ceres Seq. ID no. 13594546
MFKYLESVDVDDSKDVKSGYSITLNFSENPYFEDRKLTKSYAFADDGTTTINATSIKWKEGMEINGNAIKKKGSKRPLVEESFFTWFTDTEHKSLADGVQDEVAEIIKEDLWPNPLKYFNNEVEEFEGDDEDEEGSDGEDAEEDDDEEN

SEQ ID NO: 4067 - DNA, 1109 bp, Glycine max
  misc_feature (1)..(1109): Ceres Seq. ID no. 13594548
ctggtgaagtaaatctctcttttttcggtataaccatgagcagcttcttgttaacattcccttacttccctaacgacgcttcgtggcaggtaaaactttgtccttctccacaaattcgccttgtctgcgtcaaaaccaatctcaaaacactcaccaaggcttcttctcagaattgcgtcgaaagcatgagttctctcaccagtcttgctccactcgaagcagtgctctttgatgttgatggaactctctgtgattctgatccactccactattatgctttgcgtgaaatgctccaagagcttggttttaatggaggtgctcctataacagaggaattctttgtcgagacattttctggcaagcacagtgatgatactgccttggttgtctttcctggtgatctggaacgaggtttaaagtttgtagaagataaggaagccatgttccggagattggcttcagagcaactgaatcccttgaaaggccttgataaagtgaggaaatgggttgaaaaccatggtctgaagagagctgcagtcaccaatgctccaaggaaaaatgcagaactcattatctcaaaacttggtctaacagatttctttgatgctgttattattggtgatgaatgtgaacatgccaaacctcatccagaaccctacttgaaagcacttgaagttctgaaggcatcaaaggatcatgcatttgtatttgaggattctgcttcagggataaaagctggagtggcagctgggatgcctgttataggtttagctacaagaaacccggagaatttactgatggaagcaaagcctgcctttctgattaaggattatgaggattcaaaattgtgggcagctttggaagaacttgacaaggctggtgcacgttaagtttgaattaatgatgtgactgacggaatttcttgatataaacatgtaacaaggagttccatattaaatcccctacttccctaaataattttgttcaaagtgggcaatattattacactagtccacaatcaatctcgctttggaacagaaggcaaacggttctattctatttgtatttagtaataatgtaacgttggccatgawaaacmaaammaaamr

SEQ ID NO: 4068 - protein, 295 aa, Glycine max
  misc_feature (1)..(295): Ceres Seq. ID no. 15221387
GEVNLSFFGITMSSFLLTFPYFPNDASWQVKLCPSPQIRLVCVKTNLKTLTKASSQNCVESMSSLTSLAPLEAVLFDVDGTLCDSDPLHYYALREMLQELGFNGGAPITEEFFVETFSGKHSDDTALVVFPGDLERGLKFVEDKEAMFRRLASEQLNPLKGLDKVRKWVENHGLKRAAVTNAPRKNAELIISKLGLTDFFDAVIIGDECEHAKPHPEPYLKALEVLKASKDHAFVFEDSASGIKAGVAAGMPVIGLATRNPENLLMEAKPAFLIKDYEDSKLWAALEELDKAGAR

SEQ ID NO: 4069 - protein, 284 aa, Glycine max
  misc_feature (1)..(284): Ceres Seq. ID no. 15221388
MSSFLLTFPYFPNDASWQVKLCPSPQIRLVCVKTNLKTLTKASSQNCVESMSSLTSLAPLEAVLFDVDGTLCDSDPLHYYALREMLQELGFNGGAPITEEFFVETFSGKHSDDTALVVFPGDLERGLKFVEDKEAMFRRLASEQLNPLKGLDKVRKWVENHGLKRAAVTNAPRKNAELIISKLGLTDFFDAVIIGDECEHAKPHPEPYLKALEVLKASKDHAFVFEDSASGIKAGVAAGMPVIGLATRNPENLLMEAKPAFLIKDYEDSKLWAALEELDKAGAR

SEQ ID NO: 4070 - protein, 234 aa, Glycine max
  misc_feature (1)..(234): Ceres Seq. ID no. 15221389
MSSLTSLAPLEAVLFDVDGTLCDSDPLHYYALREMLQELGFNGGAPITEEFFVETFSGKHSDDTALVVFPGDLERGLKFVEDKEAMFRRLASEQLNPLKGLDKVRKWVENHGLKRAAVTNAPRKNAELIISKLGLTDFFDAVIIGDECEHAKPHPEPYLKALEVLKASKDHAFVFEDSASGIKAGVAAGMPVIGLATRNPENLLMEAKPAFLIKDYEDSKLWAALEELDKAGAR

SEQ ID NO: 4071 - DNA, 1178 bp, Glycine max
  misc_feature (1)..(1178): Ceres Seq. ID no. 13594549
atcgaaaactcttatctctattcatctttgtttttttgttagcaaagcaaaactattgtttctcgggaaatttaagataattcaattggataacctgaacgaaaatctcaattttgtgctgttgtcggagtgactcagaaaaaaatgcaatgcacgattctaatagcattaattatgatacattttctgttgttgaaggtagcgtaggttaattttcattttcagttttttgtgcagctccaatggcaacctctcaaatcacttcatcattgaggaacttgcctgcatttgaaaggtttcaaccttcaacgcttcgatttccttctgctgggcacgtcagaattgggacactgacacaaacctcgtttccctctttcgttgtcaaagccgccactgttgtcgcccccaagcacaccactgttaagcctctgggtgatagagtactggtgaaaattaaggatgcagaggagaagactgcaggtgggattttactgccagcaactgctcaaggcaagcctcaaggaggtgaagtggttgctgttggggatgggaagtcggttgggaagagcaaagtggatgttagtgtgaagacaggtttgcaggttgtgtattcaaagtatgcagggactgaggtggagttcaatggttcaaaacatcttattctgaaggacgatgacatcgttggtatccttgaaacagatgaggtcaaggatcttaaacccttaaatgatagagtcttgataaaggttgcagaagcggatgaaaaaactgctggagggttgttgctcacagaggcaaccaaggaaaaaccatctattggaacagtgatagcagttggtccggggcctctggatgaggaaggtaatagaaagccattgtctgtcgtgcccgggaatacagttctgtactccaagtatgcagggaatgacttcaagggcaaagatggttctgactacattgccttgagggcctcagatgtcatggctatcctgtcctagtcagtatttagtagcaaatattttttttgttccctaacccaaaattttgagttaatgccgagggaaatggatatttatgttgtgaagacagcttgaaatatagttgattgcaactctgttccttagacaattttgcgttaaattgaaacgtttgaaatatattattttctacggcctttc

SEQ ID NO: 4072 - protein, 251 aa, Glycine max
  misc_feature (1)..(251): Ceres Seq. ID no. 13594550
MATSQITSSLRNLPAFERFQPSTLRFPSAGHVRIGTLTQTSFPSFVVKAATVVAPKHTTVKPLGDRVLVKIKDAEEKTAGGILLPATAQGKPQGGEVVAVGDGKSVGKSKVDVSVKTGLQVVYSKYAGTEVEFNGSKHLILKDDDIVGILETDEVKDLKPLNDRVLIKVAEADEKTAGGLLLTEATKEKPSIGTVIAVGPGPLDEEGNRKPLSVVPGNTVLYSKYAGNDFKGKDGSDYIALRASDVMAILS

SEQ ID NO: 4073 - DNA, 1194 bp, Glycine max
  misc_feature (1)..(1194): Ceres Seq. ID no. 13594560
acgattccatccacacatcaacacatggctccgccgaacagatcgttttcgccagagctatattgcctacagcgatcctcaccctcgcatcacttgaataactgcacgtggtgggcaggcgaggccgactcgtgatctgatcgggcgacaagagaatatcgctgtgcttgttctctttcgcggcgcatgtggccttgcccgcgagcgagcgcgacggacggacggacggacggacgccggcgatcacagtcacatggtcacatggaggatgacggaatggatgtgaccacatgctgttatcctattattaatggggtgttgccacgggattgccacaactctcgcggggagcaggggatgtgcgtcgtcggggccatcaacaactacacggagcagctctacacctacggggactcccccaagagttcgtcgtacaacctgacggagagcctcatgttcctggcgcacttcgtgggggacgtgcaccagccgctgcacgtcggctacgaggacgacgagggcggcaacaccatcacggtgcactggtaccacaggaaggccaacctccaccacgtgtgggacgtgagcatcatcgacacggtgatgaaggacttctacaacaagagcctcgacaccatggtggccgccctgcagacgaacctcaccgagggatggtctgacgatgtcggtcactgggagaattgcgccaacaagaaggcgacctgcgcaaacgactacgcgatcgagagcataagtctgtcgtgcaactacgcctacaaagatgtggtgcagaacatcaccctaggagatgattattacttcacccgctacccggttgtggagaagagattggcgcaggccggcgtcagactggcgctgatactcaaccgtatatttgacaagaaagaagctgatactatgccgttatacgtgcagtagaatagctatacttgtacaaaaggtgtatatatacgggctggacaaaattcggtattgtagctgccactgccacgccgtttgatcaatttccacttcaataggtttaccattatgtaatataaagagtcacgcaaccttggcacggctttcagaaattcattagttgtaaagttgcaatacaaaccctcttattagtctatttgcttgaacaataaacaaatccacaagtgcagtttaaagcgatgttttagtttc

SEQ ID NO: 4074 - protein, 250 aa, Glycine max
  misc_feature (1)..(250): Ceres Seq. ID no. 13594561
MWPCPRASATDGRTDGRRRSQSHGHMEDDGMDVTTCCYPIINGVLPRDCHNSRGEQGMCVVGAINNYTEQLYTYGDSPKSSSYNLTESLMFLAHFVGDVHQPLHVGYEDDEGGNTITVHWYHRKANLHHVWDVSIIDTVMKDFYNKSLDTMVAALQTNLTEGWSDDVGHWENCANKKATCANDYAIESISLSCNYAYKDVVQNITLGDDYYFTRYPVVEKRLAQAGVRLALILNRIFDKKEADTMPLYVQ

SEQ ID NO: 4075 - protein, 225 aa, Glycine max
  misc_feature (1)..(225): Ceres Seq. ID no. 13594562
MEDDGMDVTTCCYPIINGVLPRDCHNSRGEQGMCVVGAINNYTEQLYTYGDSPKSSSYNLTESLMFLAHFVGDVHQPLHVGYEDDEGGNTITVHWYHRKANLHHVWDVSIIDTVMKDFYNKSLDTMVAALQTNLTEGWSDDVGHWENCANKKATCANDYAIESISLSCNYAYKDVVQNITLGDDYYFTRYPVVEKRLAQAGVRLALILNRIFDKKEADTMPLYVQ

SEQ ID NO: 4076 - protein, 220 aa, Glycine max
  misc_feature (1)..(220): Ceres Seq. ID no. 13594563
MDVTTCCYPIINGVLPRDCHNSRGEQGMCVVGAINNYTEQLYTYGDSPKSSSYNLTESLMFLAHFVGDVHQPLHVGYEDDEGGNTITVHWYHRKANLHHVWDVSIIDTVMKDFYNKSLDTMVAALQTNLTEGWSDDVGHWENCANKKATCANDYAIESISLSCNYAYKDVVQNITLGDDYYFTRYPVVEKRLAQAGVRLALILNRIFDKKEADTMPLYVQ

SEQ ID NO: 4077 - DNA, 734 bp, Glycine max
  misc_feature (1)..(734): Ceres Seq. ID no. 13594573
gtgattagatccaggtagccggctttgccatttccgcctctataaatgccgccctacgctctcgtgcacagcaaaacccaacggaactataactacagtcactctgctccctcactcaacctgtcccccacacaccacacagagagacgcagagaagcagcaggagggtgatggctatggctcagggaagaggcagtgcggcgcagggcttcgccctcggcttgctagtgctgtgcctcctcctcggcgccgacaccgccggcgccgccacctacaacgtcgactggtcgttcgcctccggcagctggcccatcggcaagagcttccgcgcaggggacgtcctcgttttcagctacaacccggccgtgcacaacgtggtggcggtggacgccggcggctacaacagctgccggggctccggcgcgacgcacacctacacctcggggagcgaccacgtcccgctcgtccccgggacgaactacttcatctgcagcctcagcagccactgcgggctcgggatgaagatggccgtcactgcaaactgaagctagctgcagcttctggtttcaagaaaagcgagctgcgactgcgatgccatctgtgcgcatgtgaaaacatcaataaagtgctgtggaactcagtgactcctagtatgcgatagtgtacgccccgtgtgttgtactgtatccctgagttgttaacatgacacagaagccagcagtgtgcaccaattg

SEQ ID NO: 4078 - protein, 124 aa, Glycine max
  misc_feature (1)..(124): Ceres Seq. ID no. 13594574
MAMAQGRGSAAQGFALGLLVLCLLLGADTAGAATYNVDWSFASGSWPIGKSFRAGDVLVFSYNPAVHNVVAVDAGGYNSCRGSGATHTYTSGSDHVPLVPGTNYFICSLSSHCGLGMKMAVTAN

SEQ ID NO: 4079 - protein, 122 aa, Glycine max
  misc_feature (1)..(122): Ceres Seq. ID no. 13594575
MAQGRGSAAQGFALGLLVLCLLLGADTAGAATYNVDWSFASGSWPIGKSFRAGDVLVFSYNPAVHNVVAVDAGGYNSCRGSGATHTYTSGSDHVPLVPGTNYFICSLSSHCGLGMKMAVTAN

SEQ ID NO: 4080 - DNA, 1109 bp, Glycine max
  misc_feature (1)..(1109): Ceres Seq. ID no. 13594604
agttaggtcaactattaggcatgggctcgtccttgtcgaatctcaacgacggggagacgaatgattcctccatggggcctagcctcggcgatataccggaaagctgcatcgccgccgtgttcatgtacctgactcccccggagatttgcaacctcgccggtcttaaccgttcgtttcgcggcgcggcttcgtcggatttcgtctgggagaagaagctcccgccgaattaccaggatctgctcgatttgttgccgccggagagggttcttggtctctcgaagaaggatatcttcgctgtgctctctcgtcctatccccttcgacggtgataacaaggagctgtggattgatagagttacgggacgggtttgtatggcgatttctgcgaggggaatggctattactgggattgaagaccggagatattggaattggattccgaccaatgagtccaggttccatgttgtagcctacttacagcagatttggtggtttgaagtcgatgggacagtgacattccatctcccaccgggtatctactctctatcattcagaatccatctaggcggattcgcaaagaagtcggggagacgtgtgtgcaactacgaacacactcacggctgggatttgaagcctgttaggttttcgctttcgacttctgatggtcaagaggcatcatgtgagtattacttggatgatgtaaagagagaagaatcaaccgggcaccacaagcgcggtttctggatcgattataaggttggggagttcgtagtgactggatcagaaccatctactgagatcaaatggtccatgaaacagattgactgcacccactcgaaaggcgggctatgtgttgattcagtcttcattaacccaattggtgatttgaaagattacagaacgaaatctttttgtgaaatagattgaagaaagaagattcttttgaaggtaattttcattttattgttgtgcatttcatggagttgagttttgtttttttttacttcatactcgtttttgctacatagtttaggcgagaggactctctttgtgcattttcacatgtttataagtttggatgactatgatgtatccaaccaaagttaatct

SEQ ID NO: 4081 - protein, 307 aa, Glycine max
  misc_feature (1)..(307): Ceres Seq. ID no. 13594605
LGQLLGMGSSLSNLNDGETNDSSMGPSLGDIPESCIAAVFMYLTPPEICNLAGLNRSFRGAASSDFVWEKKLPPNYQDLLDLLPPERVLGLSKKDIFAVLSRPIPFDGDNKELWIDRVTGRVCMAISARGMAITGIEDRRYWNWIPTNESRFHVVAYLQQIWWFEVDGTVTFHLPPGIYSLSFRIHLGGFAKKSGRRVCNYEHTHGWDLKPVRFSLSTSDGQEASCEYYLDDVKREESTGHHKRGFWIDYKVGEFVVTGSEPSTEIKWSMKQIDCTHSKGGLCVDSVFINPIGDLKDYRTKSFCEID

SEQ ID NO: 4082 - protein, 301 aa, Glycine max
  misc_feature (1)..(301): Ceres Seq. ID no. 13594606
MGSSLSNLNDGETNDSSMGPSLGDIPESCIAAVFMYLTPPEICNLAGLNRSFRGAASSDFVWEKKLPPNYQDLLDLLPPERVLGLSKKDIFAVLSRPIPFDGDNKELWIDRVTGRVCMAISARGMAITGIEDRRYWNWIPTNESRFHVVAYLQQIWWFEVDGTVTFHLPPGIYSLSFRIHLGGFAKKSGRRVCNYEHTHGWDLKPVRFSLSTSDGQEASCEYYLDDVKREESTGHHKRGFWIDYKVGEFVVTGSEPSTEIKWSMKQIDCTHSKGGLCVDSVFINPIGDLKDYRTKSFCEID

SEQ ID NO: 4083 - protein, 284 aa, Glycine max
  misc_feature (1)..(284): Ceres Seq. ID no. 13594607
MGPSLGDIPESCIAAVFMYLTPPEICNLAGLNRSFRGAASSDFVWEKKLPPNYQDLLDLLPPERVLGLSKKDIFAVLSRPIPFDGDNKELWIDRVTGRVCMAISARGMAITGIEDRRYWNWIPTNESRFHVVAYLQQIWWFEVDGTVTFHLPPGIYSLSFRIHLGGFAKKSGRRVCNYEHTHGWDLKPVRFSLSTSDGQEASCEYYLDDVKREESTGHHKRGFWIDYKVGEFVVTGSEPSTEIKWSMKQIDCTHSKGGLCVDSVFINPIGDLKDYRTKSFCEID

SEQ ID NO: 4084 - DNA, 1123 bp, Glycine max
  misc_feature (1)..(1123): Ceres Seq. ID no. 13594713
atcgaacggcctgggcttctctgcgcctacacagccctccctcctacgccgtcttctgcttcgtccagcataacccccaaaaccacctcacccgagagaacaggcggcggcggcggcggcggcatcgggcaagatgatcaagaggcgctacttcaggcaagaccacggcgacaatagcgcctcctcgtcctcctcctcgtcgggttcagattcggaccgcgaccccgcggaagaagaggtctcggaggaggaagtagaagaggatcaagaacaagtaaaagaagaagaagatgatgatgaagaagcggaggtggagtcgggggaagaacaggaaacggaagtagatgagcaggcggaagatgagggttcaggataccaaagtgaggatagctctggacatcatgttgatagtccttgtgcagatgagaacagcagtctggtgtatgaacaataccaagcaatcagtttgcctgttaagaaagcatcaagtggtgatgctgattctgccaaaggtgctgttaacaaggatgacgctgttgaggtcgatttcagtaactacattctgaagtgcaaatctgtgtataagtgcaagctttgtcccagaatcatgtgcttaagtgaggagatggtcagggtacatcttgaatcaaagatggtgctcaacagtgatggtgagctggaggaggaggcagagacacatgctgaacgacatgcccgaactatagctcttgctcagcaagtacaaaagcccaagaaggattcaggcaggcagcgacaaaatcggagaagacagaagaggtcgcagaatcgtctcaaggacaaagaccagagacacaactctggaaaggaaggtgcaaggccgaacaatggaactgctgataagaaaataccgaatattgaaactgctgctaagaaaatgccgaatcttgaaactgctgctaagaaaaggcgcaagactgaaaaataagtgggtgctgcagaaatatttcttgcgtgttatttcttcctatattgttgtaatttttaggagctttctgcggttttactgcttctgttttgccttcctttttgatccaagtgtagctgatgaaagctgagagattaaattgaaaggaaatacgac

SEQ ID NO: 4085 - protein, 277 aa, Glycine max
  misc_feature (1)..(277): Ceres Seq. ID no. 13594714
MIKRRYFRQDHGDNSASSSSSSSGSDSDRDPAEEEVSEEEVEEDQEQVKEEEDDDEEAEVESGEEQETEVDEQAEDEGSGYQSEDSSGHHVDSPCADENSSLVYEQYQAISLPVKKASSGDADSAKGAVNKDDAVEVDFSNYILKCKSVYKCKLCPRIMCLSEEMVRVHLESKMVLNSDGELEEEAETHAERHARTIALAQQVQKPKKDSGRQRQNRRRQKRSQNRLKDKDQRHNSGKEGARPNNGTADKKIPNIETAAKKMPNLETAAKKRRKTEK

SEQ ID NO: 4086 - DNA, 1369 bp, Glycine max
  misc_feature (1)..(1369): Ceres Seq. ID no. 13594719
cctagagcatcctaatcgaaaacctgcttggttgctgagaaaattttccaaatatttcccctttcgattttctcccctttccgggattgcgaaaaacgacgctaattcgtgtagctgcatttagaatcgccaactcagaagcagtcctaattcctcaatggagagttctgaagaggaaactgatggagtctctggtaatcatgctcctaaggaactgattcgtttggcatcaaatggtgcaaaatttatagatgaagtactcaatggtcaaaatgaatgctgtctggataattttcgcatggataaacatgtattctataagttgtgtgatatcctgcaagccaagggtttattgcgtcacacaaatcgaatcaaaattgaggagcaactgggcatatttatgttcattattgggcataatctacggacaagggcggttcaagagttattccgttattctggagaaactattagtcgtcactttaacaatgttttgaatgctataatgtcaatttctctggatctctttcagcctcccggctctggtgttccttcagaaatcattgaagatcctagattctatccatattttaaagattgtgtcggagtaatagatggtatacatgtaccagtaacggtaggtgtagatgagcaaggaccattccgcaataagaatggtttgctttcacagaatattctggcagcttgctcatttgacctcaagtttcattatgttttggctggatgggaaggatctgccacagacttactagtttttaattcagcaatcacaaggaggaacaaattgcaggtccccgaaggtaaatactacatcgtagacagcaagtacccaaatgtgccaggtttcattgctccatattccagtactccctactactccaaggaatttctcagcgattaccacccacaagatgccagtgaactgttcaatcaacgacattcattattacgacatgttacagatcgaacttttgggatcttaaaggcacggtttcctatattgatgtctgctccttcttatccattacaaacacaagtgaagttagtggtggctgcatgtgcgttgcacaattacattcgcagagagaagccagatgattggcttttcaagatgtatgaagaagggtcatttccaatggaggaaccacaacccccattggagatggaagtacctccaaagatggatgttgagacccagacccagccatctgttcatacttttgattcagaagaaattggacttgcttcacagttaagggactccattgctactgaaatgtggaatgattttatccacgatttcccccccatgtaaatttctttagttaagcttatatatgatcatatt

SEQ ID NO: 4087 - protein, 392 aa, Glycine max
  misc_feature (1)..(392): Ceres Seq. ID no. 15221410
MESSEEETDGVSGNHAPKELIRLASNGAKFIDEVLNGQNECCLDNFRMDKHVFYKLCDILQAKGLLRHTNRIKIEEQLGIFMFIIGHNLRTRAVQELFRYSGETISRHFNNVLNAIMSISLDLFQPPGSGVPSEIIEDPRFYPYFKDCVGVIDGIHVPVTVGVDEQGPFRNKNGLLSQNILAACSFDLKFHYVLAGWEGSATDLLVFNSAITRRNKLQVPEGKYYIVDSKYPNVPGFIAPYSSTPYYSKEFLSDYHPQDASELFNQRHSLLRHVTDRTFGILKARFPILMSAPSYPLQTQVKLVVAACALHNYIRREKPDDWLFKMYEEGSFPMEEPQPPLEMEVPPKMDVETQTQPSVHTFDSEEIGLASQLRDSIATEMWNDFIHDFPPM

SEQ ID NO: 4088 - protein, 345 aa, Glycine max
  misc_feature (1)..(345): Ceres Seq. ID no. 15221411
MDKHVFYKLCDILQAKGLLRHTNRIKIEEQLGIFMFIIGHNLRTRAVQELFRYSGETISRHFNNVLNAIMSISLDLFQPPGSGVPSEIIEDPRFYPYFKDCVGVIDGIHVPVTVGVDEQGPFRNKNGLLSQNILAACSFDLKFHYVLAGWEGSATDLLVFNSAITRRNKLQVPEGKYYIVDSKYPNVPGFIAPYSSTPYYSKEFLSDYHPQDASELFNQRHSLLRHVTDRTFGILKARFPILMSAPSYPLQTQVKLVVAACALHNYIRREKPDDWLFKMYEEGSFPMEEPQPPLEMEVPPKMDVETQTQPSVHTFDSEEIGLASQLRDSIATEMWNDFIHDFPPM

SEQ ID NO: 4089 - protein, 311 aa, Glycine max
  misc_feature (1)..(311): Ceres Seq. ID no. 15221412
MFIIGHNLRTRAVQELFRYSGETISRHFNNVLNAIMSISLDLFQPPGSGVPSEIIEDPRFYPYFKDCVGVIDGIHVPVTVGVDEQGPFRNKNGLLSQNILAACSFDLKFHYVLAGWEGSATDLLVFNSAITRRNKLQVPEGKYYIVDSKYPNVPGFIAPYSSTPYYSKEFLSDYHPQDASELFNQRHSLLRHVTDRTFGILKARFPILMSAPSYPLQTQVKLVVAACALHNYIRREKPDDWLFKMYEEGSFPMEEPQPPLEMEVPPKMDVETQTQPSVHTFDSEEIGLASQLRDSIATEMWNDFIHDFPPM

SEQ ID NO: 4090 - DNA, 991 bp, Glycine max
  misc_feature (1)..(991): Ceres Seq. ID no. 13594738
atcctctcgattgagtaaaccctaattttcccccaaaccgcagccatgaacctcccgtcctccacggcgacctcaacttcggagtcgcctgatacggcggcgggggcgatttccccggagacgtgcggcggttgcaaaagccaagactcctgggtcatacactcggctcgtctccgcggcatcctccgcttctactgcacgcactgcctcctccgcaaccacccggcgtcgttttgccccacctgcttcgccttctacgactcctccccgccgcaccagtcccgccgcgtctcctgcaacgattgcaactccgtcactcacatccactgcgcgggagacgccaagtcccctccttaccgctgtcctccgtgccgcgaccccgacggcttctccttcttccgccccatcgtcgacgaaaacggcgcccggtgcatggataaggccctctcggaggccttcctgtgcgccgcgaagatcgcggcctcgtcgatgagcaaggccgttactttcttcagaagcgaagctgagcggaaagggaaagatgccgccgtggcgaagaagagagcgcgggaggctctcgaggacgtgctcaagctcgacgagaaggctaagttggccgtttcgaagccctccgagaatagagatcagaaaccgaaacagagtcctgcttcgaatggtggtttgaaacagattgagagctctgcggccaccgcccaagtcaagaaacagagttcgtctgtagtgcaagttaagcaagagaagtgattgcttttgaatggttatcagtgaataacttgatgtatcttttgtcttgtttgtgaaaaaaaaggttcaagcttggcatattatgtttcgggttttagtgtagatttgtgtaagtggtctccttgttttttcagtttctttttgggtttgtttgctatgtgtaggagtatgtggaacagtgtgaaagtgttagatttctaattttaattgcttcatcttgtgtctc

SEQ ID NO: 4091 - protein, 239 aa, Glycine max
  misc_feature (1)..(239): Ceres Seq. ID no. 13594739
MNLPSSTATSTSESPDTAAGAISPETCGGCKSQDSWVIHSARLRGILRFYCTHCLLRNHPASFCPTCFAFYDSSPPHQSRRVSCNDCNSVTHIHCAGDAKSPPYRCPPCRDPDGFSFFRPIVDENGARCMDKALSEAFLCAAKIAASSMSKAVTFFRSEAERKGKDAAVAKKRAREALEDVLKLDEKAKLAVSKPSENRDQKPKQSPASNGGLKQIESSAATAQVKKQSSSVVQVKQEK

SEQ ID NO: 4092 - DNA, 796 bp, Glycine max
  misc_feature (1)..(796): Ceres Seq. ID no. 13594766
atcaagctagcagcacggcattaaactaatttgacagcgatcccgatccgtcatcacatctcacacgagacagtcgttcgatccgtccgtggagcagccatggcgcagctgatggacaaggccaaggggttcgtggccgagaagatatcgggggtgcagaagccggaggcggacctgtcggacatgtcggtgcagcacgttggccgcgacggcgccaccctgtccggccgcctcgacgtgcgcaacccctactcgcacaccatccccatctgcgagatcagctactccctcaagagcgccggccgcgacgtggcctccgggaccatgccggacccggggtcgctggtggccagcgacaccaccagcctcgacataccggtgaaggtgccgtacgacttcctgatgagcctggtgaaggacgccggcaaggactgggacctcgactacgagatgcgcgtcggcctcaccgtcgacctccccatcgtcggcaacttcacgctgccgctcaccaaggccggcgagctcaagctccccacgctctccgacctgttctaaacttaccgccgcacccagctaagtaggttcgaccgtgccgtactagctgctgcgctctccatcgcctgtacgggtgatgggtagtactgggctgggcgagcgggacgatcgatcgctgcctagctctgtttttacttcggatcgcggtgtgggtgtgcacgacgtaataatgatgtattgcgtgttgtatttctagacttttatacgtgaataaaataaacagacgggtttactgtactcc

SEQ ID NO: 4093 - protein, 151 aa, Glycine max
  misc_feature (1)..(151): Ceres Seq. ID no. 13594767
MAQLMDKAKGFVAEKISGVQKPEADLSDMSVQHVGRDGATLSGRLDVRNPYSHTIPICEISYSLKSAGRDVASGTMPDPGSLVASDTTSLDIPVKVPYDFLMSLVKDAGKDWDLDYEMRVGLTVDLPIVGNFTLPLTKAGELKLPTLSDLF

SEQ ID NO: 4094 - protein, 147 aa, Glycine max
  misc_feature (1)..(147): Ceres Seq. ID no. 13594768
MDKAKGFVAEKISGVQKPEADLSDMSVQHVGRDGATLSGRLDVRNPYSHTIPICEISYSLKSAGRDVASGTMPDPGSLVASDTTSLDIPVKVPYDFLMSLVKDAGKDWDLDYEMRVGLTVDLPIVGNFTLPLTKAGELKLPTLSDLF

SEQ ID NO: 4095 - protein, 123 aa, Glycine max
  misc_feature (1)..(123): Ceres Seq. ID no. 13594769
MSVQHVGRDGATLSGRLDVRNPYSHTIPICEISYSLKSAGRDVASGTMPDPGSLVASDTTSLDIPVKVPYDFLMSLVKDAGKDWDLDYEMRVGLTVDLPIVGNFTLPLTKAGELKLPTLSDLF

SEQ ID NO: 4096 - DNA, 749 bp, Glycine max
  misc_feature (1)..(749): Ceres Seq. ID no. 13594792
cccccctccagttacctagaacatcctaatcgaaaagtcgtccctccctcggttccccatttctccacctccgagcagccgactcctccctcgccgcctccgtctctgtgacggtaactcaccatgtcggggatgaaggacgccaatgctgttgggcatgataatgttggaaattctgaacctatggaccaaagtggagataatgccatgccatcagctcagcaacaggaacaagtaatcaagaagaagtttggaggactaattcctaaaaagccaccgctcatctcaaaggatcatgagcgggcctattttgattctgctgattgggctctcggaaagtctggacagcaaggtgttgcaaaacccaaaggaccactggaggcacttaggccaaagttgcagcccacacgacaacagcaacagcgttcaaggagctctatctacagttcatcagaaaacgaggatggagatggcgctgggtcggaggacatgaatatcaactgatcaacagcgtggaatctcgtgttgtcggtgcgaaggggcctcgtcgtctgaagaagcagcttgctttcattgtctgtggaccgcagggaagggatgtatgcgtgcgtccatagataagaaaagagacggttgtaatttcaaggactgcggctgcgggtttgtacttgatcgaacagctaccttgctatgtgaccattatagactggaccattgtcctatttgtgaatggatctctgtttttgaac

SEQ ID NO: 4097 - protein, 126 aa, Glycine max
  misc_feature (1)..(126): Ceres Seq. ID no. 15221418
MSGMKDANAVGHDNVGNSEPMDQSGDNAMPSAQQQEQVIKKKFGGLIPKKPPLISKDHERAYFDSADWALGKSGQQGVAKPKGPLEALRPKLQPTRQQQQRSRSSIYSSSENEDGDGAGSEDMNIN

SEQ ID NO: 4098 - protein, 123 aa, Glycine max
  misc_feature (1)..(123): Ceres Seq. ID no. 15221419
MKDANAVGHDNVGNSEPMDQSGDNAMPSAQQQEQVIKKKFGGLIPKKPPLISKDHERAYFDSADWALGKSGQQGVAKPKGPLEALRPKLQPTRQQQQRSRSSIYSSSENEDGDGAGSEDMNIN

SEQ ID NO: 4099 - protein, 106 aa, Glycine max
  misc_feature (1)..(106): Ceres Seq. ID no. 15221420
MDQSGDNAMPSAQQQEQVIKKKFGGLIPKKPPLISKDHERAYFDSADWALGKSGQQGVAKPKGPLEALRPKLQPTRQQQQRSRSSIYSSSENEDGDGAGSEDMNIN

SEQ ID NO: 4100 - DNA, 700 bp, Glycine max
  misc_feature (1)..(700): Ceres Seq. ID no. 13594809
ctctgcctctgcctctcagtttaccaaaaccctagtttcaaagctttactctccagaaatggctttctgcaaaaatctcggtggtctattgaggcaaggtgcggtttctcagacagggaatgtacccgttcagtctatgctcgggtctctccggtacatgtctaccaagctctttgtcggtggtctctcatggggaactgatgaccagtcattgagggaggctttctccaacttcggtgaagtgatcgattctaaggtcattgttgatagggaaaccggaaggtcaagggggtttggatttgtcaatttctctgatgagagtgctgctaatgctgcaatttcagagatggacggaaaggaactgaatggacgcaacatccgagtgaatgttgctaacgatagaccaagtgctccccgggcttatggaggtggtggcggctacggtggaggtggtggtggctatggaggaggtggtgatggaggcggttactaaacagaggagcttcttgtgataagaagaattgatctttctgtttgtttttttttattatttaaatcgagcttgtgctagtacaaaacctgaatgggatttgttgagactctagtagtcagtactcttatctaagacacggcttttcactcagtttgtgttagcttcaaatattgtccgttaataattctggaggaaagccgaattgag

SEQ ID NO: 4101 - protein, 163 aa, Glycine max
  misc_feature (1)..(163): Ceres Seq. ID no. 13594810
SASASQFTKTLVSKLYSPEMAFCKNLGGLLRQGAVSQTGNVPVQSMLGSLRYMSTKLFVGGLSWGTDDQSLREAFSNFGEVIDSKVIVDRETGRSRGFGFVNFSDESAANAAISEMDGKELNGRNIRVNVANDRPSAPRAYGGGGGYGGGGGGYGGGGDGGGY

SEQ ID NO: 4102 - protein, 144 aa, Glycine max
  misc_feature (1)..(144): Ceres Seq. ID no. 13594811
MAFCKNLGGLLRQGAVSQTGNVPVQSMLGSLRYMSTKLFVGGLSWGTDDQSLREAFSNFGEVIDSKVIVDRETGRSRGFGFVNFSDESAANAAISEMDGKELNGRNIRVNVANDRPSAPRAYGGGGGYGGGGGGYGGGGDGGGY

SEQ ID NO: 4103 - protein, 118 aa, Glycine max
  misc_feature (1)..(118): Ceres Seq. ID no. 13594812
MLGSLRYMSTKLFVGGLSWGTDDQSLREAFSNFGEVIDSKVIVDRETGRSRGFGFVNFSDESAANAAISEMDGKELNGRNIRVNVANDRPSAPRAYGGGGGYGGGGGGYGGGGDGGGY

SEQ ID NO: 4104 - DNA, 761 bp, Glycine max
  misc_feature (1)..(761): Ceres Seq. ID no. 13594814
aaaaacgactgtatccgcgtcctttactttccaaaaaataaatatttttcttcttgaagagattacaccttatccaattattggttgcattaggagaagccaaattttctttgtgtctctgagctgcgtatcgagctacaactccttcaatggcttccctatcaaccagttctctaagcttcaaagctccctccatacaatctaccagaacttctcaggtgttaagaaaacccttgagtttccagcctatctcctttggacgttttcagtcttcaaagaaccttcgtcttcagatcagttgtgcagcaaaaccagagacggtgcagaaagtgagtgacattgtcagggaacaattagctttgtctgccgacactgctctcactgccgagtccaagttctctgctcttggcgcagattctctcgacaccgtggagatagtgatggctttggaggaaaagtttaacataagtgtggaggaagctgatgctcaaaacattacgacgattcaggaggcagctgatttgattgaggatcttgctcagaagaaacctgcggcttaagcttcctaaactatcccggtttaacacaaaccggctgtccttttttttttctcctcctttctgagctttcttgttttcagatcattttattgtggtttattagaccatgtgttattattttttgttttcttcttttggaagttaagattggatgttgatgatgagaaaactttggtacgttgagattgattctttgtggtg

SEQ ID NO: 4105 - protein, 136 aa, Glycine max
  misc_feature (1)..(136): Ceres Seq. ID no. 13594815
MASLSTSSLSFKAPSIQSTRTSQVLRKPLSFQPISFGRFQSSKNLRLQISCAAKPETVQKVSDIVREQLALSADTALTAESKFSALGADSLDTVEIVMALEEKFNISVEEADAQNITTIQEAADLIEDLAQKKPAA

SEQ ID NO: 4106 - protein, 111 aa, Glycine max
  misc_feature (1)..(111): Ceres Seq. ID no. 13594816
KTTVSASFTFQKINIFLLEEITPYPIIGCIRRSQIFFVSLSCVSSYNSFNGFPINQFSKLQSSLHTIYQNFSGVKKTLEFPAYLLWTFSVFKEPSSSDQLCSKTRDGAESE

SEQ ID NO: 4107 - DNA, 728 bp, Glycine max
  misc_feature (1)..(728): Ceres Seq. ID no. 13594844
tcgcacgagaccattacctagaacatcctaatcgmaaacattccattcaagagatacagcaatgatctttctaaactgagagggcatgtgagctttaaggagattcttcatcttggaccattcatggaccccaggtctgaggacaaagataactgcagctaccgtctagttggtgtcattgagcacgaagggcatcaaataaatggagggcactacattgcttatgtgcggggggcaggtcacaaccatcagagcagtggttcttcctcgtgggttcgtgcaagcgatctcgacatcaaggaagtctccctagaaaaagttctcggccgcgaggcgtacatgcttttctacgagaggatggaggactgatgcatgtccggcattgtacccaactaagcaatcagaagggcactgacaaaagaagcagaaggtgttttgatggcctggtgtaccgtcctacttacatagtctatatagtctgtcgtccagtccaattttgttgattttggcgggctgggtcattgcagttgcaggattttgcattggttgcaacttgtagcgtggtcagctggagagaaccttttttctctgtccatgaaagtatagtaattcttgtcggaacgacatgggataggttcgacagtgaatattttttgttagaaacgagattgaatacacgtaggaagacactggatattttttgcattctgcaattaaattcacctctg

SEQ ID NO: 4108 - protein, 81 aa, Glycine max
  misc_feature (1)..(81): Ceres Seq. ID no. 15221424
MDPRSEDKDNCSYRLVGVIEHEGHQINGGHYIAYVRGAGHNHQSSGSSSWVRASDLDIKEVSLEKVLGREAYMLFYERMED

SEQ ID NO: 4109 - protein, 44 aa, Glycine max
  misc_feature (1)..(44): Ceres Seq. ID no. 15221425
MHVRHCTQLSNQKGTDKRSRRCFDGLVYRPTYIVYIVCRPVQFC

SEQ ID NO: 4110 - DNA, 643 bp, Glycine max
  misc_feature (1)..(643): Ceres Seq. ID no. 13594879
gactgagtctcgccgctgcctcatttctgttctgttctcgtcacagattgtggtgattctattatgcgttggctgggttcaattgatgagagacaattgtggggatgcttgtttctgtcaattggctctgttttctttgttgggtatttctctattgctgttctttgcaagcttttcccaccttcacacattcccctcatttctgcactgcaaaatgactggtactactgcttcttggtgccattgactctccctataattgtggttgctgtgtactttcattggctcagcatgaagctgttcaagcatgcttaattagcttaactttgccagattttgaaggcagaaagaaatacatgtatgctgttggggcaagcaacaactacctatgacaattgctgcactcctctctcctaatcacctcaaaaagagttcaaggattggtgtttgtgcaaatcatttagtagtatcctgccttaagatgttaaatgtgattgcatacctgtcaaagaccattcatgtttattgtactatggaaagttatgtaacatcattcagtccttctagcagcataacttgttttggaggctcatttttgtcttattaatctttcttcatatcaatgatatctatgtgattaggc

SEQ ID NO: 4111 - protein, 83 aa, Glycine max
  misc_feature (1)..(83): Ceres Seq. ID no. 13594880
MRWLGSIDERQLWGCLFLSIGSVFFVGYFSIAVLCKLFPPSHIPLISALQNDWYYCFLVPLTLPIIVVAVYFHWLSMKLFKHA

SEQ ID NO: 4112 - protein, 81 aa, Glycine max
  misc_feature (1)..(81): Ceres Seq. ID no. 13594881
TESRRCLISVLFSSQIVVILLCVGWVQLMRDNCGDACFCQLALFSLLGISLLLFFASFSHLHTFPSFLHCKMTGTTASWCH

SEQ ID NO: 4113 - protein, 72 aa, Glycine max
  misc_feature (1)..(72): Ceres Seq. ID no. 13594882
MTIAALLSPNHLKKSSRIGVCANHLVVSCLKMLNVIAYLSKTIHVYCTMESYVTSFSPSSSITCFGGSFLSY

SEQ ID NO: 4114 - DNA, 748 bp, Glycine max
  misc_feature (1)..(748): Ceres Seq. ID no. 13594904
atccaccacaacgaaagcaacagccagcgatcgagacagcagcaagaggctcacttagctactgccactagtcgcgatcacatagccactcgatcgacatggcctgcaagtcggcgtccctgctgatcctcgcggcgctggtggcggccgcggcgtgcgcgggctcggcaacggcgcgcgacgtcccggccgggaaggaggatgcggtgaagcggccggagacgttccaggaggggacggtgctgatcccggggatcgggcggtacgagctgggcagccactacaggccggacatcggcgggctggaccacagcatcccggtcgccgccagggcgcagttcatccccggcgccgacgacacctgggtgcccaaccccggcttcgaggtgcccaaccccttccgccccgcagccaccacggagtccccctgatgcatggatcgagtcggccggccaacgcgtccacgttacgcctatcgatcaatgggtagctagcctgctacaattcaatttccgctagcttttggttgctacaataaaatagctgctatgcataggcaaggcatgcgtatgcatgtatcagcgactgcgtgcgagcgcgctgtcgacgttttttgtgtgtgattggagagtgtacctgtatggggtatgcatggatgcgtaggaaggaagcatccatcgcatatctcgctttgctttgttgttgccaagtaatgtgtagttcaatgtatttttctttttagttcggt

SEQ ID NO: 4115 - protein, 110 aa, Glycine max
  misc_feature (1)..(110): Ceres Seq. ID no. 13594905
MACKSASLLILAALVAAAACAGSATARDVPAGKEDAVKRPETFQEGTVLIPGIGRYELGSHYRPDIGGLDHSIPVAARAQFIPGADDTWVPNPGFEVPNPFRPAATTESP

SEQ ID NO: 4116 - DNA, 959 bp, Glycine max
  misc_feature (1)..(959): Ceres Seq. ID no. 13594918
catcctaatcgaaaaagagtactaaacggaatttgaaaaccaaggctgaagaagttttaagagacatggagctctccgtggttgcaagagacatggaagaagttgtattgctggttgatgatttgagatcactttctgggatttctcgctgtagaatatgtcatgaagaagaatttgagagctccaaaaccttggaagctccttgtgcttgttctgggacagttaagtttgctcacagagattgcattcagacatggtgcgatgagaaaggaaatacaacttgtgaaatatgtctccagcaatatgaacctggatatacagcagccccaaagaaatcgcaaataactgatgcagcaatgaccattagggatagcctgcaaatttcaaggaatgaacaagaaccgttaaacacaagaatagtgggtatcgttgaaggaaacaattactctgaatgcacgtatgctgcagataggaccgcggcttgttgtcgatctctggctctagcttttacactcatcttgcttgtaagacatctttttgcactccttacagatggaatggaagattatccatttacaattcttacggtctttttactaagggccagtggaattattatacccatgtacataattattaaggcgatcggagctattcatgacaatattaagcgtcaccatcatgaggattctgacgatgactcatcgatatctgatggagatgatgaagaaaatgagacaccaaatgatgaaattttaagacattcacaatcataggtcattatttgatttaatttgtatcagagcattatgctgatgctctgtcaagttttaccattttggaggcataattttttattgtaaaaaaaaagaagaacgaaattcacattgaaatacatatagctttgcagtatttatactgtttcctaccaacccaagtatataaaacaaccaaatttc

SEQ ID NO: 4117 - protein, 236 aa, Glycine max
  misc_feature (1)..(236): Ceres Seq. ID no. 13594919
MELSVVARDMEEVVLLVDDLRSLSGISRCRICHEEEFESSKTLEAPCACSGTVKFAHRDCIQTWCDEKGNTTCEICLQQYEPGYTAAPKKSQITDAAMTIRDSLQISRNEQEPLNTRIVGIVEGNNYSECTYAADRTAACCRSLALAFTLILLVRHLFALLTDGMEDYPFTILTVFLLRASGIIIPMYIIIKAIGAIHDNIKRHHHEDSDDDSSISDGDDEENETPNDEILRHSQS

SEQ ID NO: 4118 - protein, 227 aa, Glycine max
  misc_feature (1)..(227): Ceres Seq. ID no. 13594920
MEEVVLLVDDLRSLSGISRCRICHEEEFESSKTLEAPCACSGTVKFAHRDCIQTWCDEKGNTTCEICLQQYEPGYTAAPKKSQITDAAMTIRDSLQISRNEQEPLNTRIVGIVEGNNYSECTYAADRTAACCRSLALAFTLILLVRHLFALLTDGMEDYPFTILTVFLLRASGIIIPMYIIIKAIGAIHDNIKRHHHEDSDDDSSISDGDDEENETPNDEILRHSQS

SEQ ID NO: 4119 - protein, 139 aa, Glycine max
  misc_feature (1)..(139): Ceres Seq. ID no. 13594921
MTIRDSLQISRNEQEPLNTRIVGIVEGNNYSECTYAADRTAACCRSLALAFTLILLVRHLFALLTDGMEDYPFTILTVFLLRASGIIIPMYIIIKAIGAIHDNIKRHHHEDSDDDSSISDGDDEENETPNDEILRHSQS

SEQ ID NO: 4120 - DNA, 820 bp, Glycine max
  misc_feature (1)..(820): Ceres Seq. ID no. 13594922
gtttttcccaaataagcgtacgtcgatgtcaaacttggtttgagcaaacgcgcattcgctgacactttcactgcgtgattgattaaccttgctggtttccaccaaattggaattgtttgattgttctttgattttcaaacagcaatcactttcacaatggtgattgcaacaagaaatttcttcgtatctcttttcttaatatcctcatttttttgcacaacactccttgccaagtcttctcacccaatctccgatgctcaagtcaggaagaacaagcttcagtgctatgctgatattgacagtgggttgtggggttggtcatgcaaatcaacggtgatagcaagggagaattgtgctctaagatgcctttcacccgcttgttacgagctcatctacgagagtgacccgctcgaagagggagaaaaggactttattcgaagccaagagtacaaatactgcatgcacaagttgtccatgggagagagccttgagggtgttaagggtgcttttagcaactaatcaagcgaaaattctaaattggaggtggaagctatgatgaatttatatatgccctgttaaatgtagattaaagaaaatgccaagagtcttgagagcatttttttctttcaattaattaattataatgaaccatatacaagtatatgctcttagaaatccagtacaatctagaagaaaacaacgcttctcaaaaggtgagtgctttagtttctaacccttcaagactctattaaggtagtatataagttgcttcatattttgacatttctaaaagaattttatctgttagtaaatttccgtc

SEQ ID NO: 4121 - protein, 120 aa, Glycine max
  misc_feature (1)..(120): Ceres Seq. ID no. 15221432
MVIATRNFFVSLFLISSFFCTTLLAKSSHPISDAQVRKNKLQCYADIDSGLWGWSCKSTVIARENCALRCLSPACYELIYESDPLEEGEKDFIRSQEYKYCMHKLSMGESLEGVKGAFSN

SEQ ID NO: 4122 - DNA, 1156 bp, Glycine max
  misc_feature (1)..(1156): Ceres Seq. ID no. 13594929
ccatcgtacggtacactcgtaccaatcagcgttagcgcgaagggataacgtacgtccgttccatcctcgcgcgcgcggccgctccggctccggctccggccatggcgtccacctccgcctccctcggcgccatcctccagcgcttcccgctgctcgcgccccgccccgcctcccgccgcgcgcccaccgcccgccgcgccgtcgccaacaagatctcctgcatcggatgggacccggagggcatcctggcgccgccgcagccgggccacatcgcgcgcctcgagttccggcgccgcctcgacagcgacgccgacgcgcgcgccgccttcgacctccaggtcaaggaggagcaggagcgccgccgcaaggagcgcgaggcgcgggtgatacctgagacggacgccgggctggtggagttcttcctggacacggacgcgcgggagatcgagatcgagatcggcaggctccggcccaggctcaacaagggcttcttcgaccacatccagcgcgagatcgcgcagatcaagttcgcagtcaccagaacagcggcaaatgaagacagactgatcgagctggaggcgatgcagaaggtcatcggggagggagtcgaggcctacgacaagctgcaaaacgacctggtcacggccaaggagcggctcaccaacatcctgcaatccaaagataggaagaaaactctgctcgacatggttgaacggaacgagctcaacatgtccatattaacgcttctcgacgagaacatagcgagcgccaagaccagtaaccaggaggaggccgtggctttcatggaggatgtgcgctcatctatgctgaaatacataacagtataaattttgcctacatacaccggtgaccagttatctctgctatggcactggagtcgtcttcggcgcatagttgttcgaattaattcaatggagctgtaattcacaagtccatcttgtgtgttgtaattttgtttcggttgtatctagttgttctgtctgatatatgttgcaattgtcagtagctttactggcaaaaagagattgtacaatcatatatacatgcacggctgtaccagaaacaaatacaacaagactatgatctaaaaaaaaaaaaaaaaaagcttatcgataccgtcgacctcgaggggggg

SEQ ID NO: 4123 - protein, 248 aa, Glycine max
  misc_feature (1)..(248): Ceres Seq. ID no. 13594930
MASTSASLGAILQRFPLLAPRPASRRAPTARRAVANKISCIGWDPEGILAPPQPGHIARLEFRRRLDSDADARAAFDLQVKEEQERRRKEREARVIPETDAGLVEFFLDTDAREIEIEIGRLRPRLNKGFFDHIQREIAQIKFAVTRTAANEDRLIELEAMQKVIGEGVEAYDKLQNDLVTAKERLTNILQSKDRKKTLLDMVERNELNMSILTLLDENIASAKTSNQEEAVAFMEDVRSSMLKYITV

SEQ ID NO: 4124 - protein, 130 aa, Glycine max
  misc_feature (1)..(130): Ceres Seq. ID no. 13594931
HRTVHSYQSALARRDNVRPFHPRARGRSGSGSGHGVHLRLPRRHPPALPAARAPPRLPPRAHRPPRRRQQDLLHRMGPGGHPGAAAAGPHRAPRVPAPPRQRRRRARRLRPPGQGGAGAPPQGARGAGDT

SEQ ID NO: 4125 - DNA, 1037 bp, Glycine max
  misc_feature (1)..(1037): Ceres Seq. ID no. 13594940
aatttctccttcctctctgcccatacatatctctctctccatcgatctaacctacacacacagagaaagagagagaagcagcagtagcacatgtaacctagctagcctgcggttctccacggcaacgcttcttcttcttggctgccgcctggtgaacctcgccgtagtctgaacggctaggggggcagcgaggcggcggcgccaggggataatcaggaggaatgtcgtcgtcgggccagatcgcgccggcagaacaagtctgctacgtccactgcaacttctgcaacaccgtactcgcggtgagtgtccctgggaacagcatgctcaacattgtgacagtccggtgtgggcactgtacaaacctactttcggtgagcctgagagggcagatgcactcaccagtccctcctgcagcacaggtccaggagagcagcctgagcaagcccaatggcagcaacggcttcattcgcgatcacagcgtctacaatagcccggagtttggttcgtcttcttcttcgtcgtcgtccaaattccggatgccgacgatgatgttctcgtcgcaaaatgatctgctgcaggaacagacgctgcacgcacgtcctccggagaagaggcagcgtgttccttcagcgtacaacagattcatcaaggaagagatacgaaggataaaggcaaacaaccccgacattagccacagggaagccttcagcactgccgcaaagaactgggcacattacccaaacatccatttcggtctaaaccccgagcgcgacggtggcaagaggctcgccgtcgacgatgccgcgccggctgccaagaagatccaaggtttctgttcatagacacgacggttgggagtccaaacaagaacaattgtatctatatatagtattagtatatcgcatatgtgtatacgtaccgcatgtgagtaagtaaagatgcaaaggaaaagagaagaagtcactacgtaccttaccttatacaattgtacgtacatatacggtgatcgagtgaataaataattagtctgtcttttt

SEQ ID NO: 4126 - protein, 206 aa, Glycine max
  misc_feature (1)..(206): Ceres Seq. ID no. 13594941
MSSSGQIAPAEQVCYVHCNFCNTVLAVSVPGNSMLNIVTVRCGHCTNLLSVSLRGQMHSPVPPAAQVQESSLSKPNGSNGFIRDHSVYNSPEFGSSSSSSSSKFRMPTMMFSSQNDLLQEQTLHARPPEKRQRVPSAYNRFIKEEIRRIKANNPDISHREAFSTAAKNWAHYPNIHFGLNPERDGGKRLAVDDAAPAAKKIQGFCS

SEQ ID NO: 4127 - protein, 173 aa, Glycine max
  misc_feature (1)..(173): Ceres Seq. ID no. 13594942
MLNIVTVRCGHCTNLLSVSLRGQMHSPVPPAAQVQESSLSKPNGSNGFIRDHSVYNSPEFGSSSSSSSSKFRMPTMMFSSQNDLLQEQTLHARPPEKRQRVPSAYNRFIKEEIRRIKANNPDISHREAFSTAAKNWAHYPNIHFGLNPERDGGKRLAVDDAAPAAKKIQGFCS

SEQ ID NO: 4128 - protein, 150 aa, Glycine max
  misc_feature (1)..(150): Ceres Seq. ID no. 13594943
MHSPVPPAAQVQESSLSKPNGSNGFIRDHSVYNSPEFGSSSSSSSSKFRMPTMMFSSQNDLLQEQTLHARPPEKRQRVPSAYNRFIKEEIRRIKANNPDISHREAFSTAAKNWAHYPNIHFGLNPERDGGKRLAVDDAAPAAKKIQGFCS

SEQ ID NO: 4129 - DNA, 827 bp, Glycine max
  misc_feature (1)..(827): Ceres Seq. ID no. 13594974
agaacatcctaatcgaaaaatatttcttttaacatttccttagtttctgaacctaccctcatcgggtctccaaggagccaagaaagaactgctttctcggcttctcggagtctcaccatcctctgttttcaccatttcttcatccacacgcaacctctaatctaaacctaaccctaaaaaatggactccacggagctaaaacgtgtgttccaaatgttcgacaaggacggagacggtcggatcacacagaaggagctaaacgagtcattcaaaaacctcggcatcataatccctgaaaacgagctgtcgcagatgatcgagaagatcgatgtgaacggagatggttgcgttgacgtcgaagagtttggagagctttacaagtcgataatggtccaaggcgaggatgagataggagatgaagatatgaaggaagcgttcaacgtttttgatcagaatggagatgggtttattacggtggatgagttgaaaacggtgttgtcttccttgggcctcaagcaaggtaagaccttggaggagtgtaggaagatgataatacaagtggatgttgatggtgatggtagggttaattacaaggagtttaggcaaatgatgaagaagggtcagattttagctcaatgagctgatgatctatgatttgtttgtttatatattttttttggttatttgtgttaacctttttctctcgcattctagaaggaaatatcacattatctgtaactggagctgttttatagtgtctaggtttgcgagagcacattgtaaaaattgtagacctgtttgtttctaatgtgatttgtgataatttt

SEQ ID NO: 4130 - protein, 152 aa, Glycine max
  misc_feature (1)..(152): Ceres Seq. ID no. 15221441
MDSTELKRVFQMFDKDGDGRITQKELNESFKNLGIIIPENELSQMIEKIDVNGDGCVDVEEFGELYKSIMVQGEDEIGDEDMKEAFNVFDQNGDGFITVDELKTVLSSLGLKQGKTLEECRKMIIQVDVDGDGRVNYKEFRQMMKKGQILAQ

SEQ ID NO: 4131 - protein, 141 aa, Glycine max
  misc_feature (1)..(141): Ceres Seq. ID no. 15221442
MFDKDGDGRITQKELNESFKNLGIIIPENELSQMIEKIDVNGDGCVDVEEFGELYKSIMVQGEDEIGDEDMKEAFNVFDQNGDGFITVDELKTVLSSLGLKQGKTLEECRKMIIQVDVDGDGRVNYKEFRQMMKKGQILAQ

SEQ ID NO: 4132 - protein, 108 aa, Glycine max
  misc_feature (1)..(108): Ceres Seq. ID no. 15221443
MIEKIDVNGDGCVDVEEFGELYKSIMVQGEDEIGDEDMKEAFNVFDQNGDGFITVDELKTVLSSLGLKQGKTLEECRKMIIQVDVDGDGRVNYKEFRQMMKKGQILAQ

SEQ ID NO: 4133 - DNA, 660 bp, Glycine max
  misc_feature (1)..(660): Ceres Seq. ID no. 13594979
accaagcaattcaaacaacacggtaacacgcaaactccgagaaaatccccaaatcacataaaattagggttacgaatcggggaaagttgtctctcctttcaccctaattcgatgcctataggtttcaggaaccaagtgatgcggtcgttctcgtggatcatcatccctttactcttattgctattctgcttgatcggctcctcacaagcagcggacgagaaatcaagcggcgacgtgtgcaatacggtttcggatccgggcgggtgcccaataaactgtttccgggcggatccggtttgcggagccgacggagtcacgtactggtgcggttgtcccgacgcggcgtgccacggagctcgcgtggtgaaaacgggagcctgcgacgcgggtaacgcgggaagcgcttctgtgccgggtcaagctttgttactgatccatatcgtttggctcttcttgctcggactctctcttctcgtcggtgctttctgaatggattagataataaggaaattgatcccaattcgtttctgtagcttcttcttttgtcgtgatttatagatcagcacttgtgtttgagatgattcatgcttctgtagatcacacgttatgtgtttgtatgtgtaacgttgagttggtttctcttaatggatttgcttcgtc

SEQ ID NO: 4134 - protein, 162 aa, Glycine max
  misc_feature (1)..(162): Ceres Seq. ID no. 13594980
TKQFKQHGNTQTPRKSPNHIKLGLRIGESCLSFHPNSMPIGFRNQVMRSFSWIIIPLLLLLFCLIGSSQAADEKSSGDVCNTVSDPGGCPINCFRADPVCGADGVTYWCGCPDAACHGARVVKTGACDAGNAGSASVPGQALLLIHIVWLFLLGLSLLVGAF

SEQ ID NO: 4135 - protein, 125 aa, Glycine max
  misc_feature (1)..(125): Ceres Seq. ID no. 13594981
MPIGFRNQVMRSFSWIIIPLLLLLFCLIGSSQAADEKSSGDVCNTVSDPGGCPINCFRADPVCGADGVTYWCGCPDAACHGARVVKTGACDAGNAGSASVPGQALLLIHIVWLFLLGLSLLVGAF

SEQ ID NO: 4136 - protein, 116 aa, Glycine max
  misc_feature (1)..(116): Ceres Seq. ID no. 13594982
MRSFSWIIIPLLLLLFCLIGSSQAADEKSSGDVCNTVSDPGGCPINCFRADPVCGADGVTYWCGCPDAACHGARVVKTGACDAGNAGSASVPGQALLLIHIVWLFLLGLSLLVGAF

SEQ ID NO: 4137 - DNA, 530 bp, Glycine max
  misc_feature (1)..(530): Ceres Seq. ID no. 13594983
ctcaaccgccgtcgcgtctccactttcctctccatctcactcactctccccctccgccgccggcgcagcgtcctccccgcgactccgatggccagcaagtgggtcaggcccgaggtgtacccgctgttcgcggcgacgggcgtggccatcggcatctgcgcctttagcctccttcgcaacatcaccggcaacccagaagtcagggtcaacaagatggggagggcagcaggagtgcttgagaaccatgaggagggcaggcgctacgccgagcacggcctcagagcctatgtgcaggacaagacccccgagatcatgccaggaatcaacaagttcttcaccagcccaaaatgaagcactttagtctgtctgtgactcgctattagtaactgttgtggtcaagtgcaaacctatttcaagcattcagtaatgttgttgcgtccataattcagaggacatcgtcaattacctcttattgaaagaaccatgtgatgtttgatggcttgctatatatgtgatggttgatggcttcg

SEQ ID NO: 4138 - protein, 119 aa, Glycine max
  misc_feature (1)..(119): Ceres Seq. ID no. 13594984
STAVASPLSSPSHSLSPSAAGAASSPRLRWPASGSGPRCTRCSRRRAWPSASAPLASFATSPATQKSGSTRWGGQQECLRTMRRAGATPSTASEPMCRTRPPRSCQESTSSSPAQNEAL

SEQ ID NO: 4139 - protein, 116 aa, Glycine max
  misc_feature (1)..(116): Ceres Seq. ID no. 13594985
LNRRRVSTFLSISLTLPLRRRRSVLPATPMASKWVRPEVYPLFAATGVAIGICAFSLLRNITGNPEVRVNKMGRAAGVLENHEEGRRYAEHGLRAYVQDKTPEIMPGINKFFTSPK

SEQ ID NO: 4140 - protein, 87 aa, Glycine max
  misc_feature (1)..(87): Ceres Seq. ID no. 13594986
MASKWVRPEVYPLFAATGVAIGICAFSLLRNITGNPEVRVNKMGRAAGVLENHEEGRRYAEHGLRAYVQDKTPEIMPGINKFFTSPK

SEQ ID NO: 4141 - DNA, 721 bp, Glycine max
  misc_feature (1)..(721): Ceres Seq. ID no. 13595008
cgcacgaggatcaacagcagcagagagaagcaaaccggccggccggcgagatggcgcaggagagcctgaggctggtgtgcccgccggtgtcggcgcacgaggggcggctgccgcggcagtacacgctggaggggcagggcgcgaagaaggacatctcgccgccgctggagtggtacggggtgcccgacggcacgcggtcgctggcggtggtggtgcaggacgtcgacgcggacgagcgggtgccgtggacgcactgggtggtcgtcaacatctcgcccgaggagaaggggctgcccgagggcttctccggcgccgggggcaacgccaacgccggcggcggcgacggcggcgtccaggagggggtcaacgactggaagcagcccgggtggcgcggccccgtcccggactcccacggccaccgcatccagttccggctctacgcgctcgacgacgtgctcagcctcggcaacaaggtgactgtggacaaggtcatggaggccatcgaggggcacgtgctgggggaggccgagatcacggccgtgttctaaggagttcttgtggattttgacactcggctctgtgtgtgtgtgtgacctgcttgttacttcttgcgaattgtgtgtggtctgttctgtagcgtgcctgtatacgcatggccacgagcagcctttgtaattttgatccaataaatgaagtgacttcttatcagccgggtacggtt

SEQ ID NO: 4142 - protein, 188 aa, Glycine max
  misc_feature (1)..(188): Ceres Seq. ID no. 13595009
ARGSTAAERSKPAGRRDGAGEPEAGVPAGVGARGAAAAAVHAGGAGREEGHLAAAGVVRGARRHAVAGGGGAGRRRGRAGAVDALGGRQHLARGEGAARGLLRRRGQRQRRRRRRRRPGGGQRLEAARVARPRPGLPRPPHPVPALRARRRAQPRQQGDCGQGHGGHRGARAGGGRDHGRVLRSSCGF

SEQ ID NO: 4143 - protein, 181 aa, Glycine max
  misc_feature (1)..(181): Ceres Seq. ID no. 13595010
HEDQQQQREANRPAGEMAQESLRLVCPPVSAHEGRLPRQYTLEGQGAKKDISPPLEWYGVPDGTRSLAVVVQDVDADERVPWTHWVVVNISPEEKGLPEGFSGAGGNANAGGGDGGVQEGVNDWKQPGWRGPVPDSHGHRIQFRLYALDDVLSLGNKVTVDKVMEAIEGHVLGEAEITAVF

SEQ ID NO: 4144 - protein, 165 aa, Glycine max
  misc_feature (1)..(165): Ceres Seq. ID no. 13595011
MAQESLRLVCPPVSAHEGRLPRQYTLEGQGAKKDISPPLEWYGVPDGTRSLAVVVQDVDADERVPWTHWVVVNISPEEKGLPEGFSGAGGNANAGGGDGGVQEGVNDWKQPGWRGPVPDSHGHRIQFRLYALDDVLSLGNKVTVDKVMEAIEGHVLGEAEITAVF

SEQ ID NO: 4145 - DNA, 806 bp, Glycine max
  misc_feature (1)..(806): Ceres Seq. ID no. 13595012
acagcgcctacaaacccttgctagttgcttcctatagtaagccttgcttcctctcgaccaaggctagctttcgcaatggagccatcgaccaagctcttcctcgtgctcctcggcctaaacttgatggtcaccgctgtgcacggtggttgcggaccccactgccctaccccgaccccaccgccgcctccatcgaccaacggcggctcgtgctcgattgacacgttgaagctgcgcgtgtgcgccaacgtgctgaacctgctgaagctcgggcttggcgtgccgcccagcgagcggtgttgcccgctgctggccgatctggccgacctggacgctgcggtgtgcctctgcaccgccatcagggccaaggtcctcggcgtcatcaagctcaatgtccccgtcgacctggtgctcctgctcaaccactgccacaagacctgcccgcctggcttcacctgcccgcactgatcgaacaaagtactcggccaagcatggcatgctgcgtacacatgccatgcatgcagccgtctatacaccactccagtttgtgtttgagttcatctatatgtcttgtgcatgcctaggttctctgtcatgcattagcattatgcatgcatgcagtgatcactaggtaggtacgtaaacataagtgcatgaaagtgtgtcaagtttgtggtgtccaaataaatgacccacgtaaccggggatttgtatcatcatctgaaatactgtaccgggcgcctatatgcccctagcttgtatcatctgaaatctgatgaagttgtgtaaactcgagatgtgtgttacat

SEQ ID NO: 4146 - protein, 129 aa, Glycine max
  misc_feature (1)..(129): Ceres Seq. ID no. 13595013
MEPSTKLFLVLLGLNLMVTAVHGGCGPHCPTPTPPPPPSTNGGSCSIDTLKLRVCANVLNLLKLGLGVPPSERCCPLLADLADLDAAVCLCTAIRAKVLGVIKLNVPVDLVLLLNHCHKTCPPGFTCPH

SEQ ID NO: 4147 - protein, 113 aa, Glycine max
  misc_feature (1)..(113): Ceres Seq. ID no. 13595014
MVTAVHGGCGPHCPTPTPPPPPSTNGGSCSIDTLKLRVCANVLNLLKLGLGVPPSERCCPLLADLADLDAAVCLCTAIRAKVLGVIKLNVPVDLVLLLNHCHKTCPPGFTCPH

SEQ ID NO: 4148 - protein, 79 aa, Glycine max
  misc_feature (1)..(79): Ceres Seq. ID no. 13595015
MSPSTWCSCSTTATRPARLASPARTDRTKYSAKHGMLRTHAMHAAVYTPLQFVFEFIYMSCACLGSLSCISIMHACSDH

SEQ ID NO: 4149 - DNA, 693 bp, Glycine max
  misc_feature (1)..(693): Ceres Seq. ID no. 13595036
agatctctctcaccccaaagacaacagaaaaccttcttcacgcgcgcacgcaccaaaatcaccttcgatctcatcaccggggaagggggatggccgccgaggagggagccgtgatagcgtgccacaccaagcaagagttcgacacccacatggctaatggcaaggagaccggcaagctggtgatcattgacttcactgcttcctggtgcggtccttgtcgtgtcatagccccagtctttgctgagtacgccaagaagttccctggcgccattttcctgaaggtggacgttgacgagctgaaggacgtcgctgaagcatacaacgttgaggcaatgccgaccttcctgtttatcaaggatggtgcgaaggtggacactgttgtcggtggcaggaaggatgatatccataccaagatagtggccctcatgggttctgcatctgcctaagaagggaagagtgatgcccctcttgtgtcaataagagccagcacctggtgtaagtagttatcgctgcagtatgctttggcttagtcgtgactgaactttgtgatgattcggtttagagttcagaacttcagacatttgcaccggttgttctgaattacagtacctaatgttttgctacagttgcttcgttgtgaagtttggataactatcctgtctgaatgttaatgcaaagccaatatgccgctgt

SEQ ID NO: 4150 - protein, 147 aa, Glycine max
  misc_feature (1)..(147): Ceres Seq. ID no. 15221457
ISLTPKTTENLLHARTHQNHLRSHHRGRGMAAEEGAVIACHTKQEFDTHMANGKETGKLVIIDFTASWCGPCRVIAPVFAEYAKKFPGAIFLKVDVDELKDVAEAYNVEAMPTFLFIKDGAKVDTVVGGRKDDIHTKIVALMGSASA

SEQ ID NO: 4151 - protein, 118 aa, Glycine max
  misc_feature (1)..(118): Ceres Seq. ID no. 15221458
MAAEEGAVIACHTKQEFDTHMANGKETGKLVIIDFTASWCGPCRVIAPVFAEYAKKFPGAIFLKVDVDELKDVAEAYNVEAMPTFLFIKDGAKVDTVVGGRKDDIHTKIVALMGSASA

SEQ ID NO: 4152 - protein, 98 aa, Glycine max
  misc_feature (1)..(98): Ceres Seq. ID no. 15221459
MANGKETGKLVIIDFTASWCGPCRVIAPVFAEYAKKFPGAIFLKVDVDELKDVAEAYNVEAMPTFLFIKDGAKVDTVVGGRKDDIHTKIVALMGSASA

SEQ ID NO: 4153 - DNA, 1087 bp, Glycine max
  misc_feature (1)..(1087): Ceres Seq. ID no. 13595050
accagctccatcgcaagggacaatactaccactctagccacttactactggagctagcaggcgccaccccacccaccaaccaacgacaacgagcgcgccgcgagcgcacgccggagcaagcatgtcgatgtcggtgtccatgtccgggaaggcgagcgacccgggttccgcctggttcggcggcggcagcaggagcccgcaaccggggccgacgcacaacgtgcggctcatcgccatggccgttgccgcgttcgtctccgtgctcggcctctccctgctcctgcacctctacatctgccgcgtccgccgcaggaaccgcaggcaggcggaggcagccgcggcggctctggaggccggctcggcggcccccaagccggccaaggttggcctggacccgtccgccatcgcggcgctgccgacagcggcgtacaaggagacgggcgagccgggcagcggcgcaagcgagtgcaccatctgcctcggcgccatgcaggagggcgaggcggtgcgcgtgctgccggcctgcgcccacgtgttccacgtcccctgcgtcgacacgtggctcgcgtccagctcgtcgtgcccggtctgccgcgccctggtggagccgccgccgtcgccggccgcgccagcgtgggtgcaggagaagcagggcctggagaaggagtgtggtgcaagtgggagctcggcgccgccatgtgggctgggggcgtcgctgatgaggatgctgagcagggagaggccgctggcgcggaggccgacgcagggtgaccacgcgcacccgatggaaatgcatgtcgaggacttggaaagccagcagccccagctgcaacactctgtggatagcaattagtctacttttctgttcttcttttttgggttttcgccattcgccgctgctcgattgcaaatcttgcatttgggtggccgattcagaggtgtgaaatacggaaatacacccctgaaagtgtcctatgttttaattaggcactggcgcttgtggatgtgcttggagctcacccatatctctcgtatttgtgcaaacaagggatcatggatatataaatagagctccgttttctcttcc

SEQ ID NO: 4154 - protein, 243 aa, Glycine max
  misc_feature (1)..(243): Ceres Seq. ID no. 13595051
MSMSVSMSGKASDPGSAWFGGGSRSPQPGPTHNVRLIAMAVAAFVSVLGLSLLLHLYICRVRRRNRRQAEAAAAALEAGSAAPKPAKVGLDPSAIAALPTAAYKETGEPGSGASECTICLGAMQEGEAVRVLPACAHVFHVPCVDTWLASSSSCPVCRALVEPPPSPAAPAWVQEKQGLEKECGASGSSAPPCGLGASLMRMLSRERPLARRPTQGDHAHPMEMHVEDLESQQPQLQHSVDSN

SEQ ID NO: 4155 - protein, 241 aa, Glycine max
  misc_feature (1)..(241): Ceres Seq. ID no. 13595052
MSVSMSGKASDPGSAWFGGGSRSPQPGPTHNVRLIAMAVAAFVSVLGLSLLLHLYICRVRRRNRRQAEAAAAALEAGSAAPKPAKVGLDPSAIAALPTAAYKETGEPGSGASECTICLGAMQEGEAVRVLPACAHVFHVPCVDTWLASSSSCPVCRALVEPPPSPAAPAWVQEKQGLEKECGASGSSAPPCGLGASLMRMLSRERPLARRPTQGDHAHPMEMHVEDLESQQPQLQHSVDSN

SEQ ID NO: 4156 - protein, 238 aa, Glycine max
  misc_feature (1)..(238): Ceres Seq. ID no. 13595053
QLHRKGQYYHSSHLLLELAGATPPTNQRQRARRERTPEQACRCRCPCPGRRATRVPPGSAAAAGARNRGRRTTCGSSPWPLPRSSPCSASPCSCTSTSAASAAGTAGRRRQPRRLWRPARRPPSRPRLAWTRPPSRRCRQRRTRRRASRAAAQASAPSASAPCRRARRCACCRPAPTCSTSPASTRGSRPARRARSAAPWWSRRRRRPRQRGCRRSRAWRRSVVQVGARRRHVGWGRR

SEQ ID NO: 4157 - DNA, 764 bp, Glycine max
  misc_feature (1)..(764): Ceres Seq. ID no. 13595055
attttaggaggatctctctctctctctgcttctctccatctctctcttagccatggctgctttcacctgtacctctcgtcctcccgtttccctccgttcggagtcaagaatcgcttcctctccatcagcttcactctctgctcggcggatgttcgccgtctcgcctgactcagcaggattgagaatccgtctttcccagtctccctcctcgttgacctcgaaggttcctcgaccacgaagaggcatcgtctgtgaggctcaggaaaccactacagatatagtttcaatagtcaacgacacaacatgggactctctagttctcaaggcggacgggcctgtattggttgacttttgggcaccatggtgtgggccttgcaaaatgattgacccgctcgtgaacgagctagcaaaagagtacaccgggaaggtcaagttctacaaactgaacacggacgactctccttcaaccccaagcaagtacaatgttagaagcatcccaacgatcatgatctttgtcaatggggagaagaaggatgcaatcataggtgcagtgcctagatctacgctcgcgtctagcattgataaattcttgcaatgagatttagactggtgagtctgtgagatctgtttctcctcctcttctgtcttgtgttctcattctctcttgtaatttgtgcttctttgtagctatctgtttcttctattgtatcttttattcatcactgaacatggataaataagatgatgtcatgtttttttatgtt

SEQ ID NO: 4158 - protein, 181 aa, Glycine max
  misc_feature (1)..(181): Ceres Seq. ID no. 15221468
MAAFTCTSRPPVSLRSESRIASSPSASLSARRMFAVSPDSAGLRIRLSQSPSSLTSKVPRPRRGIVCEAQETTTDIVSIVNDTTWDSLVLKADGPVLVDFWAPWCGPCKMIDPLVNELAKEYTGKVKFYKLNTDDSPSTPSKYNVRSIPTIMIFVNGEKKDAIIGAVPRSTLASSIDKFLQ

SEQ ID NO: 4159 - protein, 149 aa, Glycine max
  misc_feature (1)..(149): Ceres Seq. ID no. 15221469
MFAVSPDSAGLRIRLSQSPSSLTSKVPRPRRGIVCEAQETTTDIVSIVNDTTWDSLVLKADGPVLVDFWAPWCGPCKMIDPLVNELAKEYTGKVKFYKLNTDDSPSTPSKYNVRSIPTIMIFVNGEKKDAIIGAVPRSTLASSIDKFLQ

SEQ ID NO: 4160 - DNA, 486 bp, Glycine max
  misc_feature (1)..(486): Ceres Seq. ID no. 13595076
tatttgcccttataaaccagaagggtccatggctatgatggtaagactaaacctttcacttctggaggatattagcgatgatattgatttttgtttcaagcttgctaaggaggaatccgttatcattcttccaggaactgcggtagggctgaataattggattcgtattattttcgctactgatccatttgctctgttagagggtttgaagagggtaaaatctttttgtgaaaggcatgcaagaaagtgtttaaagacaactgaataaaattcacaaattaaggcggctactatgttgtattgaggacctaataggttctcaaatatccaattttgcgaattggatcgttttacaaataattgtgattctctgtatttttttcagttttattgttagcaagctagtttatcactagcttttaaggaaggattctccaagaatctaagtgtttatcaattggtatttgtgaaaaaaaaaaagcttat

SEQ ID NO: 4161 - protein, 88 aa, Glycine max
  misc_feature (1)..(88): Ceres Seq. ID no. 13595077
ICPYKPEGSMAMMVRLNLSLLEDISDDIDFCFKLAKEESVIILPGTAVGLNNWIRIIFATDPFALLEGLKRVKSFCERHARKCLKTTE

SEQ ID NO: 4162 - protein, 79 aa, Glycine max
  misc_feature (1)..(79): Ceres Seq. ID no. 13595078
MAMMVRLNLSLLEDISDDIDFCFKLAKEESVIILPGTAVGLNNWIRIIFATDPFALLEGLKRVKSFCERHARKCLKTTE

SEQ ID NO: 4163 - protein, 77 aa, Glycine max
  misc_feature (1)..(77): Ceres Seq. ID no. 13595079
MMVRLNLSLLEDISDDIDFCFKLAKEESVIILPGTAVGLNNWIRIIFATDPFALLEGLKRVKSFCERHARKCLKTTE

SEQ ID NO: 4164 - DNA, 927 bp, Glycine max
  misc_feature (1)..(927): Ceres Seq. ID no. 13595125
aaattgaatttgaactagaaaggaagagagtaactacgatttgaaggaagagacgcagacataggaggttttccgccaaattcgaaaatggtgaaagaaatcgaaactctgacagaagatgaaagacgcgcacttcgtggaagcaaattcgcccctcttccccgcccttccaattccaaacctaggttggctcatccaggtggacccttggcgacgaataaagcagcggctttggccaagtttctggagagaaagctgaaagacccaaatggattggcgtctattaaccctgatatccttgaacttgctgtcaataatgccaaagaaactgtctatgcaagtggtacttctaattcacgaagaaatgttcggcatgtggactcctttggtgactctgattctaaggattctagtgatgaagagcagaatgaactatctgaggtaaaggaatgcaagaagaagaagaagaagaagaaaaagaagaaagagaaaaacaaaaacaaaaagccaaagaatacagaggaccctggatgtgccgtgatgaaaaagcctaaacagaagtttaaattctgatcttatttgtactggcaaaattttgaaaaaggattggagctcaaaatttttagccatggtttctttccttgcccaaatttgctacttacaagtaacatggagtttagatgcaatattgtgcaggagcttttgattcgatcgacctttccaacaagctacaacatagattacgaacctttatatatatatattgttagattctttcatgttgtgaaggtggagggaattattgttgaaacaagtccaatttccaaatattaaatggcaaaaatgcaggtcgggcgatgggatttcaaatcgttgttgtaatttgtaaacattcaatttcaatcgggataaacactttcatttgtc

SEQ ID NO: 4165 - protein, 161 aa, Glycine max
  misc_feature (1)..(161): Ceres Seq. ID no. 13595126
MVKEIETLTEDERRALRGSKFAPLPRPSNSKPRLAHPGGPLATNKAAALAKFLERKLKDPNGLASINPDILELAVNNAKETVYASGTSNSRRNVRHVDSFGDSDSKDSSDEEQNELSEVKECKKKKKKKKKKKEKNKNKKPKNTEDPGCAVMKKPKQKFKF

SEQ ID NO: 4166 - DNA, 491 bp, Glycine max
  misc_feature (1)..(491): Ceres Seq. ID no. 13595150
acatacaacactctctccaaagttcaaattaagactgaggggtgagaaagagagaattgatatgggtgccggtctagttgcgttcctcttaatggttcttgtgcaattggtctatgcagtgatgaacattacttcaaagcttgcaatagaatctggaatgagccctcttgtccttgttgcttatcgacaactctttgctactgtgtccattgctccctttgcttattggctcgagtggtaattatatatatatatatatataccctttctggttttgttttatttcatatatatacacaatgcatgcatgaaagggtttgatcaactttgaagcacctataacattctcactttgagtgtcaccgtcgatgtcccttttgttttggttgattcatgattgtgttatttatctgtctatctatttatatatgtttgctgtatataaatggagtagagagacactcaaaagaaaaatgctacatgttgttctg

SEQ ID NO: 4167 - protein, 79 aa, Glycine max
  misc_feature (1)..(79): Ceres Seq. ID no. 13595151
HTTLSPKFKLRLRGEKERIDMGAGLVAFLLMVLVQLVYAVMNITSKLAIESGMSPLVLVAYRQLFATVSIAPFAYWLEW

SEQ ID NO: 4168 - protein, 59 aa, Glycine max
  misc_feature (1)..(59): Ceres Seq. ID no. 13595152
MGAGLVAFLLMVLVQLVYAVMNITSKLAIESGMSPLVLVAYRQLFATVSIAPFAYWLEW

SEQ ID NO: 4169 - protein, 49 aa, Glycine max
  misc_feature (1)..(49): Ceres Seq. ID no. 13595153
MVLVQLVYAVMNITSKLAIESGMSPLVLVAYRQLFATVSIAPFAYWLEW

SEQ ID NO: 4170 - DNA, 738 bp, Glycine max
  misc_feature (1)..(738): Ceres Seq. ID no. 13595156
gaacatcctaatcaaaaaacacatccttccatatcaattaacctactccttaatttcaccatgtctgatataaacatcaatcatccactaccaacacatgaggtggtgacctacaaggagtgtttgcataaccattcagcagcacttgatcatgtcacctatgatggttgtgtcaagtatatcgccggtgaggatgctctcttgtgtgcttgttgtggctgccgccgaaactttcaccataagaacaccattttcactgctgagccccaaactcaaacaccggatcaagtgcaagagatgaggtccaagaggaagaagaggactaccttctcgtcagagcagaagaacaagctgattaggtttgctgagagtgtggggtggaaacctcgaaaggaaaagaaggacgaaatcgaaagcttctgctctgagatgggaatcacccgtaggaagttcgttgtatggctcagcaacaaccgtcaccaggcaatcaatgatgcttagaagttgttcatttcgtcgtcatggttgaattagtcttggcacttggcattaataagatcactctgatcaaactcaaactaagtttgttcaggaagttgggtttctttgtcagcttttgcttttttttcaccgtcttttagctctgttttgttctcttaatgtaattgtagtgccttggcttttagtgatcattcagtccatgtaccttaatttcttatatgcgttgttttggaatgc

SEQ ID NO: 4171 - protein, 166 aa, Glycine max
  misc_feature (1)..(166): Ceres Seq. ID no. 15221492
EHPNQKTHPSISINLLLNFTMSDININHPLPTHEVVTYKECLHNHSAALDHVTYDGCVKYIAGEDALLCACCGCRRNFHHKNTIFTAEPQTQTPDQVQEMRSKRKKRTTFSSEQKNKLIRFAESVGWKPRKEKKDEIESFCSEMGITRRKFVVWLSNNRHQAINDA

SEQ ID NO: 4172 - protein, 146 aa, Glycine max
  misc_feature (1)..(146): Ceres Seq. ID no. 15221493
MSDININHPLPTHEVVTYKECLHNHSAALDHVTYDGCVKYIAGEDALLCACCGCRRNFHHKNTIFTAEPQTQTPDQVQEMRSKRKKRTTFSSEQKNKLIRFAESVGWKPRKEKKDEIESFCSEMGITRRKFVVWLSNNRHQAINDA

SEQ ID NO: 4173 - DNA, 1327 bp, Glycine max
  misc_feature (1)..(1327): Ceres Seq. ID no. 13595164
ctagaacmcccctccyratcgaaaaacttctgttcatccatttgtccaagacattcgagcttgttaagttctagtagttttatttgttgcagagttagtaccagagaaatggagccacaggaaggaaggaaagggataccatctctgctgtcctcgcagggggagtgcattgccaccaacatcacacagctcattggttggacaccactgatagaactgagaaacatcactgagaaagacagcataggtgctcggctgattgggaagattgagccgtaccagcccctttcctctgtgaaggatcggagtgctctcagattgattgaagatgcagaggagaaaggcttgatcacacctggcatcacaacactgctgggggtcacaagtggtaatcttggcatcggcgtggcgttcattgctgctcagaaaggatacaagttcatcgccctcatgcctgctaaactctcgcttgataagcagatactgatgcgataccttggcgtagaagtggtattagttgatgctgtacagcatggattcaaagctttacttgatagggtagaacagatgaagaaggatgtggaagatgtgtatgttctagatcaattcaccaatcctgcaaatcccgatgcccacttcagatggactggacctgagatatggaaagatacagcaggcaaagtggacatatttatagctgcttcaggttcaggaggcaccatcacaggcgtggggaggtatctcaagacgaagaacccatctgtaaaattaatatgcgttgaaccagctgaaagtccagtgatttcaggtggcgagccagccttccacaacatcctaggaatagggcctggttttgtcccagaaatattggatagatcccagatagatgaaattgtaacagtaactactcaagaagctatggacatggctagaagattggcaagggaagaaggattgcttgttggcatatcttcaggggcaaatgcagctgcctgcttaaaggttgcatcaagagaggagaacaggggaaagatgattgtgacaatgttttccagtggtgcagagaggtatctgaactcggagctctttgcgcaggttaaggaagagtgcgtcaacgtcaacatgaccttctgatgtccatatcaaggcaatgacaccgtaggggtgatccagaagtctagtgttatcttacactggcttataagaagcggaggtctcagttactcaaataccagacactgttttgttaggagacaaaacgaaatgcactagcgtkrmmaabtaaatactccctctgttcactccctctgttcacaaaaaaaaaaaa

SEQ ID NO: 4174 - protein, 377 aa, Glycine max
  misc_feature (1)..(377): Ceres Seq. ID no. 15221496
  misc_feature (3)..(3): Xaa is any aa, unknown or other
  misc_feature (6)..(6): Xaa is any aa, unknown or other
LEXPSXSKNFCSSICPRHSSLLSSSSFICCRVSTREMEPQEGRKGIPSLLSSQGECIATNITQLIGWTPLIELRNITEKDSIGARLIGKIEPYQPLSSVKDRSALRLIEDAEEKGLITPGITTLLGVTSGNLGIGVAFIAAQKGYKFIALMPAKLSLDKQILMRYLGVEVVLVDAVQHGFKALLDRVEQMKKDVEDVYVLDQFTNPANPDAHFRWTGPEIWKDTAGKVDIFIAASGSGGTITGVGRYLKTKNPSVKLICVEPAESPVISGGEPAFHNILGIGPGFVPEILDRSQIDEIVTVTTQEAMDMARRLAREEGLLVGISSGANAAACLKVASREENRGKMIVTMFSSGAERYLNSELFAQVKEECVNVNMTF

SEQ ID NO: 4175 - protein, 341 aa, Glycine max
  misc_feature (1)..(341): Ceres Seq. ID no. 15221497
MEPQEGRKGIPSLLSSQGECIATNITQLIGWTPLIELRNITEKDSIGARLIGKIEPYQPLSSVKDRSALRLIEDAEEKGLITPGITTLLGVTSGNLGIGVAFIAAQKGYKFIALMPAKLSLDKQILMRYLGVEVVLVDAVQHGFKALLDRVEQMKKDVEDVYVLDQFTNPANPDAHFRWTGPEIWKDTAGKVDIFIAASGSGGTITGVGRYLKTKNPSVKLICVEPAESPVISGGEPAFHNILGIGPGFVPEILDRSQIDEIVTVTTQEAMDMARRLAREEGLLVGISSGANAAACLKVASREENRGKMIVTMFSSGAERYLNSELFAQVKEECVNVNMTF

SEQ ID NO: 4176 - protein, 227 aa, Glycine max
  misc_feature (1)..(227): Ceres Seq. ID no. 15221498
MPAKLSLDKQILMRYLGVEVVLVDAVQHGFKALLDRVEQMKKDVEDVYVLDQFTNPANPDAHFRWTGPEIWKDTAGKVDIFIAASGSGGTITGVGRYLKTKNPSVKLICVEPAESPVISGGEPAFHNILGIGPGFVPEILDRSQIDEIVTVTTQEAMDMARRLAREEGLLVGISSGANAAACLKVASREENRGKMIVTMFSSGAERYLNSELFAQVKEECVNVNMTF

SEQ ID NO: 4177 - DNA, 1061 bp, Glycine max
  misc_feature (1)..(1061): Ceres Seq. ID no. 13595183
gctaggttttcagtctctcgcctccaccagcgcctccacgccgccgaggaacggagcaggaagtgacgccggaggaggacgctctgctcgtcgtccgccgcatctcgcgcccgcccaacccgaacgccccgaaaggccaccaaagccgtagccttcttcttcctagagctcccgcagcatgtcggcatccaccagcggcggcggggggctctcgccgcaggcggccgcggcgctccaggagggcgtcgggctggtgttcatgcggtggacggcgctgcagatggcggtggagaacgggtggggcggccgcgactcccgcgccaaggccgaccggctcgccgccgacgtcctcgccttcttcaccacctccaaaggtccatattattatgatgacttggaggagatgatgtttgacagcatatccgaatccttcaatgctgactttgaggatggaagtgttggggaggttgctgaacaagtattgattatgcatgaagaatgcctgcaaaacaactattcgtcgattgagaagctaaggaacacacgtgctcaaggaaatgctgtttcccaaagtagaatgatggtaactgatgaaggcgatgatagctcggatgatagctcggacgatgacgacggcgatgaaccagccagcgcagatgatatgtcggtggatgagccaaagcctcccaagcctgcccctgacgctgatgggtggactgttgtgccaccgaagcgcggcggccggggcaagaattaagcacagaagcaaaccctggcaacaaactgccatctgagaggccgttttggtctgaaggctttgaggtgtgattagcaaaaccttggcaaccacttcctgccacttgtgccattttggtcttggaggttttgaagtgttgcgcttcacctgtattacttcgattttgtcaggaatgttggttgtgtagcatgttttccttggttactctcttggtgttcagacttggcggcgaaagatctggattgtaagcgggtctgacatatccttatgcacattttgaactgatgcttatctgtatcgtcgc

SEQ ID NO: 4178 - protein, 192 aa, Glycine max
  misc_feature (1)..(192): Ceres Seq. ID no. 13595184
MSASTSGGGGLSPQAAAALQEGVGLVFMRWTALQMAVENGWGGRDSRAKADRLAADVLAFFTTSKGPYYYDDLEEMMFDSISESFNADFEDGSVGEVAEQVLIMHEECLQNNYSSIEKLRNTRAQGNAVSQSRMMVTDEGDDSSDDSSDDDDGDEPASADDMSVDEPKPPKPAPDADGWTVVPPKRGGRGKN

SEQ ID NO: 4179 - protein, 165 aa, Glycine max
  misc_feature (1)..(165): Ceres Seq. ID no. 13595185
MRWTALQMAVENGWGGRDSRAKADRLAADVLAFFTTSKGPYYYDDLEEMMFDSISESFNADFEDGSVGEVAEQVLIMHEECLQNNYSSIEKLRNTRAQGNAVSQSRMMVTDEGDDSSDDSSDDDDGDEPASADDMSVDEPKPPKPAPDADGWTVVPPKRGGRGKN

SEQ ID NO: 4180 - protein, 158 aa, Glycine max
  misc_feature (1)..(158): Ceres Seq. ID no. 13595186
MAVENGWGGRDSRAKADRLAADVLAFFTTSKGPYYYDDLEEMMFDSISESFNADFEDGSVGEVAEQVLIMHEECLQNNYSSIEKLRNTRAQGNAVSQSRMMVTDEGDDSSDDSSDDDDGDEPASADDMSVDEPKPPKPAPDADGWTVVPPKRGGRGKN

SEQ ID NO: 4181 - DNA, 828 bp, Glycine max
  misc_feature (1)..(828): Ceres Seq. ID no. 13595187
acactctttctctcaatttctctctcttttaaaacactaatcactaaaatcttgattcactatatcgtcaaaaccaacgctaaatcaattaaactctctcaaagaaaacaagacaaagccctacttttgatggattcagggtcacaacgaccggggcctgttagcgaaggcgatccgggtccgtccatcgtaaccccctcttcaccgcctgcgacgcctagcaggtacgagtcgcagaaacgacgtgactggaccacgttcttgcagtacctcaagaaccacaagccgcctctttccttgtcacggtgtagcggagcacatgccatcgagttcctcaagtacttagatcagttcggtaagaccaaagtccacgtggcggcatgtccttactttggccatcagcaacctccgtctccttgcgcttgtcctctcaagcaagcctgggggtctctcgatgccctgatcggacggttgagagcagcctacgaagagaacggtggacggcccgagtcgaacccgttcgcggcacgtgcggttaggatttacttgagggaagtcagagaaagtcaagccaaggcccgtgggagaccctacgagaaaaagaaacggaaacggccaacaactgttaccaccgtgagagttgacgttgcttcgtcgagacaaagtgaaggagatggttgtaacatcggtgatccgtcgtatgtggccgaggctgtacctccttaattaagttattattattgtcatgatatattaaatacattatatatgtctggaactcacatcaccttcttgagttaactattgaaaatatttttgttctagttc

SEQ ID NO: 4182 - protein, 241 aa, Glycine max
  misc_feature (1)..(241): Ceres Seq. ID no. 13595188
TLFLSISLSFKTLITKILIHYIVKTNAKSIKLSQRKQDKALLLMDSGSQRPGPVSEGDPGPSIVTPSSPPATPSRYESQKRRDWTTFLQYLKNHKPPLSLSRCSGAHAIEFLKYLDQFGKTKVHVAACPYFGHQQPPSPCACPLKQAWGSLDALIGRLRAAYEENGGRPESNPFAARAVRIYLREVRESQAKARGRPYEKKKRKRPTTVTTVRVDVASSRQSEGDGCNIGDPSYVAEAVPP

SEQ ID NO: 4183 - protein, 198 aa, Glycine max
  misc_feature (1)..(198): Ceres Seq. ID no. 13595189
MDSGSQRPGPVSEGDPGPSIVTPSSPPATPSRYESQKRRDWTTFLQYLKNHKPPLSLSRCSGAHAIEFLKYLDQFGKTKVHVAACPYFGHQQPPSPCACPLKQAWGSLDALIGRLRAAYEENGGRPESNPFAARAVRIYLREVRESQAKARGRPYEKKKRKRPTTVTTVRVDVASSRQSEGDGCNIGDPSYVAEAVPP

SEQ ID NO: 4184 - DNA, 1191 bp, Glycine max
  misc_feature (1)..(1191): Ceres Seq. ID no. 13595202
actccgcactgttcctcggactctcgtctcgctagttccccaacttccggcgcaagctgaaccctcggacccgaccgcggcagccgccgatccagccccgccgcgatggaattcgccctcgtcgacggcgagaagttctcgccctcctgctccacgctcgtcatgcccgcgctttcgatcggcaacgtggggcagctcgccgtggacctgctgataccgtcggcgaaggcgaggcgcgtggcgtacctcgatgagccctccgtgctgccctgcatcggcaacgacgccttcggaccgggcgctgtcggcgacctcgcgctcgcgctcgaagaatacgagtcaccgtctcacgggctggctttcattcaacaaagatctccagttattacggggatgatggtttcgtttgccaaaaatgttgctaatttcatcagtagcattgagaaggaccatgttgttattctttcaagtttagattctggcaagagaagagtaattgatgcatccagtgatatgctgtattacctttcaagctgcaatgaggatggttctgatccagaatgtgagaaactagggtggaagaaacttgaggaatataatccatctcaacgactgtggaaatgtcttgctagtctaattgagggtggtgttctttcagaagatatggctgatgatcctgaagagatgaccgcaagtgattactatgcgaccttaccatttgcagctctattctttgcctgcaaggccaaaggtttgaaagttagctgtgtattatgttactgttcagaaggggacaatatgccagaatctttccacttagcagaagcagtatgcaaacttcgaggtcaagaccctgaacaattccatggaaatgggtcaaatggatggactattcccttgtcatggaaatcaatttatggaccacctcctgatatgtctattttctagactgactgacctaggaagttgcaatcatggacagcgctgtatctagaatgaggaaggatattagctttaggttgtgtactagaaatccccaggatggtgagtcgccgaccctcttttgaagcaacaacagttttcaacttccgtttagaactggagggatcgtgaacctggaatttatctgccgcggctattcctcatgtctaagtggaatagatttattcgtttttattaaaaaaattcact

SEQ ID NO: 4185 - protein, 280 aa, Glycine max
  misc_feature (1)..(280): Ceres Seq. ID no. 13595203
MEFALVDGEKFSPSCSTLVMPALSIGNVGQLAVDLLIPSAKARRVAYLDEPSVLPCIGNDAFGPGAVGDLALALEEYESPSHGLAFIQQRSPVITGMMVSFAKNVANFISSIEKDHVVILSSLDSGKRRVIDASSDMLYYLSSCNEDGSDPECEKLGWKKLEEYNPSQRLWKCLASLIEGGVLSEDMADDPEEMTASDYYATLPFAALFFACKAKGLKVSCVLCYCSEGDNMPESFHLAEAVCKLRGQDPEQFHGNGSNGWTIPLSWKSIYGPPPDMSIF

SEQ ID NO: 4186 - protein, 261 aa, Glycine max
  misc_feature (1)..(261): Ceres Seq. ID no. 13595204
MPALSIGNVGQLAVDLLIPSAKARRVAYLDEPSVLPCIGNDAFGPGAVGDLALALEEYESPSHGLAFIQQRSPVITGMMVSFAKNVANFISSIEKDHVVILSSLDSGKRRVIDASSDMLYYLSSCNEDGSDPECEKLGWKKLEEYNPSQRLWKCLASLIEGGVLSEDMADDPEEMTASDYYATLPFAALFFACKAKGLKVSCVLCYCSEGDNMPESFHLAEAVCKLRGQDPEQFHGNGSNGWTIPLSWKSIYGPPPDMSIF

SEQ ID NO: 4187 - protein, 184 aa, Glycine max
  misc_feature (1)..(184): Ceres Seq. ID no. 13595205
MMVSFAKNVANFISSIEKDHVVILSSLDSGKRRVIDASSDMLYYLSSCNEDGSDPECEKLGWKKLEEYNPSQRLWKCLASLIEGGVLSEDMADDPEEMTASDYYATLPFAALFFACKAKGLKVSCVLCYCSEGDNMPESFHLAEAVCKLRGQDPEQFHGNGSNGWTIPLSWKSIYGPPPDMSIF

SEQ ID NO: 4188 - DNA, 791 bp, Glycine max
  misc_feature (1)..(791): Ceres Seq. ID no. 13595210
attcaccgtttctctctcttccttatcatcaaacttgctctgatctgatcagcgcttttgaaaatgtcggagggatcagaagaaacgaagacaaagatcgattccaccggagagttatcggacgtcgataacgagaactgcagtagcagtggaagtggcggcggcgagacgaagaagacatgcgttgattgcggaacattcaaaactcctctctggcgtggtggccctgccggacctaagtcactgtgcaatgcttgtgggatcaagagcaggaagaagaggcaagcggctctcgggatcaaaccagagaagaagatcagaaaaagcaacagctgtgacagtgatctaagcctcgaagatgatggccgtaacgtcaataacaagatcaagaaaggtgatgatcacaaaacttgcagtagcaagagtggtactagtactagtagcagctgcagcaaaagagtgagtaagtttttggatctgggattggaagtgccggtgatgaagagatcagcggttgagaagaagaggctgtggaagaaacgcggcgacgaagaaagagccgccgtgcttctcatggcgctctcttgcggctctgtttatgcgtaaacgatggagatcaagcttctttgtttggtgtcgttcgagaataattaaagtgaggggttctgattaattatttaattaacttaagacaatagagataactgtgtaatagctagtgatgtcgtggttttttttggcttgttcccactgatgttatgtgttcttttgctaatcaagtttcaattttt

SEQ ID NO: 4189 - protein, 180 aa, Glycine max
  misc_feature (1)..(180): Ceres Seq. ID no. 13595211
MSEGSEETKTKIDSTGELSDVDNENCSSSGSGGGETKKTCVDCGTFKTPLWRGGPAGPKSLCNACGIKSRKKRQAALGIKPEKKIRKSNSCDSDLSLEDDGRNVNNKIKKGDDHKTCSSKSGTSTSSSCSKRVSKFLDLGLEVPVMKRSAVEKKRLWKKRGDEERAAVLLMALSCGSVYA

SEQ ID NO: 4190 - DNA, 520 bp, Glycine max
  misc_feature (1)..(520): Ceres Seq. ID no. 13595248
acattcctaaagaaccagagaccgaaggactcgaaggatcatggcttgtacctccacaatgtcattggtcacaccacttaaccagacccgctcatcgaccttcttcaacccgttacctctgaaaccatccaaggccatgtctgcacctggaggcaggacacagaggctcgaagttagggcttctaagatcaagttcggcaaggctttaaccggactctctgcggccgctctcaccgcttcaatggtcatcccggagatggctgaagctgctggtccaggaatctctccttctctcaagaatttcttgctcagcattgcgtctggtggcgtggttctcaccgtcatcattggtgccgtcgtcggtgtctccaactttgaccctgtcaagagaacctaagaagctagcaagctatattttatcttcattgttgttaatgtgttgtgcctcatgttttgtatcgtttaatgaaactttggtgtgtactatgctcaaaacttaaaaaaaaaaactccttgtttc

SEQ ID NO: 4191 - protein, 118 aa, Glycine max
  misc_feature (1)..(118): Ceres Seq. ID no. 15221516
MACTSTMSLVTPLNQTRSSTFFNPLPLKPSKAMSAPGGRTQRLEVRASKIKFGKALTGLSAAALTASMVIPEMAEAAGPGISPSLKNFLLSIASGGVVLTVIIGAVVGVSNFDPVKRT

SEQ ID NO: 4192 - protein, 112 aa, Glycine max
  misc_feature (1)..(112): Ceres Seq. ID no. 15221517
MSLVTPLNQTRSSTFFNPLPLKPSKAMSAPGGRTQRLEVRASKIKFGKALTGLSAAALTASMVIPEMAEAAGPGISPSLKNFLLSIASGGVVLTVIIGAVVGVSNFDPVKRT

SEQ ID NO: 4193 - protein, 86 aa, Glycine max
  misc_feature (1)..(86): Ceres Seq. ID no. 15221518
MSAPGGRTQRLEVRASKIKFGKALTGLSAAALTASMVIPEMAEAAGPGISPSLKNFLLSIASGGVVLTVIIGAVVGVSNFDPVKRT

SEQ ID NO: 4194 - DNA, 663 bp, Glycine max
  misc_feature (1)..(663): Ceres Seq. ID no. 13595251
atgcaaattcaccaccaccaccaaagcctaaactttaagcaaccaaaatccccctcttctctctatcctcccatccatcttccccatcaacaaaaatagtaacaaatcccatttccctctctctcccccaaaataaaacaaaaaaaaaatccattctttctccattttcaaccccatttccccccaaaaatccaatctttccccatacccacctcccaaaatctcttctttctccaaacccaaatccccaattcccccaaatccaaccaaagagaatcaaacacacaaaaaagaaaacaaatttgtagcttcccaccttcaatgtggcgaccgtggggcaaatcaactgttcgaattcacagcgcgtcttcatcaccctcttccacattctcttgttcttccttcaaagacattcaaaccctttgcctcgacgaacccccacaacaaaaccagcatcatcaacaattaccctctccttcccccacaagaaaaccctccgttttccaccgagtccgactcgccaactcgctcctccgaacctggtcaactcacctccacccccaaccccaacctcccaaactccccgaaccccccgaatccgaacctgatgttgtcgtctcgaaacccgaaccacaacaacctgcgatttattatttcccgggc

SEQ ID NO: 4195 - protein, 114 aa, Glycine max
  misc_feature (1)..(114): Ceres Seq. ID no. 13595252
MWRPWGKSTVRIHSASSSPSSTFSCSSFKDIQTLCLDEPPQQNQHHQQLPSPSPTRKPSVFHRVRLANSLLRTWSTHLHPQPQPPKLPEPPESEPDVVVSKPEPQQPAIYYFPG

SEQ ID NO: 4196 - DNA, 870 bp, Glycine max
  misc_feature (1)..(870): Ceres Seq. ID no. 13595263
ttacctagaacatcctaatcgaaaaataaaaaccctaaacacaaccaccgtcctcaaccaccatggcagagcgtgaccgccgcgaacgagagagggatagagaccgtgagcgcgaccgcgatagacgccgtgacagagacgaccgtgaccgtgaccgtgggattcgaagcaagaagtcccgatctcgtactccagaccaccaccaccacgctcgccctcctcgccacgtgcgctctcccgagaggtatcgatcccggtcccgctccgctgaccgtgaccgtcatcgccaccacagcaggcgcaggactccctctccagatcccccgccgcggaaacggcctcgccatggctcagcggaagacgacaaggaaaggagtcgcaaacgagaggagactgcgacggagcaagctaagaagaaggagaataaagaaccaagcggcggcggaggaggagaagcggaaacggatgtgaatgagatagagatgatgaagatgttagggatccctactggtttcgactccacgaaagggaagcatgtcgaaggcgctgacgtcagcgggattagggctgttaccaagcgccagccgaggcagtacatgaaccgtcgcggtggctttaaccgtcctttgcctgctgagcgtaaccgctaaaggtccttgtcaatgctgtcttaaacacgaggtcagatgatgagagttcgagcttgtatttactgcaattcttccccagacgctgttctaatgtccttagagaacaaacatgtactctctggagttagaaacatcttatctctttttaggggtttagagttgtgaatgatgttatgtgtattaatttcccggctctaacttttagactatgatttagttg

SEQ ID NO: 4197 - protein, 195 aa, Glycine max
  misc_feature (1)..(195): Ceres Seq. ID no. 13595264
MAERDRRERERDRDRERDRDRRRDRDDRDRDRGIRSKKSRSRTPDHHHHARPPRHVRSPERYRSRSRSADRDRHRHHSRRRTPSPDPPPRKRPRHGSAEDDKERSRKREETATEQAKKKENKEPSGGGGGEAETDVNEIEMMKMLGIPTGFDSTKGKHVEGADVSGIRAVTKRQPRQYMNRRGGFNRPLPAERNR

SEQ ID NO: 4198 - DNA, 1147 bp, Glycine max
  misc_feature (1)..(1147): Ceres Seq. ID no. 13595271
accattacctagaacatcctaatcgaaaacagccctacctgccattttcctccgttcgttcatctccttcgcctcgccaccgtccctcctcctctcttccctccctcatccctcatctcgtgtcggctcgaaagtcgaaaccctagaccaaccaccctcccctagtacgtaggaacagggacagagatgtatgcagaccagatctccaccggccgcaagcgctccatccatgaccgccttgacgccgacctcccctccgaccgcggcggcgcggacgccgccggccgggctcgtaacgcgctgtccaagaggcaacgacaaactgatgataaatggaagcatgatctttaccgggatgatgaatcagcttcaagatcagttgatccacgggatttgcgattcaagcttcagaagaaaagctctcagcaagggtttgctggccaaaagggttccggggtacgtgatctacgtgagatgttatctggaacaatgcacgcacaaccatcaaatgttgaccctcaaaagaggaaaccggtgtcagaggttgtgaaagtcacaaggcgtgaaattgttgatgaaaggcctgtacgcctaagtaagaaagtatcaaaaccatcaacatccaagaagacttctcagccaaaggctgaaagtccactcgacagttttctgaaatcacttggacttgagaagtattctattaccttccaggcggaggaggttgacatggcggccctacgtcacatgactgaaagtgatctcaaggcgttgggcatcccgatgggtcctaggaagaagattacccttgccttggaatccagagcgtagggcaatgtccctggagtacaatgtagaaaagcagggagatgtggtaggtttttgctcatctgcaaatttggcatatcttggaaagcagtggtacaggtaaacaatgcggtgtctcttgtaatggcatgttgctgtaagattattagactgctgttgtttatctggtctgcatgctttcctggccagaccagctgatttaactgatgaggtatccgtgctgttgaagctgcggtgatgttctcgctgtatactattattatgccttttttttcattggaaactggcattattagagtaatagagttgagattcttcagtc

SEQ ID NO: 4199 - protein, 213 aa, Glycine max
  misc_feature (1)..(213): Ceres Seq. ID no. 13595272
MYADQISTGRKRSIHDRLDADLPSDRGGADAAGRARNALSKRQRQTDDKWKHDLYRDDESASRSVDPRDLRFKLQKKSSQQGFAGQKGSGVRDLREMLSGTMHAQPSNVDPQKRKPVSEVVKVTRREIVDERPVRLSKKVSKPSTSKKTSQPKAESPLDSFLKSLGLEKYSITFQAEEVDMAALRHMTESDLKALGIPMGPRKKITLALESRA

SEQ ID NO: 4200 - protein, 119 aa, Glycine max
  misc_feature (1)..(119): Ceres Seq. ID no. 13595273
MQTRSPPAASAPSMTALTPTSPPTAAARTPPAGLVTRCPRGNDKLMINGSMIFTGMMNQLQDQLIHGICDSSFRRKALSKGLLAKRVPGYVIYVRCYLEQCTHNHQMLTLKRGNRCQRL

SEQ ID NO: 4201 - protein, 117 aa, Glycine max
  misc_feature (1)..(117): Ceres Seq. ID no. 13595274
MLSGTMHAQPSNVDPQKRKPVSEVVKVTRREIVDERPVRLSKKVSKPSTSKKTSQPKAESPLDSFLKSLGLEKYSITFQAEEVDMAALRHMTESDLKALGIPMGPRKKITLALESRA

SEQ ID NO: 4202 - DNA, 788 bp, Glycine max
  misc_feature (1)..(788): Ceres Seq. ID no. 13595288
gtgaagataagaagttgaatgcaacatatataatcagtgtcgcccgaaaacttgggtgttccattttcctgttacctgaggacataatagaggtcaaccagaagatgattctcattttagntgctagtataatgtattggagcctcaagaaacctgaagaaaacatcacccctgaagcatcgcctaaagcttcagtagatggtgaaagcgaaacagatttagttgatgaggtatcccatttagccattgacgaggtatccaatttagccattgatgatacaacttcggagaatgctagctcttcttaagttagtaaggttgaagcaaaccatacccaatggagaatgagcgggaaaaaacgcatttttgtttatagggcaaaaggaagatgccaacctcttggttcccagttcgaaagaaagcttattgttatgaaaaaccacagataatagaaggatcttgtaaattattctttagaatttttttgtacttaggcatattctttcatgaaaattgcatgcaaattttcccaataataatgtgggcggaaggcatcattttattttcggtctgattgttaagattattcttaatgcgtgcatacggatacgggttgaagtggatgaactgaaccagtaatgattatgcacttcatttaagtggtttttctatttcaagtctgggattcaagtataatacatgtagttgatgctatagcaattggagacctttatgccaaaaaaaaaaaaaaaaaatatcgataccgtcgacctcgagggggggcccgg

SEQ ID NO: 4203 - protein, 101 aa, Glycine max
  misc_feature (1)..(101): Ceres Seq. ID no. 13595289
  misc_feature (40)..(40): Xaa is any aa, unknown or other
EDKKLNATYIISVARKLGCSIFLLPEDIIEVNQKMILILXASIMYWSLKKPEENITPEASPKASVDGESETDLVDEVSHLAIDEVSNLAIDDTTSENASSS

SEQ ID NO: 4204 - protein, 67 aa, Glycine max
  misc_feature (1)..(67): Ceres Seq. ID no. 13595290
  misc_feature (6)..(6): Xaa is any aa, unknown or other
MILILXASIMYWSLKKPEENITPEASPKASVDGESETDLVDEVSHLAIDEVSNLAIDDTTSENASSS

SEQ ID NO: 4205 - protein, 61 aa, Glycine max
  misc_feature (1)..(61): Ceres Seq. ID no. 13595291
MPTSWFPVRKKAYCYEKPQIIEGSCKLFFRIFLYLGIFFHENCMQIFPIIMWAEGIILFSV

SEQ ID NO: 4206 - DNA, 818 bp, Glycine max
  misc_feature (1)..(818): Ceres Seq. ID no. 13595292
tactcatccccactcctgtcccccgtccactccgccgccgccgccgccgccgcgaattccgcccgcgtccaccgccgcgcgtcgccccggcggactccaggacctccggatcggagccccgcgcctcgccatggcggtcgccgcgctcaaggtgcagctgaacgcgctcctctccaacatgttcgccacgggtatggtggacgagcagttccagcagctgcagtcgctggaggaggggggcaccgcgtcgggcttcgtcgccgaggtcgccaccctcttcatcgaagacgccgaccggatcatcgcctacatcgccgccctgctggaccagcccgtggtggatttcgacaaggtggacgcccacgtgcaccagctcaaggggagcagctcgagtgttggtgctcagaaagtgaagctcgcctgcatgcacttccgccagttctatgaggcaaaaagcaaagaagggtgcctcatggcgctggctcttgttaggagcgagttctgtgatgtgcgcaacaagttccagaccatgatgcagctggagcagcagatcgaggcgtgcagtccgaagtagagtagcagtaactgaagcaaaaggagcttagctccctccgtgtgacccctgacatgatggggggcagtgtgtatgtatctctgaagcttgtaggcagtgtaacgggcgtcgggggctttggagggcgtgtgcgcggaaccgggccgaccgattcccgcggcggaactccgggctcgcgacccccttggaacggaacttgcttgtaccgtgtcaacgctatacctgtttgtgttgtgcccgccct

SEQ ID NO: 4207 - protein, 190 aa, Glycine max
  misc_feature (1)..(190): Ceres Seq. ID no. 15221525
THPHSCPPSTPPPPPPPRIPPASTAARRPGGLQDLRIGAPRLAMAVAALKVQLNALLSNMFATGMVDEQFQQLQSLEEGGTASGFVAEVATLFIEDADRIIAYIAALLDQPVVDFDKVDAHVHQLKGSSSSVGAQKVKLACMHFRQFYEAKSKEGCLMALALVRSEFCDVRNKFQTMMQLEQQIEACSPK

SEQ ID NO: 4208 - protein, 148 aa, Glycine max
  misc_feature (1)..(148): Ceres Seq. ID no. 15221526
YSSPLLSPVHSAAAAAAANSARVHRRASPRRTPGPPDRSPAPRHGGRRAQGAAERAPLQHVRHGYGGRAVPAAAVAGGGGHRVGLRRRGRHPLHRRRRPDHRLHRRPAGPARGGFRQGGRPRAPAQGEQLECWCSESEARLHALPPVL

SEQ ID NO: 4209 - protein, 147 aa, Glycine max
  misc_feature (1)..(147): Ceres Seq. ID no. 15221527
MAVAALKVQLNALLSNMFATGMVDEQFQQLQSLEEGGTASGFVAEVATLFIEDADRIIAYIAALLDQPVVDFDKVDAHVHQLKGSSSSVGAQKVKLACMHFRQFYEAKSKEGCLMALALVRSEFCDVRNKFQTMMQLEQQIEACSPK

SEQ ID NO: 4210 - DNA, 990 bp, Glycine max
  misc_feature (1)..(990): Ceres Seq. ID no. 13595308
aaaccgtccaacaaacctctttcccctccccgcatcccaagcctcccagctccatcgccacacgctcgaacccactcctctcacgctcaagcgcacaccgcaccaaccagagcagccatggctctcaccggcggcgccaccaccgcagcgtgcatcctcgtcctcctcgcgctcgccgacgccgcgggggcggctacccgggcgccagcgccggcgccggcgccggactgcatggaggcgttgattagcctcgcagactgcctcgactatgtgacgcccagcaccaagtcggctcggccttccaaggcttgctgcacggaggtgaagaccgccgtcggcacccccgccaccgtgaagtgcctctgcgctgccatggacgccaagacaactccgataccgatcaacatgacacgggtgctcgctctccccaccgcctgcggccaatccgcctccgtcttgaacaagtgccacgctgcacatgggccgggtggtgctcctgctgaagcaccgtcaccttcagcatccagtggcggcgcgaccgcttcaccaccgaaggcgaatgtggcggcgaggtctccgggcggctccgccaccgttctcttggcaactgtggtgacttcgctgctcgccttctattacctctgagggccaacatctcagcctctctcacgtgttatgttgcacagaccttgtgactctgcgttgcgcggtgttgtaatctgagtttactttgtttatcgggatgggttattatcatgtagtgtcgtggactgaatattgagtgcgtagtaaattgcaatgtaccgtggactgggtattttgaagtcgttgccagttatgacactttatttacttttgaatgcgcagatgactttgttgactttggaatgcgcagatgatctgctacgatcttcttttgggctaaaaaaaaaaaaaaaaaagcttatcgatannnnnnnraacctcgaaggggggggcccggtacccaat

SEQ ID NO: 4211 - protein, 214 aa, Glycine max
  misc_feature (1)..(214): Ceres Seq. ID no. 15221539
KPSNKPLSPPRIPSLPAPSPHARTHSSHAQAHTAPTRAAMALTGGATTAACILVLLALADAAGAATRAPAPAPAPDCMEALISLADCLDYVTPSTKSARPSKACCTEVKTAVGTPATVKCLCAAMDAKTTPIPINMTRVLALPTACGQSASVLNKCHAAHGPGGAPAEAPSPSASSGGATASPPKANVAARSPGGSATVLLATVVTSLLAFYYL

SEQ ID NO: 4212 - protein, 175 aa, Glycine max
  misc_feature (1)..(175): Ceres Seq. ID no. 15221540
MALTGGATTAACILVLLALADAAGAATRAPAPAPAPDCMEALISLADCLDYVTPSTKSARPSKACCTEVKTAVGTPATVKCLCAAMDAKTTPIPINMTRVLALPTACGQSASVLNKCHAAHGPGGAPAEAPSPSASSGGATASPPKANVAARSPGGSATVLLATVVTSLLAFYYL

SEQ ID NO: 4213 - protein, 137 aa, Glycine max
  misc_feature (1)..(137): Ceres Seq. ID no. 15221541
MEALISLADCLDYVTPSTKSARPSKACCTEVKTAVGTPATVKCLCAAMDAKTTPIPINMTRVLALPTACGQSASVLNKCHAAHGPGGAPAEAPSPSASSGGATASPPKANVAARSPGGSATVLLATVVTSLLAFYYL

SEQ ID NO: 4214 - DNA, 565 bp, Glycine max
  misc_feature (1)..(565): Ceres Seq. ID no. 13595313
cattacctagaacatcctaatcgaaaatctattgattgtgagcatattcttgcacgagaactctggtcatgtataaccatgatataccgattgactcgaaagataaaagtcttgcggtgttgcaaaaggataagcgccttgttttgacaatggaagacctttcaaaggcattgcgtgagtatggcgtgaatttaaggcatcaagaatattttgctgatagtccttctaccggaatggatcctgctactcgtgaagaatgagtccttgtttgtgtgttcaggcttctaaaatgtcgtgtttagtaagtatttctatatacaaattctgaattgaatgtattctattgatatgttgctagttctctagttttatgcactgtatctgaagtcatagcacagcatgcccattttatgtagttggatacacatcatattactggcttcaatttgtgtttcaaaaaaaaaaaaaaaaaagcttatcgataccgtcgacctcgagggggggcccggtacccaattcgccctatagtgagtcgtattacgcgcgctcactggccgtcgtttta

SEQ ID NO: 4215 - protein, 63 aa, Glycine max
  misc_feature (1)..(63): Ceres Seq. ID no. 13595314
MYNHDIPIDSKDKSLAVLQKDKRLVLTMEDLSKALREYGVNLRHQEYFADSPSTGMDPATREE

SEQ ID NO: 4216 - protein, 48 aa, Glycine max
  misc_feature (1)..(48): Ceres Seq. ID no. 13595315
HYLEHPNRKSIDCEHILARELWSCITMIYRLTRKIKVLRCCKRISALF

SEQ ID NO: 4217 - protein, 42 aa, Glycine max
  misc_feature (1)..(42): Ceres Seq. ID no. 13595316
MPILCSWIHIILLASICVSKKKKKKLIDTVDLEGGPGTQFAL

SEQ ID NO: 4218 - DNA, 1232 bp, Glycine max
  misc_feature (1)..(1232): Ceres Seq. ID no. 13595321
gaaaaactccttcgttttcgtcgtctttagtaattttcactaccttcttctttacctcaccttctccatgatcctctccgtcatccgcaaatcatgactctcactcctcctccctcgcagcaaacacctaactcacctcatcgccgagtcctcatcgtcggaaactactgccacgacgttctaatccaaaacggcaccgtcgtggccgaaaccctcggcggcgccgcctccttcatctccaacgtcctagattcctcctccgtctcctgcgacctaatctccaaagtcggccgcgacttcaaatacgacgtcgcccaccctccgatcgtggctccggagaaggagaccacggtcttcaaagcctatttcgatctcgcagccgatcgggtcctgaaacgcgtcgctgcatgcgacccgatcctcccgtcggacatccccgactcgaggttcgacatcgggatggccgtcggcgtcggcggggagattctccccgagacgctcgagaagatggtggagatctgcgacgtggtggctgtggacatacaagctctgattagaggtttcgatcctgtcgacggagccgtgaagcttgttgatttgaaggagagtgggtttcgtcacctcatgggtaagkwkatygggttcttgaaagcyymtaagatcgggttctkgaaagcttcgtcggacgaagctttgttcatggatgttgaagagatgaggcgtttgtgctgtgtggtggtgactagtggtgaaaaagggtgcaggatttatgacaaggatgatgagacggtggttcctccgttcgtggcgaagcaggtggatcctacgggcgctggagatagttttcttggaggtttggtggttggtcttgtggagggtttggatgttcctgatgctgctttgttggggaacctctttggttccgtcactgttgagcacattggtcagcctaagttcgatttgacgatgcttcagagagtaaaggatgaggtacagaggaggaagaagcaatgtaatctctcaagtagccacaacaatgatcatgacgagttccatgcgcgtctaagtccagctcggtttcaggagtctccacttcaaccaaagatattggtcaatggtcacttgtgtgaccggtcatgattggttcctgcaaatacgaatcttttaatcactaacaacgctcttctgaattgtgtaaactttctacgtttatgaattttggaaatttatct

SEQ ID NO: 4219 - protein, 348 aa, Glycine max
  misc_feature (1)..(348): Ceres Seq. ID no. 15221542
  misc_feature (181)..(181): Xaa is any aa, unknown or other
  misc_feature (182)..(182): Xaa is any aa, unknown or other
  misc_feature (187)..(187): Xaa is any aa, unknown or other
  misc_feature (188)..(188): Xaa is any aa, unknown or other
  misc_feature (193)..(193): Xaa is any aa, unknown or other
MTLTPPPSQQTPNSPHRRVLIVGNYCHDVLIQNGTVVAETLGGAASFISNVLDSSSVSCDLISKVGRDFKYDVAHPPIVAPEKETTVFKAYFDLAADRVLKRVAACDPILPSDIPDSRFDIGMAVGVGGEILPETLEKMVEICDVVAVDIQALIRGFDPVDGAVKLVDLKESGFRHLMGKXXGFLKXXKIGFXKASSDEALFMDVEEMRRLCCVVVTSGEKGCRIYDKDDETVVPPFVAKQVDPTGAGDSFLGGLVVGLVEGLDVPDAALLGNLFGSVTVEHIGQPKFDLTMLQRVKDEVQRRKKQCNLSSSHNNDHDEFHARLSPARFQESPLQPKILVNGHLCDRS

SEQ ID NO: 4220 - protein, 226 aa, Glycine max
  misc_feature (1)..(226): Ceres Seq. ID no. 15221543
  misc_feature (59)..(59): Xaa is any aa, unknown or other
  misc_feature (60)..(60): Xaa is any aa, unknown or other
  misc_feature (65)..(65): Xaa is any aa, unknown or other
  misc_feature (66)..(66): Xaa is any aa, unknown or other
  misc_feature (71)..(71): Xaa is any aa, unknown or other
MAVGVGGEILPETLEKMVEICDVVAVDIQALIRGFDPVDGAVKLVDLKESGFRHLMGKXXGFLKXXKIGFXKASSDEALFMDVEEMRRLCCVVVTSGEKGCRIYDKDDETVVPPFVAKQVDPTGAGDSFLGGLVVGLVEGLDVPDAALLGNLFGSVTVEHIGQPKFDLTMLQRVKDEVQRRKKQCNLSSSHNNDHDEFHARLSPARFQESPLQPKILVNGHLCDRS

SEQ ID NO: 4221 - protein, 210 aa, Glycine max
  misc_feature (1)..(210): Ceres Seq. ID no. 15221544
  misc_feature (43)..(43): Xaa is any aa, unknown or other
  misc_feature (44)..(44): Xaa is any aa, unknown or other
  misc_feature (49)..(49): Xaa is any aa, unknown or other
  misc_feature (50)..(50): Xaa is any aa, unknown or other
  misc_feature (55)..(55): Xaa is any aa, unknown or other
MVEICDVVAVDIQALIRGFDPVDGAVKLVDLKESGFRHLMGKXXGFLKXXKIGFXKASSDEALFMDVEEMRRLCCVVVTSGEKGCRIYDKDDETVVPPFVAKQVDPTGAGDSFLGGLVVGLVEGLDVPDAALLGNLFGSVTVEHIGQPKFDLTMLQRVKDEVQRRKKQCNLSSSHNNDHDEFHARLSPARFQESPLQPKILVNGHLCDRS

SEQ ID NO: 4222 - DNA, 862 bp, Glycine max
  misc_feature (1)..(862): Ceres Seq. ID no. 13595335
atggccttgaaggagataaacctactgttacagcatttgatacaagcaaaggtactaaatatctgttggaggcagatattaacgcgaagaacctaaaggagttctccttaagccttttggatggtacactccctccatacttccgctcagaaccagtaccacaagaaaagggacttgttgaaaaggttgttggacgtacatttgattcttctgtcctgcaaagccctcacaatgtcctccttgaggctcatgcaccttggtgtgttgactgtgaagccatcagtaaaaacattgagaagttggccaagcatttcagtggtgtggacaatcttaaatttgcacgtattgatgcttcggtgaatgaacatccaaaattgcaggtaatcaattaccccacactcttgctttatcctgctgaagacaagaccaacccgatcaaactttcaaagaaattaagcctgaaagacatggcgagattcatcaaggagaagctgcagatttcggacgttgaaatcaaggagaagctgcagatttcggacgttgaaatcaaggagaagctccaaactcctgaggtcgaaacagtagctgccgctgacaatgtcaaggatgagctatagtagatttgctggttcaagcatgctgggcgcgttgaaggaaaatgacagcgtatgtgcgttgctgtggcatgaccatggagcatggccttgtagagaagcaaatagagtaggggttggtcacggttatacacagtagtcatctaaaatcaaacatatatgatgatgtaccacatgttctaacacgtcagttggcaatgtatggtgtaccacatgtctgaattagcttgttcatgtattatataatg

SEQ ID NO: 4223 - protein, 204 aa, Glycine max
  misc_feature (1)..(204): Ceres Seq. ID no. 13595336
GLEGDKPTVTAFDTSKGTKYLLEADINAKNLKEFSLSLLDGTLPPYFRSEPVPQEKGLVEKVVGRTFDSSVLQSPHNVLLEAHAPWCVDCEAISKNIEKLAKHFSGVDNLKFARIDASVNEHPKLQVINYPTLLLYPAEDKTNPIKLSKKLSLKDMARFIKEKLQISDVEIKEKLQISDVEIKEKLQTPEVETVAAADNVKDEL

SEQ ID NO: 4224 - DNA, 1353 bp, Glycine max
  misc_feature (1)..(1353): Ceres Seq. ID no. 13595341
atttaaagacctttcctttaccaaactttgtctctttctacttcagccatctcttcttctgcctcatcctgcgccagtggaattttgagcctttccctcgaaatcaatgcatgtaaagactcaagctttgatgccgcatattggtttttcatttgcacattcatgtgggtcattgtgtgcttctcttagtttcagcatagtggcaaaatggtctgtgtttgtttgatttgagggtagtagctttgtgttctttttcatattgaggcatgaattttcttgtggggtagattttgatcttcaaaccttaagtgatagcaccccatttggcaaaagtgaggatttcagtgaattgtagtgaagtgggcattttttgttttttgaaaaaggcaaaaggatgattcagttgttgttcttggtgatttttgttgagggggttctggcatttcttttgttggtgaagataggacctttgagagatcttgtgataaagagcctggatcagttgaagatggggaagggtccagctacagtgaaaaccattgctggtaccatgtctgtgattcttctttcaagtctcatgagcattatcaagatccagaacaaaggtgctaaactcggtactatgtcgcccatggatcaagttctatggagatctcacttgctcgaggcttcactcatgggttttacattattccttggattcctaattgatcgtacccaccattatcttcaaaaacttattaatttaaggagtaatgcgggagcttcaaaagaagaattggaaaaccttaaaaaagaaactgtccaacttaaagaaaaggatgagaaagcatccaaggagattaaacagctaaaggaagaactttcatgtctgtccaaaagtttggaaaagattaaatcggaatctgaagagaaggataagaaagtcgagaccgccgaagcacatgttgcttccctccaaaagcaagctgcagatctactacttgaatatgatagactcttagaagaaaaccaaaaccttcaggctcaaacactgggacataagagttgaggaatgactgagatgcattgataaacaaagttttggggtgagacttcattaggaccatccctagttttgttgcaaaatctttattttggaaaaaaaagagtacttttttggtccttttcgatattgcaacattgaccaaaagaactctctgcttaagtttataagttttacagttcattttcagtttgttcaaaattttgttattggatcgtcgctttacaattgccccatctagtttttgtttttgccccttccttttattgtttggatgaatatattttagttgaaggattattggcggg

SEQ ID NO: 4225 - protein, 218 aa, Glycine max
  misc_feature (1)..(218): Ceres Seq. ID no. 15221545
MIQLLFLVIFVEGVLAFLLLVKIGPLRDLVIKSLDQLKMGKGPATVKTIAGTMSVILLSSLMSIIKIQNKGAKLGTMSPMDQVLWRSHLLEASLMGFTLFLGFLIDRTHHYLQKLINLRSNAGASKEELENLKKETVQLKEKDEKASKEIKQLKEELSCLSKSLEKIKSESEEKDKKVETAEAHVASLQKQAADLLLEYDRLLEENQNLQAQTLGHKS

SEQ ID NO: 4226 - protein, 180 aa, Glycine max
  misc_feature (1)..(180): Ceres Seq. ID no. 15221546
MGKGPATVKTIAGTMSVILLSSLMSIIKIQNKGAKLGTMSPMDQVLWRSHLLEASLMGFTLFLGFLIDRTHHYLQKLINLRSNAGASKEELENLKKETVQLKEKDEKASKEIKQLKEELSCLSKSLEKIKSESEEKDKKVETAEAHVASLQKQAADLLLEYDRLLEENQNLQAQTLGHKS

SEQ ID NO: 4227 - protein, 166 aa, Glycine max
  misc_feature (1)..(166): Ceres Seq. ID no. 15221547
MSVILLSSLMSIIKIQNKGAKLGTMSPMDQVLWRSHLLEASLMGFTLFLGFLIDRTHHYLQKLINLRSNAGASKEELENLKKETVQLKEKDEKASKEIKQLKEELSCLSKSLEKIKSESEEKDKKVETAEAHVASLQKQAADLLLEYDRLLEENQNLQAQTLGHKS

SEQ ID NO: 4228 - DNA, 1453 bp, Glycine max
  misc_feature (1)..(1453): Ceres Seq. ID no. 13595351
agaaccacaagcagttagcaccccgcattgtttctctgtagatcactaacaggttgtagagagagagagagagagagagagagagagagagaggaggaaggagggagagatggggagggatcagcaggcaggtgtaggtgcaggcgcggcggcggcgcaccgggagaaggtgaagctgttcatgggggtgctggcgctgcagttcctgctcgccggcttccacatcgtcagccgggcggcgctcaacatgggcatcagcaagctcgtcttcatcgtctaccgcaacgtcatctccctcgccctcctcgcccccttcgcctacttcctcgagaagaaggaccggccgccgctcaccttctcgctgctggcggagttcttcgtgctggcgctcatcgggatcacggcgaaccaggggttctacctgctggggctgtaccacctgtcgccgacctacgcgtcggcgatccagaacatggtgccagccatcaccttcgtgctggccacggtcctccggctggagcaggtggacctgggccggcggcacggggtggccaaggtggtgggcaccgtggtgagcatcggcggcgccacggtgatcacgctctacaagggcctgccgctcttcagccacaacctgcacgtgcaggccgtcctctcctggacctccggcagccccatcttcaactggaccctaggctgcgtcttcatcctcggccactgcctctcctggtccggctggatggtgctccaggtgccggtgctcaagcggtacccggcgaggctgtcggtcatctcgctcacctgcgtcttcgggctgctccagttcctcgtcatcgccgccttcaccgaggaggacctcagccggtggaaggtgcagtccggcggggagctgttcaccatcctctacgcggggctggtggcctccggcgtggcgttcgcgctgcagatctggtgcatcgaccgcggcggcccgctcttcaccgccgtgttccagcccgtgcagaccgtcgccgtcgccgtcatggccgccgtcatcctcggcgaccagctctacaccggagggatcatcggcgcggtgctgatcgtcatcgggctctacttcgtgctgtggggcaagagcgaggagaagaagacgaggagccaagacccggagatggcgaggcgcctgctcggggaagacggcggcgcagctgacaaagatcagcaagtgagcaccactgtcctggcgtgaaagctgctgcttgctggatttggagatgtgtgtactgatgtgggtgtttgtacctacgtttttaactagtgtttcaagcgtgcgaccaagaagaagaagactcgtactagttgacgatgtgaactgccaaacacactcagtcatatttggtacctactgtgtatagccccttgtcttcgagttgtgtgtgtgtctataaatacactatgctccctaattttc

SEQ ID NO: 4229 - protein, 373 aa, Glycine max
  misc_feature (1)..(373): Ceres Seq. ID no. 13595352
MGRDQQAGVGAGAAAAHREKVKLFMGVLALQFLLAGFHIVSRAALNMGISKLVFIVYRNVISLALLAPFAYFLEKKDRPPLTFSLLAEFFVLALIGITANQGFYLLGLYHLSPTYASAIQNMVPAITFVLATVLRLEQVDLGRRHGVAKVVGTVVSIGGATVITLYKGLPLFSHNLHVQAVLSWTSGSPIFNWTLGCVFILGHCLSWSGWMVLQVPVLKRYPARLSVISLTCVFGLLQFLVIAAFTEEDLSRWKVQSGGELFTILYAGLVASGVAFALQIWCIDRGGPLFTAVFQPVQTVAVAVMAAVILGDQLYTGGIIGAVLIVIGLYFVLWGKSEEKKTRSQDPEMARRLLGEDGGAADKDQQVSTTVLA

SEQ ID NO: 4230 - protein, 349 aa, Glycine max
  misc_feature (1)..(349): Ceres Seq. ID no. 13595353
MGVLALQFLLAGFHIVSRAALNMGISKLVFIVYRNVISLALLAPFAYFLEKKDRPPLTFSLLAEFFVLALIGITANQGFYLLGLYHLSPTYASAIQNMVPAITFVLATVLRLEQVDLGRRHGVAKVVGTVVSIGGATVITLYKGLPLFSHNLHVQAVLSWTSGSPIFNWTLGCVFILGHCLSWSGWMVLQVPVLKRYPARLSVISLTCVFGLLQFLVIAAFTEEDLSRWKVQSGGELFTILYAGLVASGVAFALQIWCIDRGGPLFTAVFQPVQTVAVAVMAAVILGDQLYTGGIIGAVLIVIGLYFVLWGKSEEKKTRSQDPEMARRLLGEDGGAADKDQQVSTTVLA

SEQ ID NO: 4231 - protein, 327 aa, Glycine max
  misc_feature (1)..(327): Ceres Seq. ID no. 13595354
MGISKLVFIVYRNVISLALLAPFAYFLEKKDRPPLTFSLLAEFFVLALIGITANQGFYLLGLYHLSPTYASAIQNMVPAITFVLATVLRLEQVDLGRRHGVAKVVGTVVSIGGATVITLYKGLPLFSHNLHVQAVLSWTSGSPIFNWTLGCVFILGHCLSWSGWMVLQVPVLKRYPARLSVISLTCVFGLLQFLVIAAFTEEDLSRWKVQSGGELFTILYAGLVASGVAFALQIWCIDRGGPLFTAVFQPVQTVAVAVMAAVILGDQLYTGGIIGAVLIVIGLYFVLWGKSEEKKTRSQDPEMARRLLGEDGGAADKDQQVSTTVLA

SEQ ID NO: 4232 - DNA, 978 bp, Glycine max
  misc_feature (1)..(978): Ceres Seq. ID no. 13595376
acctagaacatcctaatcgaaaaaaaaaaactccgattccgagtaccataggacccaacggtaaaaggatggcgaccaaagcagccccaccgaccctggtggtctcgcaccattagaatccccttccccaacccaaatcggccgccgccgagccctcgaccgtcaccggagccgccgagccaaccaccgaagcgcctcgaacccctcgtcctcctcctcgtgcctgccatcctccaccggatcggcgcggatcggaggctcccgcgaagcgattcctcctgtcaggcagtcgagatgtcggagtaccagaacgtcgttggggggaggctcaagctgaaggggaaaccgctggatgtcaaggagggcggagtcaagaagaagaataagaagaagcaccgccgcgaggagtcgtctcaaggcgagcacggcgagctccgcgaaggtggaagctctgaattgccaggtgaccctgacaatgagttcagtgaagctgacaagctgggagaggaagggagtgcgcaagccgattatgatcacctcactccagctgagaggcgttacattgaacagaagcagaagatcgacgtacacaagttggccaaggtggctgacaagtcgcacagggaccgcatccaggacttcaaccagtacctcgcaaatcttagtgagcactatgatatcccgaaggtcggccctggttaattaaggtccgcaagtgctccagtgtgctggacctatgcatgtagctcgtcaatttcgcgtgggtgtgctctgaaacaatggatgattgtgttgtcttcagagataaactgagtatctctgcacttataagctgattgcactttatctctgtttaaagaccatgtttaatatacttccaagtgttctgagtaaaaaaaaaaaaaaaaaagcttatcgataccgtcgacctcgagggggggcccgkttaaacmcaataaagttggaacgggagggggg

SEQ ID NO: 4233 - protein, 135 aa, Glycine max
  misc_feature (1)..(135): Ceres Seq. ID no. 15221565
MSEYQNVVGGRLKLKGKPLDVKEGGVKKKNKKKHRREESSQGEHGELREGGSSELPGDPDNEFSEADKLGEEGSAQADYDHLTPAERRYIEQKQKIDVHKLAKVADKSHRDRIQDFNQYLANLSEHYDIPKVGPG

SEQ ID NO: 4234 - protein, 117 aa, Glycine max
  misc_feature (1)..(117): Ceres Seq. ID no. 15221566
MSRRAESRRRIRRSTAARSRLKASTASSAKVEALNCQVTLTMSSVKLTSWERKGVRKPIMITSLQLRGVTLNRSRRSTYTSWPRWLTSRTGTASRTSTSTSQILVSTMISRRSALVN

SEQ ID NO: 4235 - protein, 76 aa, Glycine max
  misc_feature (1)..(76): Ceres Seq. ID no. 15221567
MSSVKLTSWERKGVRKPIMITSLQLRGVTLNRSRRSTYTSWPRWLTSRTGTASRTSTSTSQILVSTMISRRSALVN

SEQ ID NO: 4236 - DNA, 473 bp, Glycine max
  misc_feature (1)..(473): Ceres Seq. ID no. 13595406
acctagaacatcctaatcgaaaaatctttatatctgtgaactgtgaacatcatcatcacaattaagatgagtagtgcaacaagcaaggcttggattgtggcagcgagtgttggagccgtggaggctttgaaggaccagctgggtgtgtgcaggtggaactatgttttgagatgtgctcagcagcacatgaaaaaccactttagatccttgtctcaagcaaaaaatgtttcttcttcatctgctcttgttgcaagcaaattaaagggtgatgagaaggctaaaaaggctgaagagtccttgaggactgtcatgtacttaagctgctggggtcctaactgatcttaaaggagagagattttcttaattgctggggattaattgtgatttgaaatgaatattgctttgtgtaaatagagatatgatagattgtatgaaaattgtaatgccaaacaatattaattaatatactattc

SEQ ID NO: 4237 - protein, 90 aa, Glycine max
  misc_feature (1)..(90): Ceres Seq. ID no. 13595407
MSSATSKAWIVAASVGAVEALKDQLGVCRWNYVLRCAQQHMKNHFRSLSQAKNVSSSSALVASKLKGDEKAKKAEESLRTVMYLSCWGPN

SEQ ID NO: 4238 - protein, 50 aa, Glycine max
  misc_feature (1)..(50): Ceres Seq. ID no. 13595408
MKNHFRSLSQAKNVSSSSALVASKLKGDEKAKKAEESLRTVMYLSCWGPN

SEQ ID NO: 4239 - DNA, 1169 bp, Glycine max
  misc_feature (1)..(1169): Ceres Seq. ID no. 13595423
atttagaagttgaatcggtgctacggggtatggaggcgaagacacatggcgaggatgaatccgcataactcaaccgccgatcttctttcggaatctctccaagctgctaacgagccgtctgatgtagccagcaagaaccttagttgcggtcaaatcaccaacgaggaagatgaatctcttgacaagcaaaacaagtgttgtagtgacattgtctctgacagttgtaaagatgattcaaattacaagacaggactcaattgccatcaggaggaccagcggaggacgagtctagtagcatcgattgtggagacatctcacgacgctcccactaggagaaccattgatcttggtcatggaagtgacctcatctacatccagaggtttcttccctttcaaaagtcttggactttatttgattatctcgacaagcatattccttggaccaggcccaccatccgcgtctttggtcgttcttgcctccagccaagagatacatgttacgttgcaagtagcggattgactccgctaatgtacagtggataccgacctgatgcctattcttgggatgactttccacctctcaaggacatccttgatgctatttgcgtagcgtttcctggaagcagattcaacagcttgcttttgaataggtacaacggcgccaacgactacgttggttggcatgctgatgatgaaaagctttacggccccactcctgaaattgcttccctctcttttggatgcaaacgtgactttgtgctcaagaaaaagaaacttcaagactcttcccgtgagaaaagaggagagggtggaccagcgaagaagaggttgaagaaaagcagcagcggagaggaggatcagcatagtttcgcattgaagcatggatcgttgctggtgatgaggggatacactcaaagggactggattcattctgtgccaaagcgtgcaaaggcggagggcactcgtatcaacctcaccttcaggcttgttttgtaaaccatgcatcattcatcattcatcatcatcatcaacaagcttagcttgatctcaagtcacattgattgactaggcttttctcatcttagttcttcgacatgagatataacatataagttggtgtagacattttgaaaaatcttaattactaattaacgtgaagattattaagg

SEQ ID NO: 4240 - protein, 316 aa, Glycine max
  misc_feature (1)..(316): Ceres Seq. ID no. 13595424
MARMNPHNSTADLLSESLQAANEPSDVASKNLSCGQITNEEDESLDKQNKCCSDIVSDSCKDDSNYKTGLNCHQEDQRRTSLVASIVETSHDAPTRRTIDLGHGSDLIYIQRFLPFQKSWTLFDYLDKHIPWTRPTIRVFGRSCLQPRDTCYVASSGLTPLMYSGYRPDAYSWDDFPPLKDILDAICVAFPGSRFNSLLLNRYNGANDYVGWHADDEKLYGPTPEIASLSFGCKRDFVLKKKKLQDSSREKRGEGGPAKKRLKKSSSGEEDQHSFALKHGSLLVMRGYTQRDWIHSVPKRAKAEGTRINLTFRLVL

SEQ ID NO: 4241 - protein, 313 aa, Glycine max
  misc_feature (1)..(313): Ceres Seq. ID no. 13595425
MNPHNSTADLLSESLQAANEPSDVASKNLSCGQITNEEDESLDKQNKCCSDIVSDSCKDDSNYKTGLNCHQEDQRRTSLVASIVETSHDAPTRRTIDLGHGSDLIYIQRFLPFQKSWTLFDYLDKHIPWTRPTIRVFGRSCLQPRDTCYVASSGLTPLMYSGYRPDAYSWDDFPPLKDILDAICVAFPGSRFNSLLLNRYNGANDYVGWHADDEKLYGPTPEIASLSFGCKRDFVLKKKKLQDSSREKRGEGGPAKKRLKKSSSGEEDQHSFALKHGSLLVMRGYTQRDWIHSVPKRAKAEGTRINLTFRLVL

SEQ ID NO: 4242 - DNA, 816 bp, Glycine max
  misc_feature (1)..(816): Ceres Seq. ID no. 13595433
ttttttcttcggttcggggttttagcagtgaagtagcgaaaatggcgtctacatcgtgttttgatccttatcaacttgagcgagttgcagatattttcacaggccaagatctaagatccgagttacaaagcaaaatggcgatggtttcaggaagacgttctacgctaaaccccaacgcgcctctctttgtcccagcagccgttagacaagtggaagatttctctccggagtggtggcagttggtgacgacctccacttggtaccacgactactggatcagccagcaccaaggagctgacggattctacgacaacggagagagtggtgaagtcgatgtagctgatcttcttccagagtcgtttgatttcgatgatattgaagatgtcttcgaggccgagtttgatcatcaaggttacggtggatatgttggacaacagatgtatcatgcaccttctgactttggtttagggaagaatggtgagatggtgaggaaatcgagtgggaacaggagtcctaggtcgattgttgaaccggcgaagtatgcagagaagccagcgaaatgggggaaccagaaggttgctccacgaaacattcaccagcctcgttgaagtgcaaagttaactaggcagagtatgttgtatctttagccacttgtacctttgtaatttttagtattttctgctttccacaagagagaacctgtaacttctttgtacctttatgatgttcagtctcaaacttgttatctcaaaaaaaaatgtaaaaacataaaaaaattgtaaaatttgaagagtaatgagaaatagagtttcacat

SEQ ID NO: 4243 - protein, 201 aa, Glycine max
  misc_feature (1)..(201): Ceres Seq. ID no. 13595434
FSSVRGFSSEVAKMASTSCFDPYQLERVADIFTGQDLRSELQSKMAMVSGRRSTLNPNAPLFVPAAVRQVEDFSPEWWQLVTTSTWYHDYWISQHQGADGFYDNGESGEVDVADLLPESFDFDDIEDVFEAEFDHQGYGGYVGQQMYHAPSDFGLGKNGEMVRKSSGNRSPRSIVEPAKYAEKPAKWGNQKVAPRNIHQPR

SEQ ID NO: 4244 - protein, 188 aa, Glycine max
  misc_feature (1)..(188): Ceres Seq. ID no. 13595435
MASTSCFDPYQLERVADIFTGQDLRSELQSKMAMVSGRRSTLNPNAPLFVPAAVRQVEDFSPEWWQLVTTSTWYHDYWISQHQGADGFYDNGESGEVDVADLLPESFDFDDIEDVFEAEFDHQGYGGYVGQQMYHAPSDFGLGKNGEMVRKSSGNRSPRSIVEPAKYAEKPAKWGNQKVAPRNIHQPR

SEQ ID NO: 4245 - protein, 157 aa, Glycine max
  misc_feature (1)..(157): Ceres Seq. ID no. 13595436
MAMVSGRRSTLNPNAPLFVPAAVRQVEDFSPEWWQLVTTSTWYHDYWISQHQGADGFYDNGESGEVDVADLLPESFDFDDIEDVFEAEFDHQGYGGYVGQQMYHAPSDFGLGKNGEMVRKSSGNRSPRSIVEPAKYAEKPAKWGNQKVAPRNIHQPR

SEQ ID NO: 4246 - DNA, 863 bp, Glycine max
  misc_feature (1)..(863): Ceres Seq. ID no. 13595452
aaagaaacattctagagctccgctccactcccagtaatggcggcgacatggacttgttttgtaacttcgttgtgtatttcttcaccttcttataaaccatcgtcgttgcacggtctgtctttccggaggcaagcagtgaccagaacgaacagattttttaccaggatatatgcgctgtctagcaacgacatcaaagtcgggacaagcatagaagtcgatggtgctccgtggcgtgttctggagtttctgcatgtgaagccaggcaaaggtgctgcttttgtcagaaccaaaatcaggaactacgtcaatggtagcacagtcgagagaacctttcgtgctgggattactatagaagaggccaatgtctccaaggagactaagcaattcacttataaagacggctctcagtttgttttcatggacttgagcagttatgaggaaacacgtttaaacgaggctgatatgggcgacaagaccaaatggcttaaagagggaatggactgcaatttgctctactggaaggacaaggtcatcgattttgaacttcccattacagttcagcttaaaatagttgacgttgatcctggtctccgaggtgacactgcacaaggtggaactaaacctgccacactcgagactggtgcagttgtcaatgtacccctctttgtcaatgttggtgaagatattatggtggacacgagaaccggtacgtacatgagccgggtctgacacttcttccctattgctaacgactaaggaatgtgatatttaatgagcggttttgcttagactactctgattagttgagtgaacgcccagaattgctactattggtttccctaataatgattctgtattatttt

SEQ ID NO: 4247 - protein, 230 aa, Glycine max
  misc_feature (1)..(230): Ceres Seq. ID no. 13595453
MAATWTCFVTSLCISSPSYKPSSLHGLSFRRQAVTRTNRFFTRIYALSSNDIKVGTSIEVDGAPWRVLEFLHVKPGKGAAFVRTKIRNYVNGSTVERTFRAGITIEEANVSKETKQFTYKDGSQFVFMDLSSYEETRLNEADMGDKTKWLKEGMDCNLLYWKDKVIDFELPITVQLKIVDVDPGLRGDTAQGGTKPATLETGAVVNVPLFVNVGEDIMVDTRTGTYMSRV

SEQ ID NO: 4248 - DNA, 1311 bp, Glycine max
  misc_feature (1)..(1311): Ceres Seq. ID no. 13595454
atcttaaagacgaaccaaaatgagagagagaattattcatgatatgttttgttcttaattggaaaattgtaatgcatgcacactctcttgaagggtaagtttctgagaattttctgtcactttctcggcaaaaaattatgtcttccctctccaatcttgaacgctttctcctacgcgtcactccagatgttccgtcactcactcttcagagctgctgtagtgatctaaatgcacaatggctacctcctggcaaagacacaatcgaatatttcactctgaaagatctttgggactgctactatgaatggagtgcctttggtgctggcattcctatgatattggaaaatggtgacactctggtgcaatactatgctccatatctgtctgctacccaaatctatatcagtaaatctaggattcggaaagagtacggtgaaggagttgaagttgaatgtgattccttgagcgaggacagtgcaagtgataacctttctagatcacccagtaacaattctagcaaagcatgggatgatgcttctttggattcaggctctgaccaagtgggttcatgcacaacaaaggatatgcttggcgctctttacttacaatactctgagaactctccaccttaccagcgggttccattttctgagaagataaccgagttagctaaaagccatccaggattgatgaggttgaagagtgtggatatttcccccacaagttggatggctgtttcatggtatcccatttattccgtaccatgccacaaaaataaaagggaccaaacaagcttcctcactttccattcactttcatctttccaagactgtgcaagcaaatatgacgaaattcacacagggaataacaaaagttgtttaattgattggcgaagtattgtgggagagaaatgcaagaaaaaagagaggggttgcatgtctctctctccttttgggttagccacgtacaaaatgaggaaaaacatatggttaaatccctataacaataaccaagtggtgaccgatctatacaacgctgcagactggtggttgaagcatatcaacgctgaccaccctgacttcaacttcttcacacgccaacctaccttgtagattggtttgtgttgtgttcatcaccaccagctcaatgcccctttgctcagtttgctactctcatttcggtatcagaatttgcttagtttggtactctgaccttcaccctaggtccaactctgagaacattaataaataaaatgtaaagtttagtttaatgggttcatgtaaagtgatatttatcttagcttctttaccc

SEQ ID NO: 4249 - protein, 324 aa, Glycine max
  misc_feature (1)..(324): Ceres Seq. ID no. 13595455
MSSLSNLERFLLRVTPDVPSLTLQSCCSDLNAQWLPPGKDTIEYFTLKDLWDCYYEWSAFGAGIPMILENGDTLVQYYAPYLSATQIYISKSRIRKEYGEGVEVECDSLSEDSASDNLSRSPSNNSSKAWDDASLDSGSDQVGSCTTKDMLGALYLQYSENSPPYQRVPFSEKITELAKSHPGLMRLKSVDISPTSWMAVSWYPIYSVPCHKNKRDQTSFLTFHSLSSFQDCASKYDEIHTGNNKSCLIDWRSIVGEKCKKKERGCMSLSPFGLATYKMRKNIWLNPYNNNQVVTDLYNAADWWLKHINADHPDFNFFTRQPTL

SEQ ID NO: 4250 - protein, 259 aa, Glycine max
  misc_feature (1)..(259): Ceres Seq. ID no. 13595456
MILENGDTLVQYYAPYLSATQIYISKSRIRKEYGEGVEVECDSLSEDSASDNLSRSPSNNSSKAWDDASLDSGSDQVGSCTTKDMLGALYLQYSENSPPYQRVPFSEKITELAKSHPGLMRLKSVDISPTSWMAVSWYPIYSVPCHKNKRDQTSFLTFHSLSSFQDCASKYDEIHTGNNKSCLIDWRSIVGEKCKKKERGCMSLSPFGLATYKMRKNIWLNPYNNNQVVTDLYNAADWWLKHINADHPDFNFFTRQPTL

SEQ ID NO: 4251 - protein, 175 aa, Glycine max
  misc_feature (1)..(175): Ceres Seq. ID no. 13595457
MLGALYLQYSENSPPYQRVPFSEKITELAKSHPGLMRLKSVDISPTSWMAVSWYPIYSVPCHKNKRDQTSFLTFHSLSSFQDCASKYDEIHTGNNKSCLIDWRSIVGEKCKKKERGCMSLSPFGLATYKMRKNIWLNPYNNNQVVTDLYNAADWWLKHINADHPDFNFFTRQPTL

SEQ ID NO: 4252 - DNA, 1000 bp, Glycine max
  misc_feature (1)..(1000): Ceres Seq. ID no. 13595464
agttttaccgttgttgttggcaatgaaaaaatcatcatcagcttcaaaaggtgcagcagccaatgatggagttattaagggaggaagcatagattgggagctaagacctggtggcatgcttgttcagaagagacaaccccttgattcctcttctagttccatgatcaaaatcaaggtctctcatggttcttaccaccatgaggtcactgttcctgcacaatccacttttgggcatctaaaaatggtgcttacatccgagactggtcttgagcctaaagagcaaaggttactatttagagggaaagagaaagaggatgaggaatgcttgcatatggtgggagtgaaagacatgtctaaggttatattgctagaggatccagccagcaaagagagaaagcttgaggagatgcataagagtgaagatatctcaaaggcatgtgaagccatctccaaagtcagaacagaagttgacaagctatatcaaaaggtggttgctttggagacaactgtttgtggtggtgctaaggttgaagacaaagaatttgctatcttgacagaattgctaatggttcaattgcttaaactggattccattgctgctgagggagaagccaaagggcagagaagagttgaggttcgtcgtgtacagagttatgtggacacaattgacaacctgaaggcaagaaattttgctgcatttagcaatgctggtaacaatgcagtccctgtgatttgggaggccttggaatccggagttggaagcttgaagtcaccaacttcatttccaacatctacagtgattactcaaaactgggagcactttgaataaatacaagttaatccttccactttatttatagaagaggcttctatgatgacacttggttttttgtaatgacaagctgtttttggtagggaagggttatgcttgtacaaaattaatacatgtacatgttacttctctatgtccaaataaacactgattttgccttgtgtgttc

SEQ ID NO: 4253 - protein, 275 aa, Glycine max
  misc_feature (1)..(275): Ceres Seq. ID no. 13595465
VLPLLLAMKKSSSASKGAAANDGVIKGGSIDWELRPGGMLVQKRQPLDSSSSSMIKIKVSHGSYHHEVTVPAQSTFGHLKMVLTSETGLEPKEQRLLFRGKEKEDEECLHMVGVKDMSKVILLEDPASKERKLEEMHKSEDISKACEAISKVRTEVDKLYQKVVALETTVCGGAKVEDKEFAILTELLMVQLLKLDSIAAEGEAKGQRRVEVRRVQSYVDTIDNLKARNFAAFSNAGNNAVPVIWEALESGVGSLKSPTSFPTSTVITQNWEHFE

SEQ ID NO: 4254 - protein, 268 aa, Glycine max
  misc_feature (1)..(268): Ceres Seq. ID no. 13595466
MKKSSSASKGAAANDGVIKGGSIDWELRPGGMLVQKRQPLDSSSSSMIKIKVSHGSYHHEVTVPAQSTFGHLKMVLTSETGLEPKEQRLLFRGKEKEDEECLHMVGVKDMSKVILLEDPASKERKLEEMHKSEDISKACEAISKVRTEVDKLYQKVVALETTVCGGAKVEDKEFAILTELLMVQLLKLDSIAAEGEAKGQRRVEVRRVQSYVDTIDNLKARNFAAFSNAGNNAVPVIWEALESGVGSLKSPTSFPTSTVITQNWEHFE

SEQ ID NO: 4255 - protein, 237 aa, Glycine max
  misc_feature (1)..(237): Ceres Seq. ID no. 13595467
MLVQKRQPLDSSSSSMIKIKVSHGSYHHEVTVPAQSTFGHLKMVLTSETGLEPKEQRLLFRGKEKEDEECLHMVGVKDMSKVILLEDPASKERKLEEMHKSEDISKACEAISKVRTEVDKLYQKVVALETTVCGGAKVEDKEFAILTELLMVQLLKLDSIAAEGEAKGQRRVEVRRVQSYVDTIDNLKARNFAAFSNAGNNAVPVIWEALESGVGSLKSPTSFPTSTVITQNWEHFE

SEQ ID NO: 4256 - DNA, 713 bp, Glycine max
  misc_feature (1)..(713): Ceres Seq. ID no. 13595468
aaaataaaactgcatgttgattgcctttactccgaaaaatgaatttttttataatatttatgttgattattgctatgattttaggggtgagcgaagcaatttggcataaagttgttgcgcctttgtctaagtgtgagaagaaccgagtaattattcgaaatgaacttggtccaggtagaagtctagaatatcattgtcattctaatggtaaagatcaaggcgtccagtttttaaaattcaatgaagaaaggaactttgaatttgtcgatcatttttttggaaaaaaaaataaagtgaattgtgttttgaggcaagggttgtggatgcagagttcttctcgagactttgaagcataccatacaagtaaaagtaatggtaacaattgtggacagactcgtgaatggattgcgagaacagatggaacatactttcaaagaaatcgaattaagccagcagcttttgtgtttgcttggattaataaaaaaccttaaaaaaatctaattgatgtttctgattaagacactcaaaatctttaatcgtttctaattttaattattgttgttcgttttgtaaactttgtcatgattctgctttcgtgtcgaatattaagaaaataaatattgtatctatgtaattatgtatatttttttgtttgtcatctatttataatgtgttttaaataataagtatgcaaaaaaaaattggatttgtgg

SEQ ID NO: 4257 - protein, 150 aa, Glycine max
  misc_feature (1)..(150): Ceres Seq. ID no. 15221586
MNFFIIFMLIIAMILGVSEAIWHKVVAPLSKCEKNRVIIRNELGPGRSLEYHCHSNGKDQGVQFLKFNEERNFEFVDHFFGKKNKVNCVLRQGLWMQSSSRDFEAYHTSKSNGNNCGQTREWIARTDGTYFQRNRIKPAAFVFAWINKKP

SEQ ID NO: 4258 - protein, 143 aa, Glycine max
  misc_feature (1)..(143): Ceres Seq. ID no. 15221587
MLIIAMILGVSEAIWHKVVAPLSKCEKNRVIIRNELGPGRSLEYHCHSNGKDQGVQFLKFNEERNFEFVDHFFGKKNKVNCVLRQGLWMQSSSRDFEAYHTSKSNGNNCGQTREWIARTDGTYFQRNRIKPAAFVFAWINKKP

SEQ ID NO: 4259 - protein, 138 aa, Glycine max
  misc_feature (1)..(138): Ceres Seq. ID no. 15221588
MILGVSEAIWHKVVAPLSKCEKNRVIIRNELGPGRSLEYHCHSNGKDQGVQFLKFNEERNFEFVDHFFGKKNKVNCVLRQGLWMQSSSRDFEAYHTSKSNGNNCGQTREWIARTDGTYFQRNRIKPAAFVFAWINKKP

SEQ ID NO: 4260 - DNA, 794 bp, Glycine max
  misc_feature (1)..(794): Ceres Seq. ID no. 13595474
cacaaattacccttgttgaagcctttagaaacatgcagattgaggaaggagaggagcatctggagaatggggactctactcatgagttgacagaacaaagtggagaagagcactacacagaggatcaggaggaacagaatggagaggaaggaagccaagaggaggcagttgtagtggatgcagattctacagatggtgcagtactcgttaatggtaacgaggctgacgaagagtggggtacgaataatgaaggagccccgtcagcctaaaagcaattggttggggtggtgtgaaaatcgaaattttgtctctgtgcttgcaccacatcactaggttccatcaagacagtctattccagcttctgggatattttatgaggtttatcaatcgattaacagtttttggttattattatgatcttattaccacccggatagactatttttggtttgataaagcattccttcattcaatttggatgctcacatagacgagtagtgttgcaaaaagaagacatgctcgtgtttatgtgcatccgcaggtcttctcaaggttacatgaagagattttttggactggttgtttgtttcctggtgttgtggatttgtagtgccctgaattttgtcattttgctcgttgtatgaacaatattccttagggtcagttacaatttactagagtttatatatagcacattcttttgaggcttttacctcaatatactcgtgccattgtgaatgtagaaaagcggaactagagacgggttgcccgtttaaactttagataagtttttt

SEQ ID NO: 4261 - protein, 88 aa, Glycine max
  misc_feature (1)..(88): Ceres Seq. ID no. 13595475
QITLVEAFRNMQIEEGEEHLENGDSTHELTEQSGEEHYTEDQEEQNGEEGSQEEAVVVDADSTDGAVLVNGNEADEEWGTNNEGAPSA

SEQ ID NO: 4262 - protein, 78 aa, Glycine max
  misc_feature (1)..(78): Ceres Seq. ID no. 13595476
MQIEEGEEHLENGDSTHELTEQSGEEHYTEDQEEQNGEEGSQEEAVVVDADSTDGAVLVNGNEADEEWGTNNEGAPSA

SEQ ID NO: 4263 - protein, 51 aa, Glycine max
  misc_feature (1)..(51): Ceres Seq. ID no. 13595477
MQILQMVQYSLMVTRLTKSGVRIMKEPRQPKSNWLGWCENRNFVSVLAPHH

SEQ ID NO: 4264 - DNA, 983 bp, Glycine max
  misc_feature (1)..(983): Ceres Seq. ID no. 13595495
atctttcattcgtgcctgaagcagcagccattgcccattgctaaccagagtggagtggtagagcagttcgagtttgcttttctctcttgcttgattgatcggtgcctcgatccatcgttcgtcggaggtgcatatagttagcgaggaattctccggccggccaccggcgacgacgaccgcaagtgatccgtgaggatggtgaacacgacggcggctatggtgagcggcggcggcaagggcggcgtgctgccgctggcgtccctgaaccacatcagcatagtgtgcaggtcggtggaggagtcgctcgacttctacatgaacgtcctcgggttcacccccatccgccgccccggctctttcgacttcgacggcgcatggctgttcaactacgggatcggcatccacctgctgcagtcggagcatcccgagagcttaccggcgaagaaggagatcaaccccaaggataaccacatctccttccagtgcgagagcatggtggcggtggagcggcggctcaaggagctgggcatcccgtacatccagcggtgcgtggaggagggcggcatctacgtcgaccagatcttcttccacgaccccgacggcttcatgatcgagatctgcaactgcgacaagctcccggtcgtcccgctcgccggccagaccttcgccatggccgcctgcaagagggtcgcctccgtcaagcaacagcagctgcccatgccagtcgcacaagtagcgcaagcaacccccgctccggcggcggccgcggcttcgcagtgcattccggcgccgaacccggccttgcagcgcgtcggcggcgaggaggcggcgcatatctcgtgcgcgtgaggggtggggggccggggtagccaggccgcccaactggtgggtggcgcgctccgtggagttgtggtttttgtacattgtgatatgacattgtgcgtatgaataaagcgagaggagcagagtgtagtttcagcttc

SEQ ID NO: 4265 - protein, 217 aa, Glycine max
  misc_feature (1)..(217): Ceres Seq. ID no. 15221592
MVNTTAAMVSGGGKGGVLPLASLNHISIVCRSVEESLDFYMNVLGFTPIRRPGSFDFDGAWLFNYGIGIHLLQSEHPESLPAKKEINPKDNHISFQCESMVAVERRLKELGIPYIQRCVEEGGIYVDQIFFHDPDGFMIEICNCDKLPVVPLAGQTFAMAACKRVASVKQQQLPMPVAQVAQATPAPAAAAASQCIPAPNPALQRVGGEEAAHISCA

SEQ ID NO: 4266 - protein, 210 aa, Glycine max
  misc_feature (1)..(210): Ceres Seq. ID no. 15221593
MVSGGGKGGVLPLASLNHISIVCRSVEESLDFYMNVLGFTPIRRPGSFDFDGAWLFNYGIGIHLLQSEHPESLPAKKEINPKDNHISFQCESMVAVERRLKELGIPYIQRCVEEGGIYVDQIFFHDPDGFMIEICNCDKLPVVPLAGQTFAMAACKRVASVKQQQLPMPVAQVAQATPAPAAAAASQCIPAPNPALQRVGGEEAAHISCA

SEQ ID NO: 4267 - protein, 177 aa, Glycine max
  misc_feature (1)..(177): Ceres Seq. ID no. 15221594
MNVLGFTPIRRPGSFDFDGAWLFNYGIGIHLLQSEHPESLPAKKEINPKDNHISFQCESMVAVERRLKELGIPYIQRCVEEGGIYVDQIFFHDPDGFMIEICNCDKLPVVPLAGQTFAMAACKRVASVKQQQLPMPVAQVAQATPAPAAAAASQCIPAPNPALQRVGGEEAAHISCA

SEQ ID NO: 4268 - DNA, 1276 bp, Glycine max
  misc_feature (1)..(1276): Ceres Seq. ID no. 13595503
acctagaacatcccaatcaaaaaatcaaagccctgctgaatggcgccaccggcaccacccaagtcaagtcagggtcaggtgatgaataatgcaaggattcacttcttttccattctcctcgctctccaatacggtgctcaacctttgatctccaaacgcttcatcagacgtgaagttattgtgacttcatctgttttgacttgtgagcttgcaaaggttatatgtgcagtgttttttatggcaaaagatggtagtctgaggaaattgtataaagagtggactttggttggtgcgttgactgcatcaggacttcctgcagctatatatgcattgcaaaatagtttgctgcaaatttcttacaagaatcttgattcactcacattctcaatgctgaatcagaccaaaatatttttcaccgcgctctttgcatatttcatattgaggcaaaaacaatcgattgagcaaattggagccttgttcttgttaatagttgcggcagttcttttaagtgttggcgaaggctctaccaaaggttctgctattggcaatgctgatcaaattttattttatggaattattcctgtattagttgcttcagtgctctctggattggcttcatccttgtgtcaatgggcctctcaggttaagaaacactcatcatacttgatgactatagaaatgtctattgttggaagtctatgtttgcttgccagtactttgaaatctccagatggggaagctatgagacaacatgggtttttctatggttggactcctcttactttgatcccagtaattttcaatgcccttggaggaattcttgtcggtttagttacaagccatgctggtggtgttcggaaggggtttgtcattgtttctgctttactcattacagcattgctacagtttattttcgatggaaagacaccttcattgtattgccttttggctcttccactagtggtcactagcatttcaatataccagaaatacccctaccaggttaagaagaaggagtcatagaatctgaccatggggaatttatttcattagttccccccgaaactactttgtttttttatccagaatatatagcatattgtaaatgatagaacatagaaggcaagcattcttcttgatgtcttctggatctcaatagaattaggatgttatacagagctatttttttttttttgaatattctggaatctttaaatgatcaattatttgtctcctaaaaaaaaaaaaaaaaaagcttatcgataccgtcgacctc

SEQ ID NO: 4269 - protein, 327 aa, Glycine max
  misc_feature (1)..(327): Ceres Seq. ID no. 13595504
MAPPAPPKSSQGQVMNNARIHFFSILLALQYGAQPLISKRFIRREVIVTSSVLTCELAKVICAVFFMAKDGSLRKLYKEWTLVGALTASGLPAAIYALQNSLLQISYKNLDSLTFSMLNQTKIFFTALFAYFILRQKQSIEQIGALFLLIVAAVLLSVGEGSTKGSAIGNADQILFYGIIPVLVASVLSGLASSLCQWASQVKKHSSYLMTIEMSIVGSLCLLASTLKSPDGEAMRQHGFFYGWTPLTLIPVIFNALGGILVGLVTSHAGGVRKGFVIVSALLITALLQFIFDGKTPSLYCLLALPLVVTSISIYQKYPYQVKKKES

SEQ ID NO: 4270 - protein, 313 aa, Glycine max
  misc_feature (1)..(313): Ceres Seq. ID no. 13595505
MNNARIHFFSILLALQYGAQPLISKRFIRREVIVTSSVLTCELAKVICAVFFMAKDGSLRKLYKEWTLVGALTASGLPAAIYALQNSLLQISYKNLDSLTFSMLNQTKIFFTALFAYFILRQKQSIEQIGALFLLIVAAVLLSVGEGSTKGSAIGNADQILFYGIIPVLVASVLSGLASSLCQWASQVKKHSSYLMTIEMSIVGSLCLLASTLKSPDGEAMRQHGFFYGWTPLTLIPVIFNALGGILVGLVTSHAGGVRKGFVIVSALLITALLQFIFDGKTPSLYCLLALPLVVTSISIYQKYPYQVKKKES

SEQ ID NO: 4271 - protein, 261 aa, Glycine max
  misc_feature (1)..(261): Ceres Seq. ID no. 13595506
MAKDGSLRKLYKEWTLVGALTASGLPAAIYALQNSLLQISYKNLDSLTFSMLNQTKIFFTALFAYFILRQKQSIEQIGALFLLIVAAVLLSVGEGSTKGSAIGNADQILFYGIIPVLVASVLSGLASSLCQWASQVKKHSSYLMTIEMSIVGSLCLLASTLKSPDGEAMRQHGFFYGWTPLTLIPVIFNALGGILVGLVTSHAGGVRKGFVIVSALLITALLQFIFDGKTPSLYCLLALPLVVTSISIYQKYPYQVKKKES

SEQ ID NO: 4272 - DNA, 1236 bp, Glycine max
  misc_feature (1)..(1236): Ceres Seq. ID no. 13595507
gcggtctcggttttctgcaattggctggcggcctggcgctccaccccgtgcgtccttcagtccttctatccaaaagcgacggagagactcccggcggcgagcaggttgtcctgttgttctatccgattgtgcactgctggttgtcctgctctccagctgactgcagtggtgttcttctcgcagtttgaagatggatctcaaggatagcctctccagatttaagcagcagcaggagaggtgccagtcatctttggccagcatagctgcaagccaagcttcaaccacaaaaccaaagcacagggcccaaccgattaatgctccatctgctccagcaaggcctgcacaacctattaaattttcaaacgatacagaaaggctgcaagacattaattcgattaggaaatctcctgttggggcacagatcaaacttgtcattgaattgctttacaagacaagacaagcttttacggcagagcaaataaatgatgcaacttacgttgatatcaatggtaataaggctgtctttgacagtctgaggaataacctcaaagtacactatgatgggagacgtttctcgtacaagtccaagcatgatctggaggggaaagatcaactacttgatttgataaggtgtcaccaggagggtcttgctgttgtggaagtgaaggatgcatacccaagtgtattggaagatttgcaggctctgaaggcagcaggtgaagtttggctgttgtcaaacatggattcacaggaggacattgtttaccctaatgatccaaaagtgaagatcaaggttgatgatgacctgaaggagctcttccgtgggattgagttaccgcgtgatatggttgatatcgaaaaggagctccagaagaacggcatgaagccgatgaccgacaccacgaaacgacgagcagcagcccagatccatggcgtgaaaccaaaggctaagcctaagaagaagcaacgcgagataactaaacggaccaagctcacgaatgcccatctgcctgagctgttccaacatcttaaatcttgattgtgccgttatcagcaactccgatgtatttcgtttcatcctacctctagttaatgtcatcgattatatgtgcctgcaaccctagtttgtggttatgtgagctccaagatcttgatctgagagccctgttgtatgtagcataatctgacttggaagagtttgagattgttttttatcataatcctctcaaacctgcc

SEQ ID NO: 4273 - protein, 282 aa, Glycine max
  misc_feature (1)..(282): Ceres Seq. ID no. 13595508
MDLKDSLSRFKQQQERCQSSLASIAASQASTTKPKHRAQPINAPSAPARPAQPIKFSNDTERLQDINSIRKSPVGAQIKLVIELLYKTRQAFTAEQINDATYVDINGNKAVFDSLRNNLKVHYDGRRFSYKSKHDLEGKDQLLDLIRCHQEGLAVVEVKDAYPSVLEDLQALKAAGEVWLLSNMDSQEDIVYPNDPKVKIKVDDDLKELFRGIELPRDMVDIEKELQKNGMKPMTDTTKRRAAAQIHGVKPKAKPKKKQREITKRTKLTNAHLPELFQHLKS

SEQ ID NO: 4274 - DNA, 1183 bp, Glycine max
  misc_feature (1)..(1183): Ceres Seq. ID no. 13595509
cttcctctcctcagatcgttcctcttcgtctccttcaatcactcgtaagactcttccgagacggtgtgttcgctctttgattgaatggaaagtgaagacatgcattcgaaacctgacggtgggaatcagatcgtttcagagtcggttcatcatcactccataaatagtttaaacccttggcaacgtgctgctgctgcctgcaatgcaagttctttagtggaggaagctggagataagtctatagctttggagaaccaaaacaattgggaatcaactaatggttccaagtcaccatctcataaagatgaaaatggtaacaaggaatcaccacaagtcacatcctctccccaacaatcagctggagattacagtgaaaaaagtcaagaacttgtgcatgttggcgtcacaggacctcctcaccctcaacttgttagccacacaggatgggcatcctcaaatccataccaggatccttattatgctggaatgatgggagcctatcccatggcttatgttccatatggtgggatgcctcattcaagaatgccactgcctcctgaggtggcacaggaaccagtttatgtgaatgctaaacagtaccaggcgatacttaggcgaaggcaggcacgcgccaaggcagagcttgaaatgaagctaatcaaatccagaaagccttatctccatgaatctcggcatcagcatgctatgaggaggcctaggggcactggaggccggtttgcaaagaaaacaaacaccgaagtttcacagccgaaacctggagaaaagaacaatgctactcagtccccgacgtcatctcactctgaccaacctgaagcctggaatgatgagtgtagaaaacagtctgaagagatgcaaagctcagcttctaagagaagggaagaagcagactgttcagggcaacaatggaacagcatttcctcaaaccatacttctgaagctcgtctagccatcaaatgacatctccactggcaactcattcttggctctctctttgttggcttatttggtagcagccattgaagagtcccctgtacaaatacttctgtgtttttcttcttttgtgatatgtcaaatgttactgctttcttttgtcaactctctttagcacatttttgaatcaaaaactatgtgtttaaaattaaattccaaagtgtgcaaactg

SEQ ID NO: 4275 - protein, 297 aa, Glycine max
  misc_feature (1)..(297): Ceres Seq. ID no. 13595510
MESEDMHSKPDGGNQIVSESVHHHSINSLNPWQRAAAACNASSLVEEAGDKSIALENQNNWESTNGSKSPSHKDENGNKESPQVTSSPQQSAGDYSEKSQELVHVGVTGPPHPQLVSHTGWASSNPYQDPYYAGMMGAYPMAYVPYGGMPHSRMPLPPEVAQEPVYVNAKQYQAILRRRQARAKAELEMKLIKSRKPYLHESRHQHAMRRPRGTGGRFAKKTNTEVSQPKPGEKNNATQSPTSSHSDQPEAWNDECRKQSEEMQSSASKRREEADCSGQQWNSISSNHTSEARLAIK

SEQ ID NO: 4276 - protein, 292 aa, Glycine max
  misc_feature (1)..(292): Ceres Seq. ID no. 13595511
MHSKPDGGNQIVSESVHHHSINSLNPWQRAAAACNASSLVEEAGDKSIALENQNNWESTNGSKSPSHKDENGNKESPQVTSSPQQSAGDYSEKSQELVHVGVTGPPHPQLVSHTGWASSNPYQDPYYAGMMGAYPMAYVPYGGMPHSRMPLPPEVAQEPVYVNAKQYQAILRRRQARAKAELEMKLIKSRKPYLHESRHQHAMRRPRGTGGRFAKKTNTEVSQPKPGEKNNATQSPTSSHSDQPEAWNDECRKQSEEMQSSASKRREEADCSGQQWNSISSNHTSEARLAIK

SEQ ID NO: 4277 - protein, 163 aa, Glycine max
  misc_feature (1)..(163): Ceres Seq. ID no. 13595512
MMGAYPMAYVPYGGMPHSRMPLPPEVAQEPVYVNAKQYQAILRRRQARAKAELEMKLIKSRKPYLHESRHQHAMRRPRGTGGRFAKKTNTEVSQPKPGEKNNATQSPTSSHSDQPEAWNDECRKQSEEMQSSASKRREEADCSGQQWNSISSNHTSEARLAIK

SEQ ID NO: 4278 - DNA, 1759 bp, Glycine max
  misc_feature (1)..(1759): Ceres Seq. ID no. 13595521
aacggttccctttgttttctttttttctctgctagttgagcaaaaatggaggaagcgagtcctaaaattttcattccaaacacgatccagggagtgagtgagcacgtgacggggcagattgaactgctctgggagttagtgaaagtgccattgatagtgcctctgctgaagcttggagtgtacatttgtttagcaatgtcacttatgcttttcatggagaggctctacatgggcatcgtcatcattctagtgaaactcttctggaaaaaacccgaacagcgttacaactacaagcccctccaagacgacgtcgaattgggctccttcatcttccccacggtcctaatacaaatcccaatgttcaacgaaaaagaggtttacaaggtgtccatcggagcagcttgtgggctttcatggcccagtgaccgtctcgttatccaagtcctggacgattcaactgacactgtcattaaggaaatggtggagcaagaatgtttgagatgggcaagtaaaggcatcaacataacgtaccaaataagggagaacagaacgggttacaaagctggtgcgttgaaagaaggcctcaagcgaagctatgtggagcattgcgagtacgtggcaatattcgacgcggatttcaggccagagccagactttctcaggcgagcgattccattcttggtggggaaccctgagattgccctggttcaagctcgttggaggtttgtgaatgcgaatgagtgcttgttgacaagaatgcaagagatgtcactggattatcatttcacagtagagcaagaagttgggtcagccactcatgctttctttggtttcaatgggacagcgggtatatggagaattgctgctatcaatgaagctggagggtggaaagacagaacaacggtggaggacatggatcttgctgttcgtgccagccttaggggctggaagtttttgtacctcggagaccttcaggcgaaaagtgagcttccaagtactcttagagccttccgcttccagcagcatcgatggtcttgtggtcctgctaatctattccgcaaaatggtgatggagatagtaaggaacaagaaagtaaaattctggaagaaagtgtacgttatatacagcttcttctttgttcgtaaaatcatagctcacatggtcacattcttcttctactgtgtggtgcttcccttgacaattttggtccctgaagttcgtgttccaatttggggagctgtttatattccttccatcatcaccaccctcaactcagtaggcacaccaaggtccattcatctgttgttctactggatcctttttgagaatgcgatgtcattgcaccgtacgaaggcgaccttcataggcctgctagaggccgggagagccaatgagtgggtcgttactgaaaaacttggtgactctgtcaataataagaacaaaagcaatgtcaccaaagcaatcagaaaatctcgattcaaatttggtgaaagacttcatttattggagcttggattcgctgccttcctcttcctttgtggatgctatgactatgtgcacggcaagaactactactttttgtacctcttccttcagaccataaccttctcaatcgtaggatttggctatgttggcaccattgtttagtacttgttaagctaaaatcttcagtgacttaagtttcagagtcactagtgttcatgtcttactagtttctctcctcaataaaatgcaaaaggtagggctgatttctcaagct

SEQ ID NO: 4279 - protein, 533 aa, Glycine max
  misc_feature (1)..(533): Ceres Seq. ID no. 13595522
MEEASPKIFIPNTIQGVSEHVTGQIELLWELVKVPLIVPLLKLGVYICLAMSLMLFMERLYMGIVIILVKLFWKKPEQRYNYKPLQDDVELGSFIFPTVLIQIPMFNEKEVYKVSIGAACGLSWPSDRLVIQVLDDSTDTVIKEMVEQECLRWASKGINITYQIRENRTGYKAGALKEGLKRSYVEHCEYVAIFDADFRPEPDFLRRAIPFLVGNPEIALVQARWRFVNANECLLTRMQEMSLDYHFTVEQEVGSATHAFFGFNGTAGIWRIAAINEAGGWKDRTTVEDMDLAVRASLRGWKFLYLGDLQAKSELPSTLRAFRFQQHRWSCGPANLFRKMVMEIVRNKKVKFWKKVYVIYSFFFVRKIIAHMVTFFFYCVVLPLTILVPEVRVPIWGAVYIPSIITTLNSVGTPRSIHLLFYWILFENAMSLHRTKATFIGLLEAGRANEWVVTEKLGDSVNNKNKSNVTKAIRKSRFKFGERLHLLELGFAAFLFLCGCYDYVHGKNYYFLYLFLQTITFSIVGFGYVGTIV

SEQ ID NO: 4280 - protein, 483 aa, Glycine max
  misc_feature (1)..(483): Ceres Seq. ID no. 13595523
MSLMLFMERLYMGIVIILVKLFWKKPEQRYNYKPLQDDVELGSFIFPTVLIQIPMFNEKEVYKVSIGAACGLSWPSDRLVIQVLDDSTDTVIKEMVEQECLRWASKGINITYQIRENRTGYKAGALKEGLKRSYVEHCEYVAIFDADFRPEPDFLRRAIPFLVGNPEIALVQARWRFVNANECLLTRMQEMSLDYHFTVEQEVGSATHAFFGFNGTAGIWRIAAINEAGGWKDRTTVEDMDLAVRASLRGWKFLYLGDLQAKSELPSTLRAFRFQQHRWSCGPANLFRKMVMEIVRNKKVKFWKKVYVIYSFFFVRKIIAHMVTFFFYCVVLPLTILVPEVRVPIWGAVYIPSIITTLNSVGTPRSIHLLFYWILFENAMSLHRTKATFIGLLEAGRANEWVVTEKLGDSVNNKNKSNVTKAIRKSRFKFGERLHLLELGFAAFLFLCGCYDYVHGKNYYFLYLFLQTITFSIVGFGYVGTIV

SEQ ID NO: 4281 - protein, 480 aa, Glycine max
  misc_feature (1)..(480): Ceres Seq. ID no. 13595524
MLFMERLYMGIVIILVKLFWKKPEQRYNYKPLQDDVELGSFIFPTVLIQIPMFNEKEVYKVSIGAACGLSWPSDRLVIQVLDDSTDTVIKEMVEQECLRWASKGINITYQIRENRTGYKAGALKEGLKRSYVEHCEYVAIFDADFRPEPDFLRRAIPFLVGNPEIALVQARWRFVNANECLLTRMQEMSLDYHFTVEQEVGSATHAFFGFNGTAGIWRIAAINEAGGWKDRTTVEDMDLAVRASLRGWKFLYLGDLQAKSELPSTLRAFRFQQHRWSCGPANLFRKMVMEIVRNKKVKFWKKVYVIYSFFFVRKIIAHMVTFFFYCVVLPLTILVPEVRVPIWGAVYIPSIITTLNSVGTPRSIHLLFYWILFENAMSLHRTKATFIGLLEAGRANEWVVTEKLGDSVNNKNKSNVTKAIRKSRFKFGERLHLLELGFAAFLFLCGCYDYVHGKNYYFLYLFLQTITFSIVGFGYVGTIV

SEQ ID NO: 4282 - DNA, 875 bp, Glycine max
  misc_feature (1)..(875): Ceres Seq. ID no. 13595532
ccacgcagtttcgaatccgcaatgaaactcaaccacgtttgaaaaccatgtcaaacatccccacaacgctctcggagatttgcctcacccagtttcggcttgccatgtccatagcagacccgtggcccttctcaagaacccacccagcaagtcccaagtagcaccctcggtcctccttttcacttccattcattccaatacacaccacaccaaacacatctctctcaattcaaattaaggcacatgtccaagaaccgcggattcaacctcaggaggcgcctcatccgggtctcgaaatggatcttcaggaagatacggacgcgggctccacgcgagtaccattgcctgggtgactctcctccgtcacccatggtgaagctccttacgtggggccgcaagctgacagcgggtgccaagtcccgcttgaaagtggcgtccggatccggttatgcccaattaggaaccgatccggacccgagtgtgccgaaggggcacctggccgtgtacgtagggcagaaggacggcgagttgcaccgtgttctggtgccggtaatatacttcaaccaccctttgtttggagaattgctgaagcaggcggaggaggagttcgggttccaccacgaagggggaatcaccatcccgtgccggttcaccgagtttgaacgggtgaagacccgaattgcatccggatctcgcagaggcacccgtccgaaaagattggcctggcgctgaggactgaggtgatgctgaattgctgcccatcctgtaactcaacaaataatattgctttttaggatttttttttttcgtgttgttaattattttttttaacctcgtttaatccgtgaggtaaattttagctttcctgtttacct

SEQ ID NO: 4283 - protein, 162 aa, Glycine max
  misc_feature (1)..(162): Ceres Seq. ID no. 13595533
MSKNRGFNLRRRLIRVSKWIFRKIRTRAPREYHCLGDSPPSPMVKLLTWGRKLTAGAKSRLKVASGSGYAQLGTDPDPSVPKGHLAVYVGQKDGELHRVLVPVIYFNHPLFGELLKQAEEEFGFHHEGGITIPCRFTEFERVKTRIASGSRRGTRPKRLAWR

SEQ ID NO: 4284 - protein, 120 aa, Glycine max
  misc_feature (1)..(120): Ceres Seq. ID no. 13595534
MVKLLTWGRKLTAGAKSRLKVASGSGYAQLGTDPDPSVPKGHLAVYVGQKDGELHRVLVPVIYFNHPLFGELLKQAEEEFGFHHEGGITIPCRFTEFERVKTRIASGSRRGTRPKRLAWR

SEQ ID NO: 4285 - DNA, 1541 bp, Glycine max
  misc_feature (1)..(1541): Ceres Seq. ID no. 13595560
actgcctcagtgttctccataacaccataaaacactgacccaatctttctcctcctcctccctcacaatctgacacactaacacaccaaaattcaaattacattaccaaaaaaagaaaaatggtgggtacatatgcatatacatatacatatagactactatagagtgaaagtgatatacttcttgctattcaatttttatgtctgttttgaagttaattctgttcactctcctggcgcaaacacagatcaaaattcaaattgcaaagtaaaaaaaaaaaaccatgttcgtttcttcttcatcgcatgttccccgttggctccaagttctcctcacggagaagttctacaacgtttgcataattcacgaagaggcaaagaagaacgagaagaacgtttattgcttggattgttgcattagcctctgccctcactgtttgtccccccaccgctctcatagactcttgcagattagaagatatgtgtatcacgatgttataaggttggatgatgctgcaaagttaattgactgcaattccgttcaatcctacacaaccaacagcgcaaaagtggtatttttaaaccaaaggccacagacaaggaacttcagaggctccggcaatttctgcagcacctgtgacagaagcctgcaagacccataccacttctgctccctctcttgcaaggtctttcctttggtcactcccattttcgccctctcaccaacgttaccattattctttattcttattatatatattattattattactattctttttttctcttatttatgtaatgtgtgtcttctaataatgtttatgtttatgtttatttcctcaatttttttttctcgtttttgtttttgttttaaacagataaattatctcgtcagaacaacggactctctctgcggctacctcttcgagtgcaactacctgccgctactggaatctgggctcgacgatggtctaatgatgactcctgattcggttctcgaaccgtctggttcaggggggtacggaggggtggattgtaggaccaccttggcttgcactgccaccaccgagattgtgaggaagaagaggaccggcggtgccgctttccggcttccgttccggccggcgtgctcgccggtctcggaaatctcggcgtgtctcatgaaccggaggaaagggaacccccagcgggccccactccattgaagaacttgagagagagggtgagtttttttttatatgaaaagagaaaaaaaaacgtttattaaatattaatattctaaatactgttattattattatggagtttaaatctggggttggaacttactatacctttacagggagaaaaaaataacctcctagttttgtagagattatcaccctctgctttgttgctgctgtgtatctatctacccggattgttagaatttattgaggtttattactgcttctgttatagtactagtatatataatttgataatttgaaaraamaamwaaaaaaagyttatcrataccgtcsacctcsagggggggcccgg

SEQ ID NO: 4286 - protein, 306 aa, Glycine max
  misc_feature (1)..(306): Ceres Seq. ID no. 15221611
MFVSSSSHVPRWLQVLLTEKFYNVCIIHEEAKKNEKNVYCLDCCISLCPHCLSPHRSHRLLQIRRYVYHDVIRLDDAAKLIDCNSVQSYTTNSAKVVFLNQRPQTRNFRGSGNFCSTCDRSLQDPYHFCSLSCKVFPLVTPIFALSPTLPLFFILIIYIIIITILFFSYLCNVCLLIMFMFMFISSIFFSRFCFCFKQINYLVRTTDSLCGYLFECNYLPLLESGLDDGLMMTPDSVLEPSGSGGYGGVDCRTTLACTATTEIVRKKRTGGAAFRLPFRPACSPVSEISACLMNRRKGNPQRAPLH

SEQ ID NO: 4287 - DNA, 1016 bp, Glycine max
  misc_feature (1)..(1016): Ceres Seq. ID no. 13595561
aatcaaatccatgttctagctctgctgtacagttaaccttaagaaacgatgaatcagtgggcgattcagccaaaggctttcgctgcgggaggagagcagagtgttgtagtttgcccaaaaccccgtcgtattggtctcggtaaccatctccaccatccctcctcccgctctctgcgatgttacttcagccagcaagttgaatccaaggctgagactgatatcttagatatcatactcaccaaggaacaagttaatcactcgcaggtattagactcgccgtccccgtttttatgtgggtcgccgccgagtagagtcgctaacccattaacacaggatgctcgtttcagagatgaaatcaagctggtctcttcttccccgatcacgactccgctgggccaacctccgtcgtccccttcttcctctgggaggaaaggaggatgtgttagaggcaattttggtaacagcccagcggttaggatcgaagggtttgattgccttgacagggacagtagaaactgcagcatccctgccttggcttagaaaccaaaccaacctcgaaaacgcatccactctgttgaattatctcatgaaaaccaatttagtgcgtcgtacatatatgagtttaaggatatggaaatgtgtggaatataatctttgagggaagtgaaagagcatgtgagatcaatcttttggragtttggttgttttgtttttaaagagtgtaaataggtgacggagtaaaaccgattttctgggttaagtttttagtattcgtggtcattttgtaagtataagtatcaagtctaaagatgaatcgttgaggataaggaagaataacatttgaaggtcaggttttcttgtgtaaagagagatcgagatagaaaagtgcattttgggtattttctacttttgtttttgtttctattatgtgttcatgttggttatgaagatgagaaagaagaatttgtacaaaaggaaagaaatttaaatgatgtaaattttacttttgaattccg

SEQ ID NO: 4288 - protein, 163 aa, Glycine max
  misc_feature (1)..(163): Ceres Seq. ID no. 15221612
MNQWAIQPKAFAAGGEQSVVVCPKPRRIGLGNHLHHPSSRSLRCYFSQQVESKAETDILDIILTKEQVNHSQVLDSPSPFLCGSPPSRVANPLTQDARFRDEIKLVSSSPITTPLGQPPSSPSSSGRKGGCVRGNFGNSPAVRIEGFDCLDRDSRNCSIPALA

SEQ ID NO: 4289 - protein, 107 aa, Glycine max
  misc_feature (1)..(107): Ceres Seq. ID no. 15221613
MLVSEMKSSWSLLPRSRLRWANLRRPLLPLGGKEDVLEAILVTAQRLGSKGLIALTGTVETAASLPWLRNQTNLENASTLLNYLMKTNLVRRTYMSLRIWKCVEYNL

SEQ ID NO: 4290 - protein, 102 aa, Glycine max
  misc_feature (1)..(102): Ceres Seq. ID no. 15221614
MKSSWSLLPRSRLRWANLRRPLLPLGGKEDVLEAILVTAQRLGSKGLIALTGTVETAASLPWLRNQTNLENASTLLNYLMKTNLVRRTYMSLRIWKCVEYNL

SEQ ID NO: 4291 - DNA, 1666 bp, Glycine max
  misc_feature (1)..(1666): Ceres Seq. ID no. 13595562
catcaaggatattagagtgtgaaaaaggtgaagaacaaaccaaatctttatcatagtcataaatggtaggataggaatgtacatggaaactaggaaaagattgagtaaatatcaaatgtaatataccctttttagtgtgaggcttgaagcccaaaaaaatggaagcagaggctctaagatcaagttttttttttgttattagtgagagtgttgatgtagcataagcaaccaaagactttcaaagaagaaatgtcatatgcagtaccatataatttttcaaaaggagacttattattaagaaatggagttggcaaacaattgatgagtaaaacagcatgttgtaaagcaaaagaccaaaagattggtggtaacttggactgaaaaagaagggctcgagtaacatttaataaatgttgatgctttctttccacaattccattttgttgtagggtttcaacacaggaagtctggtgtatgataccagtattatgataaaactatttcataataaattctggaccattgtctgatcggatagctttcacttttgtattgaattgcctctcaacataggaaacaaaggcttgtaaatgagtttgagtctcagcttttgaagtcattataaaaatccaaacaaatctagtatgatcatccacaattctcgtgcaaaaataatgctagaaaaggttgcaaggtgaaggggtaggtgctcaaaaggggactctgtctgggaaggaagatcttagtggcttctttcgtagcttctgctgccccggttgttgttccacctcttgttgttgcttctgctattggcatggctctttctatgccttgtgttattttcttggctagccatgtttgcactctgagtttaatgagtaagttgctccctaggcctactcctcaggatactttgttgcatgaagagatgtgttttcggccaggtaatgatgttattcacacatataaagaggttgctccctaggcctattacattgcccaatgagaagttagataataacaattttgactttgaaaatcaagaatcacagttgcatgaattaaatgaagggatgtacccgttagatgcagaagctagagaaattgctaatgaaagtgcacttgatttgtttgatggaaaccaaatagaccatgacgagtatgcatacacaattgatttaaatgaaggctcttcaaatgttgtaaggcatacaaattctatgcaggttcttgtttcgtctgttgaaaaagagtcaaggccatctaaatgttcctctgcagaaaaccatgtttgcccttctcaagagctattgcaggttgtattgggtgaagagaacatatggaaaaagatgaatatgatacggaagatagtaggatatgaaggtagaatgcaagcatcatgttcagatgaattaaaagctctctacatgttcactggagttgagcccccaacttgttctctcgctgaaatcaaggagaagctcccwctccttatgtccatccttggaattaaatmgaatgatgctyagacakgtcacacatctttgtactgttttttacatatttccgttaacatgtaatgwgtgttctttttattctccgyggayttccctgggcgatatggagacccaagaaaaggaaaggaaaattattcaamactttcttc

SEQ ID NO: 4292 - protein, 219 aa, Glycine max
  misc_feature (1)..(219): Ceres Seq. ID no. 15221615
  misc_feature (189)..(189): Xaa is any aa, unknown or other
  misc_feature (199)..(199): Xaa is any aa, unknown or other
  misc_feature (203)..(203): Xaa is any aa, unknown or other
  misc_feature (205)..(205): Xaa is any aa, unknown or other
MKRCVFGQVMMLFTHIKRLLPRPITLPNEKLDNNNFDFENQESQLHELNEGMYPLDAEAREIANESALDLFDGNQIDHDEYAYTIDLNEGSSNVVRHTNSMQVLVSSVEKESRPSKCSSAENHVCPSQELLQVVLGEENIWKKMNMIRKIVGYEGRMQASCSDELKALYMFTGVEPPTCSLAEIKEKLXLLMSILGIKXNDAXTXHTSLYCFLHISVNM

SEQ ID NO: 4293 - protein, 210 aa, Glycine max
  misc_feature (1)..(210): Ceres Seq. ID no. 15221616
  misc_feature (180)..(180): Xaa is any aa, unknown or other
  misc_feature (190)..(190): Xaa is any aa, unknown or other
  misc_feature (194)..(194): Xaa is any aa, unknown or other
  misc_feature (196)..(196): Xaa is any aa, unknown or other
MMLFTHIKRLLPRPITLPNEKLDNNNFDFENQESQLHELNEGMYPLDAEAREIANESALDLFDGNQIDHDEYAYTIDLNEGSSNVVRHTNSMQVLVSSVEKESRPSKCSSAENHVCPSQELLQVVLGEENIWKKMNMIRKIVGYEGRMQASCSDELKALYMFTGVEPPTCSLAEIKEKLXLLMSILGIKXNDAXTXHTSLYCFLHISVNM

SEQ ID NO: 4294 - protein, 209 aa, Glycine max
  misc_feature (1)..(209): Ceres Seq. ID no. 15221617
  misc_feature (179)..(179): Xaa is any aa, unknown or other
  misc_feature (189)..(189): Xaa is any aa, unknown or other
  misc_feature (193)..(193): Xaa is any aa, unknown or other
  misc_feature (195)..(195): Xaa is any aa, unknown or other
MLFTHIKRLLPRPITLPNEKLDNNNFDFENQESQLHELNEGMYPLDAEAREIANESALDLFDGNQIDHDEYAYTIDLNEGSSNVVRHTNSMQVLVSSVEKESRPSKCSSAENHVCPSQELLQVVLGEENIWKKMNMIRKIVGYEGRMQASCSDELKALYMFTGVEPPTCSLAEIKEKLXLLMSILGIKXNDAXTXHTSLYCFLHISVNM

SEQ ID NO: 4295 - DNA, 1317 bp, Glycine max
  misc_feature (1)..(1317): Ceres Seq. ID no. 13595567
gaacatcctaatcgaaaacttattattagaccctttctcttagagccaagaggtttaagttatagtaacattacttgaggagattaccacttgctagaaaaatatgaagttccatttggtgctatttgttataatagccgccatttttggagttgggcttgaagggtgccaatgcaaggttgtgcagttcatttttggagactctctctctgatgttggaaataacaattacctttctaagagccttgctcaggcaagtttaccttggtatggtattgatttgggcaatggactccctaatggcaggttctcaaatggtcgcacggttgctgatataataggtgataatatgggccttcctaggcctccagcattccttgacccatctttatctgaagatgttatattggaaaatggagtgaattatgcttctgggggtggaggcatcttgaatgaaacaggcagttattttattcaaaggttttctctctacaagcaaatggagctgtttcaggggacacaagaactgattagaagcagaattgggaaagaggaggcagagaagtttttccagggagctcattatgttgttgctttaggcagcaatgacttcatcaacaactacttgatgcctgtttacagtgattcatggacatataatgatcaaaccttcatggattacttgataggaactctaggagaacaattaaagctactgcatggtctaggagcaaggcagttgatggtgtttgggctgggcccaatgggctgcattccacttcaaagggtgcttagtacatctggggaatgtcaaagtagaacaaataatctggctattagctttaataaggctacaagcaagttagttgttgacttgggaaagcaacttcccaattcaagctacagatttggagatgcatatgacgttgttaatgatgtgattaccaacccgaacaaatatgggttccaaaactctgattcaccctgttgctcctttgggaatattcgaccagctcttacatgtatacctgcatcaaaactgtgcaaagatagaagcaagtacgttttttgggatgagtaccatccttcagacagagctaatgagctaattgccaatgaactcatcaagaaatttgggtttgtgcgtgttgatcaaacaaaacctccttcaccatcacccgctcttgctccgtcttcagacgattaatcgtgcatgtgaaggttttattactaaatgctcttaaattgcttttgttaaatttgtaatcaaagttggttctctttaattacaagtcggttacactaatttattgatgc

SEQ ID NO: 4296 - protein, 367 aa, Glycine max
  misc_feature (1)..(367): Ceres Seq. ID no. 15221618
MKFHLVLFVIIAAIFGVGLEGCQCKVVQFIFGDSLSDVGNNNYLSKSLAQASLPWYGIDLGNGLPNGRFSNGRTVADIIGDNMGLPRPPAFLDPSLSEDVILENGVNYASGGGGILNETGSYFIQRFSLYKQMELFQGTQELIRSRIGKEEAEKFFQGAHYVVALGSNDFINNYLMPVYSDSWTYNDQTFMDYLIGTLGEQLKLLHGLGARQLMVFGLGPMGCIPLQRVLSTSGECQSRTNNLAISFNKATSKLVVDLGKQLPNSSYRFGDAYDVVNDVITNPNKYGFQNSDSPCCSFGNIRPALTCIPASKLCKDRSKYVFWDEYHPSDRANELIANELIKKFGFVRVDQTKPPSPSPALAPSSDD

SEQ ID NO: 4297 - protein, 285 aa, Glycine max
  misc_feature (1)..(285): Ceres Seq. ID no. 15221619
MGLPRPPAFLDPSLSEDVILENGVNYASGGGGILNETGSYFIQRFSLYKQMELFQGTQELIRSRIGKEEAEKFFQGAHYVVALGSNDFINNYLMPVYSDSWTYNDQTFMDYLIGTLGEQLKLLHGLGARQLMVFGLGPMGCIPLQRVLSTSGECQSRTNNLAISFNKATSKLVVDLGKQLPNSSYRFGDAYDVVNDVITNPNKYGFQNSDSPCCSFGNIRPALTCIPASKLCKDRSKYVFWDEYHPSDRANELIANELIKKFGFVRVDQTKPPSPSPALAPSSDD

SEQ ID NO: 4298 - protein, 235 aa, Glycine max
  misc_feature (1)..(235): Ceres Seq. ID no. 15221620
MELFQGTQELIRSRIGKEEAEKFFQGAHYVVALGSNDFINNYLMPVYSDSWTYNDQTFMDYLIGTLGEQLKLLHGLGARQLMVFGLGPMGCIPLQRVLSTSGECQSRTNNLAISFNKATSKLVVDLGKQLPNSSYRFGDAYDVVNDVITNPNKYGFQNSDSPCCSFGNIRPALTCIPASKLCKDRSKYVFWDEYHPSDRANELIANELIKKFGFVRVDQTKPPSPSPALAPSSDD

SEQ ID NO: 4299 - DNA, 995 bp, Glycine max
  misc_feature (1)..(995): Ceres Seq. ID no. 13595568
gaaataatctcgatttggacaaaagacagagaacgatggagtcttgccagcaaaaggttatggagaagctgcttcacggccatgggtgtgccaaccagctcaagctaatcatggaccaccacgccgagtcagattcgtccgttgaaagggaggatctggccaagtccgtcctccattgtttctcggatgctctctccattttgatcgatacgaatgatcataacaaagatgatgataaatccaataactcatctccccaagactcttcacatgttcttgagagcagcaggaaaccttttcacaagaggggaagaaagacatcaatggcggagagctcagattaccgcagacacgaatccccaaacccgatctaccacgacggctttctttggaggaaatacggacaaaagcaaatcaaagaatcggaccaccaaaggagttactacaagtgtgcgtacacaaacgaccagaaatgcgaagcaaagaagcaggttcaaatgatccaaaacaaccctccattgtactcaaccacttacttcggccgccacacatgtcagcttcatcaagcctttgaaacttttcccattgacacctcagatccccaagattcacgcatgatccgatttgataacccagattcctctacccatcaacatcaaaatcagataattcatctcaaagctgaacaaatgatgccctctgagaaagcagaagagtggtcgtccccatctgagtatatgtcctccgaggttgcctacgctgtggaggctttcgggtttaaccctgctcgcacatcaagtgacttatcatgaccatatatgcccttcccgtcgctatcatcagacatctaaagcaactttagttatttgtttcctcataatatcctatagtatacctcctgttactttttttttgtgttttgcatctcatgtatttgcctacctctactttgaacttttgttttgagtttaatattaatcagctttaataacgcg

SEQ ID NO: 4300 - protein, 269 aa, Glycine max
  misc_feature (1)..(269): Ceres Seq. ID no. 15221621
NNLDLDKRQRTMESCQQKVMEKLLHGHGCANQLKLIMDHHAESDSSVEREDLAKSVLHCFSDALSILIDTNDHNKDDDKSNNSSPQDSSHVLESSRKPFHKRGRKTSMAESSDYRRHESPNPIYHDGFLWRKYGQKQIKESDHQRSYYKCAYTNDQKCEAKKQVQMIQNNPPLYSTTYFGRHTCQLHQAFETFPIDTSDPQDSRMIRFDNPDSSTHQHQNQIIHLKAEQMMPSEKAEEWSSPSEYMSSEVAYAVEAFGFNPARTSSDLS

SEQ ID NO: 4301 - protein, 258 aa, Glycine max
  misc_feature (1)..(258): Ceres Seq. ID no. 15221622
MESCQQKVMEKLLHGHGCANQLKLIMDHHAESDSSVEREDLAKSVLHCFSDALSILIDTNDHNKDDDKSNNSSPQDSSHVLESSRKPFHKRGRKTSMAESSDYRRHESPNPIYHDGFLWRKYGQKQIKESDHQRSYYKCAYTNDQKCEAKKQVQMIQNNPPLYSTTYFGRHTCQLHQAFETFPIDTSDPQDSRMIRFDNPDSSTHQHQNQIIHLKAEQMMPSEKAEEWSSPSEYMSSEVAYAVEAFGFNPARTSSDLS

SEQ ID NO: 4302 - protein, 250 aa, Glycine max
  misc_feature (1)..(250): Ceres Seq. ID no. 15221623
MEKLLHGHGCANQLKLIMDHHAESDSSVEREDLAKSVLHCFSDALSILIDTNDHNKDDDKSNNSSPQDSSHVLESSRKPFHKRGRKTSMAESSDYRRHESPNPIYHDGFLWRKYGQKQIKESDHQRSYYKCAYTNDQKCEAKKQVQMIQNNPPLYSTTYFGRHTCQLHQAFETFPIDTSDPQDSRMIRFDNPDSSTHQHQNQIIHLKAEQMMPSEKAEEWSSPSEYMSSEVAYAVEAFGFNPARTSSDLS

SEQ ID NO: 4303 - DNA, 1119 bp, Glycine max
  misc_feature (1)..(1119): Ceres Seq. ID no. 13595569
aattcctaagatgctgatcataattgtaataacaaagaccaatattttgtgtgtgccagtgagctagttaggtgttaaatatttgattgcaatattaatatgaaggcacagtgtgagtagtgagaaggggcattagtaaagaggatgggtagacgaccctgctgccccaaagagatcaacaaaggtgcttggtctcgagaagaagatgaaaccctctccaaatatgtttccatccatggagaaggaaaatggcagaaggttgcccaaaatgcagggttaaagcgatgtggaaagagttgcagacaaagatggttgaattatctcaagcccggtataaaaagaggccacatctctgtggatgaagaggatatgattataagacttcatcgtcttcttggtaacagataggcattgattgcaaagaggctacctggacgaacagacaatgaaatcaagaactattggaacacaaatctgtcaaagaagttacaaaaacatccaacatcatcagtttcttcacttcaacacaaacgtcatgaaaaagaaaaaaccatacaaatgcatgtatcacccgaagcaccacggcctaggagagttaatgcagttgaatacagtaaaaatttggagaatggtgggtgtggaaatagacctagtacaactcccagtccctcaaataaagtagagggtagtagtgaagaagcttcttttagtgatttcctcatccacgacattgatcaaaaccaatttttgattgctgatgattcaaactcaaaggtgccacaaatggaagaagatcaccaccacaacaacaaggtggaattaataaccaacaacagtcctagctcttcatcaccttctgatcattgtcaccatctcttgccagagaaatttgacccttttgagacccttttggatgtggagctggcttcctttcttggatttgaaaatgattgatcaagagattttatttattattattgcatgcagtgagatgaatgaaaaaaggtcaagtacttagggagtgttatagataatatcccatctatatatggaatgcctaactaattatgcatctagctatagctagatgtaatatacaaatccagggtttctttttcg

SEQ ID NO: 4304 - protein, 131 aa, Glycine max
  misc_feature (1)..(131): Ceres Seq. ID no. 13595570
MHVSPEAPRPRRVNAVEYSKNLENGGCGNRPSTTPSPSNKVEGSSEEASFSDFLIHDIDQNQFLIADDSNSKVPQMEEDHHHNNKVELITNNSPSSSSPSDHCHHLLPEKFDPFETLLDVELASFLGFEND

SEQ ID NO: 4305 - protein, 87 aa, Glycine max
  misc_feature (1)..(87): Ceres Seq. ID no. 13595571
MGRRPCCPKEINKGAWSREEDETLSKYVSIHGEGKWQKVAQNAGLKRCGKSCRQRWLNYLKPGIKRGHISVDEEDMIIRLHRLLGNR

SEQ ID NO: 4306 - protein, 78 aa, Glycine max
  misc_feature (1)..(78): Ceres Seq. ID no. 13595572
MKSRTIGTQICQRSYKNIQHHQFLHFNTNVMKKKKPYKCMYHPKHHGLGELMQLNTVKIWRMVGVEIDLVQLPVPQIK

SEQ ID NO: 4307 - DNA, 1259 bp, Glycine max
  misc_feature (1)..(1259): Ceres Seq. ID no. 13595576
actgaaccactcctactcacaaagactaccactataaaatggacatagttcaattgcaccaaagcaacaaaaaatgaatgaaagaggaaagaagaagaagcatgttagggaaccaccttcagttcctttcatatgggaagtaaagccaggcattcctaagaaagattggaagccagaggcagagatccctataaccccactcaaactaattgcctcagttccctttgtttgggaagaaaagccaggaaaaccccttcccaatttctcagtggaccacccagtgccttcaaagccattacttattcatgtagcatcttcttcaggattttctgttgcatgcaactttggccatgatgacaaagagaaaggaagcttaagcttaagcagcagtgacaatgaaagcataactaccttagaccttgaagcatttagctttgatgaagatgagtcttttattagttcagttccctcattgcttgcaaattgtcttgtaccatcagcaaaagttcccactgccattccactgagggaaaccaccccatcctcaccaacctcctcagagacagacagtggcacaagcagctatgcaacaggcttatcaagtccaattggtgctactttccttgagtgtctatttcctttgtatccacctaagtcttgcttccttgaaagtgatgagaatttggaaaaagtaacttcaagtgcacaagaactaagaaagaaagagcttgatcttgaagattgtgccggtgactcggtaaggaggccaccaacacttggagagctgattatgatgagccgaagaagaagctgcagaaggaaagcagtacaaatgaaaaaatgggatccaccaaagaaaatcacaagaaagcaagcttttggatgcttctccgttgtaactgacaacaatatgattgaagggctgctaaagagaaagtattttcccagactgaaactggtatagacttgacaggatcaatgatacagaagagaagtaccaaaactgctctagaactaaattcctatcaggctatggattataaaccaacctctcttgatttagtttgtcgagtctgttgcaatttacgggtttcatttgttaagaatttcgaaagtggattgtcaaagaatatatcttcatcaatcatttccataagatagctcatactcctcatagcagaacttctacttaccactatgtacgtgtacattgttcttccttggacaagaaagtattacttttttcttcagttattctc

SEQ ID NO: 4308 - protein, 296 aa, Glycine max
  misc_feature (1)..(296): Ceres Seq. ID no. 13595577
MNERGKKKKHVREPPSVPFIWEVKPGIPKKDWKPEAEIPITPLKLIASVPFVWEEKPGKPLPNFSVDHPVPSKPLLIHVASSSGFSVACNFGHDDKEKGSLSLSSSDNESITTLDLEAFSFDEDESFISSVPSLLANCLVPSAKVPTAIPLRETTPSSPTSSETDSGTSSYATGLSSPIGATFLECLFPLYPPKSCFLESDENLEKVTSSAQELRKKELDLEDCAGDSVRRPPTLGELIMMSRRRSCRRKAVQMKKWDPPKKITRKQAFGCFSVVTDNNMIEGLLKRKYFPRLKLV

SEQ ID NO: 4309 - DNA, 1334 bp, Glycine max
  misc_feature (1)..(1334): Ceres Seq. ID no. 13595578
atgaatcttctgatcagttcggttgctgcattgctcatattggagtttttggttatgagcttctttgatcggaagctttatacctggtgctttttggcccttgggatactagcttcagtttgtggagccttttctattgaagctagccctgctgttgcaatatacacatggctcgcatgctggttcctgtctgtattcacattgatgccagctgaaattccagagaacaacaacttagtaatttttagtggggcacttataatactgatcgcaatggcttcgagatgggcgaccatcaataccactaccttttggttgtatcttaatcgagcaaacaaacaagcccctaaatcctccatgttattttccgttcaggttattttgatctcagtgtcttcaataatggtgtggttaactacatctcatcggtcccagcacaaagaactgcacccgttgcaccagttgatcaactggtgcgtagctgctatgaagcggttttctatagtgcttttgcgctggtactcatgggatggatatttcttgaatctgccaacttgttttgctctgaaggaagcaattcttcatgccacagtagccttgcggatggatcagtttatggctatgacgaaagatgcttacaactatctgatttacgaatccctctgttatttatgatcttattcaatgttgctttctttggaactggtaattttgcaagtattgcaagctttgagatctcatctgtgtacagattcatcacaatatttagtccatttcttatgacggcacttcttattttcaaattgttcattccatatatgcttgtcatatgtacatttagtgccataaccaagattgtacggattccacgtatcggttgttattttcttgtaatactgctttcagatgtgatgacaattcatttcttttttctggtccaaaacacagggagctggatggagattggcaacagcattagtcattttggaattgtgagtgcacaagtagtcttcgtgttgctgctttttgcactcacaaatatatacacaaaagatatcgaagtctcgtctcggcaattaacctcgcgaaaatttatgtgaattgatctgactttatatagattttgcagaatgtatccatttttgtagaactaacttatgggctgtgtttttacatgtggcctaagttttgggactaagctcttgtagtttatatatgttcattgtattgggtggattaacttgtttacccatgtcgtttcttagagacagaagtgcctgcttaaagacataatctggccacgacatcatgaatttgttaatgcaaattgtcgc

SEQ ID NO: 4310 - protein, 224 aa, Glycine max
  misc_feature (1)..(224): Ceres Seq. ID no. 13595579
MNLLISSVAALLILEFLVMSFFDRKLYTWCFLALGILASVCGAFSIEASPAVAIYTWLACWFLSVFTLMPAEIPENNNLVIFSGALIILIAMASRWATINTTTFWLYLNRANKQAPKSSMLFSVQVILISVSSIMVWLTTSHRSQHKELHPLHQLINWCVAAMKRFSIVLLRWYSWDGYFLNLPTCFALKEAILHATVALRMDQFMAMTKDAYNYLIYESLCYL

SEQ ID NO: 4311 - protein, 206 aa, Glycine max
  misc_feature (1)..(206): Ceres Seq. ID no. 13595580
MSFFDRKLYTWCFLALGILASVCGAFSIEASPAVAIYTWLACWFLSVFTLMPAEIPENNNLVIFSGALIILIAMASRWATINTTTFWLYLNRANKQAPKSSMLFSVQVILISVSSIMVWLTTSHRSQHKELHPLHQLINWCVAAMKRFSIVLLRWYSWDGYFLNLPTCFALKEAILHATVALRMDQFMAMTKDAYNYLIYESLCYL

SEQ ID NO: 4312 - protein, 191 aa, Glycine max
  misc_feature (1)..(191): Ceres Seq. ID no. 13595581
MGWIFLESANLFCSEGSNSSCHSSLADGSVYGYDERCLQLSDLRIPLLFMILFNVAFFGTGNFASIASFEISSVYRFITIFSPFLMTALLIFKLFIPYMLVICTFSAITKIVRIPRIGCYFLVILLSDVMTIHFFFLVQNTGSWMEIGNSISHFGIVSAQVVFVLLLFALTNIYTKDIEVSSRQLTSRKFM

SEQ ID NO: 4313 - DNA, 803 bp, Glycine max
  misc_feature (1)..(803): Ceres Seq. ID no. 13595582
acatcctaatcgaaaaaaaacctatttagtgtaagaaatagctaggttccacacagctgggttttgtactaaggcaagccattcattcggtgtgacagtccctgagactcgagagactgttgccgccggtattaattctcctcctcctcctccttcttcttcttctccccaaaaccctaatttcttctattcaccaaatcatattcatggctgaacacaacgacccaccccaagaacccacattgccctccaagcgcatgtccgatcccgacctccaagacctcccttccaaaatccccaagctcgacctcaaagaaacactacccactgcaaacgacaacgacctccaaaacgacgatgaagatgacgacgacaacgacgacgacgaggaggagcaggaggataaccgaaagggaaaggggattatgcgtgacgacaagggcaaagggaaaatgattgtagaagaagaagacgacgacgacgatgattccgacgaggatagtgctagcgacgacgacggaagcgatttctctaacgactcgctcacggaggtcgatttgaataacattctgccgtccaggactcgggggcggacggtgagttccggagtgcacattgccggtgactcggggaatgctgctgctgccgtggccgcgggcattgacgacgaagatagcgacagcgacgatagcgatgcttgaattcctgccgaggttagtgagggtttgggaggaaacggaaatggattagttctgttgttgactatgagaaagaagtgtttctttagatttttctttgagccc

SEQ ID NO: 4314 - protein, 164 aa, Glycine max
  misc_feature (1)..(164): Ceres Seq. ID no. 13595583
MAEHNDPPQEPTLPSKRMSDPDLQDLPSKIPKLDLKETLPTANDNDLQNDDEDDDDNDDDEEEQEDNRKGKGIMRDDKGKGKMIVEEEDDDDDDSDEDSASDDDGSDFSNDSLTEVDLNNILPSRTRGRTVSSGVHIAGDSGNAAAAVAAGIDDEDSDSDDSDA

SEQ ID NO: 4315 - protein, 147 aa, Glycine max
  misc_feature (1)..(147): Ceres Seq. ID no. 13595584
MSDPDLQDLPSKIPKLDLKETLPTANDNDLQNDDEDDDDNDDDEEEQEDNRKGKGIMRDDKGKGKMIVEEEDDDDDDSDEDSASDDDGSDFSNDSLTEVDLNNILPSRTRGRTVSSGVHIAGDSGNAAAAVAAGIDDEDSDSDDSDA

SEQ ID NO: 4316 - protein, 91 aa, Glycine max
  misc_feature (1)..(91): Ceres Seq. ID no. 13595585
MRDDKGKGKMIVEEEDDDDDDSDEDSASDDDGSDFSNDSLTEVDLNNILPSRTRGRTVSSGVHIAGDSGNAAAAVAAGIDDEDSDSDDSDA

SEQ ID NO: 4317 - DNA, 635 bp, Glycine max
  misc_feature (1)..(635): Ceres Seq. ID no. 13595610
gatgaagaccgaatccccgcgtcatcttcgtaaccctctgctcgtcctcctcttcctcgcagcagcagcagcagcgtcggcagcccccgtcgtccagatcgccatggcggccgagccggagcaggcgcccgcggcgcaggaggcggccgtgcacatcgtctacgtggaccgccccgaggacgccgaccccgaggagttccacatccgcacccttgcccccgtcctcggcagcgaggagaaggccaggggcgcggtcctctaccactacaagcacgccgccagcggattctccgcaaagctcaccaccgagcaggtcgaggacctcaagaagcaaccaggtgtccttcaggttgtgccgagccagacctaccagctccatggaaatgagggtggacatgccagcacaacccgcaccatgggccttatgtgaaagccccgggtaggctctgttcttctaatgtgggaatggtcgcatctcatggctgtaacctaagaataagagatgtatccacttgactttgaagggatccagttcctgaagtgtgtaaatgtaatgaattaatgcatgatggcgaacaaatgtgctgatctaatctcgtttggctacaagtttgaattaatgtgatggcaaactc

SEQ ID NO: 4318 - protein, 142 aa, Glycine max
  misc_feature (1)..(142): Ceres Seq. ID no. 13595611
MKTESPRHLRNPLLVLLFLAAAAAASAAPVVQIAMAAEPEQAPAAQEAAVHIVYVDRPEDADPEEFHIRTLAPVLGSEEKARGAVLYHYKHAASGFSAKLTTEQVEDLKKQPGVLQVVPSQTYQLHGNEGGHASTTRTMGLM

SEQ ID NO: 4319 - protein, 108 aa, Glycine max
  misc_feature (1)..(108): Ceres Seq. ID no. 13595612
MAAEPEQAPAAQEAAVHIVYVDRPEDADPEEFHIRTLAPVLGSEEKARGAVLYHYKHAASGFSAKLTTEQVEDLKKQPGVLQVVPSQTYQLHGNEGGHASTTRTMGLM

SEQ ID NO: 4320 - DNA, 1428 bp, Glycine max
  misc_feature (1)..(1428): Ceres Seq. ID no. 13595616
gaacatcctaatcgaaaaattttttttcccttatttttcttaaatatttttatggctccggagtcaaaagttcctggagcaagtagaaagaagaaagcgagtgacgagggaaacgtttaaaccatatatgttttgttgtttctagctccattctatagcaatggccacgtctgttcttagtcctcctttctttcatcctctgcatcaacttcaattctcgaaatgcccccgcctttcttctaaatcccactttcgccctcgcctcctccgctccatatcccaaagaaccattcgcgctatctccgcagttgccgcagaatcagagttaggtacacagcaggatcatgcaattgaagcagacatctttgcttgccctgtatgttatgaaccattgataagaaaaggtccttctggccttaacttgtctggtttcatgtgtaagagatgtaagaagacatattctagcaaagataggtatctggatctgactgtaactgctggattgagagactacactgaaattcaacctgctcggactgagcttttcaggagtcccctggtttcattcttgtatgaaagaggttggcgtcagaatttcaggcaaagtggctttcctggtcctgatgaagagttcaaaatggctcaagagtactttgaatctgctgaaggtggacttcttgttgatgttagctgtggtagtggtttattttcccgaaaattcgccaaatctggaacatattcgggagtcatagcactagatttttctgagaatatgcttcgtcaatgttatgatttcattgagaaagataacacactttcaacaaataatattgctcttgtaagggcagatgtttctagacttcccttctcatcaggttcggttgatgctgttcatgctggtgcagctttgcattgctggccatctccctccaatgctgttgctgaaatcacccggacactaaaaaatggtggagtatttgttgggagcacttttctgcgttatagttcaaaaactccctggtttttacgccctttcagggagaggactccacaaggctatggctatctaacagaggaagagatcaaagacctttgcacctcatgtggtcttaccaattactcaagcaaaattcagcaggcttttattatgttcacagctcagaagccataaaactgggtctgatctatttataacattgattctccactgcattttatcaattccttctgtatgtatgtattgtatcacttgtttcatctgtaaagaagaaattgtaaataaatgagaaatgaaaaggtcaaaacctgagtccggtgtgttcgcaggttgtaaaatgcatcgtgtatcagtgcctaataatatatccaaattctgacaatttttgtaaagaatatatattttgttggcttaaatatatttttggttct

SEQ ID NO: 4321 - protein, 336 aa, Glycine max
  misc_feature (1)..(336): Ceres Seq. ID no. 13595617
MATSVLSPPFFHPLHQLQFSKCPRLSSKSHFRPRLLRSISQRTIRAISAVAAESELGTQQDHAIEADIFACPVCYEPLIRKGPSGLNLSGFMCKRCKKTYSSKDRYLDLTVTAGLRDYTEIQPARTELFRSPLVSFLYERGWRQNFRQSGFPGPDEEFKMAQEYFESAEGGLLVDVSCGSGLFSRKFAKSGTYSGVIALDFSENMLRQCYDFIEKDNTLSTNNIALVRADVSRLPFSSGSVDAVHAGAALHCWPSPSNAVAEITRTLKNGGVFVGSTFLRYSSKTPWFLRPFRERTPQGYGYLTEEEIKDLCTSCGLTNYSSKIQQAFIMFTAQKP

SEQ ID NO: 4322 - protein, 245 aa, Glycine max
  misc_feature (1)..(245): Ceres Seq. ID no. 13595618
MCKRCKKTYSSKDRYLDLTVTAGLRDYTEIQPARTELFRSPLVSFLYERGWRQNFRQSGFPGPDEEFKMAQEYFESAEGGLLVDVSCGSGLFSRKFAKSGTYSGVIALDFSENMLRQCYDFIEKDNTLSTNNIALVRADVSRLPFSSGSVDAVHAGAALHCWPSPSNAVAEITRTLKNGGVFVGSTFLRYSSKTPWFLRPFRERTPQGYGYLTEEEIKDLCTSCGLTNYSSKIQQAFIMFTAQKP

SEQ ID NO: 4323 - protein, 177 aa, Glycine max
  misc_feature (1)..(177): Ceres Seq. ID no. 13595619
MAQEYFESAEGGLLVDVSCGSGLFSRKFAKSGTYSGVIALDFSENMLRQCYDFIEKDNTLSTNNIALVRADVSRLPFSSGSVDAVHAGAALHCWPSPSNAVAEITRTLKNGGVFVGSTFLRYSSKTPWFLRPFRERTPQGYGYLTEEEIKDLCTSCGLTNYSSKIQQAFIMFTAQKP

SEQ ID NO: 4324 - DNA, 1378 bp, Glycine max
  misc_feature (1)..(1378): Ceres Seq. ID no. 13595651
agaacatcctaatcgaaaaaaaaagatttgtgatatctctctctcagtgacacccaaactcaaaacacactcaaacaatctctgttcactttaacaatggcggttttgttgcctccaacattctccccacttctactaaacaccaagacagattttgggtcaccaccatttcctcttctcaccctctcctcctcctcacccacctcctcacccctcttcgtctcttacaccaaatccggaaatgggttggccagtgaggacaaaaaaatcttgcttgagaagtatggctacgatattgatgctgatgagtacttttcacagtcatcttctaagtccaagaggagaaaggagcaaccaaggagaagaggagggaagcaagtgcaggacccaccagaggaccctaagcctcctcgtgtaacccataaattgcttcaggttcttggaggaacagctcgaagagtgaagctactttcaccaaagggcatggatgtgcgccccatgatggaagtggtgaaaggtgcagcctttgatatattacaggcagctggtggctgtcctgcagcattgagacctggtcgctggttagacttgtatagcggtacaggttctgttggaattgaagcacttagccgaggatgttctcaggtgcattttgttgagatggatccgtgggttgtatcagatgttttacgtccaaacctggaggaaactggattcctagatgcttcagtcatacatactgtccgtgtagaaaaattctttgagcgtgcagagcaatttgtaggaaacagtggcccatttgattacattagtgtcacccctccatatacacaagttgactatggggtgctgatgaggcagatatcagaatcatccttgattggagagaacacgtttattgtagttgagtatcctttaaaaactgacatgctggattcttgtggaagtcttgtaaagataaccgacagacggtttggacggacactcttggcaatttatggaccaacatggtcccagaagaagaggagatgacacattcaaatgcctaagttgcagtaaaggctgaaaaacatgctggtgcaatatttatctgttacagtggtcaacaggaattagtttttggcacctacctcacttcttcaaaagctgttatacacagtctaatgttggtccctgcaacaggtcatgtcttgtaatgttaatcataaaatcttgcattctttgttataatgtgacccatcttcagctgaaaattgattattaaatctagattaaggtttcattaccaacagtgttgatcacagtagaagtggattgtgattgtaggtgaactttatctaccatattagtgaaatcatcactctaatcattctatttc

SEQ ID NO: 4325 - protein, 311 aa, Glycine max
  misc_feature (1)..(311): Ceres Seq. ID no. 15221630
MAVLLPPTFSPLLLNTKTDFGSPPFPLLTLSSSSPTSSPLFVSYTKSGNGLASEDKKILLEKYGYDIDADEYFSQSSSKSKRRKEQPRRRGGKQVQDPPEDPKPPRVTHKLLQVLGGTARRVKLLSPKGMDVRPMMEVVKGAAFDILQAAGGCPAALRPGRWLDLYSGTGSVGIEALSRGCSQVHFVEMDPWVVSDVLRPNLEETGFLDASVIHTVRVEKFFERAEQFVGNSGPFDYISVTPPYTQVDYGVLMRQISESSLIGENTFIVVEYPLKTDMLDSCGSLVKITDRRFGRTLLAIYGPTWSQKKRR

SEQ ID NO: 4326 - protein, 182 aa, Glycine max
  misc_feature (1)..(182): Ceres Seq. ID no. 15221631
MDVRPMMEVVKGAAFDILQAAGGCPAALRPGRWLDLYSGTGSVGIEALSRGCSQVHFVEMDPWVVSDVLRPNLEETGFLDASVIHTVRVEKFFERAEQFVGNSGPFDYISVTPPYTQVDYGVLMRQISESSLIGENTFIVVEYPLKTDMLDSCGSLVKITDRRFGRTLLAIYGPTWSQKKRR

SEQ ID NO: 4327 - protein, 177 aa, Glycine max
  misc_feature (1)..(177): Ceres Seq. ID no. 15221632
MMEVVKGAAFDILQAAGGCPAALRPGRWLDLYSGTGSVGIEALSRGCSQVHFVEMDPWVVSDVLRPNLEETGFLDASVIHTVRVEKFFERAEQFVGNSGPFDYISVTPPYTQVDYGVLMRQISESSLIGENTFIVVEYPLKTDMLDSCGSLVKITDRRFGRTLLAIYGPTWSQKKRR

SEQ ID NO: 4328 - DNA, 1242 bp, Glycine max
  misc_feature (1)..(1242): Ceres Seq. ID no. 13595660
aagaatgaatgaaaggcattagaaatcagtgaccggcgtgagagagcaaagatggtggttcttggcaccacctcaccttcaatttcctgcttgccgtcttcaactcaaaccgactacaaggcgcgtcgatactgttcttttccgcaacgcccacgcccacgcccacgcgcttcacgtttcttttgcggattccctttcgctccaaatgccatccattctccttctctgtctgtgacgaatgaagcactgaatgttatgatttctggggctcctgcttctggtaaaggaacccagtgccacctcatcaccaacaagtacggtttggttcatattgctgctggagatttacttagggcagaaattgccactggaagtgataatggaaagcgagccaaacagtatatggagaagggacagttggtccctgacgaaattgttgtgatgatggttaaggagcgtctcttgaaaccagattcgaaagagaatggttggcttttggatggatatcccatgagcttatcacaggccactgcacttgaggctcttggctttcggcctcatatttttcttcttcttgaggtttctgaagatgttcttgtggagagagtagttggacggagattagatcctgttaccggcaagatatatcacttgaagtattctcctccagagacacaagaaatagccgcaaggcttacccaacgctttgatgatacagaagaaaaggtgaaattgcgattgaatacccatcatcaaaatgtggagtcagtcctttccatgtacaaagacataactgttaagattaacggaaatgtctcaaaggaggaagtatttgctcaaattgatagtgcactgacaagtcttatagaggaaaggaaggctgcttcaggatctgtggcagcatagaagacccatcttttgacattttgatctagcatggtgcgttgctggtggtagtggattttaaatgatttatttatagagttaaacaaaagagtcttcactcaaactaagctgcattttctcgtgaagattgtctcacggcttatatcctcccatttggaaagcaatgtgatgattggcttggaccatgcatgaggacctgtgatagtgtagtgcgcagtatattttacaaatttattttttatgagaaaatgattaccttaaattaaaatcgtttttatgtaatgactagcttgtaaatgcaggattttgtgaattatcgtttgttggtttcctgtt

SEQ ID NO: 4329 - protein, 284 aa, Glycine max
  misc_feature (1)..(284): Ceres Seq. ID no. 13595661
MVVLGTTSPSISCLPSSTQTDYKARRYCSFPQRPRPRPRASRFFCGFPFAPNAIHSPSLSVTNEALNVMISGAPASGKGTQCHLITNKYGLVHIAAGDLLRAEIATGSDNGKRAKQYMEKGQLVPDEIVVMMVKERLLKPDSKENGWLLDGYPMSLSQATALEALGFRPHIFLLLEVSEDVLVERVVGRRLDPVTGKIYHLKYSPPETQEIAARLTQRFDDTEEKVKLRLNTHHQNVESVLSMYKDITVKINGNVSKEEVFAQIDSALTSLIEERKAASGSVAA

SEQ ID NO: 4330 - protein, 216 aa, Glycine max
  misc_feature (1)..(216): Ceres Seq. ID no. 13595662
MISGAPASGKGTQCHLITNKYGLVHIAAGDLLRAEIATGSDNGKRAKQYMEKGQLVPDEIVVMMVKERLLKPDSKENGWLLDGYPMSLSQATALEALGFRPHIFLLLEVSEDVLVERVVGRRLDPVTGKIYHLKYSPPETQEIAARLTQRFDDTEEKVKLRLNTHHQNVESVLSMYKDITVKINGNVSKEEVFAQIDSALTSLIEERKAASGSVAA

SEQ ID NO: 4331 - protein, 167 aa, Glycine max
  misc_feature (1)..(167): Ceres Seq. ID no. 13595663
MEKGQLVPDEIVVMMVKERLLKPDSKENGWLLDGYPMSLSQATALEALGFRPHIFLLLEVSEDVLVERVVGRRLDPVTGKIYHLKYSPPETQEIAARLTQRFDDTEEKVKLRLNTHHQNVESVLSMYKDITVKINGNVSKEEVFAQIDSALTSLIEERKAASGSVAA

SEQ ID NO: 4332 - DNA, 1529 bp, Glycine max
  misc_feature (1)..(1529): Ceres Seq. ID no. 13595665
aataacttagatgggttgggaatgagggtagtggcgagacagtgagagggtggaaatggcggctgtggcagcgagaagcacaggcagcgttggtgttggtgctgtcatcttcatctcagtcgctctcaccacttatttcatctcgaaaaagaagaagaagaagaagaaggaatccaggaagaagaagaagggactggtggacgccataggcaacactcctttgattcggatcaacagcctctccgccgccactggttgccaaattctcggcaagtgcgagttcttaaaccccggaggcagcgtcaaagaccgcgttgctgttcaaattattcaagaggctctagaatctggccagctacgtccaggtggaatagtcactgaagggagtgctggaagcactgccattagcattgccactgttgctcctgcctacgggtgcaggacccatgtggttataccagatgatgctgccattgagaagtctcaaatacttgaagcccttggggcaactgttgaaagagtgagaccggtgtccatcacccacaaagaccattttgtcaatattgcaagaagacgggcatctgaagcaaatgagtttgcattgaagcgtagaaattcacaacaattgaatggcaaggaggacaccgagaaaataaatggttatgaatctaatggatgcaattacagctctctgtttcctgaagattgtcaaggtggcttttttgctgatcagtttgagaacctagcgaacttcagggcccattatgagggtacagggcctgagatttgggaacagaccaatggaaagttagatgcatttgttgcagcagcgggtaccggtggtactgtggctggtgtttctaagtttcttcaggaaaagaatccaaacatcaagtgcttcctcttagatcctcctggctctggtttgtttaataaggtaactaggggagtgatgtacaccaaagaggaggcagaaggaagaagactcaagaatccatttgacactataacagaaggaattggaattaacaggataacaaggaattttgcaatggcaaaacttgatggggcctttagaggcaccgatagggaagctgttgaaatgtctaggtttcttttgaagaacgatggtctcttccttgggagttcttctgcaatgaactgtgttggagcagttagagtagcgcaagcaattggcactggtcacacaattgtaaccattctctgcgacagtggaatgagacatttgagcaaattctatgatgctgaatacttgtctcagcttggtttgacaccgaaagcaattggtttggagttcttaggcgtcaagtgagaaggtttcttcagagtttaaaattttaatgccactgccttggatgagagtggccacctagaagttagaactgagggtgttgtagttattgatatagaagatattacacttattaatacaatgttttggggatattacatggctcattctttgttagtctttcatggtttattgatttattaactaggccaagatg

SEQ ID NO: 4333 - protein, 425 aa, Glycine max
  misc_feature (1)..(425): Ceres Seq. ID no. 13595666
MAAVAARSTGSVGVGAVIFISVALTTYFISKKKKKKKKESRKKKKGLVDAIGNTPLIRINSLSAATGCQILGKCEFLNPGGSVKDRVAVQIIQEALESGQLRPGGIVTEGSAGSTAISIATVAPAYGCRTHVVIPDDAAIEKSQILEALGATVERVRPVSITHKDHFVNIARRRASEANEFALKRRNSQQLNGKEDTEKINGYESNGCNYSSLFPEDCQGGFFADQFENLANFRAHYEGTGPEIWEQTNGKLDAFVAAAGTGGTVAGVSKFLQEKNPNIKCFLLDPPGSGLFNKVTRGVMYTKEEAEGRRLKNPFDTITEGIGINRITRNFAMAKLDGAFRGTDREAVEMSRFLLKNDGLFLGSSSAMNCVGAVRVAQAIGTGHTIVTILCDSGMRHLSKFYDAEYLSQLGLTPKAIGLEFLGVK

SEQ ID NO: 4334 - DNA, 1076 bp, Glycine max
  misc_feature (1)..(1076): Ceres Seq. ID no. 13595668
atctctcccccacgttttccacccaccagacactcccacggctgccggcaatggcggcggcggcggagcaggactactggggcctgttccgggaggagacgggctggtacaacgagatcttcctcagcgccgtcgtgccgggcggcggcggctggtggcgggcgctgccgcacccgctccgctcctggctgcgcaactgcatcggcggctacctcctctacttcgccaccggcttcctctggtgcttcgtcatctactactggaagcgcaacgcctacatccccaaagatgctgtccctacagtagaagctatgaagaagcaaataattgttgcatcaaaggctatgccgttctactgtgctcttccgtccatatctgagcacatgattgagagtggatggacacggtgtttttttcatatcagtgaagttggttggcctatgtacattgtctatgtgtctctatatctcatctttgtggagttcggaatttactggatgcacagagagttgcatgacataaagccactatacaagcacctacatgcaacccaccacatttacaacaaggagaataccctatcaccatttgctggactagcattccatccattggacgggatactgcaagccatatcgcacgtgattgctctgttccttctgccgatgcacttcaggacgcacattgctctgttattcatagaggcggtgtggacggccaacatccatgactgcatccacggcaagatctggccagtgatgggtgccggctaccacaccatccaccacacgacgtaccggcacaactatggccactacaccgtgtggatggactggctgtttggcaccctccgcgagccggaggatctcctcaagaaggactgagctcgtgtgagcgcggtctttcctgtctctgtagcaatgtgaagtgtagtagaagtgttaaggcttaaccctccatctgttctcttattctgctgaaagatgtttgttgtggtgtttacgacagttagcggtgtgctgtttcagtctccgtccggtaggtggaaataataaggttgttcatttaccagacat

SEQ ID NO: 4335 - protein, 293 aa, Glycine max
  misc_feature (1)..(293): Ceres Seq. ID no. 13595669
LSPTFSTHQTLPRLPAMAAAAEQDYWGLFREETGWYNEIFLSAVVPGGGGWWRALPHPLRSWLRNCIGGYLLYFATGFLWCFVIYYWKRNAYIPKDAVPTVEAMKKQIIVASKAMPFYCALPSISEHMIESGWTRCFFHISEVGWPMYIVYVSLYLIFVEFGIYWMHRELHDIKPLYKHLHATHHIYNKENTLSPFAGLAFHPLDGILQAISHVIALFLLPMHFRTHIALLFIEAVWTANIHDCIHGKIWPVMGAGYHTIHHTTYRHNYGHYTVWMDWLFGTLREPEDLLKKD

SEQ ID NO: 4336 - protein, 277 aa, Glycine max
  misc_feature (1)..(277): Ceres Seq. ID no. 13595670
MAAAAEQDYWGLFREETGWYNEIFLSAVVPGGGGWWRALPHPLRSWLRNCIGGYLLYFATGFLWCFVIYYWKRNAYIPKDAVPTVEAMKKQIIVASKAMPFYCALPSISEHMIESGWTRCFFHISEVGWPMYIVYVSLYLIFVEFGIYWMHRELHDIKPLYKHLHATHHIYNKENTLSPFAGLAFHPLDGILQAISHVIALFLLPMHFRTHIALLFIEAVWTANIHDCIHGKIWPVMGAGYHTIHHTTYRHNYGHYTVWMDWLFGTLREPEDLLKKD

SEQ ID NO: 4337 - protein, 190 aa, Glycine max
  misc_feature (1)..(190): Ceres Seq. ID no. 13595671
MKKQIIVASKAMPFYCALPSISEHMIESGWTRCFFHISEVGWPMYIVYVSLYLIFVEFGIYWMHRELHDIKPLYKHLHATHHIYNKENTLSPFAGLAFHPLDGILQAISHVIALFLLPMHFRTHIALLFIEAVWTANIHDCIHGKIWPVMGAGYHTIHHTTYRHNYGHYTVWMDWLFGTLREPEDLLKKD

SEQ ID NO: 4338 - DNA, 668 bp, Glycine max
  misc_feature (1)..(668): Ceres Seq. ID no. 13595695
tttttatgaggcagtatacatgggacaaacaccttgaaacttgggtgaagacctcaggcatccttggtggacccaagaacacttctccaactgtgatatcaccacagcagtacaagaaacggtttaggaaagccatgagcttatattttcttatggtgccagatcaatggtcccctccagagttacaccccagtgggtcccaatctgacatttgtgacgaaaatgcgtgaggcatgggactcatttcattgatgtggtcaaagtttgaatcttgtaaatgttaccattccagcatacatcattgacacgggtctctccttccttatgcccttaatatttgtctcctgcataatgcagctgctgttgatttgtgtcccttaagcaatggaggtgcacctcctgttaccagagattgttgaaagggtaactaagtgtacagcgattctcctcctctttcttttttatacatttttttatatcatgtatttaatctcttgctttcataatctgtcgtaaatttgatttaaagttcacaacctattattgaattgcacaccgcgtttctttttctacgcatgtgaaaggcgttgataaattcttacctcactgttatatgacccgtgtgaaagtatatatttgaaaattgtttctttctaaaaaaaaaaaaa

SEQ ID NO: 4339 - protein, 75 aa, Glycine max
  misc_feature (1)..(75): Ceres Seq. ID no. 13595696
FMRQYTWDKHLETWVKTSGILGGPKNTSPTVISPQQYKKRFRKAMSLYFLMVPDQWSPPELHPSGSQSDICDENA

SEQ ID NO: 4340 - protein, 74 aa, Glycine max
  misc_feature (1)..(74): Ceres Seq. ID no. 13595697
MRQYTWDKHLETWVKTSGILGGPKNTSPTVISPQQYKKRFRKAMSLYFLMVPDQWSPPELHPSGSQSDICDENA

SEQ ID NO: 4341 - protein, 43 aa, Glycine max
  misc_feature (1)..(43): Ceres Seq. ID no. 13595698
MEVHLLLPEIVERVTKCTAILLLFLFYTFFYIMYLISCFHNLS

SEQ ID NO: 4342 - DNA, 823 bp, Glycine max
  misc_feature (1)..(823): Ceres Seq. ID no. 13595723
atgctgtagcaaaccaaggtgtgaacactgaggttcataaatcagaaagttcagatcaacgggtaacaagtctgggcagagtgcctcctgcgaaaatgaccatgtcaaatgaaacccgacatgctctgccaattgccctgaagaaactttttcagactcacaaagtttgcagcttcaaattgatatgcgaaggattgcgcgaaatggcagtttccaaagctatgctttcaaagggagattctaaaatggctgtggatgcagctcacagtcttgatggtccccataatgagttgatggctgtcataagtgaagttgcatgcgaaatcaatggttcttatgtgctgaagtcatcacccgatgatccattcagggatgttgtaattgatatgctttgtggaagtggacccaatgccaagctgaagaaggctgagatacttgaagctgccagaagaaaactcggtagggaggtcgctagcaatgaatataccaaggtcatgagcgagttatgtgtgtcaaaaggttctgtttgggtcttgaaaagcggtgatggaagtaagtaagcaatgatccgaggtccccgaggattgaactgcccacctgctcatgaatggaagtcatactctgctttctcatgagactaccagagtttagtttattggtcatagtcattattctcaaatattcaaatcttttccaactttttagctttagataaggaataaatttaaagagaatattttttattgttcgaatcaaaagaaaaaggtagagaagttagatgaaagaaaacaggaatggacaaagattgccctgttagctatta

SEQ ID NO: 4343 - protein, 185 aa, Glycine max
  misc_feature (1)..(185): Ceres Seq. ID no. 13595724
AVANQGVNTEVHKSESSDQRVTSLGRVPPAKMTMSNETRHALPIALKKLFQTHKVCSFKLICEGLREMAVSKAMLSKGDSKMAVDAAHSLDGPHNELMAVISEVACEINGSYVLKSSPDDPFRDVVIDMLCGSGPNAKLKKAEILEAARRKLGREVASNEYTKVMSELCVSKGSVWVLKSGDGSK

SEQ ID NO: 4344 - protein, 154 aa, Glycine max
  misc_feature (1)..(154): Ceres Seq. ID no. 13595725
MTMSNETRHALPIALKKLFQTHKVCSFKLICEGLREMAVSKAMLSKGDSKMAVDAAHSLDGPHNELMAVISEVACEINGSYVLKSSPDDPFRDVVIDMLCGSGPNAKLKKAEILEAARRKLGREVASNEYTKVMSELCVSKGSVWVLKSGDGSK

SEQ ID NO: 4345 - protein, 152 aa, Glycine max
  misc_feature (1)..(152): Ceres Seq. ID no. 13595726
MSNETRHALPIALKKLFQTHKVCSFKLICEGLREMAVSKAMLSKGDSKMAVDAAHSLDGPHNELMAVISEVACEINGSYVLKSSPDDPFRDVVIDMLCGSGPNAKLKKAEILEAARRKLGREVASNEYTKVMSELCVSKGSVWVLKSGDGSK

SEQ ID NO: 4346 - DNA, 572 bp, Glycine max
  misc_feature (1)..(572): Ceres Seq. ID no. 13595741
atttttcatcccagattatgtgggacaagttcgatggattgacgatggattccgaggtcttcttcccatcccatttaattctaccctaggggggactgcatcagcaccaccatatttcaacaataaaaacatggcatcagacaaacaatatctccatgatgttgatgcttgtactttccttgtcgagctgcagctagagcggccttacctgactcgtggaagtgacttgtcaacatgggagcctattgctgcattgccttatctggacagggagctttcaccggcactgtataggtcctttttcattccttacctttggcaagagaagaatgtttttggaatgtataagctgcttaaaagaagaaccacctgattttctatttgggcgggggatggggcattagattgtcctagaatatggtggtggattaacaacaaaaccatttttgttagagacagtaagcttgtaggatttccctcatctgttgttgaatatttgatttagttctaatcttcttagattccccgagtgttgtctgatgtctttttcccacggaagcattcagtttatt

SEQ ID NO: 4347 - protein, 123 aa, Glycine max
  misc_feature (1)..(123): Ceres Seq. ID no. 13595742
FFIPDYVGQVRWIDDGFRGLLPIPFNSTLGGTASAPPYFNNKNMASDKQYLHDVDACTFLVELQLERPYLTRGSDLSTWEPIAALPYLDRELSPALYRSFFIPYLWQEKNVFGMYKLLKRRTT

SEQ ID NO: 4348 - protein, 80 aa, Glycine max
  misc_feature (1)..(80): Ceres Seq. ID no. 13595743
MASDKQYLHDVDACTFLVELQLERPYLTRGSDLSTWEPIAALPYLDRELSPALYRSFFIPYLWQEKNVFGMYKLLKRRTT

SEQ ID NO: 4349 - DNA, 1359 bp, Glycine max
  misc_feature (1)..(1359): Ceres Seq. ID no. 13595748
aaaattctgggagaattgaagaagccccgaattagatcggggtttgtggcaagagtgcaaattcgtgtctggagttttggtcaacagagagaaagtagggaaaagaaaaaaagcctcatcaccgacttcggcgaaatggatccgccgccggtaccgatccggtggcgcgcaaccgccatcccattctttgtgttggttctctttctatccaccatctccccttcgcgcgcaatctactgcgacgaagatgattgctacgatctacttggggttactcaaagtgccaatgcttccgaaatcaaaaaagcttactacaaactctccttgaagtatcacccggacaaaaaccctgatccggaatcgcgaaagctgtttgtaaaagtcgccaatgcttatgagattttgaaggatgaggccacgcgagagcaatatgattatgcaattgcacatccggaggaggtgttttataatactgcacgctattatcgggcttactatggtcacaagacggatccccgtgctgtgttggtcggccttcttcttattctttcaggttttcaatatctaaatcaatcaacaaggtataatcaggctgtagccatggtcaagaagacacctgcatataaaaataaactaagggcattggaacttgaacgcagtggaggggttacaaacaagaagaagagtcagaagaatatggacaagaaaacggaagaagaccttagcaaagaactcgatctgcagataactggagctgaaatgccctctgtatggaaacttcttggcgtccgctttgttctattaccgtataccttaggcaagctgctgttgtggactgcctgttggttttggagatacaaagtgaaaaagtacccttattccttggaagatgcttcttatctgacacaaagatccctcagtattcctctcgatagatggagaaatatagatgaagcaacaaaggaagatcttgtgctcagacgcttatgggagaaatcaaatctggagaactatgtagcagagatgcggaaagaatcaaagcgcagaagatagttgcattagtcggctctgccgcttttaaattactaaattttgttgcaaattgattttcggggtgggggtgataaaagcagaattattcgtggcaaccacgaaattgtggaatcatatacgtagtttattacgtttacacatgttattgttgctctctaacagtctgtaaacaatgaacaccaaagaatactgctttagatattgcttttattctttcaatgaatcgggtacataagcctcaatcttgctacaatcgcatgtttggtagtaattttgagtgcctctagttcaataattttaagggtt

SEQ ID NO: 4350 - protein, 350 aa, Glycine max
  misc_feature (1)..(350): Ceres Seq. ID no. 15221656
KILGELKKPRIRSGFVARVQIRVWSFGQQRESREKKKSLITDFGEMDPPPVPIRWRATAIPFFVLVLFLSTISPSRAIYCDEDDCYDLLGVTQSANASEIKKAYYKLSLKYHPDKNPDPESRKLFVKVANAYEILKDEATREQYDYAIAHPEEVFYNTARYYRAYYGHKTDPRAVLVGLLLILSGFQYLNQSTRYNQAVAMVKKTPAYKNKLRALELERSGGVTNKKKSQKNMDKKTEEDLSKELDLQITGAEMPSVWKLLGVRFVLLPYTLGKLLLWTACWFWRYKVKKYPYSLEDASYLTQRSLSIPLDRWRNIDEATKEDLVLRRLWEKSNLENYVAEMRKESKRRR

SEQ ID NO: 4351 - protein, 305 aa, Glycine max
  misc_feature (1)..(305): Ceres Seq. ID no. 15221657
MDPPPVPIRWRATAIPFFVLVLFLSTISPSRAIYCDEDDCYDLLGVTQSANASEIKKAYYKLSLKYHPDKNPDPESRKLFVKVANAYEILKDEATREQYDYAIAHPEEVFYNTARYYRAYYGHKTDPRAVLVGLLLILSGFQYLNQSTRYNQAVAMVKKTPAYKNKLRALELERSGGVTNKKKSQKNMDKKTEEDLSKELDLQITGAEMPSVWKLLGVRFVLLPYTLGKLLLWTACWFWRYKVKKYPYSLEDASYLTQRSLSIPLDRWRNIDEATKEDLVLRRLWEKSNLENYVAEMRKESKRRR

SEQ ID NO: 4352 - DNA, 884 bp, Glycine max
  misc_feature (1)..(884): Ceres Seq. ID no. 13595752
acctagaacatcctaatcgaaaaattatcattgccgttcattttccttcttatcactactcagacaataaacgcctcagtctctcatttcagggtgcaaaatcttccatgtataaatattactatgtgcttgcattaactgattgatttactccaaaatttaggttctaatgattataaaaggattgtttggaaggtacgaaagatggaaccctgttcatccaactcatggagccttttggggaatgggtgtgggcgttggttgtggtgtcggatggggtcctgggtttggccctgaagtgataggctatgttggagctggttgtggcattggattcaatgtaggcatcacttttgctggtgttggagttggcctacctgctaattttatctttgaaggtccatataatggggttagctggattggaaatttaccttgtatctctgacttgcaaagagaagccaatggaaaattgtttgaatttaggcaaaagcatttatcaataaagggaattaacttctttgacaagaagaacagcttgcctttgctcacttctgccagtaaaagtatacaagcattccgtaaccaaatattcagctctcataaagggaaagattgatgacttccaccactgtcagttttgtgcttacattttttgacacattttgtattttgttgggtcggaggcgaagctcttgttttcacagttaaccagataatctattattgttctgctctatctctccccacatggccacattcaaattcagttgtattttatagtcttgttacatgtgtttcttcagaaaatctcagccaaattttgtaaccaatatattaaaagcatatttatactagtaagaaataagatttcctactgtggg

SEQ ID NO: 4353 - protein, 149 aa, Glycine max
  misc_feature (1)..(149): Ceres Seq. ID no. 13595753
MIIKGLFGRYERWNPVHPTHGAFWGMGVGVGCGVGWGPGFGPEVIGYVGAGCGIGFNVGITFAGVGVGLPANFIFEGPYNGVSWIGNLPCISDLQREANGKLFEFRQKHLSIKGINFFDKKNSLPLLTSASKSIQAFRNQIFSSHKGKD

SEQ ID NO: 4354 - protein, 124 aa, Glycine max
  misc_feature (1)..(124): Ceres Seq. ID no. 13595754
MGVGVGCGVGWGPGFGPEVIGYVGAGCGIGFNVGITFAGVGVGLPANFIFEGPYNGVSWIGNLPCISDLQREANGKLFEFRQKHLSIKGINFFDKKNSLPLLTSASKSIQAFRNQIFSSHKGKD

SEQ ID NO: 4355 - DNA, 562 bp, Glycine max
  misc_feature (1)..(562): Ceres Seq. ID no. 13595771
ggagattcgttcggctgctcagagtatcaatgtgtcggtgaacatgcttttcactttcttgattgcacaagtcttcttgacaatgctttgccacatgaagttcggcttgttcctcttctttgccttcttcgtgttgatcatgacattcttcgtctacttcttcttgcccgaaacaaagggcattccaattgaagaaatggggcaggtttggcaggcacaccccttctggtccagattcgtggagcatgatgattatggcaatggtgttgagatgggaaagggagctattaaagaagtgtagttagtcctcgtcttggtttatttttctcaatgactagcgttttagcttttgttggtaaatcatactattggtttcaatgtattgaattgttcctaaaaattaaaaagggttatttttcttatgtatcccctgcttcttcatatgaagcaagtttacaggatacttttctatattaatccaattgcacaaattgttatgcctttgaaaacatcaagttggatgtacactcatacctcatagacatccgatttcttatccttt

SEQ ID NO: 4356 - protein, 99 aa, Glycine max
  misc_feature (1)..(99): Ceres Seq. ID no. 13595772
EIRSAAQSINVSVNMLFTFLIAQVFLTMLCHMKFGLFLFFAFFVLIMTFFVYFFLPETKGIPIEEMGQVWQAHPFWSRFVEHDDYGNGVEMGKGAIKEV

SEQ ID NO: 4357 - protein, 85 aa, Glycine max
  misc_feature (1)..(85): Ceres Seq. ID no. 13595773
MLFTFLIAQVFLTMLCHMKFGLFLFFAFFVLIMTFFVYFFLPETKGIPIEEMGQVWQAHPFWSRFVEHDDYGNGVEMGKGAIKEV

SEQ ID NO: 4358 - protein, 72 aa, Glycine max
  misc_feature (1)..(72): Ceres Seq. ID no. 13595774
MLCHMKFGLFLFFAFFVLIMTFFVYFFLPETKGIPIEEMGQVWQAHPFWSRFVEHDDYGNGVEMGKGAIKEV

SEQ ID NO: 4359 - DNA, 637 bp, Glycine max
  misc_feature (1)..(637): Ceres Seq. ID no. 13595784
gttgacatcttccttaaggttcatccaaacatgaaggactcagagaggtaccggttatgcaaaaccattgattgtcagaaactgtctcaagaagcaagcagccatgcagcacagaatgaaagactaccggtgcagacggtggttcaagttctttacttggagcaaatgaggcttcgaaatgccatgaatggagggcacaaccaagtcttctttggtcagttccctcaccgttcaggaagcggtgcagggagtggagccatttccccaagagataactatgcatcggttagaagagagaacagagagctgaagcttgaagtagcaagaatgagaatgaggctcactgacttggagaaagaccacgtgtccatgaagcaggagcttgttaagtcacaccctgccaacaagttgttcaaatcatttaccagaaagctgagcaagctaaattctctattcaggataaacagcattaagccaattggtggcaaagctagttcagaaactcgcttcccttttccaaagcgaagacgccactccgtttcatgactacttaatatgtcatatatgccataacgtatgtacagtatgcataaacatggttgtaatgcatggcgtgatattgtgtttattttcctgc

SEQ ID NO: 4360 - protein, 181 aa, Glycine max
  misc_feature (1)..(181): Ceres Seq. ID no. 15221661
VDIFLKVHPNMKDSERYRLCKTIDCQKLSQEASSHAAQNERLPVQTVVQVLYLEQMRLRNAMNGGHNQVFFGQFPHRSGSGAGSGAISPRDNYASVRRENRELKLEVARMRMRLTDLEKDHVSMKQELVKSHPANKLFKSFTRKLSKLNSLFRINSIKPIGGKASSETRFPFPKRRRHSVS

SEQ ID NO: 4361 - protein, 171 aa, Glycine max
  misc_feature (1)..(171): Ceres Seq. ID no. 15221662
MKDSERYRLCKTIDCQKLSQEASSHAAQNERLPVQTVVQVLYLEQMRLRNAMNGGHNQVFFGQFPHRSGSGAGSGAISPRDNYASVRRENRELKLEVARMRMRLTDLEKDHVSMKQELVKSHPANKLFKSFTRKLSKLNSLFRINSIKPIGGKASSETRFPFPKRRRHSVS

SEQ ID NO: 4362 - protein, 126 aa, Glycine max
  misc_feature (1)..(126): Ceres Seq. ID no. 15221663
MRLRNAMNGGHNQVFFGQFPHRSGSGAGSGAISPRDNYASVRRENRELKLEVARMRMRLTDLEKDHVSMKQELVKSHPANKLFKSFTRKLSKLNSLFRINSIKPIGGKASSETRFPFPKRRRHSVS

SEQ ID NO: 4363 - DNA, 551 bp, Glycine max
  misc_feature (1)..(551): Ceres Seq. ID no. 13595787
acacaaacacaaaacccacaagaccagaaaaaaaaaaacagagagtaaacatgagatctctcttcttactagccttgttcctagttcttgcttttcaccatggtgaagcagccgtgacttgcaacaacgtggttggtgatctttacccttgcctctcctacgtgatgcaaggcggaaacgctccatcaactaactgctgcaacggtgtcagaacgctcaacagtcaggctcaaaccactgcggatcgtcagagtgtttgtcgttgcatcaaaaatgctattggaggagcctcttactcttcaagcaaccttaacaatgctctgtctttgcctgctaagtgtggtgttaatctccctttcagtatcagcccttccaccaactgcaacagtatccactgaaataagcagaagatcctgaaggaagctactactactactacactactacaagaacttaggacatggcctggtagtagtaactacgttgttcagtgatgtatcttcatctctatgttcttcaaggttctaataaaaattacaacatgctatgag

SEQ ID NO: 4364 - protein, 131 aa, Glycine max
  misc_feature (1)..(131): Ceres Seq. ID no. 13595788
TNTKPTRPEKKKQRVNMRSLFLLALFLVLAFHHGEAAVTCNNVVGDLYPCLSYVMQGGNAPSTNCCNGVRTLNSQAQTTADRQSVCRCIKNAIGGASYSSSNLNNALSLPAKCGVNLPFSISPSTNCNSIH

SEQ ID NO: 4365 - protein, 115 aa, Glycine max
  misc_feature (1)..(115): Ceres Seq. ID no. 13595789
MRSLFLLALFLVLAFHHGEAAVTCNNVVGDLYPCLSYVMQGGNAPSTNCCNGVRTLNSQAQTTADRQSVCRCIKNAIGGASYSSSNLNNALSLPAKCGVNLPFSISPSTNCNSIH

SEQ ID NO: 4366 - protein, 77 aa, Glycine max
  misc_feature (1)..(77): Ceres Seq. ID no. 13595790
MQGGNAPSTNCCNGVRTLNSQAQTTADRQSVCRCIKNAIGGASYSSSNLNNALSLPAKCGVNLPFSISPSTNCNSIH

SEQ ID NO: 4367 - DNA, 617 bp, Glycine max
  misc_feature (1)..(617): Ceres Seq. ID no. 13595791
acaaaatataaaagtgttgtgttatagaaattaatcaaagaccataagaagatgggcattccttcagaaattgcagcggctgcgattggtttgttgtgcttgtggagtgttgctgacagtgttcccaacaccaacatcactgtcattctgtgcaacgttggggcgtacacctcaggtgatccttttgctgtcagtttatcctatgttgttagagaattggagacagagactccaaccaggaaaaactacgattactacaacatttctccatatcctaatgcctttgcctatggacatgctgcttgcaaccttaatctgactgccactgactgcaaaacctgtcttggtgcttctaaaacagccatgttcaacgggtgtccgaaacgtgtaggagctcgttcggtgctgcatgattgtacaatcaggtatgagcagtacccatttgatgattgagatacagaattattggagctttggatttctgtttccaccgcaaagctttgtaagccataaatttgtttgtgtaccacaaatgtatgtatgggttacttataaagtcaaaaatactagtctagtacgacctattcgctcatcaagtctcattttgatttccattc

SEQ ID NO: 4368 - protein, 133 aa, Glycine max
  misc_feature (1)..(133): Ceres Seq. ID no. 13595792
MGIPSEIAAAAIGLLCLWSVADSVPNTNITVILCNVGAYTSGDPFAVSLSYVVRELETETPTRKNYDYYNISPYPNAFAYGHAACNLNLTATDCKTCLGASKTAMFNGCPKRVGARSVLHDCTIRYEQYPFDD

SEQ ID NO: 4369 - protein, 69 aa, Glycine max
  misc_feature (1)..(69): Ceres Seq. ID no. 13595793
MIVQSGMSSTHLMIEIQNYWSFGFLFPPQSFVSHKFVCVPQMYVWVTYKVKNTSLVRPIRSSSLILISI

SEQ ID NO: 4370 - DNA, 879 bp, Glycine max
  misc_feature (1)..(879): Ceres Seq. ID no. 13595797
atgcctcagaaaatagagattccaattcgagctccatagacaccattagcattagagggagggtgcaacagcaggattggagggttctcttctccaaaggcgccgaagttcttcagcttggcaagtaagtgataatcaatggcttacaggcttccactggcaggagttagggcttccaattatgaggctagagagcttccatcaaacagctacctggatctgggtgggccttatggaaaatttgtgcctttcataatcgcgggagaagggggctttggggagcataagcagctcaactggacaaacttgtttttactgaacaagcttggcagtgacatagacagggatcatcaagaggtgatcgatcagataaaggcagagaaagatgttgaaaagataaaagagttgatagagcgactgcctcgtgaaattgctgagcatttggaaggccatgagacccatgaacaggtcgaaatcctggcagatctgagcaggaacatggatcagaggatgtcttatctcagcagagagatccggcatctaaggagtgacctgggacaggtgatgcaaggtatcggagagatacgcgaagcattggctaggatggagcgccagaatccttgcttccgtccatgaacaaatgcaaccagccctggagcaagtgcacctggcagtttcgtatttgcatttcgtacttttctatattgtgttgtaatgaataaaattatgcgctccttgcagcgtataatgttgtacgagtctgagtcgatcgagttttattagctacatgtgcatgtctgtactgtctgcagttggttgttcttgtcaagggtttgtaatgaataaaattatgtgcagcttgctgcacataatgttgtc

SEQ ID NO: 4371 - protein, 165 aa, Glycine max
  misc_feature (1)..(165): Ceres Seq. ID no. 15221664
MAYRLPLAGVRASNYEARELPSNSYLDLGGPYGKFVPFIIAGEGGFGEHKQLNWTNLFLLNKLGSDIDRDHQEVIDQIKAEKDVEKIKELIERLPREIAEHLEGHETHEQVEILADLSRNMDQRMSYLSREIRHLRSDLGQVMQGIGEIREALARMERQNPCFRP

SEQ ID NO: 4372 - DNA, 1185 bp, Glycine max
  misc_feature (1)..(1185): Ceres Seq. ID no. 13595798
ttttccattgctcgacgtggcggagaaggttggggtgcttcctctctctccggttagggaaagaaacgcactttttggttttgggtttggatttcgatctcactgcattgccttctgctactgctaggtttgttctctccattcacttgcatgatggttgtgcagaactttgtagttgatttgaataaggcccttgttttccaggttgggcatcttggagaagcttatgaagagtgggttcaccagcccattgtcagcaaggaaggcccccgtttctttgaaaatgagattctggagttcttgacgcgcacagtctggtgggcaataccagtcatttggctgccagttgtatgctggtttatatataagtccatacgaatgggcctcagttgtcctcatttagctctattggtggttcttggcatttttgtttggacactgcttgaatactcattgcatcgttttcttttccacattaaaacaaagacctactgggggaataccttgcattatcttctccatggctgccaccataagcaccccatggatggcttaagactcgttttccctcctgctgcaacagctatattattgatgccgttctggaacttggtgaaactcatggcgaccacttcaactgctcctgctttgtttggaggtggtttattgggttatgtaatgtatgattgcacccattattacttgcaccatggtcagccaaggactgaagtgccccgaaatctcaagcacaaatcattgaaaaggaaaatagttgatggtttcaccagttcttagaaattgaagggcattaatctgagagtaagatacagtgaatgtgaagaagtaccacttgaatcatcactttcggatccaggataaaggctttgggatcacttcatcactatgggataaagtttttggaacacttcctcctaaaatggatgccaaaagtatgtaaattactgtcaagggtagcatatgttcgttggttaaaataatagcaagttcaggaattcctgcttttatttatctaatttatttgacctccccaatcattgatgttttctggggtgttagcgtgccatcattcgtcaattttgtggtgccaaagttcgacaattaaacattctgtaaaaattgatttcttgtatcagattgatttatgatggaaagctcaccttgtgc

SEQ ID NO: 4373 - protein, 214 aa, Glycine max
  misc_feature (1)..(214): Ceres Seq. ID no. 13595799
MMVVQNFVVDLNKALVFQVGHLGEAYEEWVHQPIVSKEGPRFFENEILEFLTRTVWWAIPVIWLPVVCWFIYKSIRMGLSCPHLALLVVLGIFVWTLLEYSLHRFLFHIKTKTYWGNTLHYLLHGCHHKHPMDGLRLVFPPAATAILLMPFWNLVKLMATTSTAPALFGGGLLGYVMYDCTHYYLHHGQPRTEVPRNLKHKSLKRKIVDGFTSS

SEQ ID NO: 4374 - protein, 213 aa, Glycine max
  misc_feature (1)..(213): Ceres Seq. ID no. 13595800
MVVQNFVVDLNKALVFQVGHLGEAYEEWVHQPIVSKEGPRFFENEILEFLTRTVWWAIPVIWLPVVCWFIYKSIRMGLSCPHLALLVVLGIFVWTLLEYSLHRFLFHIKTKTYWGNTLHYLLHGCHHKHPMDGLRLVFPPAATAILLMPFWNLVKLMATTSTAPALFGGGLLGYVMYDCTHYYLHHGQPRTEVPRNLKHKSLKRKIVDGFTSS

SEQ ID NO: 4375 - protein, 138 aa, Glycine max
  misc_feature (1)..(138): Ceres Seq. ID no. 13595801
MGLSCPHLALLVVLGIFVWTLLEYSLHRFLFHIKTKTYWGNTLHYLLHGCHHKHPMDGLRLVFPPAATAILLMPFWNLVKLMATTSTAPALFGGGLLGYVMYDCTHYYLHHGQPRTEVPRNLKHKSLKRKIVDGFTSS

SEQ ID NO: 4376 - DNA, 1030 bp, Glycine max
  misc_feature (1)..(1030): Ceres Seq. ID no. 13595808
ggatgtaaagagtttctttattaatccaagtaaatcaccacagactcatagttatccacgcatggttgcatgtgcagggaagaaaaccaacaaaccgtgaggaaatggagggaacacgacgtcccaccacggacaccaccagccacacaagccaccacaccagtgacggacgcgcggtgcatgccccccggttcgttcacaccgaaaccgacacggcctccgcggccggctcgccgccggcgagggcggccccctccagcagctcggcgaccctggtggccaggctgagcttggccgccggcgacaccccgtgctcgccgatgatggactccagcacggcctcgcagagccgggcgttgtcgatggccacgccgccggactccggcacggacgagtccttggagaaggcgacggtgaggaggccggcgggggagtgggtgaagaggatggacgcgccgggggcgaagctgtggggcccgaaggcctccttgaacttgtcgacggcggcggcctcggcgtccgtgtacacgccggtggccttccagtaggcgacgcagttctccgtcaccttgtccgagtactgcgcgcccgtcagcggcaggatcatcgtcaccctcgtgaacttctcgaactcgccggtgacgacgtcgcggaagaaggcggcgtcggaggcgaggtcggcggcgggcttgccggcccacttggcggcgagcgcggagacggcggcgtcggcctgcaggtagacgccgatggccgtgaacttgatgaagttgcccccgatctccatcccccgcacgcctgcgccggcgagaaagtgggcgtgctcggagcccggcgggcgggcgagcggcgggaagacgacgccgtcgacctcgagctccgacacggccatggtggtgcacggagggtctccggagacgacggcacgtagcgagcgaacacttgtattgatgtgatgggggcaggccggcagggtaggtgcgatctggcgaggcgtaggcgcacgggatttttcgattaggatgttcta

SEQ ID NO: 4377 - protein, 147 aa, Glycine max
  misc_feature (1)..(147): Ceres Seq. ID no. 13595809
MEGTRRPTTDTTSHTSHHTSDGRAVHAPRFVHTETDTASAAGSPPARAAPSSSSATLVARLSLAAGDTPCSPMMDSSTASQSRALSMATPPDSGTDESLEKATVRRPAGEWVKRMDAPGAKLWGPKASLNLSTAAASASVYTPVAFQ

SEQ ID NO: 4378 - protein, 75 aa, Glycine max
  misc_feature (1)..(75): Ceres Seq. ID no. 13595810
MMDSSTASQSRALSMATPPDSGTDESLEKATVRRPAGEWVKRMDAPGAKLWGPKASLNLSTAAASASVYTPVAFQ

SEQ ID NO: 4379 - protein, 74 aa, Glycine max
  misc_feature (1)..(74): Ceres Seq. ID no. 13595811
MDSSTASQSRALSMATPPDSGTDESLEKATVRRPAGEWVKRMDAPGAKLWGPKASLNLSTAAASASVYTPVAFQ

SEQ ID NO: 4380 - DNA, 1153 bp, Glycine max
  misc_feature (1)..(1153): Ceres Seq. ID no. 13595812
cattacctagaacatcctaatcvaaaaaagtcaatcvagtcaatcctaaaatcacaatacccgaccacaaggtcttttttttctctgtggcggcatcattggcaatggttaaaagttaaaacttcaacacacagaatccagattcgtcgagaaagagaaaagagaaaagaagaatgggcgattaccatttcgtgtacaaggatttagaaggggcttctactcaatgggacgatattcaaagaaagctcggaaatttgcctccaaaggcacccgctttcaagcccccacctttcacccctgcctctgatgatcaacccaaagacaaaacatggatcgattccaaaacctccgaggaactcgaagacctcgaagacaacctcgatgatgatcgcttcctccaagaatacaggaagaagaggctggctgagatgcaagaggcagcaaaagtattgaggtttggatctgtgattcccatttcgggatctgatttcgttcgagaggtgtcacaagctccatctgatgtttgggtggttgtcatcctatacaaagaagggattcctgaatgtgggttgttgatgcaaagcattgaagaattggcactaagatatccttcaacaaaatttgtgaagataatatctactgattgcataccgaactacccggatcggaatcttcccactttgttggtgtacaacaatggagcagtcaaaggaaattatgtgggtttgcatagtttcgggcgaagatgcactcctgaaggtgttgcattagtgttgtgccaatcagatcctgtacttaatgatggccataatggaaatgaggctatcattgaaggagtccgcaaacggtttatagagaaagttgttgctgatcatgaagagggtggtgatgatgattactctagcgattaacattttttcttgtatttgttgtgttgctttctttggagggggtatgcttttctaactttcttttggtctcacttttataattttgcctaaaaaaaagagtaacggatctgttattaaatacttaaattatgcgtgtgtgtttmwacacaataaaggcttttcnngttcctagtaattagatggttttatcaggtattatgtktawacamartgattttattgtttaaacacaataaagtggg

SEQ ID NO: 4381 - protein, 245 aa, Glycine max
  misc_feature (1)..(245): Ceres Seq. ID no. 15221665
MGDYHFVYKDLEGASTQWDDIQRKLGNLPPKAPAFKPPPFTPASDDQPKDKTWIDSKTSEELEDLEDNLDDDRFLQEYRKKRLAEMQEAAKVLRFGSVIPISGSDFVREVSQAPSDVWVVVILYKEGIPECGLLMQSIEELALRYPSTKFVKIISTDCIPNYPDRNLPTLLVYNNGAVKGNYVGLHSFGRRCTPEGVALVLCQSDPVLNDGHNGNEAIIEGVRKRFIEKVVADHEEGGDDDYSSD

SEQ ID NO: 4382 - protein, 160 aa, Glycine max
  misc_feature (1)..(160): Ceres Seq. ID no. 15221666
MQEAAKVLRFGSVIPISGSDFVREVSQAPSDVWVVVILYKEGIPECGLLMQSIEELALRYPSTKFVKIISTDCIPNYPDRNLPTLLVYNNGAVKGNYVGLHSFGRRCTPEGVALVLCQSDPVLNDGHNGNEAIIEGVRKRFIEKVVADHEEGGDDDYSSD

SEQ ID NO: 4383 - DNA, 563 bp, Glycine max
  misc_feature (1)..(563): Ceres Seq. ID no. 13595837
aataccactcctcgcgaatctgagattgtcggaagatacgatcgaattcggggtcagggtttttctctgccgacgaactgcttaataatctgatcaatgacgccgcctccaggactttactccggtcgcagcactcttgccctggtggctcgtgcttcggctttcgggctgggtctcatctacggcaacgtcaagctcaaggctttgaagataaagaagaactcacagattaaggctgaagccaaggcggaagccaaggctcatcactaaaccgaacatctttctctaccttcaaaataagattatgaagaatcccagtgaacgttccacaaatgtagctgtttcttcttcttgagctatatctcccttggtgacatttttttggttttttctatgttcattttggctatcgttgacgaagaagagcaactacttttgtctgcaaaagcaatcataataccattttgattaaacctgatgctatgaacacccatatgtttctactcataacaagattggttatatgatctgttgtgtgttgccactcaaaaaccaaggcattc

SEQ ID NO: 4384 - protein, 57 aa, Glycine max
  misc_feature (1)..(57): Ceres Seq. ID no. 13595838
MTPPPGLYSGRSTLALVARASAFGLGLIYGNVKLKALKIKKNSQIKAEAKAEAKAHH

SEQ ID NO: 4385 - protein, 30 aa, Glycine max
  misc_feature (1)..(30): Ceres Seq. ID no. 13595839
NTTPRESEIVGRYDRIRGQGFSLPTNCLII

SEQ ID NO: 4386 - DNA, 1262 bp, Glycine max
  misc_feature (1)..(1262): Ceres Seq. ID no. 13595840
atatttatttctcctgctgcgacgactggtacatgatcagcagttcccccattttaagttagattattatcacacctcgtgaacacagattgcagttggtgcggaggatcgatctcgccatgaatttcaattgcactgctaacaaggagcaaaagaaaaccgtagaccaatctatcttattgtgctgcaagttctttgtctctgaatcacgcaacaatgccactctcaatgcaatagaacgagctgcaaggtcaaacccagaaactgtgattgtgaacatgtttcatgatcgagcttataacagggcaaggtacgaccttgtgtcgtatgttttgcatgactgcacaggaaatcccatatacagccccttgcatcaaactgtcatagccatggctgaggctacattcaatgccgtcaaccttgaattccatgaaggtgctcaccctcgcttgggcgcagtggacgacattgttttccatccacttggtcatgcgtcgctcgacgaggcagcgtggctcgccaaagcagtggcagcagacattggcaaccgattcagtgtgccagtgtttctgtacgctgcagcccacccaacagggaaggaacttgacgccataaggcgagagcttggatattacaggccaaattctaggggcagccaatgggccgggtgggcaatgcccgaaacgcttcctctaagcccagatgaagggcctaacgtcgtttcaagagctaaaggcatcacaatgattggtgcacgcccttgggtcacactctacaacgttccaattttgtgcactgatgtgtcagtagcaagaaggattgcaaggaaggtgagtgctcgtggcggtggcctccccactgtgcaaacgattgcgcttgtccatgaggactcaactgagatagcctgcatgcttttggactccaagcaggttggagcggatagggttcaaaatagggttgagatgctggccgcacaagagggactggacatagaacaaggttatttcactgacatttctccagaaatgatcgtagagaaatacatgaaattaatcaatagtgctaacaaatcgtgatcatgcatgtgtgtaactcattgaacttgttgatgagtaatcataaatgatcgaaggctgtaattttcagtaagtgtaaaacaaaggttatgaattgtgattccaaaatggttggctgggataacaaactaagggtaacaaatatatctatctgtatttatatatcaaaataataacctttcgccc

SEQ ID NO: 4387 - protein, 318 aa, Glycine max
  misc_feature (1)..(318): Ceres Seq. ID no. 13595841
MNFNCTANKEQKKTVDQSILLCCKFFVSESRNNATLNAIERAARSNPETVIVNMFHDRAYNRARYDLVSYVLHDCTGNPIYSPLHQTVIAMAEATFNAVNLEFHEGAHPRLGAVDDIVFHPLGHASLDEAAWLAKAVAADIGNRFSVPVFLYAAAHPTGKELDAIRRELGYYRPNSRGSQWAGWAMPETLPLSPDEGPNVVSRAKGITMIGARPWVTLYNVPILCTDVSVARRIARKVSARGGGLPTVQTIALVHEDSTEIACMLLDSKQVGADRVQNRVEMLAAQEGLDIEQGYFTDISPEMIVEKYMKLINSANKS

SEQ ID NO: 4388 - protein, 265 aa, Glycine max
  misc_feature (1)..(265): Ceres Seq. ID no. 13595842
MFHDRAYNRARYDLVSYVLHDCTGNPIYSPLHQTVIAMAEATFNAVNLEFHEGAHPRLGAVDDIVFHPLGHASLDEAAWLAKAVAADIGNRFSVPVFLYAAAHPTGKELDAIRRELGYYRPNSRGSQWAGWAMPETLPLSPDEGPNVVSRAKGITMIGARPWVTLYNVPILCTDVSVARRIARKVSARGGGLPTVQTIALVHEDSTEIACMLLDSKQVGADRVQNRVEMLAAQEGLDIEQGYFTDISPEMIVEKYMKLINSANKS

SEQ ID NO: 4389 - protein, 228 aa, Glycine max
  misc_feature (1)..(228): Ceres Seq. ID no. 13595843
MAEATFNAVNLEFHEGAHPRLGAVDDIVFHPLGHASLDEAAWLAKAVAADIGNRFSVPVFLYAAAHPTGKELDAIRRELGYYRPNSRGSQWAGWAMPETLPLSPDEGPNVVSRAKGITMIGARPWVTLYNVPILCTDVSVARRIARKVSARGGGLPTVQTIALVHEDSTEIACMLLDSKQVGADRVQNRVEMLAAQEGLDIEQGYFTDISPEMIVEKYMKLINSANKS

SEQ ID NO: 4390 - DNA, 1105 bp, Glycine max
  misc_feature (1)..(1105): Ceres Seq. ID no. 13595851
atcgccgcctcatcgccgccaggagttcgagttccccccgaaccgtcgccatggctgccgcaccagtcatctccccgaaagaaaatctgcccccttcgctgacctccacctccgagccccctccactcttcgacggcaccaccaggttgtatgttgcatatcactgcccatatgcgcagcgcgcttggattgccaggaactacaagggtttgcaagacaagatcaagatagtcgggatcgatctcgcagacaggccggcttggtacaaggagaaggtttacccacagaacaaggtgccttcactggagcataacaacgaggtgaaaggagaaagcttggatttggtcaagtacattgacagcaatttcgatggcccagcattgctccccgatgattctgcaaagaagcagtttgccgaggagctgcttgtgtacatcgatgagttcaataaagcactatactcatccataacctccaagggagatgtggcagaggaaactgttgctgcgctggataaaatagaagcggccctgggaaagttcagtgatggccctttcttccttggccagttcagtttggtggacattgcatatgtgccatttatcgaaaggtttcagatattcttttctggtatcaaaaactatgatatcaccaaggacagacctaatattcagaaattcatcgaggaagtgaacaagatcgatgcgtacacgcaaacgaaactggacccacaatttctacttgaacacacaaagaagcggcttgggattgagtgaagatgtgaccaaggatgaccaagagaccagggaactactgcagcatggaagatgaagaggaagacactcaggagtgtgcttgcttgctactactactagatcatgaaaggcacgcgttgctgcgcccgtcttatggtaataataaattttaggcttgacacaattgtgcggaagcattgtatgtaaactttagatcttctagtattataaataattttgtgtaatttcatttttacctggaatttaaagcaatgtagtagtattaggcttatgccgttgtcattacaatacaacgattgttcaaagaccttggtgaacaacaacggttc

SEQ ID NO: 4391 - protein, 257 aa, Glycine max
  misc_feature (1)..(257): Ceres Seq. ID no. 13595852
RRLIAARSSSSPRTVAMAAAPVISPKENLPPSLTSTSEPPPLFDGTTRLYVAYHCPYAQRAWIARNYKGLQDKIKIVGIDLADRPAWYKEKVYPQNKVPSLEHNNEVKGESLDLVKYIDSNFDGPALLPDDSAKKQFAEELLVYIDEFNKALYSSITSKGDVAEETVAALDKIEAALGKFSDGPFFLGQFSLVDIAYVPFIERFQIFFSGIKNYDITKDRPNIQKFIEEVNKIDAYTQTKLDPQFLLEHTKKRLGIE

SEQ ID NO: 4392 - protein, 241 aa, Glycine max
  misc_feature (1)..(241): Ceres Seq. ID no. 13595853
MAAAPVISPKENLPPSLTSTSEPPPLFDGTTRLYVAYHCPYAQRAWIARNYKGLQDKIKIVGIDLADRPAWYKEKVYPQNKVPSLEHNNEVKGESLDLVKYIDSNFDGPALLPDDSAKKQFAEELLVYIDEFNKALYSSITSKGDVAEETVAALDKIEAALGKFSDGPFFLGQFSLVDIAYVPFIERFQIFFSGIKNYDITKDRPNIQKFIEEVNKIDAYTQTKLDPQFLLEHTKKRLGIE

SEQ ID NO: 4393 - DNA, 1324 bp, Glycine max
  misc_feature (1)..(1324): Ceres Seq. ID no. 13595861
atcgaaagtcgaaacatcccctgtcactttgactcaactcacacaccaatctccatatccctaccaattttccctattcactcatcaattttctcgtatcagattttgtggtagtgtagtccaactgtccaacttagagcaggcagcatggaggatattctgttggataccaggtgggaagatgtaatctgccccatatgcttggaagtccctcataatagtgtgctccttcagtgttcatcttatgataaggggtgtcgttcttttgtatgtgacacaagtcagttgcactcaaattgcttggatcgttttaaaagcacacatagcatgccatcctcttcaacatatgattcaacctcccaaatgtctgatgcaaattccatggcaaatagtgagtcagtggtatctgattgtcaatacaagctgagttgtccgttgtgtagaggtgatgtttttgggtggattattgttgataaagctcgtgtgcatcttgatgagaagaagcgttgctgtgaagaggagcaatgtgcatttattggaagttactccgagctacaaaaacatgctcaactggaacaccctcatgcttgtccatcgaaaattgatcctgtccgacagcttgattggaaaaattttcagcagtcatctgagatcatagatgttttgagcactattcattcagaaattccacggggagtggtcttgggagattatgtgattgaatatggggatgatgacagtgcagatgagtttgaggacttccctggagatgaaggttctgtagcatctgtagagtatggcgagtataggctagatgagattgatgatgattttgttagtacaattggccacttgagaggtggaagtggttttcgcagatcgcggagacgtcattctcgctccaatgacaattagtatttgaactgaaggaagcagaatgagaggaagagatacactcaacatagaaaccagtgtgatcttgatgcagctggtgtgacaactcgcaaaggttacatttaggtcatctaatgcatttgtgataacttgagggatcaacattacaagattgatagttgaatgtggattatattccaagtttctgttatgcttaccattaactaccatttagtatgctagccattgggagcctgttaatttactcctgtgccaccaaagtgattccgctagctttatgctctgtagaacaatgaattacttcttttccttgtatatatagccgcttagttgtgatgtattataatgattctaaagtagggatgtttccatgtcactgaataaaacttttgtttttttttcctccccc

SEQ ID NO: 4394 - protein, 255 aa, Glycine max
  misc_feature (1)..(255): Ceres Seq. ID no. 13595862
MEDILLDTRWEDVICPICLEVPHNSVLLQCSSYDKGCRSFVCDTSQLHSNCLDRFKSTHSMPSSSTYDSTSQMSDANSMANSESVVSDCQYKLSCPLCRGDVFGWIIVDKARVHLDEKKRCCEEEQCAFIGSYSELQKHAQLEHPHACPSKIDPVRQLDWKNFQQSSEIIDVLSTIHSEIPRGVVLGDYVIEYGDDDSADEFEDFPGDEGSVASVEYGEYRLDEIDDDFVSTIGHLRGGSGFRRSRRRHSRSNDN

SEQ ID NO: 4395 - protein, 195 aa, Glycine max
  misc_feature (1)..(195): Ceres Seq. ID no. 13595863
MPSSSTYDSTSQMSDANSMANSESVVSDCQYKLSCPLCRGDVFGWIIVDKARVHLDEKKRCCEEEQCAFIGSYSELQKHAQLEHPHACPSKIDPVRQLDWKNFQQSSEIIDVLSTIHSEIPRGVVLGDYVIEYGDDDSADEFEDFPGDEGSVASVEYGEYRLDEIDDDFVSTIGHLRGGSGFRRSRRRHSRSNDN

SEQ ID NO: 4396 - protein, 183 aa, Glycine max
  misc_feature (1)..(183): Ceres Seq. ID no. 13595864
MSDANSMANSESVVSDCQYKLSCPLCRGDVFGWIIVDKARVHLDEKKRCCEEEQCAFIGSYSELQKHAQLEHPHACPSKIDPVRQLDWKNFQQSSEIIDVLSTIHSEIPRGVVLGDYVIEYGDDDSADEFEDFPGDEGSVASVEYGEYRLDEIDDDFVSTIGHLRGGSGFRRSRRRHSRSNDN

SEQ ID NO: 4397 - DNA, 555 bp, Glycine max
  misc_feature (1)..(555): Ceres Seq. ID no. 13637446
gaagatgaaaaaatgtccgtgctctgttttcactagcagcaaaggttgctccaactattatttttattgatgaggttgatagcatgcttggaaagcggactaaatatggagagcatgaggcaatgagaaagattaaaaatgaattcatggcccactgggatggaatattgacaaaacctggtgagcgaattctggttcttgctgcaaccaacaggccatttgaccttgatgaagcaattataagacggtttgagcgcaggatcatggttggtcttccatctgctgagaacagggaaatgatcttgaaaactctcctagctaaggaaaaatatgaacatatagactttaatgagctttcaaccattacagaaggatatactggaagtgatcttaagaatttgtgcactgctgctgcttatcgacctgttagagaggtacttcaacaggagaggttgaaggaaaaggaaaagaagaaaacagaagcagaagttcaaagatcagaagatgcttctgatgctaaaggagataaagaagatggagtgattacttcaaggt

SEQ ID NO: 4398 - protein, 157 aa, Glycine max
  misc_feature (1)..(157): Ceres Seq. ID no. 13637447
MLGKRTKYGEHEAMRKIKNEFMAHWDGILTKPGERILVLAATNRPFDLDEAIIRRFERRIMVGLPSAENREMILKTLLAKEKYEHIDFNELSTITEGYTGSDLKNLCTAAAYRPVREVLQQERLKEKEKKKTEAEVQRSEDASDAKGDKEDGVITSR

SEQ ID NO: 4399 - protein, 144 aa, Glycine max
  misc_feature (1)..(144): Ceres Seq. ID no. 13637448
MRKIKNEFMAHWDGILTKPGERILVLAATNRPFDLDEAIIRRFERRIMVGLPSAENREMILKTLLAKEKYEHIDFNELSTITEGYTGSDLKNLCTAAAYRPVREVLQQERLKEKEKKKTEAEVQRSEDASDAKGDKEDGVITSR

SEQ ID NO: 4400 - protein, 136 aa, Glycine max
  misc_feature (1)..(136): Ceres Seq. ID no. 13637449
MAHWDGILTKPGERILVLAATNRPFDLDEAIIRRFERRIMVGLPSAENREMILKTLLAKEKYEHIDFNELSTITEGYTGSDLKNLCTAAAYRPVREVLQQERLKEKEKKKTEAEVQRSEDASDAKGDKEDGVITSR

SEQ ID NO: 4401 - DNA, 612 bp, Glycine max
  misc_feature (1)..(612): Ceres Seq. ID no. 13637453
atctagttaagtgtctcggttcagtatatcatgtgaatatattaattgagaaagttgcattttggtatttattggattcgttaaatggatattgaatccacagtgtagagctgagacacatttttcagtgtatacttcttgttacaatttttttttggtcttgttttccttcttgttacgttgtgtatttatgattctgaattgcctgtttttttaaacatcgtcagaggggctttgatcaacaatggctatcattaacattctcaaaggctatatttcttggaaatggtcttgttgctattttgtctgggctgtttggaaatgtacttgttgatacattggctcttggacctgtggccccctttgatgctgcttcatgttttcttgctattggtatggccatcatactatcttcatggtcagagaatttcggggatccttcagagaacaaggacttgcttacccaatttaggggtgctgctgtggccattgcttctgatgaaaagatagccttgctgggtgccatacagtctctctttgaaggttcaatgtacacctttgtgtttctatggactcctgcattgagcccaaatgatgaagagattccccatg

SEQ ID NO: 4402 - protein, 74 aa, Glycine max
  misc_feature (1)..(74): Ceres Seq. ID no. 13637454
MVLLLFCLGCLEMYLLIHWLLDLWPPLMLLHVFLLLVWPSYYLHGQRISGILQRTRTCLPNLGVLLWPLLLMKR

SEQ ID NO: 4403 - protein, 72 aa, Glycine max
  misc_feature (1)..(72): Ceres Seq. ID no. 13637455
MAIILSSWSENFGDPSENKDLLTQFRGAAVAIASDEKIALLGAIQSLFEGSMYTFVFLWTPALSPNDEEIPH

SEQ ID NO: 4404 - protein, 62 aa, Glycine max
  misc_feature (1)..(62): Ceres Seq. ID no. 13637456
MYLLIHWLLDLWPPLMLLHVFLLLVWPSYYLHGQRISGILQRTRTCLPNLGVLLWPLLLMKR

SEQ ID NO: 4405 - DNA, 1277 bp, Glycine max
  misc_feature (1)..(1277): Ceres Seq. ID no. 13637457
gaacgtggaaaaatcaatgaaagttgaagattcaaaggaacactaaaacgacttgatacacgactcaattaaaaattcaaaggaacattgagacgatcctagcgcagctccggccaaaagatccgttgatgtttgttctcaggttcacattgcctttttacattttcgctgcacttgttgttccaccaattctcttcataggaaaatctttgtaggcttgtgctggaaatgctctgtgacttgtgctaatagtatcaccaaaagaagtcaaagaatcagaaagcattaatctggatttgcagtttgcacatattggcagtagttttcttttttcatttttcaattgttaaactagatgtctagaagacccccactccctcgtctcctccttaacaatgtctcttgcatgagaaatgcccagcaagttctgcgccatgtgaatgtctctcttcatgatggaggggcacttgtgctaacaggtgcaaatggctcgggaaagacaactttcctgcgcatgttagctgggttttcccgcccttctgctggtgaaatcctttggaatggacatgacattcaacaatctacaatattccatcagtataaacttcagcttaactggctctctctcaaggatgccattgataataagatgtcagttcttaacaatgtacaatggtttgaacttcttgaaaacaaggaagggaaggctatggctgcactagagttgatgggactaggaagattagccaacgaaaaaccaaggatgctatctatgggccagcggaaaagactgcaacttgccagattgctggcacttgatcgccccatatggttgctagatgagccttcagttgcactagatgatgacggtgtgaagttacttgagtatattattgcagaacacaggaaatatggaggaattgtgattgtggcaactcatctacccattgagatagaagattccttagtcttgaggcttccaccaaggtttccaaggaggatgacccttgtggatatgcttgaccgggcagatatcagttaattcctattttcgttcacattctcttcaaaacaggataggtgttgtaatcagctttgtgcaaatgtcatttgtgacaattcagtcaggattcacaattgagttgtctttatattgcagtcgtagtgctggtcatgcttgtatacttgtctgatgcctttgttcttgtatctttcatttcataaaacatttttaagaggccctgaaaatcatatattctggggggacattcaggctt

SEQ ID NO: 4406 - protein, 228 aa, Glycine max
  misc_feature (1)..(228): Ceres Seq. ID no. 13637458
MSRRPPLPRLLLNNVSCMRNAQQVLRHVNVSLHDGGALVLTGANGSGKTTFLRMLAGFSRPSAGEILWNGHDIQQSTIFHQYKLQLNWLSLKDAIDNKMSVLNNVQWFELLENKEGKAMAALELMGLGRLANEKPRMLSMGQRKRLQLARLLALDRPIWLLDEPSVALDDDGVKLLEYIIAEHRKYGGIVIVATHLPIEIEDSLVLRLPPRFPRRMTLVDMLDRADIS

SEQ ID NO: 4407 - protein, 211 aa, Glycine max
  misc_feature (1)..(211): Ceres Seq. ID no. 13637459
MRNAQQVLRHVNVSLHDGGALVLTGANGSGKTTFLRMLAGFSRPSAGEILWNGHDIQQSTIFHQYKLQLNWLSLKDAIDNKMSVLNNVQWFELLENKEGKAMAALELMGLGRLANEKPRMLSMGQRKRLQLARLLALDRPIWLLDEPSVALDDDGVKLLEYIIAEHRKYGGIVIVATHLPIEIEDSLVLRLPPRFPRRMTLVDMLDRADIS

SEQ ID NO: 4408 - protein, 175 aa, Glycine max
  misc_feature (1)..(175): Ceres Seq. ID no. 13637460
MLAGFSRPSAGEILWNGHDIQQSTIFHQYKLQLNWLSLKDAIDNKMSVLNNVQWFELLENKEGKAMAALELMGLGRLANEKPRMLSMGQRKRLQLARLLALDRPIWLLDEPSVALDDDGVKLLEYIIAEHRKYGGIVIVATHLPIEIEDSLVLRLPPRFPRRMTLVDMLDRADIS

SEQ ID NO: 4409 - DNA, 1384 bp, Glycine max
  misc_feature (1)..(1384): Ceres Seq. ID no. 13637461
cccccccccccttacaggagatagacttaaagaagcacagcatattaacaaatctctttcagctttgggagatgtcattgcttcccttgctcagaaaaactctcacgtaccttacagaaatagtaaactcacacaactactccaagattcacttggaggacaggctaagacactaatgtttgttcacataagtccagagagtgatgctattggagaaacaattagtaccttaaaatttgctgaaagagttgccacagttgaacttggtgctgctcgagtaaacaaagatagtgcagatgttaaagaactcaaagaacagattgccagcctcaaggcagcactggcaagaaaggaaggagaatcagaacattcttttttgggcagctctgaaaaacatagaacaaaggctagtgagctatcaccttatcatataaaccagcgaggtcctgacgctgtggatcagcttggatgccggcaaccaatggttgaggttggcaacatagaacttcggagtaataccacagtgaggctcaaaactcagagctttgattttgatgagatatcagcaaattcaccatcatggcccccagtgaacaatagtcttgcacaaaactatggggaggatgacaaagaatctggtggttctggagaatgggttgataaggtcatggtcaacaagcaagatgtaaacaaaactgagaacctcttgggatgttggcaagcagcaagcaatgggaacttatctgaggccttttatcagaaatacctcaaagattctcccaaaatgtactcagaacaatccgataatatgttcatgggagccaatcagtttaacattgccggttcagatgacatggatgagcttgatgctgcaaccagtgattcctcagaacctgacttactttggcaatttaatcattccaaacttagcagcgtgaccaatggaattggatcaaagactatgaggtctaaggcagcaaaaaacagccctgagttgagcaagagtgctgttcattcttctcctctaggtccttcaccttcattgaaaaactcaaatggtgtcccacatcgaacagggaggcatacagctccagttgacgtgaaacgtagaactgggagtagaaaataaacgtgtttttactgaaaaggtaaagagagtgattgtttatattatgattcttttataattttttagatcgacgagagagagagagagattgttataatttttttcttggtttgtattttgtaatcacacggataatggagcaatagcgcttgttgctttgtttgtatcatgacattcttttattttactccacactagatttttaggggatgtaaaaaaatgaaactcctaacactgcaatgattttttatttgt

SEQ ID NO: 4410 - protein, 375 aa, Glycine max
  misc_feature (1)..(375): Ceres Seq. ID no. 13637462
PPPLTGDRLKEAQHINKSLSALGDVIASLAQKNSHVPYRNSKLTQLLQDSLGGQAKTLMFVHISPESDAIGETISTLKFAERVATVELGAARVNKDSADVKELKEQIASLKAALARKEGESEHSFLGSSEKHRTKASELSPYHINQRGPDAVDQLGCRQPMVEVGNIELRSNTTVRLKTQSFDFDEISANSPSWPPVNNSLAQNYGEDDKESGGSGEWVDKVMVNKQDVNKTENLLGCWQAASNGNLSEAFYQKYLKDSPKMYSEQSDNMFMGANQFNIAGSDDMDELDAATSDSSEPDLLWQFNHSKLSSVTNGIGSKTMRSKAAKNSPELSKSAVHSSPLGPSPSLKNSNGVPHRTGRHTAPVDVKRRTGSRK

SEQ ID NO: 4411 - protein, 317 aa, Glycine max
  misc_feature (1)..(317): Ceres Seq. ID no. 13637463
MFVHISPESDAIGETISTLKFAERVATVELGAARVNKDSADVKELKEQIASLKAALARKEGESEHSFLGSSEKHRTKASELSPYHINQRGPDAVDQLGCRQPMVEVGNIELRSNTTVRLKTQSFDFDEISANSPSWPPVNNSLAQNYGEDDKESGGSGEWVDKVMVNKQDVNKTENLLGCWQAASNGNLSEAFYQKYLKDSPKMYSEQSDNMFMGANQFNIAGSDDMDELDAATSDSSEPDLLWQFNHSKLSSVTNGIGSKTMRSKAAKNSPELSKSAVHSSPLGPSPSLKNSNGVPHRTGRHTAPVDVKRRTGSRK

SEQ ID NO: 4412 - protein, 215 aa, Glycine max
  misc_feature (1)..(215): Ceres Seq. ID no. 13637464
MVEVGNIELRSNTTVRLKTQSFDFDEISANSPSWPPVNNSLAQNYGEDDKESGGSGEWVDKVMVNKQDVNKTENLLGCWQAASNGNLSEAFYQKYLKDSPKMYSEQSDNMFMGANQFNIAGSDDMDELDAATSDSSEPDLLWQFNHSKLSSVTNGIGSKTMRSKAAKNSPELSKSAVHSSPLGPSPSLKNSNGVPHRTGRHTAPVDVKRRTGSRK

SEQ ID NO: 4413 - DNA, 1164 bp, Glycine max
  misc_feature (1)..(1164): Ceres Seq. ID no. 13637509
atcatgcgttctcagcttgtgaaatcgaatatcaaaacccctccaaggccaaaacggcgtcgtcaaccactcaaatcatggcctgttactttctccccctttgctcgcgctctcgctctctctcgcatcacctctctctctccaccaaaccctaccccaaccctctctgctaagaaaccgcaaccctctcatggatctgtccatgcagatttatcccaaccggaacactccgagtcttccgacgaggacttcgatggagttgtccaagcagatttttcatttttcgatcccaaacctaatgattttcacggagccaagaccttgctgcaaacctacctcgacgaccaggaatgggatttgagtgcctttgtagacttgattttggcacagaccaccgtaggctctgttgttaagatagaggacgacgaggatgaagggctcttcgctcttgttactgctcttaatttatatagatacagggagcataagtgtattgcgacagttaaggattttctcctccataaagtgcgccaagagaagagtgtccatgaccagttgaaattgctgttgggggagcaagcgcatgatgttggtctcctggtatcgcagcgcatggtgaaccttcctccccagcttctgccacctctttatgatgccctttttgatgaagtgtcctgggccacggaagatgagccgacggaggagctccagaattccttcaagtttaagcattatataatacttaccaaaatttacgtgctcaagaatgtagaacagaaaagaaaacagagcaatggtagtgatgaggcaataatatacataaagcttgaggatgaaatttttcacaagttaagctcgtggtccttctgttttccattgcaaactcagcagcttgcacctcatgagctgaggaattacaggtcaacgggattaatcgtggctgttgaagctgacaaaattccaacatttcgtcaagaattagcttctctaataaatgaaacctgaaggcatcgacaaggctactggataatttattatatgatagaatcttaatactttcatgagacatgcatttttacgcagattgaattctttttgcaagggtttgagctgccaaattttgaaattttgttttttaattttctatgatcccttttgttctgc

SEQ ID NO: 4414 - protein, 334 aa, Glycine max
  misc_feature (1)..(334): Ceres Seq. ID no. 13637510
IMRSQLVKSNIKTPPRPKRRRQPLKSWPVTFSPFARALALSRITSLSPPNPTPTLSAKKPQPSHGSVHADLSQPEHSESSDEDFDGVVQADFSFFDPKPNDFHGAKTLLQTYLDDQEWDLSAFVDLILAQTTVGSVVKIEDDEDEGLFALVTALNLYRYREHKCIATVKDFLLHKVRQEKSVHDQLKLLLGEQAHDVGLLVSQRMVNLPPQLLPPLYDALFDEVSWATEDEPTEELQNSFKFKHYIILTKIYVLKNVEQKRKQSNGSDEAIIYIKLEDEIFHKLSSWSFCFPLQTQQLAPHELRNYRSTGLIVAVEADKIPTFRQELASLINET

SEQ ID NO: 4415 - protein, 333 aa, Glycine max
  misc_feature (1)..(333): Ceres Seq. ID no. 13637511
MRSQLVKSNIKTPPRPKRRRQPLKSWPVTFSPFARALALSRITSLSPPNPTPTLSAKKPQPSHGSVHADLSQPEHSESSDEDFDGVVQADFSFFDPKPNDFHGAKTLLQTYLDDQEWDLSAFVDLILAQTTVGSVVKIEDDEDEGLFALVTALNLYRYREHKCIATVKDFLLHKVRQEKSVHDQLKLLLGEQAHDVGLLVSQRMVNLPPQLLPPLYDALFDEVSWATEDEPTEELQNSFKFKHYIILTKIYVLKNVEQKRKQSNGSDEAIIYIKLEDEIFHKLSSWSFCFPLQTQQLAPHELRNYRSTGLIVAVEADKIPTFRQELASLINET

SEQ ID NO: 4416 - DNA, 1497 bp, Glycine max
  misc_feature (1)..(1497): Ceres Seq. ID no. 13637562
atttcttatagaaaagccaaactcgcttgaactttagacactattctgattctgtccatccatccttcagattctgtgaagaacaatgttaatggcaactctgtattaaaattcttcattttctaaattctactgtctctgttactttttaattccaaccctatcctcttctctaatgctctttctttgtaactaacatagtggcttgcaagcagttcgtcctcctccattaacgtccacttccgacccaccacctctttttgatggcaccaccaggttgtacatcagttattcctgtccctatgcacaacgagtatggataactaggaactacaaggggcttcaagacaagatcaaattggtccctattgatcttcaagacaggccagcttggtataaggagaaagtctaccctgaaaataaggtgccatccttggagcacaatggcaaggtattgggagaaagtcttgatttgatcaaatatgtagatgtcaactttgaagggacacctttggttcccagtgatcctgccaagaaagagtttggtgagcacttgatatcccatgttgatacattcaacaaagacctgaactcttcattgaaaggagatcctgtacagcaagccagtccttcttttgaatacttggagaatgctcttggtaaatttgatgatgggccattcttgcttggtcaattcagtttggtggatattgcctatattccatttattgaaagatatcaaattgtctttgccgagctgttcaaacaagacatcgcagaaggaaggcctaaacttgcagcatggattgaggaggtgaacaagattgatgcttatacacagacaaaaaacgatcctcaagaaatcgctgataaatacaagaaacgtttactgtctcaacagtgatccttggattgttgcaggcttcctctaagatatatagactgtggcaacaaaacgtcctttgcattcatgggatgcatctcttcagtcaaataattatgttcacttttcagcttgcttttttggatgacattataatgtttatgtactagcttgtgatcgctgatcattatggtatagttatcctaccagtactatgttagtatttagctttgatatctctcaagtgtccctgacctcatacatgtcagcaaaggtttattgcatggaaattatacatggttgtgaaaaaaacgttgtgccggaaaaaaaaaaaaaaaaaaaaaaaaaaaaaaaaaaaaaaaaaaaaaaaaaaaaaaaaaaaaaaaaaaaaaaaaaaaaaaaaaaaaaaaaaaaaaaatttccccccccccgggaaacccccaagttttaaaggggcccccaccgggggggagttccagtttttgttccctttaaaggggggtaaatttcgagtttggggaaatcatggccaaaaatttttcctggggaaaaatttaacccccttaaaattccccaaaaaaaaaaaccccaaactaaaaggggaaaagcctggg

SEQ ID NO: 4417 - protein, 106 aa, Glycine max
  misc_feature (1)..(106): Ceres Seq. ID no. 13637563
MVVKKTLCRKKKKKKKKKKKKKKKKKKKKKKKKKKKKKKKNFPPPGKPPSFKGAPTGGEFQFLFPLKGGKFRVWGNHGQKFFLGKNLTPLKFPKKKNPKLKGEKPG

SEQ ID NO: 4418 - protein, 78 aa, Glycine max
  misc_feature (1)..(78): Ceres Seq. ID no. 13637564
MLVFSFDISQVSLTSYMSAKVYCMEIIHGCEKNVVPEKKKKKKKKKKKKKKKKKKKKKKKKKKKKKKKFPPPRETPKF

SEQ ID NO: 4419 - protein, 62 aa, Glycine max
  misc_feature (1)..(62): Ceres Seq. ID no. 13637565
MSAKVYCMEIIHGCEKNVVPEKKKKKKKKKKKKKKKKKKKKKKKKKKKKKKKFPPPRETPKF

SEQ ID NO: 4420 - DNA, 1263 bp, Glycine max
  misc_feature (1)..(1263): Ceres Seq. ID no. 13637600
accgggccccccctcgagtcagctacgtaggccccccccccttttaagtaaacctcattagactagtatttggtaaatcaaaattttcctaatctcttgtctgtaattgatttggccagcaacaacacctgaacattgatataaatgctttggtaacaaagttggaaaagctggagaaggaagtgatcttccagaaggggaacaaatttgatccatccaagaaattgaatgtgatgaagatagaaatggccaaacttgagtggtacaagaagtattccaaaaataataagattggctactatgacagcttcaagaggggtatctcaacaagcgacctagatgttgttcagtgccagaaaaccctcagaaattactggattgacatggttgcagaggcagagctgaaacctcagacagaaggtgcagcttttcgtactcgctggctttttggcggaactaattacaggagaatgtttgaacccctagatattgctgagtactacgcgaatggtggtaaagactatgaggctaagggaagatctagacattatatagtgttgcaggagtggctggaagaggataagaaagaaaaaagcaattcaaacagtacaaacaaaaaggatgtggaatctattttaacttttgactcttgcttttgggcacatgttgaagaagctatcctttcatgcaaagtgttgaaggatgaacaatctagtgtgacagagaaggaagaggaaactgggaagttgcttgaattcgagaagtatgtttatgggttgctcacgaaatatgaagtgtcatcagagattttcctaaggcaaagcagctacatgatttggtggaatcagtataaggcaattaagggaacttcttataattcagcactcgcagacttcatgagcaatcccgatcattataatgtgctgtatattaagggaacttataatttcccccctcaggcttagtgattagtgaacgtccgtgtggttgaacagtgtaaaataaattgtggttttatctcactgtgcaccttttaataagctttttttatattttcccttgttgatttttgttaaggatcttggttttaccctcccttgtgttgtggtattggaaactcatgcaattgtcttgacttgtgatattggaaactcttgcaattgtcttaccttgcaaaccttcactcattattcttgaaaatttaagttgagagcaatggatgcaggctagtttgtattaatgtaatctgaaaggctcgctgtg

SEQ ID NO: 4421 - protein, 243 aa, Glycine max
  misc_feature (1)..(243): Ceres Seq. ID no. 13637601
MKIEMAKLEWYKKYSKNNKIGYYDSFKRGISTSDLDVVQCQKTLRNYWIDMVAEAELKPQTEGAAFRTRWLFGGTNYRRMFEPLDIAEYYANGGKDYEAKGRSRHYIVLQEWLEEDKKEKSNSNSTNKKDVESILTFDSCFWAHVEEAILSCKVLKDEQSSVTEKEEETGKLLEFEKYVYGLLTKYEVSSEIFLRQSSYMIWWNQYKAIKGTSYNSALADFMSNPDHYNVLYIKGTYNFPPQA

SEQ ID NO: 4422 - protein, 239 aa, Glycine max
  misc_feature (1)..(239): Ceres Seq. ID no. 13637602
MAKLEWYKKYSKNNKIGYYDSFKRGISTSDLDVVQCQKTLRNYWIDMVAEAELKPQTEGAAFRTRWLFGGTNYRRMFEPLDIAEYYANGGKDYEAKGRSRHYIVLQEWLEEDKKEKSNSNSTNKKDVESILTFDSCFWAHVEEAILSCKVLKDEQSSVTEKEEETGKLLEFEKYVYGLLTKYEVSSEIFLRQSSYMIWWNQYKAIKGTSYNSALADFMSNPDHYNVLYIKGTYNFPPQA

SEQ ID NO: 4423 - protein, 193 aa, Glycine max
  misc_feature (1)..(193): Ceres Seq. ID no. 13637603
MVAEAELKPQTEGAAFRTRWLFGGTNYRRMFEPLDIAEYYANGGKDYEAKGRSRHYIVLQEWLEEDKKEKSNSNSTNKKDVESILTFDSCFWAHVEEAILSCKVLKDEQSSVTEKEEETGKLLEFEKYVYGLLTKYEVSSEIFLRQSSYMIWWNQYKAIKGTSYNSALADFMSNPDHYNVLYIKGTYNFPPQA

SEQ ID NO: 4424 - DNA, 1360 bp, Glycine max
  misc_feature (1)..(1360): Ceres Seq. ID no. 13637649
aaacacccaaaaataacgagcgagttttgcgtcttaatggaggagagaaagaagcacccttcttttccctccaactatctcactctcgctcaactccaagaacgatggctcaagcagcaaaaccaaatcaaccaaccacaaccacaaccacaaccacagccacaagaacaacacaaccaccaccaccgccaacaaccacaccaagagctggtactcgttcccagaaacggaaacgcttataggtctcgttctcagtttcagtatgttgcgaagaatcggaacgattccgaaactcgccgccgcgcaaccaaggttgcggtggcctccgatgacaactgcaaatcggaggccgtcgccggaatcggtgacgaaaccgccgatctgaatggaaaatccagtgaatcgaagaagaatcagaataataggaggaatgggaaaggaacatggaaaactaagacggagaagagaggagcgcgtggagatggctctggaacaggagcacaggggaaagaagaggcagagaagaaagccacaatcgagaagaagaatgagttggagaagaacggtggttcggcatcggtggatgaggttggacagcgagttagggttttatcgattaactcaggggatgaaaagaagaagaagaagaagaagaacggtggttcggttacggcagaggaggttgttgaacagagcgtgaggattttatcgattaactcggggaacggtaaacagaacaacgggagattagggaaaatgaacaacggttttggaacagcggcacatgggaaaaaagaggctgagaaaaccacaatcgaaaacgagttgaaggagaagaagaacggtggttccgtaacggtggaggaagtggaacagagagttagggtttcatcgaagaacgaggaggaggagaagaagaacggtggttccgtaacggtggaggaaatggaaaagagagttggggtttcttcatcgaataactcagggaatggtaaacagaacggaagattggggaaaatgagcaacagttttcgtcactctgaatctcagaggaagtattacggtggtgaagcaagttatggctatggctatggtaatcgtggtaacggtcactactctaaggttggggtgcagaaaacaacagagaagaagatggtttgggttaagaaggatgagatagttggtggaaattgagaccttagctagatttgtgctcttgtcgataattgaatagaaatagaatcaatcatagggtagcactatcatcaatgctcactctaacgtttgtttgcctcacccatacactcattgatggagattacaatctgtggttatcaaatatcatcatgatttgaatttt

SEQ ID NO: 4425 - protein, 397 aa, Glycine max
  misc_feature (1)..(397): Ceres Seq. ID no. 13637650
KHPKITSEFCVLMEERKKHPSFPSNYLTLAQLQERWLKQQNQINQPQPQPQPQPQEQHNHHHRQQPHQELVLVPRNGNAYRSRSQFQYVAKNRNDSETRRRATKVAVASDDNCKSEAVAGIGDETADLNGKSSESKKNQNNRRNGKGTWKTKTEKRGARGDGSGTGAQGKEEAEKKATIEKKNELEKNGGSASVDEVGQRVRVLSINSGDEKKKKKKKNGGSVTAEEVVEQSVRILSINSGNGKQNNGRLGKMNNGFGTAAHGKKEAEKTTIENELKEKKNGGSVTVEEVEQRVRVSSKNEEEEKKNGGSVTVEEMEKRVGVSSSNNSGNGKQNGRLGKMSNSFRHSESQRKYYGGEASYGYGYGNRGNGHYSKVGVQKTTEKKMVWVKKDEIVGGN

SEQ ID NO: 4426 - protein, 385 aa, Glycine max
  misc_feature (1)..(385): Ceres Seq. ID no. 13637651
MEERKKHPSFPSNYLTLAQLQERWLKQQNQINQPQPQPQPQPQEQHNHHHRQQPHQELVLVPRNGNAYRSRSQFQYVAKNRNDSETRRRATKVAVASDDNCKSEAVAGIGDETADLNGKSSESKKNQNNRRNGKGTWKTKTEKRGARGDGSGTGAQGKEEAEKKATIEKKNELEKNGGSASVDEVGQRVRVLSINSGDEKKKKKKKNGGSVTAEEVVEQSVRILSINSGNGKQNNGRLGKMNNGFGTAAHGKKEAEKTTIENELKEKKNGGSVTVEEVEQRVRVSSKNEEEEKKNGGSVTVEEMEKRVGVSSSNNSGNGKQNGRLGKMSNSFRHSESQRKYYGGEASYGYGYGNRGNGHYSKVGVQKTTEKKMVWVKKDEIVGGN

SEQ ID NO: 4427 - DNA, 1155 bp, Glycine max
  misc_feature (1)..(1155): Ceres Seq. ID no. 13637685
accgggccccccctcgagtcctacgtaggcccccccccttttataatgagaagcatagcatcttgttacaacgaacatgcaattagagtgtccgattcatattgttcaagaccttcgaaccaggcgtatctctgtccagaactcaacccttccaccagagattccgttacctgcatgtacaaactctccctcatcaaaacgcaaaaacaactcttcatcacaataacttgggccaagaaactcttgggccaaggcttcaccataaccatctccaattctgaacattttctttctccctctaataataaatccaacgcaaggcaattgagaaagaacaaaggcaacgaaacattccaatcccaaaattttcaagtccaagtcttgtgggatctctccgatgcaaagtacgaggaaggaccagaaccggttggtggcttttacgtcgacgttttggtggactccgaactgggcctacgcctcggcgacaaaaattcctcaatggaagaattgttaccaaactttgacgcaaaggaagcgactttctcgatggtttcacggagcgagacgttttccggcacagcggcttacgcgacgaaggcgaaattctcgcagacgggaagttctcacgatatattgattaggtgcggcgcggaggcggagcgaggagagccgaagggtcacgtgttgtccgtgtgcgtggacaagaagacaatgttccaggttaagaggctgaggtggaactttcgtgggaaccaaacaatttttgtcgatggtttggtcgttgatatgatgtgggacgtgcacgattggctttttaattcgaattctgcttcatctgcagtgttcatgttcaggacaaggagtggcctcgatagtaggctatggttggagaagagtttgcacgcgcacaaggaacaggacaaaattgggttctctttgttgatttgtgcctgtaagaacaatgactgattcaatcttatatagatttttttttcgttttaattcatctggattttataagattgaaaacactgacacctatttagatgatttttttcttcttcttaatcttaatctctgtcgatgatatttggtcagtggttatgtaatcctgtccgtttgaaccagaatagatgaaagtttatagattatatt

SEQ ID NO: 4428 - protein, 322 aa, Glycine max
  misc_feature (1)..(322): Ceres Seq. ID no. 15219379
TGPPLESYVGPPPFIMRSIASCYNEHAIRVSDSYCSRPSNQAYLCPELNPSTRDSVTCMYKLSLIKTQKQLFITITWAKKLLGQGFTITISNSEHFLSPSNNKSNARQLRKNKGNETFQSQNFQVQVLWDLSDAKYEEGPEPVGGFYVDVLVDSELGLRLGDKNSSMEELLPNFDAKEATFSMVSRSETFSGTAAYATKAKFSQTGSSHDILIRCGAEAERGEPKGHVLSVCVDKKTMFQVKRLRWNFRGNQTIFVDGLVVDMMWDVHDWLFNSNSASSAVFMFRTRSGLDSRLWLEKSLHAHKEQDKIGFSLLICACKNND

SEQ ID NO: 4429 - protein, 307 aa, Glycine max
  misc_feature (1)..(307): Ceres Seq. ID no. 15219380
MRSIASCYNEHAIRVSDSYCSRPSNQAYLCPELNPSTRDSVTCMYKLSLIKTQKQLFITITWAKKLLGQGFTITISNSEHFLSPSNNKSNARQLRKNKGNETFQSQNFQVQVLWDLSDAKYEEGPEPVGGFYVDVLVDSELGLRLGDKNSSMEELLPNFDAKEATFSMVSRSETFSGTAAYATKAKFSQTGSSHDILIRCGAEAERGEPKGHVLSVCVDKKTMFQVKRLRWNFRGNQTIFVDGLVVDMMWDVHDWLFNSNSASSAVFMFRTRSGLDSRLWLEKSLHAHKEQDKIGFSLLICACKNND

SEQ ID NO: 4430 - protein, 264 aa, Glycine max
  misc_feature (1)..(264): Ceres Seq. ID no. 15219381
MYKLSLIKTQKQLFITITWAKKLLGQGFTITISNSEHFLSPSNNKSNARQLRKNKGNETFQSQNFQVQVLWDLSDAKYEEGPEPVGGFYVDVLVDSELGLRLGDKNSSMEELLPNFDAKEATFSMVSRSETFSGTAAYATKAKFSQTGSSHDILIRCGAEAERGEPKGHVLSVCVDKKTMFQVKRLRWNFRGNQTIFVDGLVVDMMWDVHDWLFNSNSASSAVFMFRTRSGLDSRLWLEKSLHAHKEQDKIGFSLLICACKNND

SEQ ID NO: 4431 - DNA, 767 bp, Glycine max
  misc_feature (1)..(767): Ceres Seq. ID no. 13637770
aatcggaggaaagggatactacttctgttgatacttcgaggtaaagaaacgccgctattgatagcgtgcagacattgacaattctcaatcttccacatggggatgtggatcctgaaaatcaagcttgtgataggaatgaaggctgtaagcaaaacagacttggcttatccagagtcaatcataagaaagaaactctcgaattttcttctagtaaatcatgtgtgccaatattgccatgggtcaatggagatgggatcatcaacaacattgtttacagggtactcagacgtcgtgttcttggaatagtgatgcaaaaccctgggatattggaggatggtattctacatcatatgcacgtgttgaatccacagaactgtagaactctcttggaattgatggttctggataaacacctaattgtgaagaagatgcatcaaaatatgttagatgggggaccctccttacttccggaacttatcggaagcaaatccagtcaaccgaagttgatatgccgagagcatttcttcgccaatcccatgagtacttccttgttgtagggaatctgtggtattgacattagacattagtacttgttatataaaaaacatatttataggaaattttggatactggtttaagttatatttggaagaattgtaacttaggcaatcctagtaaatatgtttcaggctaggaacttaggattttggatatttgacaagtttggttgctacaatcctacttgagtatagcaggttggtacaccc

SEQ ID NO: 4432 - protein, 82 aa, Glycine max
  misc_feature (1)..(82): Ceres Seq. ID no. 13637771
MQNPGILEDGILHHMHVLNPQNCRTLLELMVLDKHLIVKKMHQNMLDGGPSLLPELIGSKSSQPKLICREHFFANPMSTSLL

SEQ ID NO: 4433 - protein, 69 aa, Glycine max
  misc_feature (1)..(69): Ceres Seq. ID no. 13637772
MGMWILKIKLVIGMKAVSKTDLAYPESIIRKKLSNFLLVNHVCQYCHGSMEMGSSTTLFTGYSDVVFLE

SEQ ID NO: 4434 - protein, 68 aa, Glycine max
  misc_feature (1)..(68): Ceres Seq. ID no. 13637773
MHVLNPQNCRTLLELMVLDKHLIVKKMHQNMLDGGPSLLPELIGSKSSQPKLICREHFFANPMSTSLL

SEQ ID NO: 4435 - DNA, 1019 bp, Glycine max
  misc_feature (1)..(1019): Ceres Seq. ID no. 13637789
tagacaacacaaatgcagaagaagccaggaagcaatcagaaagcatattaaatgtcaaatatggaatttctggcgatagaacaattggagctcaccctcctgtcatgaatgaatctactggagttgatggtgccagacaagagttaatcttcaggagtgcaattactttgcaaaggcctgtgcttgatccatgcctagctgttggttttcttcctctcccttcagatggcctaagagtaggacaactagttaagatgcaatggagagtggaaaggttaaaggatttagatgaggaaggagtttctaaacagaatgatgagatgctatacgaggtaaatgcaaattctggaaattggatgatagccgggaggaaaagaggatatgcatctctgtccacaaaacaaggggcaagaatagttatctcggtactatgcatgccactggtggctggttatgttcaccctcccgtacttgggctgccagatgttgatgaggcaaatataagctgcaaacctgctgggccacatctggtttgtgttttgccaccgcctctcagctcctccttctgcattccagttaattcatgagttttcactgtgactgtgtcttcacccaatcttgattgagtttgtgttccataggctattaagatgtttgagaatttttttggtttaagtaggaaagtgtaacgttgtgccttttaatttctttgcattaaaaatctccgtagttggatttgtgtcgcttgtagttgtagccttcatgcattgctcaaagtatcagcagcaggaaccttggcgcatgtacagtggaattttgtgctcttccttgtacattagacagatacacggaccataacattcttttgtctcaaaattacaaaagttggtaggaaccaccatatacaatttcattattttgctcccaaaaaatcgaattacagataccaatcgttgtaaacaatttcgaatctaccgtggtaaattggtaattatatttgggatgctacattccatttg

SEQ ID NO: 4436 - protein, 194 aa, Glycine max
  misc_feature (1)..(194): Ceres Seq. ID no. 13637790
DNTNAEEARKQSESILNVKYGISGDRTIGAHPPVMNESTGVDGARQELIFRSAITLQRPVLDPCLAVGFLPLPSDGLRVGQLVKMQWRVERLKDLDEEGVSKQNDEMLYEVNANSGNWMIAGRKRGYASLSTKQGARIVISVLCMPLVAGYVHPPVLGLPDVDEANISCKPAGPHLVCVLPPPLSSSFCIPVNS

SEQ ID NO: 4437 - protein, 160 aa, Glycine max
  misc_feature (1)..(160): Ceres Seq. ID no. 13637791
MNESTGVDGARQELIFRSAITLQRPVLDPCLAVGFLPLPSDGLRVGQLVKMQWRVERLKDLDEEGVSKQNDEMLYEVNANSGNWMIAGRKRGYASLSTKQGARIVISVLCMPLVAGYVHPPVLGLPDVDEANISCKPAGPHLVCVLPPPLSSSFCIPVNS

SEQ ID NO: 4438 - protein, 110 aa, Glycine max
  misc_feature (1)..(110): Ceres Seq. ID no. 13637792
MQWRVERLKDLDEEGVSKQNDEMLYEVNANSGNWMIAGRKRGYASLSTKQGARIVISVLCMPLVAGYVHPPVLGLPDVDEANISCKPAGPHLVCVLPPPLSSSFCIPVNS

SEQ ID NO: 4439 - DNA, 625 bp, Glycine max
  misc_feature (1)..(625): Ceres Seq. ID no. 13637911
ttattgtattttgcagccaaatctggtattgatccttccgattgtgttgagcttgcaaaacatgtgaaattgagctgcccaaacctagtgttctctggcctaatgacgataggaatgccagactataccttaactccacagaactttcagacactatcaaattgcagaactgaagtatgcaaggcacttgaaatgcccgaggaggaatgtgaactgtcaatgggcatgtctggtgattttgagttagcggtatggaatagtttactaaagttatttagcagttcaaattttcttgatagttacgttgcatgattgcacctgcaattatctcagttctggatgctttttagctcatcagggaatgaattgacgattatcataggaatggggttctttgatacttgatgtgatgatgatagtgtatgaagattcctaacaaacaacacactaacatattctttattattgaatagaattcagacaggtcccactaaataaatgaaaatcattaaattatacagggggtaagacccacatcatttagtgaacctctcatgaatgccacccaacaatagagtaatagatagcttgttgttagcattttttatggtttgtagatattgtt

SEQ ID NO: 4440 - protein, 103 aa, Glycine max
  misc_feature (1)..(103): Ceres Seq. ID no. 13637912
LLYFAAKSGIDPSDCVELAKHVKLSCPNLVFSGLMTIGMPDYTLTPQNFQTLSNCRTEVCKALEMPEEECELSMGMSGDFELAVWNSLLKLFSSSNFLDSYVA

SEQ ID NO: 4441 - protein, 69 aa, Glycine max
  misc_feature (1)..(69): Ceres Seq. ID no. 13637913
MTIGMPDYTLTPQNFQTLSNCRTEVCKALEMPEEECELSMGMSGDFELAVWNSLLKLFSSSNFLDSYVA

SEQ ID NO: 4442 - protein, 65 aa, Glycine max
  misc_feature (1)..(65): Ceres Seq. ID no. 13637914
MPDYTLTPQNFQTLSNCRTEVCKALEMPEEECELSMGMSGDFELAVWNSLLKLFSSSNFLDSYVA

SEQ ID NO: 4443 - DNA, 1450 bp, Glycine max
  misc_feature (1)..(1450): Ceres Seq. ID no. 13638029
ttgtaatacagatacctcctattaaaattttttcaggccatcttatatggagaaaaaaaaaattcagacatgaactagtgaaatttgcaggtttcattgaaataaaccatcaagggaaaactattgggtaatttgcaggtttcattaatctcaagggaagttagtgaaatttactagtcttaatgattgctcgaatgagtatggataccctatttgtgttgtgacaacagaccttcaaacactaaatgtattgtttgttgttcattattcgtaatagtttgcatggagttgacaaaaacactgatctcaaataggtattgcagattataactctagcagaagtcgtaagccaattgctgtggttggtgaagctgagatgagaccaacaagtactgcagattataactctagtagaagtcgtaagccaattgctgtggttggtgaagctgggttgagaccacctgatttccagcaagaccctaatcagaaagcagatgcaaatctacaatccaaaccacctcaagaaagagctgaagacaaggctagtagtagttcaggcacaaggccaaaagaagttgtggaatctgttcctgttcaaaatcaagcagctgcccaaaagttacttcagaagttaaatcacccaagtcagaatgatcgacatcataggggttggaaacataggggcaagggraaacaagaagatccagttgtattcactctggaagaatatgaaaacagaaaggcccagacaaagccttctattaaagactgggatctagatatcagtcgtgatgagcatcttgctagacagcttcaaaatcaactagaccttgaagattctcgggtaggaaggggtacttatgaagacaaggcacaagatattaggatgagtatgttcgcatatgaaagggattctgacagcagccatcaaatggggcaaggaggaaggggaaggggaaggggaagaggaaagggtagaggaagggggagaggaagacatggttaactatcatgattttggtttcaagtgtttcttgtgaagatgaaaatcttggcttcagaatatgttaagagttccttgggcaaaatccaacgacaagacaatcgatagcatagggttcagttttcaaggtgatcaacctttgtgctttctttgttaaatgtatcataaattgggtatttatattcttttctttccatatagattgatcagtgaacttatcaccacatttcttattttgaatatactgaagcagagttcgagtgcttataagctatagtttgactagcctccctgatattctcaactccaaccttaccgaatctygtcatccaataawatacttgccttgttttggggtaaaaaaaaaaaaaaaaaaaaaaaaaaaaaaaaaaaaaaggaaaaaaaaaaaaaaaaagaattcctgctgtttaaacacaataaagtggg

SEQ ID NO: 4444 - protein, 209 aa, Glycine max
  misc_feature (1)..(209): Ceres Seq. ID no. 15220397
  misc_feature (105)..(105): Xaa is any aa, unknown or other
MRPTSTADYNSSRSRKPIAVVGEAGLRPPDFQQDPNQKADANLQSKPPQERAEDKASSSSGTRPKEVVESVPVQNQAAAQKLLQKLNHPSQNDRHHRGWKHRGKXKQEDPVVFTLEEYENRKAQTKPSIKDWDLDISRDEHLARQLQNQLDLEDSRVGRGTYEDKAQDIRMSMFAYERDSDSSHQMGQGGRGRGRGRGKGRGRGRGRHG

SEQ ID NO: 4445 - DNA, 1399 bp, Glycine max
  misc_feature (1)..(1399): Ceres Seq. ID no. 13638097
aaaccaaaccacacaaataaacgaccaacacacattatatctctttgttaccttcgcacgaacgagagaagagaagcaaacgatggctacttttctttccaaccaatctctgttgggttcttgtccttgttctactcccttctcttcaaagccctttcaaaccctaaaaccccaaatcttatcttttccatctcgcgggtttccgcgccccctaatttcctcagtcaatcgaagaacccaattgaagtcttcccaagatttccctccaactacaaatgatgaaacagaggagacccagaatgatgtaagagggacaaatgatgatgaagataaaaaacaagtacctagtttaatgatcctccttgaagcatacaaggaagccttttttaatggcgaccaaaataccgtagctcagattgaagaggggatatattcaatagcaaataggaaaaataaattgattcagaaattatcaagtttatcggcagacaaagctgcttccaagaagagttatcttcgtttacaagctgattttgataattttaggaaaaggactgacaaagagagacttaacatccaatccgatgcccagcaacaagtcattgaaaagcttttgttgatggtcgacaattttgagagaacccaacagcaaattaaagcagcaacagagaaagagaagaaaattggtgttagctatcaaggtatttacaaacaatttgtagaggttctgaggaatcataatgtttcagtggtagcaacagtgggcaagccgtttaatcccttgcaacatgaagccgttgcacgtgaggagtccacagagttcaaaaaagggattataattaaagaatcccgacgtggtttcttgctcagagatcgagttctaaggccagcccttgtcaaggtttccttaggtcctggaaataagaaatctcccgtgtctcctgacaagtctgtggagcaaccttcaacagctgctggaatagatgaaagatagtctcttgaacttgttcattaaaaatccagttccacctgcatacctgatatcttgtcattggtcaacttgaaattcttctagtttggtattttggcctgaggtgagtatagtctcttgtagtatggacctcaccaattttaacttgtgtcccgccgcactacaattttttgcttcatcatgacaaagggaattacttttgttcatgagagaatggtgatttcttttgcaatccatttttttttttaccaaagcttagaatgttcattctcggactttgttggcattattgttccttgtctcaatgcttaacaaagggaaatactagagaaagctcgactgcaaaaattacccatgtcattctacaatattgtatgtgttatatatatgccatatcttacgacttgt

SEQ ID NO: 4446 - protein, 330 aa, Glycine max
  misc_feature (1)..(330): Ceres Seq. ID no. 13638098
NQTTQINDQHTLYLFVTFARTREEKQTMATFLSNQSLLGSCPCSTPFSSKPFQTLKPQILSFPSRGFPRPLISSVNRRTQLKSSQDFPPTTNDETEETQNDVRGTNDDEDKKQVPSLMILLEAYKEAFFNGDQNTVAQIEEGIYSIANRKNKLIQKLSSLSADKAASKKSYLRLQADFDNFRKRTDKERLNIQSDAQQQVIEKLLLMVDNFERTQQQIKAATEKEKKIGVSYQGIYKQFVEVLRNHNVSVVATVGKPFNPLQHEAVAREESTEFKKGIIIKESRRGFLLRDRVLRPALVKVSLGPGNKKSPVSPDKSVEQPSTAAGIDER

SEQ ID NO: 4447 - protein, 303 aa, Glycine max
  misc_feature (1)..(303): Ceres Seq. ID no. 13638099
MATFLSNQSLLGSCPCSTPFSSKPFQTLKPQILSFPSRGFPRPLISSVNRRTQLKSSQDFPPTTNDETEETQNDVRGTNDDEDKKQVPSLMILLEAYKEAFFNGDQNTVAQIEEGIYSIANRKNKLIQKLSSLSADKAASKKSYLRLQADFDNFRKRTDKERLNIQSDAQQQVIEKLLLMVDNFERTQQQIKAATEKEKKIGVSYQGIYKQFVEVLRNHNVSVVATVGKPFNPLQHEAVAREESTEFKKGIIIKESRRGFLLRDRVLRPALVKVSLGPGNKKSPVSPDKSVEQPSTAAGIDER

SEQ ID NO: 4448 - protein, 213 aa, Glycine max
  misc_feature (1)..(213): Ceres Seq. ID no. 13638100
MILLEAYKEAFFNGDQNTVAQIEEGIYSIANRKNKLIQKLSSLSADKAASKKSYLRLQADFDNFRKRTDKERLNIQSDAQQQVIEKLLLMVDNFERTQQQIKAATEKEKKIGVSYQGIYKQFVEVLRNHNVSVVATVGKPFNPLQHEAVAREESTEFKKGIIIKESRRGFLLRDRVLRPALVKVSLGPGNKKSPVSPDKSVEQPSTAAGIDER

SEQ ID NO: 4449 - DNA, 1056 bp, Glycine max
  misc_feature (1)..(1056): Ceres Seq. ID no. 13638114
tggaatttgcattgatcttgtagattcttagacaaagcagcatttatcacatcaaagaatttcaaacaaatggaagagagtaaatgcagtccatggtatctatccactgtgacacaagtagaagaagtgaaatgcatcctaagactactcccaatttggctatgcaccatattatactctgtcgtttttgctcaaatggcatcactttttgtggagcaaggcgatgccatggacactagaatatcatctttccacattcctccagcaagcatgtccacctttgacattctaagtgtagcaattgtcatcttcatttataggcgagttctcgaccctcttgtggccagaacaatgaaatcaaaaggactcactgaacttcaaaggatgggaattggtctagtcctagcaattatggccatggtttcagcaggattggtggagcactttaggctaaagaatgcaatagaagactgcaatgaatgtaaagggtctagttcactttccatattttggcaagtgccacaatatgtgtttgtgggggcatcagaagttttcatgtatgtgggttaattagagttcttcaatgcacaaacacctgatggattaaagagttttggtagtgcactttgcatgacttcaatatcacttggaaactacgttagtagcttgcttgttgcaattgtgatgaagatttctgccacagatgagatgccaggatggatcccaggaaacttgaacaaagggcatttggatatgttttacttcctcttagcagcactcaccgcagctgatcttgtaatatatgtactgatggctaggtggtataaatatatcaaatttcaaggaaacaatgagaatgacaccaacaaagaagaccctgaagtaggagtgtagagaaattacaattttcagggtatagtgggctctttgttgtgatactagagaaattcaattttgcatttcgcctagtggagcaaagatactacgaattgattgtgttggtgtattataaataaaattgctctatataatagaaaatatatttgtgcatggtgc

SEQ ID NO: 4450 - protein, 166 aa, Glycine max
  misc_feature (1)..(166): Ceres Seq. ID no. 13638115
MEESKCSPWYLSTVTQVEEVKCILRLLPIWLCTILYSVVFAQMASLFVEQGDAMDTRISSFHIPPASMSTFDILSVAIVIFIYRRVLDPLVARTMKSKGLTELQRMGIGLVLAIMAMVSAGLVEHFRLKNAIEDCNECKGSSSLSIFWQVPQYVFVGASEVFMYVG

SEQ ID NO: 4451 - protein, 124 aa, Glycine max
  misc_feature (1)..(124): Ceres Seq. ID no. 13638116
MASLFVEQGDAMDTRISSFHIPPASMSTFDILSVAIVIFIYRRVLDPLVARTMKSKGLTELQRMGIGLVLAIMAMVSAGLVEHFRLKNAIEDCNECKGSSSLSIFWQVPQYVFVGASEVFMYVG

SEQ ID NO: 4452 - protein, 113 aa, Glycine max
  misc_feature (1)..(113): Ceres Seq. ID no. 13638117
MDTRISSFHIPPASMSTFDILSVAIVIFIYRRVLDPLVARTMKSKGLTELQRMGIGLVLAIMAMVSAGLVEHFRLKNAIEDCNECKGSSSLSIFWQVPQYVFVGASEVFMYVG

SEQ ID NO: 4453 - DNA, 1106 bp, Glycine max
  misc_feature (1)..(1106): Ceres Seq. ID no. 13638152
ggagagagagaaaaaaaaaaaaaagtctctgtttcttcacttgctcacaagccgcaactgctactgtgtacccaatctgagcccaacgagatgggggggcagaatctttccccaaaggaaaggagtagagattggattggagttcttatgaacagcagctttggttattgtacttatcaccatgatcttcgatctaatgagatgaatgtgttctgcgtggactgtgcacttaggatgtgtaggcactgtaaggaagctcattccctacatagaaggtttcagatttacaaatattcctaccaggatgtcttccgccatgccgagctgcagaagtattttgattgctccaaaattcagacttacatatccaataatgaaaggattgtgcatctcaaacctcggccttcaatcaccaaatctaagtctgctgatctaagtcccgactctaaatacaaagagaccggcatagcaacaagaccaaagtcagggggcacgtgtgaagaatgtggaaaacacttacaagatgagcgtaatcgcttctgctccattacatgcaagatctcagtgcatccagtggagacccaataccaaggtcaaaatcaatgttcaccaaaccaccaaagtgctagaggcatcatcaatccaaaacctgaaggcattgactttacaatgaatgataaccataattcagaaccggagtcatctatctctgaagctgagccatatgggtgggttgaagttgtgaatttcagaaagcgtccaaggaaaagtatccctcagaggcctgtctttgttttcacgtcttagaataagatacactactctaatggttttcttcattttttttttttgactttacatttcttgaacatttgagggaagctcaaccccgttatgccccatattgggatttaggtatatataacttgggagtttgagattcagttgctattagcaaagtaactagccgagcttgtatagcacaaggacaaaggtaatgctactaacacacttccgacactactactacttaatatctgtatagttttcagcatcttactgtactcccttcgccccacatctaatatctattaatgtttgaggtt

SEQ ID NO: 4454 - protein, 268 aa, Glycine max
  misc_feature (1)..(268): Ceres Seq. ID no. 13638153
GEREKKKKVSVSSLAHKPQLLLCTQSEPNEMGGQNLSPKERSRDWIGVLMNSSFGYCTYHHDLRSNEMNVFCVDCALRMCRHCKEAHSLHRRFQIYKYSYQDVFRHAELQKYFDCSKIQTYISNNERIVHLKPRPSITKSKSADLSPDSKYKETGIATRPKSGGTCEECGKHLQDERNRFCSITCKISVHPVETQYQGQNQCSPNHQSARGIINPKPEGIDFTMNDNHNSEPESSISEAEPYGWVEVVNFRKRPRKSIPQRPVFVFTS

SEQ ID NO: 4455 - protein, 238 aa, Glycine max
  misc_feature (1)..(238): Ceres Seq. ID no. 13638154
MGGQNLSPKERSRDWIGVLMNSSFGYCTYHHDLRSNEMNVFCVDCALRMCRHCKEAHSLHRRFQIYKYSYQDVFRHAELQKYFDCSKIQTYISNNERIVHLKPRPSITKSKSADLSPDSKYKETGIATRPKSGGTCEECGKHLQDERNRFCSITCKISVHPVETQYQGQNQCSPNHQSARGIINPKPEGIDFTMNDNHNSEPESSISEAEPYGWVEVVNFRKRPRKSIPQRPVFVFTS

SEQ ID NO: 4456 - protein, 219 aa, Glycine max
  misc_feature (1)..(219): Ceres Seq. ID no. 13638155
MNSSFGYCTYHHDLRSNEMNVFCVDCALRMCRHCKEAHSLHRRFQIYKYSYQDVFRHAELQKYFDCSKIQTYISNNERIVHLKPRPSITKSKSADLSPDSKYKETGIATRPKSGGTCEECGKHLQDERNRFCSITCKISVHPVETQYQGQNQCSPNHQSARGIINPKPEGIDFTMNDNHNSEPESSISEAEPYGWVEVVNFRKRPRKSIPQRPVFVFTS

SEQ ID NO: 4457 - DNA, 1368 bp, Glycine max
  misc_feature (1)..(1368): Ceres Seq. ID no. 13638160
ctctttcgttatctggtcatggttgtttgcgacttctgggagctcagtctcgctcagagtcagagaaaaacacccaaatcaaatattatcatggagcccagcttggatttgagactgggctttgtccccaaacccctttccctgtttttcggcgacgtttctgggaacagagacaagtgcgacaaagtggtcacactcgatggcttcgtgcagagattggaggaagagttgacaaaggtcgaggctttcaaacgcgagcttcctctctgcattctcctcctaaacgatgctatagcgagattgaaggaggaaaaagtgaagtgttcgggaatgcaagatccgcctcttaaaaccagttcaggaggaaatgaaaatgaaaactctgagaagaagaattggatgagttcagcacagctttggagcactcagaaatccaaatcgaggaatgaggaagatgataggtctgtgccagcgaactcaattaatgggaattcgtgtgtccccgagaaggagggctcgcaagttccgagctttggtttgatggctcgtgcttctgaactgagtcatagcaattccaagagtgttggtggagatactagttctggctcctctttgctccgtgttgaggtacagagtcagccacagccgccgcagcatatgcagcagaatccgaggaaacaacggcggtgctggtcgccggagcttcaccggcgctttgtggacgcccttcaacaacttggtggagcacaagtggccactcctaaacagattagagaactgatgcaggtggaaggccttacaaatgatgaagtgaaaagtcatttgcaaaagtacaggcttcatgttaggagattcccagttttttcaattggccaggttgataatggctcatggatgacacaggatgaatgtggggataaatcaaagggaaacatgtcacagtctggttctccacagggtcctctcacacctctgctcctaggaggagcaggatccgctaagggtctctcaagccctggacggaacagtgtggatgcagaagatgagcaatcatcagattgccggaattggaaaggagggctccaccaccagcagcttgaaactgataatcacagcctctaaaattttgcagataaatgataatacaatacataaaatgatgaggagttgaaggcccagaatttgacaacataagaataatagagatctaacacataaaagaactatagggatcaagtttatgctaccagtattttaaactgtttggtagagagcaactgaggttttgcagatttttcaaggtttcttcttttctatttttaaactcagtatagttgtatggagcttaaattttactgggcaattttc

SEQ ID NO: 4458 - protein, 373 aa, Glycine max
  misc_feature (1)..(373): Ceres Seq. ID no. 13638161
LFRYLVMVVCDFWELSLAQSQRKTPKSNIIMEPSLDLRLGFVPKPLSLFFGDVSGNRDKCDKVVTLDGFVQRLEEELTKVEAFKRELPLCILLLNDAIARLKEEKVKCSGMQDPPLKTSSGGNENENSEKKNWMSSAQLWSTQKSKSRNEEDDRSVPANSINGNSCVPEKEGSQVPSFGLMARASELSHSNSKSVGGDTSSGSSLLRVEVQSQPQPPQHMQQNPRKQRRCWSPELHRRFVDALQQLGGAQVATPKQIRELMQVEGLTNDEVKSHLQKYRLHVRRFPVFSIGQVDNGSWMTQDECGDKSKGNMSQSGSPQGPLTPLLLGGAGSAKGLSSPGRNSVDAEDEQSSDCRNWKGGLHHQQLETDNHSL

SEQ ID NO: 4459 - protein, 367 aa, Glycine max
  misc_feature (1)..(367): Ceres Seq. ID no. 13638162
MVVCDFWELSLAQSQRKTPKSNIIMEPSLDLRLGFVPKPLSLFFGDVSGNRDKCDKVVTLDGFVQRLEEELTKVEAFKRELPLCILLLNDAIARLKEEKVKCSGMQDPPLKTSSGGNENENSEKKNWMSSAQLWSTQKSKSRNEEDDRSVPANSINGNSCVPEKEGSQVPSFGLMARASELSHSNSKSVGGDTSSGSSLLRVEVQSQPQPPQHMQQNPRKQRRCWSPELHRRFVDALQQLGGAQVATPKQIRELMQVEGLTNDEVKSHLQKYRLHVRRFPVFSIGQVDNGSWMTQDECGDKSKGNMSQSGSPQGPLTPLLLGGAGSAKGLSSPGRNSVDAEDEQSSDCRNWKGGLHHQQLETDNHSL

SEQ ID NO: 4460 - protein, 343 aa, Glycine max
  misc_feature (1)..(343): Ceres Seq. ID no. 13638163
MEPSLDLRLGFVPKPLSLFFGDVSGNRDKCDKVVTLDGFVQRLEEELTKVEAFKRELPLCILLLNDAIARLKEEKVKCSGMQDPPLKTSSGGNENENSEKKNWMSSAQLWSTQKSKSRNEEDDRSVPANSINGNSCVPEKEGSQVPSFGLMARASELSHSNSKSVGGDTSSGSSLLRVEVQSQPQPPQHMQQNPRKQRRCWSPELHRRFVDALQQLGGAQVATPKQIRELMQVEGLTNDEVKSHLQKYRLHVRRFPVFSIGQVDNGSWMTQDECGDKSKGNMSQSGSPQGPLTPLLLGGAGSAKGLSSPGRNSVDAEDEQSSDCRNWKGGLHHQQLETDNHSL

SEQ ID NO: 4461 - DNA, 1187 bp, Glycine max
  misc_feature (1)..(1187): Ceres Seq. ID no. 13638166
tcgagtcagctacgtaggccccccccctcaaagttcaacaatgaatgatggaggatggattgctcgaattgcagcattgcttgtgggtgaggatccaacacagtcttatgcgctcgtatgcggtaactgccgcatgcataatggtaagttggctgcctttaatgttctaggtttgtgtgttcatacacttgcactcacatgtgtgtgggttgcacatacaaagtactccctccctccgtccctaattataaaattattttaaaaaaattgtttgtacctttttataagatctttttttaatttttagatgcattaattattttttttctacatatccttatttaattattttctctccaaacattaatgaaagtaattaaggggatagagatataagaaaaagataattttagaatgatagtacaaataattgataaatttaatgtaattaactatttttcttaagggatatgaattagttgaaagaatcttataattagagacggaaggagtaatagctaattttcatttctgaatacagtttaaattgtgtttttatctacttgtttcccttcaggtcttgctcggaaggaggatttcccatttattacttattactgcccacattgtcacgccctgaacaaaccaaagcaatcggatgagcgtacatctggtttaaattcccaaaacactcagtctcctaaagcagatgacagggaagaagttaaaaatgctagtgattctgaatccgagagtgtaataagaagcgataatcccgtaaatactagccctgagattgaggaagtttctgaaccggctatttcagtggagaaaaactagttaaaagacagtagcctcttttggggatggactgtttagatgacatgtcttgccccttgtttcaggtcacagacgaccaactataaggaaaccaactttgtagttagagtccttattgctgttgtaacaggaagagttttgatatattattttggaacttgcgatttataaattataacacataaattacatggcttgcttatgaattaaggcaattttgggatttccatataatttttcctttttttgttgtcgggatagtcttagttcaaaaatgagatttggttttaaaaaaaaaaaaaaaaaaaaaaaaaaaaaaaaagaattcctgcagcccgggggatcca

SEQ ID NO: 4462 - protein, 86 aa, Glycine max
  misc_feature (1)..(86): Ceres Seq. ID no. 13638167
RVSYVGPPPQSSTMNDGGWIARIAALLVGEDPTQSYALVCGNCRMHNGKLAAFNVLGLCVHTLALTCVWVAHTKYSLPPSLIIKLF

SEQ ID NO: 4463 - protein, 73 aa, Glycine max
  misc_feature (1)..(73): Ceres Seq. ID no. 13638168
MNDGGWIARIAALLVGEDPTQSYALVCGNCRMHNGKLAAFNVLGLCVHTLALTCVWVAHTKYSLPPSLIIKLF

SEQ ID NO: 4464 - protein, 43 aa, Glycine max
  misc_feature (1)..(43): Ceres Seq. ID no. 13638169
MTCLAPCFRSQTTNYKETNFVVRVLIAVVTGRVLIYYFGTCDL

SEQ ID NO: 4465 - DNA, 645 bp, Glycine max
  misc_feature (1)..(645): Ceres Seq. ID no. 13638177
atcctaatcgaaaaaggctgtgctgtgcctgtgtcttccgctgactccaccttgtattgtatcttcttccagcactgcgttacgttgcgtttggaaactctgattagagccttcgagttggatctcaaattttgatttcaactgaataagcctaaactgcaacatcaccccaaatttctatcctgcaacacaattcaataaaaccacagcgtggcgtggttgtagtgcaagagaaggtattgcagattgatttggttgtcggaagatgcatcctcctttaacattgcacaaacacccaatgtgtgctgaaattattgaacagtttcaaaagtgtcatatagaacatcctattgcaaaattctttggtgaatgtactgatttgaaaataaaattggatcgttgtttcagagaagagaaagctttgaagcggaaggctaactttgaagagagcaaaaagttgaaggaacagttgcgagctttgaggaaagaaaatgctacaagcagtggtcaatagaagaatcttttgaaatgttgaaaatacaaaattgttttgcaaattacaatccgtaattttgtacaatggctggatacgatatgtatcttgcagcctcaaaaaagagggttattacacataatattgtttgg

SEQ ID NO: 4466 - protein, 82 aa, Glycine max
  misc_feature (1)..(82): Ceres Seq. ID no. 13638178
MHPPLTLHKHPMCAEIIEQFQKCHIEHPIAKFFGECTDLKIKLDRCFREEKALKRKANFEESKKLKEQLRALRKENATSSGQ

SEQ ID NO: 4467 - protein, 71 aa, Glycine max
  misc_feature (1)..(71): Ceres Seq. ID no. 13638179
MCAEIIEQFQKCHIEHPIAKFFGECTDLKIKLDRCFREEKALKRKANFEESKKLKEQLRALRKENATSSGQ

SEQ ID NO: 4468 - protein, 44 aa, Glycine max
  misc_feature (1)..(44): Ceres Seq. ID no. 13638180
ILIEKGCAVPVSSADSTLYCIFFQHCVTLRLETLIRAFELDLKF

SEQ ID NO: 4469 - DNA, 1401 bp, Glycine max
  misc_feature (1)..(1401): Ceres Seq. ID no. 13638292
atgaccattcaaagaaatgttatctttaccgaactgagctggaaaagactgaacaatattggaaaggctggtatgaaggcctctcagataaatttttgtcatgtcctgtgccaaaactgttgttattagccggaacagatagattggacaggtctctcacaattggtcaaatgcaagggaagtttcaaatggtagttgtaaggcatacagggcatgctattcaggaagatgtacctgatgaatttgcaactctgattgttaacttcatttctcgtaaccgaataggccctcatggaattgagatacctggccttcgcaagccagccttttccaaaccttgaatctggtattagataaaccaagaatgaccaccactgcaagatgaagatgatgaattttttttttttttttttcttaaaaaacttaaaatattattattccttgtttttttttttcctcctcctcctccctactactaccactctccaccaccaccatccccatcaccgccgtctccatattattacaaatcccctccacctccatctccatctccaccacctccttactactatcaaagtcctcctccaccatctcccacttctcatcctccctattactacaaatcccctccaccaccaacgtcatatcctccacctccttaccactacgtgagccctccaccaccttctccatctcctcccccaccataccattacacatcaccacctcctccttccccagctcctgctcccaagtacatttacaaatcacctccacctccggtttatatctatgcttccccacctccacctatctacaagtaagctcaaattgtgaaagcaccattcatgatgaatcatgttctagttttcatcgaggaataaaggcaagctctattttgagccaagtgaaacatctatcttcctgtctaagttctttgaataaaagtctgaatgtgtcatctctatgctacaatgtttatgattcagatcaggttgattctatttgtttgatggccatcttgcacgtcctgatcttattgtgttcaagtgacggacaaatccaaacaggaaagagagatttgaaatgtaaatgccaagtaaatgtgaaaagtacagtccatttttagtgatctctttaatttatttgttcatagattaatatggtcgtgtatgattgcttttctatttattgtggcatttttgtgttgtaccctgttgttgtgtttgcaataattattagtaataaagcagcaaatttcaatttgtgttcatgcatcnnnaaaaaaaaaaaaaaaaaaaaaaaaaaaaaaaaaaaaaaaaaaaaaaaaaaaaaaaaaaaaaaaaaaaaaaaaaaaaaaaagtttatcgatcccgccaacctcaaggggggccccgg

SEQ ID NO: 4470 - protein, 112 aa, Glycine max
  misc_feature (1)..(112): Ceres Seq. ID no. 15219405
DHSKKCYLYRTELEKTEQYWKGWYEGLSDKFLSCPVPKLLLLAGTDRLDRSLTIGQMQGKFQMVVVRHTGHAIQEDVPDEFATLIVNFISRNRIGPHGIEIPGLRKPAFSKP

SEQ ID NO: 4471 - protein, 97 aa, Glycine max
  misc_feature (1)..(97): Ceres Seq. ID no. 15219406
MKMMNFFFFFFLKNLKYYYSLFFFFLLLLPTTTTLHHHHPHHRRLHIITNPLHLHLHLHHLLTTIKVLLHHLPLLILPITTNPLHHQRHILHLLTTT

SEQ ID NO: 4472 - protein, 95 aa, Glycine max
  misc_feature (1)..(95): Ceres Seq. ID no. 15219407
MMNFFFFFFLKNLKYYYSLFFFFLLLLPTTTTLHHHHPHHRRLHIITNPLHLHLHLHHLLTTIKVLLHHLPLLILPITTNPLHHQRHILHLLTTT

SEQ ID NO: 4473 - protein, 56 aa, Glycine max
  misc_feature (1)..(56): Ceres Seq. ID no. 15219408
MQGKFQMVVVRHTGHAIQEDVPDEFATLIVNFISRNRIGPHGIEIPGLRKPAFSKP

SEQ ID NO: 4474 - DNA, 908 bp, Glycine max
  misc_feature (1)..(908): Ceres Seq. ID no. 13638318
agaaaatttgaacatatgttccttttttgttacaacgttgttgtttccaacggtacaacggtagatgatgggaacgctatctacgcaatttcgttccatcaaacgcccaaatccaaaccctaaactatccaaatcgtcatctcctacaaaatcagaaattaaattcatcgctaaaccaaaaccaaaatcagagtcagagtcagagtcatggtctgtttatctcatcctctccaccaaccatcctatcaaaacctacgttggaattacaaacaatttccctcgccgtttgaagcagcataacggtgaacttaaaggtggtgcaaaggcatcccgtgctggaagaccttggatttgtgcatgcataatttgtggttttacagaccgaagtgaagctagtgtatttgaatcaaaatggaaaactttctcaaggagagctccccgcaaaaatcaaaatgacaatctctccaagcaaagtgaagattcatcattaccactgctgcgacacagacaagcggctctgaatagagtgaaaggttcactcgactgcgctcacttagaaattatttggcatttggatccattgtgatccaactgccacaatgtatgtgttttgattatgtaattgtaataagttcaaatagcaaaacataggccataagagaaatattaagaacacattttgtgttattagttaaaatttattgaaaattataaaattataagtggatttcattaagtaaaaagtgagatcctccaaattttataattttttataataaagaatattaaaaagagtgcgtagctagcatttttctatatttgatagtactagcaaattgtaccagacattgattggttcttgtagtaaggtctttgtatagtatataagtgacgaaaggttataattt

SEQ ID NO: 4475 - protein, 173 aa, Glycine max
  misc_feature (1)..(173): Ceres Seq. ID no. 13638319
MMGTLSTQFRSIKRPNPNPKLSKSSSPTKSEIKFIAKPKPKSESESESWSVYLILSTNHPIKTYVGITNNFPRRLKQHNGELKGGAKASRAGRPWICACIICGFTDRSEASVFESKWKTFSRRAPRKNQNDNLSKQSEDSSLPLLRHRQAALNRVKGSLDCAHLEIIWHLDPL

SEQ ID NO: 4476 - protein, 172 aa, Glycine max
  misc_feature (1)..(172): Ceres Seq. ID no. 13638320
MGTLSTQFRSIKRPNPNPKLSKSSSPTKSEIKFIAKPKPKSESESESWSVYLILSTNHPIKTYVGITNNFPRRLKQHNGELKGGAKASRAGRPWICACIICGFTDRSEASVFESKWKTFSRRAPRKNQNDNLSKQSEDSSLPLLRHRQAALNRVKGSLDCAHLEIIWHLDPL

SEQ ID NO: 4477 - DNA, 698 bp, Glycine max
  misc_feature (1)..(698): Ceres Seq. ID no. 13638360
cgaaaatttcttcattcttgttatctctctctctctctctcttcactatattcgttttctgttctttgaaagatggctggggttcctccagaagcacatgtttcacttgatcagcttaagcagataatggatgagtttgcaaaggagagggattgggagcagtttcatagcccaaggaacctccttttggctttggtgggtgaagtgggagaattgtctgagatatttcagtggaaaggggaggttccaaagggtcttctagattggaaagaggaggaaaaggttcatcttggtgaagagctttcagatgtgttgctttatcttgtgaggctctccgacatgtgtggtgtagatcttggcaaagctgctttaagaaaggttcaactcaatgccgtaaaatacccaaaaaaggtttatgaagacccttcaagcagcactgtcagccccaacaacaccaattgataatgcaactactcgagatgctaattgatgataatccattggtgtctatagttattgtagtcgttgttttaggggggaggggggagagtaggaaagtggttttggtttttgttcttctataaaagggtggagtatagtattgcttgattggtttggtactatgaacatttattctcacctttggcaatattgtatcgaatccttttagatggatcgaataataatacattagcttt

SEQ ID NO: 4478 - protein, 129 aa, Glycine max
  misc_feature (1)..(129): Ceres Seq. ID no. 15220401
MAGVPPEAHVSLDQLKQIMDEFAKERDWEQFHSPRNLLLALVGEVGELSEIFQWKGEVPKGLLDWKEEEKVHLGEELSDVLLYLVRLSDMCGVDLGKAALRKVQLNAVKYPKKVYEDPSSSTVSPNNTN

SEQ ID NO: 4479 - protein, 111 aa, Glycine max
  misc_feature (1)..(111): Ceres Seq. ID no. 15220402
MDEFAKERDWEQFHSPRNLLLALVGEVGELSEIFQWKGEVPKGLLDWKEEEKVHLGEELSDVLLYLVRLSDMCGVDLGKAALRKVQLNAVKYPKKVYEDPSSSTVSPNNTN

SEQ ID NO: 4480 - DNA, 1285 bp, Glycine max
  misc_feature (1)..(1285): Ceres Seq. ID no. 13638375
cctagaacatcctaatcgaaaaattaaattcaaaattgaaaacggaaggaaaactcagcgtgtgattgaaatttgaagagtgtgaagatggcgatggaagtggagcagaatcagaatcatcaattagggtttcccttctggaaaccgctccgtcgcaggttcggacccgaatctcctttcttcgctcatggcaacctcgaacgggaacttctcgccaaacagcttgctttggaattaacagaagagaaacaacagcttgagaaatggatgcaagaggaagaaggaagggaagtcttttgtcccattgtgggttgtggtgcacgcttgacctcaatggaggactttgaaaatcactataatgcaaggcatactgcatcctgttctgtgtgctccagagtttacccgacatcttggttgctcagcatacatgtatctgaagtgcatgattctttctttcaggcaaaagttgcacgtggctatgatatgtatgaatgcttggtggaaaggtgtggattgaaattcaaaagctacaatagtaggcagcagcatctggttgacaagcataaattccccacctcatttgagtttttcaagaaggctaagccttcaaagaaacataggttgaagtcccaacgcaaacaagctgtttgtaaggaggattcttcaggaatgatggaagtggaaaatgcatccatggatgaccttgtttcagcagtctctaaattgaacacttctgactccaccccttcatctatcagttttggtcgccgccacaaaggcttgtcatttgtccctcgagctgttcagcgtggaggtggatcaaactcaacagcatctgtgacaaagaaataagcttggactcaaacaaatctgcattcttaattgctgaatgatcaacatgcagatgcagctccattataaaatccgtgtggacgtcttgcattctaagtttgaagaagccaattaagttgaagatggaaaattagaatcatgctggaggatgtaataacagcatttgtcagtattatctttttttgctcccacttggggctgtaagtttgcccaacacaggcaatatgagcatgcgaatatgcctggcttgtataatgtggagattttgagcttctttttctatgatattgttctgttaacatctaaccactttactgaatagccacattgtaattagagttgaaagaaatcactcttaaagcttgtcatacgtttgtggcagcacatgaataagaaaaaaaaaaaaaaaaaagcttatcgataccgtcgacct

SEQ ID NO: 4481 - protein, 254 aa, Glycine max
  misc_feature (1)..(254): Ceres Seq. ID no. 15220403
MAMEVEQNQNHQLGFPFWKPLRRRFGPESPFFAHGNLERELLAKQLALELTEEKQQLEKWMQEEEGREVFCPIVGCGARLTSMEDFENHYNARHTASCSVCSRVYPTSWLLSIHVSEVHDSFFQAKVARGYDMYECLVERCGLKFKSYNSRQQHLVDKHKFPTSFEFFKKAKPSKKHRLKSQRKQAVCKEDSSGMMEVENASMDDLVSAVSKLNTSDSTPSSISFGRRHKGLSFVPRAVQRGGGSNSTASVTKK

SEQ ID NO: 4482 - protein, 252 aa, Glycine max
  misc_feature (1)..(252): Ceres Seq. ID no. 15220404
MEVEQNQNHQLGFPFWKPLRRRFGPESPFFAHGNLERELLAKQLALELTEEKQQLEKWMQEEEGREVFCPIVGCGARLTSMEDFENHYNARHTASCSVCSRVYPTSWLLSIHVSEVHDSFFQAKVARGYDMYECLVERCGLKFKSYNSRQQHLVDKHKFPTSFEFFKKAKPSKKHRLKSQRKQAVCKEDSSGMMEVENASMDDLVSAVSKLNTSDSTPSSISFGRRHKGLSFVPRAVQRGGGSNSTASVTKK

SEQ ID NO: 4483 - protein, 194 aa, Glycine max
  misc_feature (1)..(194): Ceres Seq. ID no. 15220405
MQEEEGREVFCPIVGCGARLTSMEDFENHYNARHTASCSVCSRVYPTSWLLSIHVSEVHDSFFQAKVARGYDMYECLVERCGLKFKSYNSRQQHLVDKHKFPTSFEFFKKAKPSKKHRLKSQRKQAVCKEDSSGMMEVENASMDDLVSAVSKLNTSDSTPSSISFGRRHKGLSFVPRAVQRGGGSNSTASVTKK

SEQ ID NO: 4484 - DNA, 1360 bp, Glycine max
  misc_feature (1)..(1360): Ceres Seq. ID no. 13638402
ataaaccctgcaccttccaacaatcacttctctcctccttccttctcacttctcacttctcaccaattacgttaccttgcactattattctatacaactgtaaacatccttaattgcaaaccctctctctctctccttaaataattctcataaaaaaataaaataaaaattaaaactaacaaagaaaccattttgcacaaacccaattgagagtttgagacccagatgatgatgatgaacaatactattattccatggtcaaccattggcgttgtgattgcatggtacacttccaacataggggttcttcttctgaacaagtacttgctaagcaactacggctttaggttccccgtgttcctcaccacgtgtcacatgctggtgtgctcgctcttcagctacgttattgtttccgttacggaagctgttccgctgcagcgcgtgcggtccaggagccagttttggaggatcgtggcgctcggcgtcgttttctgcttctccgtcgtttgcgggaacgtgtcgctcaggtacattccggtgtcgtttaatcaggccatcggcgccaccacgccgttcttcaccgccgttttcgcttatgctgtcagcgccaagagggaggcttgggttacgtacgccacgctcttgcccgttgttgcgggcgtcgtcatagctagtgggggtgaaccaagttttcatctgtttggatttataatctgtgtttcatcgactggtgccagagcatttaaatcagtgcttcaagatattttgttgtcctcagagggagaaaagttgaattctatgaacctgctgctttatatggctccaatagcagtgatggtcttacttcctacaatattgttgatggagggaaatgtgattcagatcactatggatcttgccagaaaggatataagaattttttggtatctgcttctcagttcttctcttgcatattttgtgaacctcactaattttttggtgaccaaacatacaagtgcacttacccttcaggttttaggaaatgcaaagggggcagttgctgtggtggtctcaattttgatattcaaaaaccccatttcaatgataggaatgcttggctatgcactcactatcattggagttatcttgtacagtgaaaccaagaagaggtatagcaaaaattagtaaaattaacaagattaccaatcaaagcagggtgtgatttaccacaagcgagagggccaacaagttatacttatgcatacaaaattatgagcttgcagcaaccacttttgttacacgtgaacaagaatatttcccccctaactatttcattcattgcaagcgttttgggagtagtcacactccccataaacccttt

SEQ ID NO: 4485 - protein, 312 aa, Glycine max
  misc_feature (1)..(312): Ceres Seq. ID no. 13638403
MMMMNNTIIPWSTIGVVIAWYTSNIGVLLLNKYLLSNYGFRFPVFLTTCHMLVCSLFSYVIVSVTEAVPLQRVRSRSQFWRIVALGVVFCFSVVCGNVSLRYIPVSFNQAIGATTPFFTAVFAYAVSAKREAWVTYATLLPVVAGVVIASGGEPSFHLFGFIICVSSTGARAFKSVLQDILLSSEGEKLNSMNLLLYMAPIAVMVLLPTILLMEGNVIQITMDLARKDIRIFWYLLLSSSLAYFVNLTNFLVTKHTSALTLQVLGNAKGAVAVVVSILIFKNPISMIGMLGYALTIIGVILYSETKKRYSKN

SEQ ID NO: 4486 - protein, 311 aa, Glycine max
  misc_feature (1)..(311): Ceres Seq. ID no. 13638404
MMMNNTIIPWSTIGVVIAWYTSNIGVLLLNKYLLSNYGFRFPVFLTTCHMLVCSLFSYVIVSVTEAVPLQRVRSRSQFWRIVALGVVFCFSVVCGNVSLRYIPVSFNQAIGATTPFFTAVFAYAVSAKREAWVTYATLLPVVAGVVIASGGEPSFHLFGFIICVSSTGARAFKSVLQDILLSSEGEKLNSMNLLLYMAPIAVMVLLPTILLMEGNVIQITMDLARKDIRIFWYLLLSSSLAYFVNLTNFLVTKHTSALTLQVLGNAKGAVAVVVSILIFKNPISMIGMLGYALTIIGVILYSETKKRYSKN

SEQ ID NO: 4487 - protein, 310 aa, Glycine max
  misc_feature (1)..(310): Ceres Seq. ID no. 13638405
MMNNTIIPWSTIGVVIAWYTSNIGVLLLNKYLLSNYGFRFPVFLTTCHMLVCSLFSYVIVSVTEAVPLQRVRSRSQFWRIVALGVVFCFSVVCGNVSLRYIPVSFNQAIGATTPFFTAVFAYAVSAKREAWVTYATLLPVVAGVVIASGGEPSFHLFGFIICVSSTGARAFKSVLQDILLSSEGEKLNSMNLLLYMAPIAVMVLLPTILLMEGNVIQITMDLARKDIRIFWYLLLSSSLAYFVNLTNFLVTKHTSALTLQVLGNAKGAVAVVVSILIFKNPISMIGMLGYALTIIGVILYSETKKRYSKN

SEQ ID NO: 4488 - DNA, 586 bp, Glycine max
  misc_feature (1)..(586): Ceres Seq. ID no. 13638406
acatcctaatcgaaaaactttacaaccttttaagcaactccttttgctttattgatgtattcttcattttaagcaccatcatcttcctattttgttttccaatattgctgtttgttgtggtaaatttttctgtagttcatcatcatgctagaaggcaaggctgtgattggtgagactgacatgcttcagaccatgcagcaagatgctatggatttagcatccaaagcactcgatttctttgatgtcactgaagccattaagattgctcgatttataaagaaggagtttgataggatgcatggacctggttggcagtgtattgtaggcactgattttggttcgtttgtgactcactgttgtggctgtttcatctatttctgcttaggcaacttggcaattttgctattcagaggctcggctgctccagaggcacatgaaaatcggttctcagcactagatgcagccaaagcataatttcattgcctaattaattttccctctcttttgacttttctatatatatttttgttcattccatgtaatgtaatgataatgtagaaagaaatggaaggttttagagaaaagc

SEQ ID NO: 4489 - protein, 109 aa, Glycine max
  misc_feature (1)..(109): Ceres Seq. ID no. 13638407
MLEGKAVIGETDMLQTMQQDAMDLASKALDFFDVTEAIKIARFIKKEFDRMHGPGWQCIVGTDFGSFVTHCCGCFIYFCLGNLAILLFRGSAAPEAHENRFSALDAAKA

SEQ ID NO: 4490 - protein, 97 aa, Glycine max
  misc_feature (1)..(97): Ceres Seq. ID no. 13638408
MLQTMQQDAMDLASKALDFFDVTEAIKIARFIKKEFDRMHGPGWQCIVGTDFGSFVTHCCGCFIYFCLGNLAILLFRGSAAPEAHENRFSALDAAKA

SEQ ID NO: 4491 - protein, 93 aa, Glycine max
  misc_feature (1)..(93): Ceres Seq. ID no. 13638409
MQQDAMDLASKALDFFDVTEAIKIARFIKKEFDRMHGPGWQCIVGTDFGSFVTHCCGCFIYFCLGNLAILLFRGSAAPEAHENRFSALDAAKA

SEQ ID NO: 4492 - DNA, 1724 bp, Glycine max
  misc_feature (1)..(1724): Ceres Seq. ID no. 13638441
aattaacactcatcacattcgttgtgtttggcttcttcactcgctttctctatttttttctcactaaaaagttccatcttttttttttttttaatttctggggttattattgctttctgtgattctgtctcagttccattttggtatctttgagggaaattcattgggtttgcagggttttatcttgttagaatttagaccaattggctaacagataatagtcttcattgaacatcaatttcaagcattctctctgatttttttgatcaagtggctcttttctagattccgattcccttcaaaatgcttctggatttatccttagtattgttgtggtaaaacctccacttctgttatcattttctctcttctgccttatcttcctcagtttccactcatcaagtttcaatcttcctttgaataagcccaaatttgattgtatgaaccagtagctttttgcttgtacaaaattgaattgatgaagtgggaaagtataaccctctcttctcctacaccttgcactccaaactccaacaccaattggttggtgatggaggataataatagcaggagcacaaaatggacctctgaagagaacaagctctttgaaaatgctcttgcagtgcatgataaggacaccccggatcggtggcacagagtggctgagatgattcctggaaagacagtggttgatgtgataaggcagtacaaggagttggaagtagatgttagcaatatagaagctggtttgattccagttcctggctatagtagcactgctacctcacccttcaccttagattgggtgaacactcctggctatgatgggtttaaaggatgtggaaagagatcttcctcagtgagaccgattgagcatgaaaggaagaaaggagtgccttggactgaagacgaacataaattgtttctattgggtctgaagaagtatgggaaaggtgattggagaaatatatctcgcaattttgttattacaagaactccaacacaggttgctagtcatgctcagaagtacttcataaggcagctttcaggaggcaaagacaagaggagggctagcatacatgacataacaacagtgaatctcacagaaaccataacaacttcttcagaagacaccaatggatcctcttcaccacatgtgctctcacagcaacaacagccaaattctactcctactacaccaagaactcgttttcagtggagtaatcagtctaacacaggagtagctatgactctcaaccctgctcatgaaagagtcttcatgtctcattatggtgctaactcctttggggttaaaattgagggacagaatcttcatgagtcttcttacttgcgacctcagacacagaacatggttttccaaatgcaacagtcctctcaacactagttccatgcattatcacttgttgtagtgaattattaatgggcagaagtagaaccagaatcttctgtccatttcaataagtacagtgcttgagttgagctttttccccaagttcttatgtgaataccctagattgttggttagttattatgaacttgaaggaaggtacatacatttgtttcttcaacaaataagaacttcctgaaaggagtggcaggcaaccaagtccccaacgttggttttggttggtttttctatgtkgtctaagaataatggatttcaagccccgtgtwtaattaatgaaatgtttcmmcttrgrggc

SEQ ID NO: 4493 - protein, 308 aa, Glycine max
  misc_feature (1)..(308): Ceres Seq. ID no. 15220411
MKWESITLSSPTPCTPNSNTNWLVMEDNNSRSTKWTSEENKLFENALAVHDKDTPDRWHRVAEMIPGKTVVDVIRQYKELEVDVSNIEAGLIPVPGYSSTATSPFTLDWVNTPGYDGFKGCGKRSSSVRPIEHERKKGVPWTEDEHKLFLLGLKKYGKGDWRNISRNFVITRTPTQVASHAQKYFIRQLSGGKDKRRASIHDITTVNLTETITTSSEDTNGSSSPHVLSQQQQPNSTPTTPRTRFQWSNQSNTGVAMTLNPAHERVFMSHYGANSFGVKIEGQNLHESSYLRPQTQNMVFQMQQSSQH

SEQ ID NO: 4494 - protein, 284 aa, Glycine max
  misc_feature (1)..(284): Ceres Seq. ID no. 15220412
MEDNNSRSTKWTSEENKLFENALAVHDKDTPDRWHRVAEMIPGKTVVDVIRQYKELEVDVSNIEAGLIPVPGYSSTATSPFTLDWVNTPGYDGFKGCGKRSSSVRPIEHERKKGVPWTEDEHKLFLLGLKKYGKGDWRNISRNFVITRTPTQVASHAQKYFIRQLSGGKDKRRASIHDITTVNLTETITTSSEDTNGSSSPHVLSQQQQPNSTPTTPRTRFQWSNQSNTGVAMTLNPAHERVFMSHYGANSFGVKIEGQNLHESSYLRPQTQNMVFQMQQSSQH

SEQ ID NO: 4495 - protein, 245 aa, Glycine max
  misc_feature (1)..(245): Ceres Seq. ID no. 15220413
MIPGKTVVDVIRQYKELEVDVSNIEAGLIPVPGYSSTATSPFTLDWVNTPGYDGFKGCGKRSSSVRPIEHERKKGVPWTEDEHKLFLLGLKKYGKGDWRNISRNFVITRTPTQVASHAQKYFIRQLSGGKDKRRASIHDITTVNLTETITTSSEDTNGSSSPHVLSQQQQPNSTPTTPRTRFQWSNQSNTGVAMTLNPAHERVFMSHYGANSFGVKIEGQNLHESSYLRPQTQNMVFQMQQSSQH

SEQ ID NO: 4496 - DNA, 527 bp, Glycine max
  misc_feature (1)..(527): Ceres Seq. ID no. 13638462
attggaatggaatttccactttgagttcgaactaaacaattcaattcaatctgcctcgatcatggagaggaaaacatttgggtttttgttcttgctcctccttgtcttagcttctgatgtgacggtgaagagagcagaggcgaaagattgcttgacaaggaggcacgggttccagggtagatgcttattcgacaggcaatgtgcacatgtgtgcaggagcgatggtttcatcggtggtcagtgccgaggcccccttcgcaaatgcttttgcagcaggccatgttggtcgaaattactactgccaaagaggccatgaaataaacaaacaaacaaataaataaatagctctaaccgacacatatgtacgtagtgtcggggttctagctagctaggtaggtacgtgtgtcttttgttatcgatcctagtttggtggagcaagtgtggcatcatgatctagttatatatatatgtcgtgatcatcttgctctgttcagcaataaattataatggaaattaataaattagtc

SEQ ID NO: 4497 - protein, 104 aa, Glycine max
  misc_feature (1)..(104): Ceres Seq. ID no. 13638463
LEWNFHFEFELNNSIQSASIMERKTFGFLFLLLLVLASDVTVKRAEAKDCLTRRHGFQGRCLFDRQCAHVCRSDGFIGGQCRGPLRKCFCSRPCWSKLLLPKRP

SEQ ID NO: 4498 - protein, 84 aa, Glycine max
  misc_feature (1)..(84): Ceres Seq. ID no. 13638464
MERKTFGFLFLLLLVLASDVTVKRAEAKDCLTRRHGFQGRCLFDRQCAHVCRSDGFIGGQCRGPLRKCFCSRPCWSKLLLPKRP

SEQ ID NO: 4499 - DNA, 647 bp, Glycine max
  misc_feature (1)..(647): Ceres Seq. ID no. 13638509
aatcgaaaaactcacaaaacaatataacttaattgccttaaggaacgttcgagaccacagaggtttctctagtcttcttctgtggagagcttgttttctcttgttcattcatctcacttccaattaaggaacaagctttccaccaatttgaatcaccaatggctcgctctttctccaacctcaaggttctctctgctcttgtcgccgacggattctccaacactctcaccaggcgtgggtacgcagtagcgacacaaagcgcaacaagaggaggagcagcctccatcagcggcaagtcaggggaagacaaggtactaggaggaggtgctgaaaaggtttcgtgggtcccagaccctgtcactggttactacaaaccggagaacatcaaagagattgatgttgctgagctgagagccacggttttgggcaaaaaattcaaccactaggctctacttaatttcaataattaacctttttggtctcacgtgaatatgttatatgatatatgaagttcacagaaccttcggggattattcagcatggggtttttttcttgtatttctctcttgagaatttggactagcatatgaccaaattaatgtttactagtgtgattggatctcccgttgaaaactcaataaagtggg

SEQ ID NO: 4500 - protein, 95 aa, Glycine max
  misc_feature (1)..(95): Ceres Seq. ID no. 15220420
MARSFSNLKVLSALVADGFSNTLTRRGYAVATQSATRGGAASISGKSGEDKVLGGGAEKVSWVPDPVTGYYKPENIKEIDVAELRATVLGKKFNH

SEQ ID NO: 4501 - DNA, 1106 bp, Glycine max
  misc_feature (1)..(1106): Ceres Seq. ID no. 13638510
acatcctaatcgaaaaaaaaatcagaaggcatcatggcagccaaagcaaaaggaaggggttggcttacaataaagaatgggagaaaaggaaagaagcacgttgccaaccccatcttagtagattcacatacttcagcagcaaaagcctcttcttcttcttcttcttcttcttcactctcttcacaaatgaaaatactttgctctcttcctccaactctctcatactttcacttttctttgttcatgcaagatccaaagaacgattcaaacacaaggaagccatggtaccaaagagcaattgaggtgactagcctatggaaaagtgtatcaaaatccacagaaattccaacacctaattcttcaactttatggaagagatcatcatcaatgccaaaatcccctcaagtccctactacaccaagtcctaacaacaagaacaagctaagaaaatgtgcctctctaaaggttgcatcatccttcacaagggtttgtctttgtgctccaatctattcctacaacgagattttaagagctgaggtgccacctagaagaagcaatagttatccaagatcaaagccattgcatgcttcacatgagagaactcctagtgctagacttagcactgagggaaggagggtatttaggggcaaatcattgactgatgatgttctaataaggaggtttgtgattgaggaagaggcaatgatgcaaattagaagaagaaatcaaatggaagttattaggaagaggagtatgatgaggagaaaaaagcttgggcctagtcctcttagtagaatggttatggcaaatgatattggacaattttaatttgattggtccaatttggttagtgtccagtcccattggtgaattttgattctccatattaatgcctcacctttcccttttttttttctttggccttaatttcattcactgaactttttcacctcgtgtgacaagtttctactactgggattatcttataattgcaacatatctttagttttagaagacccaattttaagtgggtttgatttaatgatattgctatgtatagctccgatcagaatcacaacttttaatttcatttctatattcattcc

SEQ ID NO: 4502 - protein, 264 aa, Glycine max
  misc_feature (1)..(264): Ceres Seq. ID no. 13638511
MAAKAKGRGWLTIKNGRKGKKHVANPILVDSHTSAAKASSSSSSSSSLSSQMKILCSLPPTLSYFHFSLFMQDPKNDSNTRKPWYQRAIEVTSLWKSVSKSTEIPTPNSSTLWKRSSSMPKSPQVPTTPSPNNKNKLRKCASLKVASSFTRVCLCAPIYSYNEILRAEVPPRRSNSYPRSKPLHASHERTPSARLSTEGRRVFRGKSLTDDVLIRRFVIEEEAMMQIRRRNQMEVIRKRSMMRRKKLGPSPLSRMVMANDIGQF

SEQ ID NO: 4503 - protein, 213 aa, Glycine max
  misc_feature (1)..(213): Ceres Seq. ID no. 13638512
MKILCSLPPTLSYFHFSLFMQDPKNDSNTRKPWYQRAIEVTSLWKSVSKSTEIPTPNSSTLWKRSSSMPKSPQVPTTPSPNNKNKLRKCASLKVASSFTRVCLCAPIYSYNEILRAEVPPRRSNSYPRSKPLHASHERTPSARLSTEGRRVFRGKSLTDDVLIRRFVIEEEAMMQIRRRNQMEVIRKRSMMRRKKLGPSPLSRMVMANDIGQF

SEQ ID NO: 4504 - protein, 194 aa, Glycine max
  misc_feature (1)..(194): Ceres Seq. ID no. 13638513
MQDPKNDSNTRKPWYQRAIEVTSLWKSVSKSTEIPTPNSSTLWKRSSSMPKSPQVPTTPSPNNKNKLRKCASLKVASSFTRVCLCAPIYSYNEILRAEVPPRRSNSYPRSKPLHASHERTPSARLSTEGRRVFRGKSLTDDVLIRRFVIEEEAMMQIRRRNQMEVIRKRSMMRRKKLGPSPLSRMVMANDIGQF

SEQ ID NO: 4505 - DNA, 666 bp, Glycine max
  misc_feature (1)..(666): Ceres Seq. ID no. 13638591
ttactgtggatatggtgattcatgtaagtttatgcatgattgaggggactacaagtctgggtggcagatggagaaggaatgggaagaagctgagaaagcaaggaagatgagattggctgcaggagaggatgcagatgaggagggtgctaatttgactgatgaagatgatgaggattctttaccatttgcctgtttcatttgtagaaacacttttgtggatcctgtagtaaccaagtgcaagcactacttctgcgagcattgtgcattgaagcatcatgcaaagaataagaagtgttttgtctgcaaccagccaactcttggcatttttaacgttgctcatgagatacgcaggaagatggccgaggataaatcataaaaatgtctctctaggatccatggatctctttacttcatggaagttatcttttctcccccatgttagtttcatgttaaagattgatgctatgtaatgagttgaaaacataccagaagtttgcacagtggaattagttgattcattttgttgtatttctttgccttatagattccagaatatctaatggtgagagacatttatgatatacccgtttgtatatagggtcatactgtggttctttttacagtagtttgttaccaaataaattttgaatagagcgacctttactc

SEQ ID NO: 4506 - protein, 102 aa, Glycine max
  misc_feature (1)..(102): Ceres Seq. ID no. 13638592
MEKEWEEAEKARKMRLAAGEDADEEGANLTDEDDEDSLPFACFICRNTFVDPVVTKCKHYFCEHCALKHHAKNKKCFVCNQPTLGIFNVAHEIRRKMAEDKS

SEQ ID NO: 4507 - protein, 89 aa, Glycine max
  misc_feature (1)..(89): Ceres Seq. ID no. 13638593
MRLAAGEDADEEGANLTDEDDEDSLPFACFICRNTFVDPVVTKCKHYFCEHCALKHHAKNKKCFVCNQPTLGIFNVAHEIRRKMAEDKS

SEQ ID NO: 4508 - protein, 64 aa, Glycine max
  misc_feature (1)..(64): Ceres Seq. ID no. 13638594
MQRIRSVLSATSQLLAFLTLLMRYAGRWPRINHKNVSLGSMDLFTSWKLSFLPHVSFMLKIDAM

SEQ ID NO: 4509 - DNA, 649 bp, Glycine max
  misc_feature (1)..(649): Ceres Seq. ID no. 13638602
cacacttctagcaccccaatacaatgactttgcacctacctctctccctatttaaaacttcaatacacttcattgtgagtgtattttaatcttctttatcttcattcattggttctctctaaccaaccctctcttttcctaaatcctaattaaacacccctcaaccaaaaaaagcatgaagaagctcaatctaatactcagtaagtgcaagaacttgtcaaagcatctaggaagatcttcatcatttaatagcctaaggtccaagtttgctaaggaagacttatgggaaggaaatggcatgcaagaaggtgaacattgtgaaactgtatttgttggcagcacaaggaaacggtacgtgataagctccaagtatttgaaccatcctctcctcaaagctctcatcaacaattccaagcaaaagggcagtgatgaaagtgttttggtggtcaactgtgaggtggttctctttgatcatctactgtggatgctagaaaatgcagatcctaagtttggttctgactctttggaggaattggctgaactctatgtgttttaagagctttcaaagtgctaattgcatgcagatgcctaatgtatgaaaatatgtatgttgggttgtgcttgcatttttcagaatgttattgttaag

SEQ ID NO: 4510 - protein, 126 aa, Glycine max
  misc_feature (1)..(126): Ceres Seq. ID no. 13638603
MKKLNLILSKCKNLSKHLGRSSSFNSLRSKFAKEDLWEGNGMQEGEHCETVFVGSTRKRYVISSKYLNHPLLKALINNSKQKGSDESVLVVNCEVVLFDHLLWMLENADPKFGSDSLEELAELYVF

SEQ ID NO: 4511 - protein, 85 aa, Glycine max
  misc_feature (1)..(85): Ceres Seq. ID no. 13638604
MQEGEHCETVFVGSTRKRYVISSKYLNHPLLKALINNSKQKGSDESVLVVNCEVVLFDHLLWMLENADPKFGSDSLEELAELYVF

SEQ ID NO: 4512 - DNA, 1032 bp, Glycine max
  misc_feature (1)..(1032): Ceres Seq. ID no. 13638651
agaacatcctaatcgaaaatctttttgccatgataaaatcatctctgtcacaatttagcaaagtgagacagagagagtatggcgaccacacttcattgtctctccacactccatcttcttcctcgcaccacccatcgtcctaaaactctcaactctctcaaaccagcctccaaggcgcaacctcccaagatcccagaactaccctccattcccaacgccctccagctccttaaatcatcttccctccctctcgcactcaccgcattgccctttctcatcgatccacaggatgcagcagcagctggaggacagtttgggatcctggaaggacgatcgttcgcgttgatacacccaatagtgatgggaggtttgttcgtatacactctatacgctggttacttaggttggcaatggagacgtgtgcgtaccatccaaagcgagatcaacgagctcaagaaacaggttaagccaactcctgtttctcccgatggatccacggtcgttgactcttcgtcgcctccttctgccacggagcttgagatccgacggttgacggaagagaggaaagagttggtcaaagggtcttacagagacaaacactttgacgcaggctctgttttgttagggtttggtgttttggagtctgtgtttggtggtcttaacacttatcttcgtaccggtaaactcttccccggtcctcatctctacgctggagcagggataacggtgctatgggctgctgcagctgctttggtgccggccatgcagaaagggaatgagacggcgaggaatctacacattgcgttgaacggtctcaatgttcttcttttcatttggcaaatcccaacaggttttgatatcgtccttaaggtctttgagttcaccaaatggccttaaacccttcacttgttgtggtctcttccgcttttgtttttgtctttttcttgtctttacagttctagttgttggacttgtaatgagtcttgactatatatattgcaaagtcttatgcaactttttttgtgtgtttgt

SEQ ID NO: 4513 - protein, 272 aa, Glycine max
  misc_feature (1)..(272): Ceres Seq. ID no. 13638652
MATTLHCLSTLHLLPRTTHRPKTLNSLKPASKAQPPKIPELPSIPNALQLLKSSSLPLALTALPFLIDPQDAAAAGGQFGILEGRSFALIHPIVMGGLFVYTLYAGYLGWQWRRVRTIQSEINELKKQVKPTPVSPDGSTVVDSSSPPSATELEIRRLTEERKELVKGSYRDKHFDAGSVLLGFGVLESVFGGLNTYLRTGKLFPGPHLYAGAGITVLWAAAAALVPAMQKGNETARNLHIALNGLNVLLFIWQIPTGFDIVLKVFEFTKWP

SEQ ID NO: 4514 - protein, 178 aa, Glycine max
  misc_feature (1)..(178): Ceres Seq. ID no. 13638653
MGGLFVYTLYAGYLGWQWRRVRTIQSEINELKKQVKPTPVSPDGSTVVDSSSPPSATELEIRRLTEERKELVKGSYRDKHFDAGSVLLGFGVLESVFGGLNTYLRTGKLFPGPHLYAGAGITVLWAAAAALVPAMQKGNETARNLHIALNGLNVLLFIWQIPTGFDIVLKVFEFTKWP

SEQ ID NO: 4515 - DNA, 944 bp, Glycine max
  misc_feature (1)..(944): Ceres Seq. ID no. 13638654
acagattggcagattcccttttcgccttcccctgagcccgatcgagcaagccaatggagaagcaagccgacaaggccgcggcgccggtcgacgacggcatccacgaggagtcgccggcctccgcccagaacgggaggcccggatccgagccggcggccgcacccgaggtggaggtgcagctcttccggcggggccgggggccggtggccgtgttccggtcacccctgggcgggtacacgcaggaccagctggaggtgggggacatcctggagaagcacggcctcaagtgcgtcttcgccttcgacgccgcctcccgcgcacgcggcgtcgccatccgattcaacccccgcaacggccgctccctcctcccctacgccgccgactccaccatcttcctcgacggcgagcccaaggatcctttgctgaagcccatcaccaaggtgatgctcactgtctgcgccatgacagtggtagctgcggtgatactgaaggaggcgaagatgcccgagtggcttaagggaaccaagctaggcaacctgaaattcccaccgtgggtgctggcttgcatggtcattgtgttcatgaggctccggaagagaaccagggatgtcatgaagaagattggctggtcctcctgagaaggttactaatggcaagcacacttttggcccctccttccagtttgccgtcaatgttggagatgtactgggcagtgacatactacatgtaaatgttcagaacaaatgcatcttatagatcacttatatttgaccttatgtttagcatatacacgacgcggtttgccagtgtggcatttttgcttgtagcaagtgtgcatgaataaatgtagccgaacaaactggtgtgcactctgtttctgtgaagattttgttcactgacccttgatggtgctttaacgagaaatttaactgctaaattatttc

SEQ ID NO: 4516 - protein, 194 aa, Glycine max
  misc_feature (1)..(194): Ceres Seq. ID no. 13638655
MEKQADKAAAPVDDGIHEESPASAQNGRPGSEPAAAPEVEVQLFRRGRGPVAVFRSPLGGYTQDQLEVGDILEKHGLKCVFAFDAASRARGVAIRFNPRNGRSLLPYAADSTIFLDGEPKDPLLKPITKVMLTVCAMTVVAAVILKEAKMPEWLKGTKLGNLKFPPWVLACMVIVFMRLRKRTRDVMKKIGWSS

SEQ ID NO: 4517 - protein, 171 aa, Glycine max
  misc_feature (1)..(171): Ceres Seq. ID no. 13638656
QIGRFPFRLPLSPIEQANGEASRQGRGAGRRRHPRGVAGLRPEREARIRAGGRTRGGGAALPAGPGAGGRVPVTPGRVHAGPAGGGGHPGEARPQVRLRLRRRLPRTRRRHPIQPPQRPLPPPLRRRLHHLPRRRAQGSFAEAHHQGDAHCLRHDSGSCGDTEGGEDARVA

SEQ ID NO: 4518 - protein, 141 aa, Glycine max
  misc_feature (1)..(141): Ceres Seq. ID no. 13638657
TDWQIPFSPSPEPDRASQWRSKPTRPRRRSTTASTRSRRPPPRTGGPDPSRRPHPRWRCSSSGGAGGRWPCSGHPWAGTRRTSWRWGTSWRSTASSASSPSTPPPAHAASPSDSTPATAAPSSPTPPTPPSSSTASPRILC

SEQ ID NO: 4519 - DNA, 722 bp, Glycine max
  misc_feature (1)..(722): Ceres Seq. ID no. 13638687
cttcttcatttgattgaaaaaagttattttaaaagaggaggattctttactctctacaggttttgatcatatggaagatcctaaggagaacaagaactcgccgtggctatcagtaccgcagtttggagattgggatcagaaaggaggaagcattcctgattactctatggatttctctaagatcagagagatgaggaagcagaacaagagagatccttctcgtgctagtcttggcaacgaagaagaactcatcaacccttttcataatcagcctgcttcggttgataataccaagcctaagctcaccaccgttcacagtgacaacaacaaaacccacaatgagttttctcaccaccatccacatcctccttctgcgaggagaggaatcttcagctgcttcaactgctgcgttaaagcttgaaggtaatagagacgatgaggagatggatcttcttcagctgtttcaattatttataataatgatagtaatgatgatgatttgaagacagaaatgaaaaatggcaatgtggcaacttattactgcggaagcaggcattaaatcaagtttgtatgctgcttacttgttatcttacactgtctaaccatatgatgttttggtaaatgtgaagtgtagctacttttgtggtttgatgtagagattggtacacttcttttttaaattgtgtaatgcagagcagatatatgttacattactaagttgc

SEQ ID NO: 4520 - protein, 116 aa, Glycine max
  misc_feature (1)..(116): Ceres Seq. ID no. 15220433
MEDPKENKNSPWLSVPQFGDWDQKGGSIPDYSMDFSKIREMRKQNKRDPSRASLGNEEELINPFHNQPASVDNTKPKLTTVHSDNNKTHNEFSHHHPHPPSARRGIFSCFNCCVKA

SEQ ID NO: 4521 - protein, 84 aa, Glycine max
  misc_feature (1)..(84): Ceres Seq. ID no. 15220434
MDFSKIREMRKQNKRDPSRASLGNEEELINPFHNQPASVDNTKPKLTTVHSDNNKTHNEFSHHHPHPPSARRGIFSCFNCCVKA

SEQ ID NO: 4522 - protein, 76 aa, Glycine max
  misc_feature (1)..(76): Ceres Seq. ID no. 15220435
MRKQNKRDPSRASLGNEEELINPFHNQPASVDNTKPKLTTVHSDNNKTHNEFSHHHPHPPSARRGIFSCFNCCVKA

SEQ ID NO: 4523 - DNA, 457 bp, Glycine max
  misc_feature (1)..(457): Ceres Seq. ID no. 13638705
atctatctgtatcttggagcgaagaaaaaaggagaaaggaagatcggagatggcatcgacagcggcgtttccgttctggagagcggcggggatgacttacatcacctactcaaacatttgtgcgaatctcgtgaggaactgtctcaaggagcctttcaaagccgaagccctaaatcgcgagaaggttcatttctcgctctccaaatgggctggcggaaagcctgagaaaccaattctgcgttctgacacgcctggtgtttgagatttgtaacgttttgatatcaagtttgaggttaataatggtgaggaatgcaagatattgtgtactctgcaacattttccttctttgacttttaagattgttaacaatggagtttgtgtgagacagacctcattccaatcttgaaacttgtgtgttattttcttgctttacctctaaactcttttatatttttcc

SEQ ID NO: 4524 - protein, 86 aa, Glycine max
  misc_feature (1)..(86): Ceres Seq. ID no. 13638706
SICILERRKKEKGRSEMASTAAFPFWRAAGMTYITYSNICANLVRNCLKEPFKAEALNREKVHFSLSKWAGGKPEKPILRSDTPGV

SEQ ID NO: 4525 - protein, 74 aa, Glycine max
  misc_feature (1)..(74): Ceres Seq. ID no. 13638707
IYLYLGAKKKGERKIGDGIDSGVSVLESGGDDLHHLLKHLCESREELSQGAFQSRSPKSREGSFLALQMGWRKA

SEQ ID NO: 4526 - protein, 70 aa, Glycine max
  misc_feature (1)..(70): Ceres Seq. ID no. 13638708
MASTAAFPFWRAAGMTYITYSNICANLVRNCLKEPFKAEALNREKVHFSLSKWAGGKPEKPILRSDTPGV

SEQ ID NO: 4527 - DNA, 1077 bp, Glycine max
  misc_feature (1)..(1077): Ceres Seq. ID no. 13638750
gcattatcgcgttctcgttttccatagcaactgttcaccaaccagcatagcctgcgggctggttgcgcaatggcggcgggtcccttcgcgctccgcctagggccgcgcctcgcggcgccggccgtggcgagtgcgactaggggaggaggacggggaagtgaccgccctacggccagccgagcgctggtgtcaaagaagtcaaacaaggaccaccgtttgtggattaggaaagattcggctgggtcagggaagaaggctctttgtcttgttaatactgtttcaaaactaccgaatgaaagagaaactgtttatggtgcattggataggtggactgcttttgagtctgaatttccaattatagcagcggctaaagctttggagatgttgaaaaagcaaagaaaatggctacagattatccaggtaaccaagtggctgatgagtaaaggtcaggtgctgacatggacaacgtacgatacactgctgttggctctttctatggatggaagagtagakgargstgagtcamtttggaatactatctttcacacttatacacgctcagtgtgcacgaggtggttctctcggatgatccagagtttcaccacgcgccatatttcagacaaagtgttggagatatatgctgacacggaggaattgggcgtgcgtccacacgaggatacaccacgaggagtcgggcgagcacttgcaccttcagagcaggaagataagcagaagcctgtcctcgaaaaacactcgaagaagtggaagtgcatacacttcaatggtgagcgtgttcgtgtgcggagggcagagcctttggcctagcaaacgtcttctggataggttcggatgaacaaagagagtctcctctcctggacatatgtgatagctatagttcttccgaggtcytatrcgagcaygtcaggtagarcaaggtgtggaaatwgtaatrctctctagacaaatggataatatcatagtgcagggkgagarctggcaytactaatgatgttggtatccancacaygtgtaagttgtgatgtttcagacaggttgctgtcgtcttcggcaccatgt

SEQ ID NO: 4528 - protein, 251 aa, Glycine max
  misc_feature (1)..(251): Ceres Seq. ID no. 15220439
  misc_feature (148)..(148): Xaa is any aa, unknown or other
  misc_feature (149)..(149): Xaa is any aa, unknown or other
  misc_feature (150)..(150): Xaa is any aa, unknown or other
  misc_feature (153)..(153): Xaa is any aa, unknown or other
MAAGPFALRLGPRLAAPAVASATRGGGRGSDRPTASRALVSKKSNKDHRLWIRKDSAGSGKKALCLVNTVSKLPNERETVYGALDRWTAFESEFPIIAAAKALEMLKKQRKWLQIIQVTKWLMSKGQVLTWTTYDTLLLALSMDGRVXXXESXWNTIFHTYTRSVCTRWFSRMIQSFTTRHISDKVLEIYADTEELGVRPHEDTPRGVGRALAPSEQEDKQKPVLEKHSKKWKCIHFNGERVRVRRAEPLA

SEQ ID NO: 4529 - protein, 147 aa, Glycine max
  misc_feature (1)..(147): Ceres Seq. ID no. 15220440
  misc_feature (44)..(44): Xaa is any aa, unknown or other
  misc_feature (45)..(45): Xaa is any aa, unknown or other
  misc_feature (46)..(46): Xaa is any aa, unknown or other
  misc_feature (49)..(49): Xaa is any aa, unknown or other
MLKKQRKWLQIIQVTKWLMSKGQVLTWTTYDTLLLALSMDGRVXXXESXWNTIFHTYTRSVCTRWFSRMIQSFTTRHISDKVLEIYADTEELGVRPHEDTPRGVGRALAPSEQEDKQKPVLEKHSKKWKCIHFNGERVRVRRAEPLA

SEQ ID NO: 4530 - protein, 129 aa, Glycine max
  misc_feature (1)..(129): Ceres Seq. ID no. 15220441
  misc_feature (26)..(26): Xaa is any aa, unknown or other
  misc_feature (27)..(27): Xaa is any aa, unknown or other
  misc_feature (28)..(28): Xaa is any aa, unknown or other
  misc_feature (31)..(31): Xaa is any aa, unknown or other
MSKGQVLTWTTYDTLLLALSMDGRVXXXESXWNTIFHTYTRSVCTRWFSRMIQSFTTRHISDKVLEIYADTEELGVRPHEDTPRGVGRALAPSEQEDKQKPVLEKHSKKWKCIHFNGERVRVRRAEPLA

SEQ ID NO: 4531 - DNA, 769 bp, Glycine max
  misc_feature (1)..(769): Ceres Seq. ID no. 13638769
accacaccaccaccagacagagagaacacacgcaaggagcacgaggaggaggcaagggaagccgccgccgccgccgccccgtccctcctcgccggccggccgccacaggtttcaagatgtcaacctgcacgtttgcagcttcctgtgccctcttgggcaatgctcgaacaaccgatgccccccagaaagcggtcaagagccgcctgagcttcctcggccgaggcgcgccgcagctgcggagcctgaggtcctccttcccctccaagaagctggacgtctccgcggcggccacgtacaaggtgaagctggtgaccccggaaggggacgagcacgagtttgaggcgccggacgacgcctacatcctggactcggcggagacggcgggggtggagctgccctactcgtgccgggcgggggcgtgctcgacctgcgcgggcaagatcgaggctggcgcggtggaccagtcggacgggtcgttcctggacgacgcgcagcaggaggagggctacgtgctgacatgcgtggcctaccccaagtcggactgcgtcatccacacccacaaggagggcgacctgtattaggagggctctcatctctggtgcccccagttggttgtgtgttgagtagaacaaaccttggtggttgtttatcccgtgcctgcctgtgtgcgtgctttggtcgttattagtcggaggtggttaagattgttgggtgaagaggccacccatggagaaggcgaataaaatctggctgtgactgatggcatcat

SEQ ID NO: 4532 - protein, 192 aa, Glycine max
  misc_feature (1)..(192): Ceres Seq. ID no. 13638770
HTTTRQREHTQGARGGGKGSRRRRRPVPPRRPAATGFKMSTCTFAASCALLGNARTTDAPQKAVKSRLSFLGRGAPQLRSLRSSFPSKKLDVSAAATYKVKLVTPEGDEHEFEAPDDAYILDSAETAGVELPYSCRAGACSTCAGKIEAGAVDQSDGSFLDDAQQEEGYVLTCVAYPKSDCVIHTHKEGDLY

SEQ ID NO: 4533 - protein, 154 aa, Glycine max
  misc_feature (1)..(154): Ceres Seq. ID no. 13638771
MSTCTFAASCALLGNARTTDAPQKAVKSRLSFLGRGAPQLRSLRSSFPSKKLDVSAAATYKVKLVTPEGDEHEFEAPDDAYILDSAETAGVELPYSCRAGACSTCAGKIEAGAVDQSDGSFLDDAQQEEGYVLTCVAYPKSDCVIHTHKEGDLY

SEQ ID NO: 4534 - protein, 112 aa, Glycine max
  misc_feature (1)..(112): Ceres Seq. ID no. 13638772
PHHHQTERTHARSTRRRQGKPPPPPPRPSSPAGRHRFQDVNLHVCSFLCPLGQCSNNRCPPESGQEPPELPRPRRAAAAEPEVLLPLQEAGRLRGGHVQGEAGDPGRGRARV

SEQ ID NO: 4535 - DNA, 1012 bp, Glycine max
  misc_feature (1)..(1012): Ceres Seq. ID no. 13638811
tagccagtgcctcctcctcctcaatttcagcgccacccaaccaaatcacggccagccgagcgccttccccttcctctgccagctcgatcgtcgccggcgcacccagcagatgagcgccttccctgctccttttccttcctcctctgctcctctctctcacactgctcatctctcttccccccgtttctttctctacaggaggaaagcaccacgccatggcctccccaagctctgcttcatccccgtcttgggtccatgaggagacgaccacgccggccgcccttccccatctcgatcgggtccaggaccccgccgcctccagccacctctccgcggtcatggccccgatgggggttacctgccgcgagcctctgtcgtgaccagcacccgaccagcaggtcgccagcgtgcccgatgcctcctcctcgcgcatgcctggccgcgccacctggaccccgcagacaacaccacgccatggcccgcaggttcttctctgagttcatgtcgccctcgttccacgcgcctccggccagattgggcgctccaagcccggccatctccgccgcccttgcccgttctggccggatcccgccggttgggccccgtccccggccaccggtgccctcaccggagaccacctgcaccgtccgccaagtccctttcttcacccgctgcatcctctgcctcgctcgctcgtcccagccttcgttgaccgcgtcctgtctctcctgcgccaagaccaagcctgcgtccaacctccccaccgagccggcctcaaggcccgatgtacaggttatgcgatgatcatgacgcgagagcgatgttttgcttgtgttggcgttcttcttatgcttcttcttcgattaggggataggttccaggtcggcagcctgggctagcagggtggatgtcgtttgagtttctgtttgtgattcattcgtagtcggatggtgctcttttgtaatatgatgttgtattcgtgtggcattgtatgccttttgtatgcatcccc

SEQ ID NO: 4536 - protein, 182 aa, Glycine max
  misc_feature (1)..(182): Ceres Seq. ID no. 13638812
MRRRPRRPPFPISIGSRTPPPPATSPRSWPRWGLPAASLCRDQHPTSRSPACPMPPPRACLAAPPGPRRQHHAMARRFFSEFMSPSFHAPPARLGAPSPAISAALARSGRIPPVGPRPRPPVPSPETTCTVRQVPFFTRCILCLARSSQPSLTASCLSCAKTKPASNLPTEPASRPDVQVMR

SEQ ID NO: 4537 - protein, 129 aa, Glycine max
  misc_feature (1)..(129): Ceres Seq. ID no. 13638813
MPPPRACLAAPPGPRRQHHAMARRFFSEFMSPSFHAPPARLGAPSPAISAALARSGRIPPVGPRPRPPVPSPETTCTVRQVPFFTRCILCLARSSQPSLTASCLSCAKTKPASNLPTEPASRPDVQVMR

SEQ ID NO: 4538 - protein, 109 aa, Glycine max
  misc_feature (1)..(109): Ceres Seq. ID no. 13638814
MARRFFSEFMSPSFHAPPARLGAPSPAISAALARSGRIPPVGPRPRPPVPSPETTCTVRQVPFFTRCILCLARSSQPSLTASCLSCAKTKPASNLPTEPASRPDVQVMR

SEQ ID NO: 4539 - DNA, 971 bp, Glycine max
  misc_feature (1)..(971): Ceres Seq. ID no. 13638849
atccaacacaaaaccaaacaggtcttacgcaacaaatggagagcacccagagcaacacaagcgtgatgaaccatttcatcctggtgcacggcctctgccacggggcctggtgttggtacaaggtggttgcggcgcttcaggcagcggggcaccgtgtcacggcggtcgacctggccgcgtccggcgctcacccggcgcgcatcgacgaggtgcactcgttcgaggagtactcccagcctctgcttgacgtagtggccgcggcgccagagggtgacggcgagaggctgattctggtcgggcacagccacggcgggctcagcttggcgctagccatggagaggttccccggcaaggtcgccgccgccgtgttcgcagccgccgggatgccgtgcgttggcaagcacatgggcgtcaccaccgaggagttcatgcgaaggacatcatcggaaggactcatggactgcaagatgctgccaatcaataacaaccacggtgcaggggttgcaatgataatgggcccaaacttcttagcacacaagaactaccagcaaagttcacctgaggatttggccctggcaaaaatgttggtgagaccgggaaacctgttcatggaggatccggtgatgaaggatgcaagcctgctcaccgataccaactacgggtcggtgaagaaggtatatgtggtagcaaaggctgatggctccagcaccgaggagatgcagcgttggatggtgttgttgagccccggcacggaggctgaggagatcgcgggagctgaccacgccatcatgagctcaaggcctagggagctctgtgatgctctggtcaagatcgccgacagcttaaatacttgctaaattgtacgatatatatccctggaaatcaatgtaggtgtgtacttgattttcatctaaaaataaatatgttcagtgatactattaaatcaatggaaattaagtagtattaccttc

SEQ ID NO: 4540 - protein, 284 aa, Glycine max
  misc_feature (1)..(284): Ceres Seq. ID no. 13638850
PTQNQTGLTQQMESTQSNTSVMNHFILVHGLCHGAWCWYKVVAALQAAGHRVTAVDLAASGAHPARIDEVHSFEEYSQPLLDVVAAAPEGDGERLILVGHSHGGLSLALAMERFPGKVAAAVFAAAGMPCVGKHMGVTTEEFMRRTSSEGLMDCKMLPINNNHGAGVAMIMGPNFLAHKNYQQSSPEDLALAKMLVRPGNLFMEDPVMKDASLLTDTNYGSVKKVYVVAKADGSSTEEMQRWMVLLSPGTEAEEIAGADHAIMSSRPRELCDALVKIADSLNTC

SEQ ID NO: 4541 - protein, 273 aa, Glycine max
  misc_feature (1)..(273): Ceres Seq. ID no. 13638851
MESTQSNTSVMNHFILVHGLCHGAWCWYKVVAALQAAGHRVTAVDLAASGAHPARIDEVHSFEEYSQPLLDVVAAAPEGDGERLILVGHSHGGLSLALAMERFPGKVAAAVFAAAGMPCVGKHMGVTTEEFMRRTSSEGLMDCKMLPINNNHGAGVAMIMGPNFLAHKNYQQSSPEDLALAKMLVRPGNLFMEDPVMKDASLLTDTNYGSVKKVYVVAKADGSSTEEMQRWMVLLSPGTEAEEIAGADHAIMSSRPRELCDALVKIADSLNTC

SEQ ID NO: 4542 - protein, 263 aa, Glycine max
  misc_feature (1)..(263): Ceres Seq. ID no. 13638852
MNHFILVHGLCHGAWCWYKVVAALQAAGHRVTAVDLAASGAHPARIDEVHSFEEYSQPLLDVVAAAPEGDGERLILVGHSHGGLSLALAMERFPGKVAAAVFAAAGMPCVGKHMGVTTEEFMRRTSSEGLMDCKMLPINNNHGAGVAMIMGPNFLAHKNYQQSSPEDLALAKMLVRPGNLFMEDPVMKDASLLTDTNYGSVKKVYVVAKADGSSTEEMQRWMVLLSPGTEAEEIAGADHAIMSSRPRELCDALVKIADSLNTC

SEQ ID NO: 4543 - DNA, 766 bp, Glycine max
  misc_feature (1)..(766): Ceres Seq. ID no. 13638893
actcttcaaagtctccgccagacacttctccatcaaaactcctctcacacaatggccacttccttccctaccttgacaccttttcttttcatcctccttctctccatcccctccgttcttgaagcagctcatcaccacacggcggcgccggctccggctgtagactgttcgatgctcatactcaacatggctgattgtttgtcctttgtttccgctggaggcacggaggccaagccggctagttcgtgttgcaacggccttaagacggtgctcaagactgacgcagagtgtctatgtgaggcgtttaaaagcagtgcttctctaggagttactttgaacatgactaaagcagctacacttcccgctgcatgcaagcttcacgctccttctatggctgcttgtggattgtccgccgctcctactatggctccaggtcttgctccaggaggagctgctggacccgacttaagttttctatctccaaacccatctccagggaaccgcggatcttccttgcttcccttctccttcaccaccgtactcggtgctatgtccttcgtattgttattcttgtctcgtgtctgaagaagccagctagatttggttgtatgaaatggctttgggtttgggttttcgtgactttagttttgcgtgtcttttgagtctacttctgttttagaccatgtcggtttctgttcgtagtttatttaatcttaattacgtttcacattggtccttttatctaagaacatctctgatccctcgt

SEQ ID NO: 4544 - protein, 194 aa, Glycine max
  misc_feature (1)..(194): Ceres Seq. ID no. 13638894
TLQSLRQTLLHQNSSHTMATSFPTLTPFLFILLLSIPSVLEAAHHHTAAPAPAVDCSMLILNMADCLSFVSAGGTEAKPASSCCNGLKTVLKTDAECLCEAFKSSASLGVTLNMTKAATLPAACKLHAPSMAACGLSAAPTMAPGLAPGGAAGPDLSFLSPNPSPGNRGSSLLPFSFTTVLGAMSFVLLFLSRV

SEQ ID NO: 4545 - protein, 177 aa, Glycine max
  misc_feature (1)..(177): Ceres Seq. ID no. 13638895
MATSFPTLTPFLFILLLSIPSVLEAAHHHTAAPAPAVDCSMLILNMADCLSFVSAGGTEAKPASSCCNGLKTVLKTDAECLCEAFKSSASLGVTLNMTKAATLPAACKLHAPSMAACGLSAAPTMAPGLAPGGAAGPDLSFLSPNPSPGNRGSSLLPFSFTTVLGAMSFVLLFLSRV

SEQ ID NO: 4546 - protein, 137 aa, Glycine max
  misc_feature (1)..(137): Ceres Seq. ID no. 13638896
MLILNMADCLSFVSAGGTEAKPASSCCNGLKTVLKTDAECLCEAFKSSASLGVTLNMTKAATLPAACKLHAPSMAACGLSAAPTMAPGLAPGGAAGPDLSFLSPNPSPGNRGSSLLPFSFTTVLGAMSFVLLFLSRV

SEQ ID NO: 4547 - DNA, 654 bp, Glycine max
  misc_feature (1)..(654): Ceres Seq. ID no. 13638986
actgttctctaatctaaatctaatttcacctttcctacaaaacctaaaacctttttcttattacacaacctaaaagtctctaagtttctgacaatgtcggaagagttcgacgaatctgagatcattttctccgacagcttcttcccaattcgccgccgcgaggacgtgatcgagaaagagaatcgtccggttaatttccgagaaaactccgaaagcagaatgagaaacacatcgaggctgagtaaaacgacgccgttgccttcaccggcggttttctcatcgtcgcttccagtgaatattccgggaaggaggtattctgaggatgaggaatattcggaagacggaggaaggagaatggttccgccgcatctgatcgttggacggaggatcgaaagcggtcaaatggcgttttccgtttgtacaggtcagggaaggactcttaaaggccgagatctgagccgggttcgtaattcggttctcaggttaaccggttttttggaggcttaaatatggaccggtttttgatttattaaaaaaattcgtcttccaatttttttttttatttagcggaagaaatcagttgtctgatattgttgttagtttagtcacttgaacgaatgtcaaaaggaaaatgtcaaaaagaacatttatttc

SEQ ID NO: 4548 - protein, 137 aa, Glycine max
  misc_feature (1)..(137): Ceres Seq. ID no. 13638987
MSEEFDESEIIFSDSFFPIRRREDVIEKENRPVNFRENSESRMRNTSRLSKTTPLPSPAVFSSSLPVNIPGRRYSEDEEYSEDGGRRMVPPHLIVGRRIESGQMAFSVCTGQGRTLKGRDLSRVRNSVLRLTGFLEA

SEQ ID NO: 4549 - protein, 95 aa, Glycine max
  misc_feature (1)..(95): Ceres Seq. ID no. 13638988
MRNTSRLSKTTPLPSPAVFSSSLPVNIPGRRYSEDEEYSEDGGRRMVPPHLIVGRRIESGQMAFSVCTGQGRTLKGRDLSRVRNSVLRLTGFLEA

SEQ ID NO: 4550 - DNA, 1645 bp, Glycine max
  misc_feature (1)..(1645): Ceres Seq. ID no. 13639022
aaaatagaagaaaggattatcagagtcgcattgtcgattcagagaaaaaaaaattgaattcaatctgatagatcctatcacagcaaaaaaaattggattgaataaggtgtttccgatttcaaaaacaatcacacaaatggttaataaaagttaggtttcttaatttctgcttcttattacatcatcttaaatctttggttttggatccatccaataatcatggagagcataataagcaagctccgcaacctagacgcctaccctaaaatcaacgaggatttctacagccgcacgctctccggcggtgtcatcactctcgcttcctccattctcatgctcttgctcttctactccgagctccggttgtatcttcacgctgtcaccgagaccaagcttgtcgtcgacacttccagagccgaaacgctgcgtatcaattttgatgttacgtttcctgcgcttccatgttccatactcagtcttgatgccatggacatcagcggagagcagcgtctagatgttaaacacgatataatcaagaagagattagactctcgtggcaatgtgatagaaacaaggcaagaaggaattggtgctcccaagattgaaaagccattgcagaggcatggaggcaggctcgagcacaatgagacttattgtggttcctgttatggttctgaagtgtcagatgatgattgttgtaattcctgtgaggatgttcgtgaagcataccgtaagaaaggttgggcactttcaaatcctgatttaattgaccagtgcaaaagagaaggattcttacaaagaatcaaggatgaagaaggtgaaggatgcaatgtgtatggtttcttggaagtaaataaggttgcagggaattttcattttgcacctgggaaaagctttcagcaatctggtgtacatgtacatgacctgctggcttttcaaaaggattcttttaatttaagtcaccacatcaacagattaactttcggagagtatttccctggtgttgttaatcctcttgacaacgtgcattggacacaagaaacaccaagtgggatgtaccagtattttattaaggttgtgcctacagtatacactgatgtgagtgggcatactatccagtcaaaccagttctctgttacagaacacttcaggactggagacatgggccgtctgcagtcccttcccggagttttctttttctatgacctctctccaattaaggttacttttacggaagaaaatgtctcattcttacattttcttactaatgtttgtgccatagttggaggtattttcaccgtttctggaatactagattcattcatctatcacggtcaaagggctatcaagaagaagatggaacttggtaaatttaactgatgggtgctatttgagtaatttcgagcgaatggctctccagagacaatctattcaagagaaggtcaactactgattgaaattccccttggggttctgagttcttcggttacaacaaaaggattttgcccttagatcaaggttgaaatgcctagatatcatgtgcaacaaatgctactttgccttgattcatatcttttctgacagctctgatgttgtgaatgttatgtgttttatggaaagtagaggggcttttccttgcagaagc

SEQ ID NO: 4551 - protein, 386 aa, Glycine max
  misc_feature (1)..(386): Ceres Seq. ID no. 13639023
MESIISKLRNLDAYPKINEDFYSRTLSGGVITLASSILMLLLFYSELRLYLHAVTETKLVVDTSRAETLRINFDVTFPALPCSILSLDAMDISGEQRLDVKHDIIKKRLDSRGNVIETRQEGIGAPKIEKPLQRHGGRLEHNETYCGSCYGSEVSDDDCCNSCEDVREAYRKKGWALSNPDLIDQCKREGFLQRIKDEEGEGCNVYGFLEVNKVAGNFHFAPGKSFQQSGVHVHDLLAFQKDSFNLSHHINRLTFGEYFPGVVNPLDNVHWTQETPSGMYQYFIKVVPTVYTDVSGHTIQSNQFSVTEHFRTGDMGRLQSLPGVFFFYDLSPIKVTFTEENVSFLHFLTNVCAIVGGIFTVSGILDSFIYHGQRAIKKKMELGKFN

SEQ ID NO: 4552 - protein, 348 aa, Glycine max
  misc_feature (1)..(348): Ceres Seq. ID no. 13639024
MLLLFYSELRLYLHAVTETKLVVDTSRAETLRINFDVTFPALPCSILSLDAMDISGEQRLDVKHDIIKKRLDSRGNVIETRQEGIGAPKIEKPLQRHGGRLEHNETYCGSCYGSEVSDDDCCNSCEDVREAYRKKGWALSNPDLIDQCKREGFLQRIKDEEGEGCNVYGFLEVNKVAGNFHFAPGKSFQQSGVHVHDLLAFQKDSFNLSHHINRLTFGEYFPGVVNPLDNVHWTQETPSGMYQYFIKVVPTVYTDVSGHTIQSNQFSVTEHFRTGDMGRLQSLPGVFFFYDLSPIKVTFTEENVSFLHFLTNVCAIVGGIFTVSGILDSFIYHGQRAIKKKMELGKFN

SEQ ID NO: 4553 - protein, 297 aa, Glycine max
  misc_feature (1)..(297): Ceres Seq. ID no. 13639025
MDISGEQRLDVKHDIIKKRLDSRGNVIETRQEGIGAPKIEKPLQRHGGRLEHNETYCGSCYGSEVSDDDCCNSCEDVREAYRKKGWALSNPDLIDQCKREGFLQRIKDEEGEGCNVYGFLEVNKVAGNFHFAPGKSFQQSGVHVHDLLAFQKDSFNLSHHINRLTFGEYFPGVVNPLDNVHWTQETPSGMYQYFIKVVPTVYTDVSGHTIQSNQFSVTEHFRTGDMGRLQSLPGVFFFYDLSPIKVTFTEENVSFLHFLTNVCAIVGGIFTVSGILDSFIYHGQRAIKKKMELGKFN

SEQ ID NO: 4554 - DNA, 1347 bp, Glycine max
  misc_feature (1)..(1347): Ceres Seq. ID no. 13639090
agaacatcctaatcgaaaaaaatcagatctcgatcccaactttccccgaccttcgctgccctagttctcgattccctctttccccgatcttccccgccctagtttccgatccctagtttcctcgatctcgattctcggagttttcgcgcacctcgtcgaacatggcagcgatcatggcggcgcgcgggcaggggcaggtgcaagatttcgacttcttcgtggtggtggacttcgaggcgacgtgcgtgaaagacgcgcggatctttccgcaggaaatcattgagttccccgccgtgctcgtcgacggcgccaccggccgcatcgagtccgcgtttcgcaggtacgttcgtccaaaacatcaccctgtgctgacccaattttgcagggaactcaccggcatccggcaggaggacgtcgacggcggcgtggatctcggcgaggcgctctggatgcacgactcttggctgaaggcggcgacggcggggggagggagcttggccgtcgtgatctggggagattgggattgccgcaccatgctcgagtccgagtgccgcttcaaggggatagagaagccctcctacttcgatcgctggatcaacctgagggtccccttccaggctgcgctcggcggcggagggcgggtcaccctccaggaggcggtcagggcagcgggactggactgggagggccgcctgcactgcggactggacgacgcgcgcaacacggcgcggcttcttgttgagctgatgcggcgcggggtcaagatgaccatcaccggttcgctggcgccgccgccgccgatccagcagaaggagcagcccccgcagcttctcacaagctcttgcggtggctcatctgtgctggcgccgctgccgatgatccagcagaagcagcagtcgccgcagcttcgcacaagaccttgcggtggctcatcggcactggcgccgccgctgatccagcagaagcagcagccgccgcagccacacatgataagcccctgcggcggctcctctgcgacgtgcttctgctactgcagggtaccgaccagaggaggcgtggtgtccgtgccagggccgatgcagggcaagtgcttcttcgggtgtggcaactggacgccggccatgggacccgtgtgcccctacttcgtatggaccaactgaatgaaccacccatggcagggcaccagaatcagtgtagctcagctgttagtgtaaatcgtgctagccatcagaatcagagcttagctcggctgattctagccagtctaggtgtgaattggtctctggaatcgaatgtatttggtgtctgaattagtattatcaatagaaattctttttagttatgtcc

SEQ ID NO: 4555 - protein, 332 aa, Glycine max
  misc_feature (1)..(332): Ceres Seq. ID no. 15220453
MAAIMAARGQGQVQDFDFFVVVDFEATCVKDARIFPQEIIEFPAVLVDGATGRIESAFRRYVRPKHHPVLTQFCRELTGIRQEDVDGGVDLGEALWMHDSWLKAATAGGGSLAVVIWGDWDCRTMLESECRFKGIEKPSYFDRWINLRVPFQAALGGGGRVTLQEAVRAAGLDWEGRLHCGLDDARNTARLLVELMRRGVKMTITGSLAPPPPIQQKEQPPQLLTSSCGGSSVLAPLPMIQQKQQSPQLRTRPCGGSSALAPPLIQQKQQPPQPHMISPCGGSSATCFCYCRVPTRGGVVSVPGPMQGKCFFGCGNWTPAMGPVCPYFVWTN

SEQ ID NO: 4556 - protein, 328 aa, Glycine max
  misc_feature (1)..(328): Ceres Seq. ID no. 15220454
MAARGQGQVQDFDFFVVVDFEATCVKDARIFPQEIIEFPAVLVDGATGRIESAFRRYVRPKHHPVLTQFCRELTGIRQEDVDGGVDLGEALWMHDSWLKAATAGGGSLAVVIWGDWDCRTMLESECRFKGIEKPSYFDRWINLRVPFQAALGGGGRVTLQEAVRAAGLDWEGRLHCGLDDARNTARLLVELMRRGVKMTITGSLAPPPPIQQKEQPPQLLTSSCGGSSVLAPLPMIQQKQQSPQLRTRPCGGSSALAPPLIQQKQQPPQPHMISPCGGSSATCFCYCRVPTRGGVVSVPGPMQGKCFFGCGNWTPAMGPVCPYFVWTN

SEQ ID NO: 4557 - protein, 236 aa, Glycine max
  misc_feature (1)..(236): Ceres Seq. ID no. 15220455
MHDSWLKAATAGGGSLAVVIWGDWDCRTMLESECRFKGIEKPSYFDRWINLRVPFQAALGGGGRVTLQEAVRAAGLDWEGRLHCGLDDARNTARLLVELMRRGVKMTITGSLAPPPPIQQKEQPPQLLTSSCGGSSVLAPLPMIQQKQQSPQLRTRPCGGSSALAPPLIQQKQQPPQPHMISPCGGSSATCFCYCRVPTRGGVVSVPGPMQGKCFFGCGNWTPAMGPVCPYFVWTN

SEQ ID NO: 4558 - DNA, 1219 bp, Glycine max
  misc_feature (1)..(1219): Ceres Seq. ID no. 13639125
gttgagcttcttcctccagccccattgatccccggcgcgacgccctaacctacaccgcgcccgctccctctctctctggctcgcggctacctgctcacgcgcggccgccgtgatggcctcgtcggcgacgagggaggtgcttatgctggaggcgccaccgtccgaggctgcgggtgtgccttggcgcccgcctccggacgctgagacggtggacgcgctgccctacatcgacggggactacggcgaccctgcggtgaagcgcgaggttgaccgcctcgtcgaggaggagatgcgccgggctcaccgcaagcccgccgacttcctccgtgacttgccccccgttcccatcattggattcgagaatcatcctatgcttgcgaaagagtacgaacgtgttagagctggcaagccacctgctaccatggagatgtcccgctatggtttggagccacccccagcgaacaagagaaatgatgttcttgcttggaggcaggctttacggaatgcccagagccagctgcagcatcaaattgtgcggattgagaatttggagcttatgctgaagcacggtgttgaggtttggaagctccagaacagaaaaatggaatcagttttgtctaggacacaaaaaatgactctggaatacaatgaaaagatagaaactgtcaaccgtgagaggaaatttcatcagcaaaacactggtggacaactccatgcgttgacagtagaatggcaggaactgtgtcagaaaaacatagctattcaagctgcctgtgttgatctgcagaatcaaattgatctgcttaaacttgaagctaaagaacagggaatgccaatggctggtggcaatgaaactaacccacaagcatcagtagggatttgagatacagatgtaggaaggcagaagctgtggctccatgagatgtcagctagaggttccagtagccactatgcttacctgacccacacctggctgttccgttgacaacggccattgtggaatgtgcgttatgcaacgtgatggcatgtgctggtggacacctggtcacctggtagagaaacagcttaaacgcatgtattgttctgtgacaagagagagaatcagaatgcccatctcttttgttgatcgcaaatgggtatcaacttttcagggtgtaaatttgtactgtaacatggaagtgtcagctgaatgtttcgtctatttagctctgcttgtttc

SEQ ID NO: 4559 - protein, 256 aa, Glycine max
  misc_feature (1)..(256): Ceres Seq. ID no. 13639126
MASSATREVLMLEAPPSEAAGVPWRPPPDAETVDALPYIDGDYGDPAVKREVDRLVEEEMRRAHRKPADFLRDLPPVPIIGFENHPMLAKEYERVRAGKPPATMEMSRYGLEPPPANKRNDVLAWRQALRNAQSQLQHQIVRIENLELMLKHGVEVWKLQNRKMESVLSRTQKMTLEYNEKIETVNRERKFHQQNTGGQLHALTVEWQELCQKNIAIQAACVDLQNQIDLLKLEAKEQGMPMAGGNETNPQASVGI

SEQ ID NO: 4560 - protein, 246 aa, Glycine max
  misc_feature (1)..(246): Ceres Seq. ID no. 13639127
MLEAPPSEAAGVPWRPPPDAETVDALPYIDGDYGDPAVKREVDRLVEEEMRRAHRKPADFLRDLPPVPIIGFENHPMLAKEYERVRAGKPPATMEMSRYGLEPPPANKRNDVLAWRQALRNAQSQLQHQIVRIENLELMLKHGVEVWKLQNRKMESVLSRTQKMTLEYNEKIETVNRERKFHQQNTGGQLHALTVEWQELCQKNIAIQAACVDLQNQIDLLKLEAKEQGMPMAGGNETNPQASVGI

SEQ ID NO: 4561 - protein, 197 aa, Glycine max
  misc_feature (1)..(197): Ceres Seq. ID no. 13639128
MRRAHRKPADFLRDLPPVPIIGFENHPMLAKEYERVRAGKPPATMEMSRYGLEPPPANKRNDVLAWRQALRNAQSQLQHQIVRIENLELMLKHGVEVWKLQNRKMESVLSRTQKMTLEYNEKIETVNRERKFHQQNTGGQLHALTVEWQELCQKNIAIQAACVDLQNQIDLLKLEAKEQGMPMAGGNETNPQASVGI

SEQ ID NO: 4562 - DNA, 1259 bp, Glycine max
  misc_feature (1)..(1259): Ceres Seq. ID no. 13639236
atcgcgacgagctctcctggcccatttccctcgctgctgctgctaatcccgacccgaccgtcaccgccggcctttgcatcaaacgccctgacagcgcgcgtcgcatcgccacaacacgacggcctcgctcccttgatcgcctccctcgctccctccctgcctacttgcgtgtctacctatctacctgcctacctataccctataccctaatacaccacgcccatcgcccgcgacctgcagcttcgtccggcatctcttcctcacattcacaatggcatcaaagtttctccgagaatacaagttggtggtagtcggcggcggtggagtcggaaagtcgtgtttgactatccagctgatccagagccacttcgtagacgagtacgacccgaccatcgaggattcgtaccgcaagcagtgtgtcattgacaatgaggtcgccctgctcgatgtgctcgatacagcgggacaggaggagtactcggccatgcgcgagcagtacatgcgcacaggagagggcttcctgctcgtctactcgataaccgacaggcagagcttcgaggagattatgacgttccagcaacaaatcctgagagtaaaggacaaggactacttccccatgatcgtcgtcggcaacaagtgcgatctcgacggcgagaggcaagtgtcgacacaagagggccagactctggcgcggaactttggctgcaaattcatcgagacttcggcgaaatcccgcatcaacgttgacaacgccttctacgacatcgtccgagaaatccgcagatacaacaaggaaatgtcctcgtacacaggcgcccctggctcaaacggcaacgggccccagaagacgacattcgacacggacgaccaggcggagaagaagggatgctgtggatgcgtggtaatgtaaggatatggaagccactgtcgttgttgtcgttgttgtcgcgcacgctgtcagagagatacctacaccgctgggttcggttacccgccctggccattggcggtgctgcttggtccagcagaagaaaacacgcgatgctgctgttgcgtactgccagtacaccttctcttcgatactgtcactttgggttcgcattacggggtaacggattcacgtctgctggatgcgcctccgaacaccctacttctactactggtatcgactccatctttcctatctggtggcgctcttcgtattcgccttcatcatctatctagaccgatttctttatggcattttgatcggtactctg

SEQ ID NO: 4563 - protein, 212 aa, Glycine max
  misc_feature (1)..(212): Ceres Seq. ID no. 15219417
MASKFLREYKLVVVGGGGVGKSCLTIQLIQSHFVDEYDPTIEDSYRKQCVIDNEVALLDVLDTAGQEEYSAMREQYMRTGEGFLLVYSITDRQSFEEIMTFQQQILRVKDKDYFPMIVVGNKCDLDGERQVSTQEGQTLARNFGCKFIETSAKSRINVDNAFYDIVREIRRYNKEMSSYTGAPGSNGNGPQKTTFDTDDQAEKKGCCGCVVM

SEQ ID NO: 4564 - protein, 141 aa, Glycine max
  misc_feature (1)..(141): Ceres Seq. ID no. 15219418
MREQYMRTGEGFLLVYSITDRQSFEEIMTFQQQILRVKDKDYFPMIVVGNKCDLDGERQVSTQEGQTLARNFGCKFIETSAKSRINVDNAFYDIVREIRRYNKEMSSYTGAPGSNGNGPQKTTFDTDDQAEKKGCCGCVVM

SEQ ID NO: 4565 - protein, 136 aa, Glycine max
  misc_feature (1)..(136): Ceres Seq. ID no. 15219419
MRTGEGFLLVYSITDRQSFEEIMTFQQQILRVKDKDYFPMIVVGNKCDLDGERQVSTQEGQTLARNFGCKFIETSAKSRINVDNAFYDIVREIRRYNKEMSSYTGAPGSNGNGPQKTTFDTDDQAEKKGCCGCVVM

SEQ ID NO: 4566 - DNA, 1543 bp, Glycine max
  misc_feature (1)..(1543): Ceres Seq. ID no. 13639243
agaacaccctaatcgaaaaatttgctagggtcttcccactagcttactcactctcactcgattctcttgttccatctttgtcctcttgttgaactcgtctagtcaacaaggcttgaaaccgatcaagcaagcagtgttttcgtgtgactcggttttatattccggaaatggcgagtttgaacccgttcgatctcttaggagatgacgctgaggatccaagccagattgttttgagtttaccgaagaaggtcgagaaagcagctcctgttcagcctgctaaggccgctaagttcccaaccaagccgtctcctccttctcaagctgtgagggagtcaaggaatggtccttcaggaggtcatggtggtggtggtggacgtgggcctcctcgtggttcgtttaaccccggtggaaacagacctcatgatccaaaggatggagaaaggaacggtgggttccgcggataccgtgaaagtggtggtcgtggaggccacattggtggttttgctaatggtaaaactggtgatgttgaacgtccgaggagggtctatgaccgccgtagtggaactggtcgtagtaatgacgtgaaacgtgagggtggtggtcgtggaaactggggtactcctgaagatgatattcaaccagtaaccgaggaacctacaacggaggttgagaagagccctgttgctgagaaggaaggcggtgaggatgccaccactgatgcaaagaaagaagctcctgaagttgagcaagagcctgaggacaaggagatgacgctggaagagtatgagaagattctggaggagaagaagaaagctctgcaagccacaaaggtggaggaaaggaaagttgacaccaaagtgttcgagtctatgcaacagctctctaacaagaagaccaatgatgaggagatcttcatcaagctgggatccgacaaggacaaacgcaaagatgctgctgagaaagaagagaaggccaagaagtcgttgagcataaacgagtttttgaagccggctaatggagagacctacaacccaagaggtggataccgtggaagaggaggacgcagtggtggtcgtggacagagggatggaaaagtcaacggaggaggaaaccaaaggaatggaggagcctctgctcctgctccagctatcggagacagtgctcagttcccatcgttgggcaactaaagacaccctttctggtccttcaagcatctacctatctatctccactctcttttagtttaattttgttgtcttagttctccatcattttttgttacactttcactacaaaacatgtttggtagctgactttatgatggaaaaacaaaattataatatccttttgtctcmaaatwttwtattcttttbcttttcrarrgaaraaaaaaaaaaaaaaaaaaaaaaaaaaaaaaaaaaaaaaaaaaaaaaaaaaaaattaaaaaaaaaaaaaaaaaggtttatcsaaacccgccamccccgagggggggcccggamcccawtycccccaaaagggggccgaataacgcgggccccggggc

SEQ ID NO: 4567 - protein, 339 aa, Glycine max
  misc_feature (1)..(339): Ceres Seq. ID no. 15219423
MASLNPFDLLGDDAEDPSQIVLSLPKKVEKAAPVQPAKAAKFPTKPSPPSQAVRESRNGPSGGHGGGGGRGPPRGSFNPGGNRPHDPKDGERNGGFRGYRESGGRGGHIGGFANGKTGDVERPRRVYDRRSGTGRSNDVKREGGGRGNWGTPEDDIQPVTEEPTTEVEKSPVAEKEGGEDATTDAKKEAPEVEQEPEDKEMTLEEYEKILEEKKKALQATKVEERKVDTKVFESMQQLSNKKTNDEEIFIKLGSDKDKRKDAAEKEEKAKKSLSINEFLKPANGETYNPRGGYRGRGGRSGGRGQRDGKVNGGGNQRNGGASAPAPAIGDSAQFPSLGN

SEQ ID NO: 4568 - DNA, 1318 bp, Glycine max
  misc_feature (1)..(1318): Ceres Seq. ID no. 13639246
atccgtcaaactcccaagaaacccttcagaaccttcctcactctttctctcttcctttttttttctttttttttctataaacctaacctaaccaaaaaacccttttcattattcttcattcatttattcttattcatcttttcattcactcactctcactcatggctgaagatgggaacaacaacgatgtacccttacacaaattcaaagacagcaatccaaaccctgaagagttcgatgcaaagggttacagcctcagcggaaaaatcatgctttcagcaataatccttcttttcttcgtcgtcgttttgatgttgtgccttcatatctacgcgcgctggtacctccggcgtgctcgccgccgccagctccggcgccaacgcgagctccgccgcacccagcttgtcttttacaacgacgacgccacccccgcagccgtgtcacgtggcctcgacgccgccatccttgccacgctccccgtcttcaccttcgacccggaaaaaaccgggccggagtgcgctgtttgcttgtcggagttcgaacccggtgaaacgggtcgggtcttgcccaaatgtaatcacagtttccacatagaatgtattgacatgtggttccattctcatgacacgtgtcctctttgtcgcgccccggttgaacgcgcgccggaaccggaagttgttgttataacagtacccgatccggtttccgaaaccggttcaggcgaaaatgagaaccgaaccggttcttcttcttcttcctcttcggttggattgagtaagcctaagccttcgttggttggtgtgacaattgaggtgcctccgagggacgagaattttcaaaacgagttgcaaccgagttgcgactcatcctcctcgtttcggtcgccgatgagtcgcatgctgtcgtttacgaggatgctcggcagggaaaagaaggggaacgtgtcgccgtcgtcgtgcggcggcggcgattgtagctccgccgcggagcgaggtgagcgagaggagactcagtgagtcggtgactcgggtgctgacgtggcacttgttggaagcggaaaaacttgggttgttggcgcgtggcggtgtgtaatagtgacgtttctggattttaatgtaggcggtgagcggcgcgtgagttaggtggcgcgagatactgacgtagaatggttttgggatgaacataaatgatgtacttattcgttgatatatatattttttctttatttgtttcttatcttcgggttccaaaaatagttaaatagaatacgaaaattgctaattgtaatgcttgcttacatagaaatgaaaccaatttt

SEQ ID NO: 4569 - protein, 284 aa, Glycine max
  misc_feature (1)..(284): Ceres Seq. ID no. 13639247
MAEDGNNNDVPLHKFKDSNPNPEEFDAKGYSLSGKIMLSAIILLFFVVVLMLCLHIYARWYLRRARRRQLRRQRELRRTQLVFYNDDATPAAVSRGLDAAILATLPVFTFDPEKTGPECAVCLSEFEPGETGRVLPKCNHSFHIECIDMWFHSHDTCPLCRAPVERAPEPEVVVITVPDPVSETGSGENENRTGSSSSSSSVGLSKPKPSLVGVTIEVPPRDENFQNELQPSCDSSSSFRSPMSRMLSFTRMLGREKKGNVSPSSCGGGDCSSAAERGEREETQ

SEQ ID NO: 4570 - protein, 248 aa, Glycine max
  misc_feature (1)..(248): Ceres Seq. ID no. 13639248
MLSAIILLFFVVVLMLCLHIYARWYLRRARRRQLRRQRELRRTQLVFYNDDATPAAVSRGLDAAILATLPVFTFDPEKTGPECAVCLSEFEPGETGRVLPKCNHSFHIECIDMWFHSHDTCPLCRAPVERAPEPEVVVITVPDPVSETGSGENENRTGSSSSSSSVGLSKPKPSLVGVTIEVPPRDENFQNELQPSCDSSSSFRSPMSRMLSFTRMLGREKKGNVSPSSCGGGDCSSAAERGEREETQ

SEQ ID NO: 4571 - protein, 234 aa, Glycine max
  misc_feature (1)..(234): Ceres Seq. ID no. 13639249
MLCLHIYARWYLRRARRRQLRRQRELRRTQLVFYNDDATPAAVSRGLDAAILATLPVFTFDPEKTGPECAVCLSEFEPGETGRVLPKCNHSFHIECIDMWFHSHDTCPLCRAPVERAPEPEVVVITVPDPVSETGSGENENRTGSSSSSSSVGLSKPKPSLVGVTIEVPPRDENFQNELQPSCDSSSSFRSPMSRMLSFTRMLGREKKGNVSPSSCGGGDCSSAAERGEREETQ

SEQ ID NO: 4572 - DNA, 1440 bp, Glycine max
  misc_feature (1)..(1440): Ceres Seq. ID no. 13639469
agatgtttctataatggaggttggattaggtggaaaatatgatgcaacgaatgtggtcccaacacctattgtgtgtggtataacctcccttgggtatgaccacatggagattcttgggaatactcttggagaaattgctggtgagaaagctggtatcttcaagcatcggattccagcatttactgtgcctcaacctgatgaagcaatgcatgtactcagagagaaggcttctcagttaaatgtacctcttcaagtggtaaccccattagatgccaaattgctaaatggttcaagactagcgcttggaggtgaacaccaatatataaatgctggtcttgctattgcattatgctctacgtggctgaaaatgaatgggcatcttgaagactcgtacttgaaacatatatgactcatctgcctgtatgaagcaacacactttaccagagaagttcataaaagggttaacaactgcaagtttgcaaggaagggctcagattgttcctgatcagttcatcaatgatgaaataccaaatgaacttgtcttctttttagatggggctcatagtcctgaaagcatggaagcatgtgccaggtggttttctcttgctattaaagatcaagaccagattttgtttcatcagaaacttgataattctaacttctcaaaccaagtagtgaagatgcacaatggtgaaactgtacagaagaaatccacacagattttgctgttcaattgtatgtctgagcgaaaccctcagttgcttcttccccacttgatgaaaacatgtgctgatcatggtgtctacttcaagaaggcactctttgtacctggtttatcagtgtatcacaaagttggatcccatgctttaccagcgacagattctgatgttgacctgtcgtggcagcttactctacaaagagtgtgggaaaatctcatgcaagggaacaaagaaggcaagagtaataattctgctcctgaagaattaaacatggaaatgagtgccagcaattgtgaacacagtgccgtgttttcctcattgccactggttctcaaatggcttagggacacggtgcaacaaaaccagtcaactcgttttcaggtccttgttactggttctatacatcttattggtgacatgttgaaattagtcaagaagtgattcgttgggctacttgaaagattggctttcattcagattttttaagtaccactatttgagtccatgaaagtgctgttacacttggttcaaaagctgttgacagaaggttatcaatataataactacattcttgattgtagacattgatgcatccattacattggtttaaatcagcatcactctggctacttcgtgggtctttcaactttcatttcactgtaattgaaaataaaggtggattaagggacatgaataaagaataacatctatcaattttctt

SEQ ID NO: 4573 - protein, 245 aa, Glycine max
  misc_feature (1)..(245): Ceres Seq. ID no. 13639470
MKQHTLPEKFIKGLTTASLQGRAQIVPDQFINDEIPNELVFFLDGAHSPESMEACARWFSLAIKDQDQILFHQKLDNSNFSNQVVKMHNGETVQKKSTQILLFNCMSERNPQLLLPHLMKTCADHGVYFKKALFVPGLSVYHKVGSHALPATDSDVDLSWQLTLQRVWENLMQGNKEGKSNNSAPEELNMEMSASNCEHSAVFSSLPLVLKWLRDTVQQNQSTRFQVLVTGSIHLIGDMLKLVKK

SEQ ID NO: 4574 - protein, 194 aa, Glycine max
  misc_feature (1)..(194): Ceres Seq. ID no. 13639471
MEACARWFSLAIKDQDQILFHQKLDNSNFSNQVVKMHNGETVQKKSTQILLFNCMSERNPQLLLPHLMKTCADHGVYFKKALFVPGLSVYHKVGSHALPATDSDVDLSWQLTLQRVWENLMQGNKEGKSNNSAPEELNMEMSASNCEHSAVFSSLPLVLKWLRDTVQQNQSTRFQVLVTGSIHLIGDMLKLVKK

SEQ ID NO: 4575 - protein, 159 aa, Glycine max
  misc_feature (1)..(159): Ceres Seq. ID no. 13639472
MHNGETVQKKSTQILLFNCMSERNPQLLLPHLMKTCADHGVYFKKALFVPGLSVYHKVGSHALPATDSDVDLSWQLTLQRVWENLMQGNKEGKSNNSAPEELNMEMSASNCEHSAVFSSLPLVLKWLRDTVQQNQSTRFQVLVTGSIHLIGDMLKLVKK

SEQ ID NO: 4576 - DNA, 1398 bp, Glycine max
  misc_feature (1)..(1398): Ceres Seq. ID no. 13639476
aaacgcatagcgcgaatttacaaaactagccaggaacaggccctgtctttccgatattcaccatctctttctctctaatccaaaaaaaaatctgttgtgaacaaacacacattattgtttgttttcatcccacggaaaaatcgatcaggcaaaacaaacaaaggtgaaactgaataggtgcgtgtttgtgttgatgggctaagaggacagagaaaaagaaagaaagagtataaaatcaaatctggcaaatctcgtggggttgagggctcggtcttcgtcgaagcaagcttcccctgatttgcaggacgacgaggaggagtgcaggccttggcgtcgaaggttaataatgtctttctcctggtcctccacccttaggatcaccatcctcctcctcctcctcgccgcggtcatcgtcgcgtgcttcactctccccatcgaaaagatgatgaaggacttcttattatgggtcgatcacgatcttggcccctggggcccacttgttctggctgttgcttacattcctttgactgtcttggctgttccagcttcagtgcttactcttggtggaggttatctttttgggcttccggtgggatttgttgttgactctataggtgcaactgttggtgccggagctgcatttcttcttggtagaacaattgggagatcatttgtcgtttctaggttgaaggattatccacaattcagatcagtggcaattgcaattcgaagatctggttttaagattgtattactgcttcggcttgttccactcctaccgtttaacatgctaaattatctcttgtcggtgactcctgtttcaataggggaatacatgctggcttcctggttaggaatgatgccaataacactggcacttgtatatgttggaacaactcttaaagatctttctgatgttacacatggttggggcgagttctcaaagactcgttgggcgtttatcattcttggtcttgtgatatcggttgttctgatgatatgtgttactagagttgccaaggctgctttagataaagccttggccgaaaatgaagatattgatgggattacttcctcgccagatttacctattgttgctgaaccatcagcagatcttaaccaacctctcataattaagatagattcttctgaagacagtcatgaaaagtgaattctattttgtgtaaattctttcttcactctaccttttataaaggctatggttttaattttaagctttagcggtagctggttgcttctatttattcgcgatttgtacagtttcaacattagaaatatagtttgtgacaggagtgtttaatcctaattcctacaaccaacatgacattatggactttgtgttttatttcttttgacagcagaaaagttcatgctatg

SEQ ID NO: 4577 - protein, 274 aa, Glycine max
  misc_feature (1)..(274): Ceres Seq. ID no. 13639477
MSFSWSSTLRITILLLLLAAVIVACFTLPIEKMMKDFLLWVDHDLGPWGPLVLAVAYIPLTVLAVPASVLTLGGGYLFGLPVGFVVDSIGATVGAGAAFLLGRTIGRSFVVSRLKDYPQFRSVAIAIRRSGFKIVLLLRLVPLLPFNMLNYLLSVTPVSIGEYMLASWLGMMPITLALVYVGTTLKDLSDVTHGWGEFSKTRWAFIILGLVISVVLMICVTRVAKAALDKALAENEDIDGITSSPDLPIVAEPSADLNQPLIIKIDSSEDSHEK

SEQ ID NO: 4578 - protein, 242 aa, Glycine max
  misc_feature (1)..(242): Ceres Seq. ID no. 13639478
MMKDFLLWVDHDLGPWGPLVLAVAYIPLTVLAVPASVLTLGGGYLFGLPVGFVVDSIGATVGAGAAFLLGRTIGRSFVVSRLKDYPQFRSVAIAIRRSGFKIVLLLRLVPLLPFNMLNYLLSVTPVSIGEYMLASWLGMMPITLALVYVGTTLKDLSDVTHGWGEFSKTRWAFIILGLVISVVLMICVTRVAKAALDKALAENEDIDGITSSPDLPIVAEPSADLNQPLIIKIDSSEDSHEK

SEQ ID NO: 4579 - protein, 241 aa, Glycine max
  misc_feature (1)..(241): Ceres Seq. ID no. 13639479
MKDFLLWVDHDLGPWGPLVLAVAYIPLTVLAVPASVLTLGGGYLFGLPVGFVVDSIGATVGAGAAFLLGRTIGRSFVVSRLKDYPQFRSVAIAIRRSGFKIVLLLRLVPLLPFNMLNYLLSVTPVSIGEYMLASWLGMMPITLALVYVGTTLKDLSDVTHGWGEFSKTRWAFIILGLVISVVLMICVTRVAKAALDKALAENEDIDGITSSPDLPIVAEPSADLNQPLIIKIDSSEDSHEK

SEQ ID NO: 4580 - DNA, 937 bp, Glycine max
  misc_feature (1)..(937): Ceres Seq. ID no. 13639488
taattcttttgctacttataaggccaaattaaatgcaatcagacaatcagaaatggacaaatcaatagaaaaagctttgaaagatgctggcttgggaagtagacaagtcacaccttttatgaggttacgggtagttggattaacttataaaactagacaagacaaacctaaagaaggcatagtagcaatctggaatccaactgagacacagcgtcaggagttggtggaaggaggagcatatgccatttcaggactcatgccatcaagttctgattctgatatccttcacttggatactagaggatcttctaccaagtggttgccattatcttataattcaaggaaacagtttaagccatttttctgcaatagaaaatcgatcccattgactagcttgggtgacatccctctttccaacgagtttgacattactgcatatgttgtgcatgtgggaggggtttatatatcaaatcaacaaaagaagcaatgggtttttgtgactgatggatccatcatgaatggtttacagtcagaaaagttaatcgactccttgcttgctatctgcttttgctctccattgattgatcatgattcatttcctccaatcaattataaccttgcaggatctacggttggcttctgtaatcttataaaaaaggaaaaggaccatacaaaccatatctgggttgctgatgctaatgaaaactctgcttattatttgaattttgattccacgaactgttctcacctcagaaatgctgccagctccgtcagagcttgggcaaatcattctagtttgataatagagaaactcaaggaaaaggttatgtatgtagttggtgaagattgtaaagcataggaaaaaaaaagcggagctatggatgtaccttttttgctctattgtctttaaacctttaccttagctcaatttcctctc

SEQ ID NO: 4581 - protein, 285 aa, Glycine max
  misc_feature (1)..(285): Ceres Seq. ID no. 13639489
NSFATYKAKLNAIRQSEMDKSIEKALKDAGLGSRQVTPFMRLRVVGLTYKTRQDKPKEGIVAIWNPTETQRQELVEGGAYAISGLMPSSSDSDILHLDTRGSSTKWLPLSYNSRKQFKPFFCNRKSIPLTSLGDIPLSNEFDITAYVVHVGGVYISNQQKKQWVFVTDGSIMNGLQSEKLIDSLLAICFCSPLIDHDSFPPINYNLAGSTVGFCNLIKKEKDHTNHIWVADANENSAYYLNFDSTNCSHLRNAASSVRAWANHSSLIIEKLKEKVMYVVGEDCKA

SEQ ID NO: 4582 - protein, 268 aa, Glycine max
  misc_feature (1)..(268): Ceres Seq. ID no. 13639490
MDKSIEKALKDAGLGSRQVTPFMRLRVVGLTYKTRQDKPKEGIVAIWNPTETQRQELVEGGAYAISGLMPSSSDSDILHLDTRGSSTKWLPLSYNSRKQFKPFFCNRKSIPLTSLGDIPLSNEFDITAYVVHVGGVYISNQQKKQWVFVTDGSIMNGLQSEKLIDSLLAICFCSPLIDHDSFPPINYNLAGSTVGFCNLIKKEKDHTNHIWVADANENSAYYLNFDSTNCSHLRNAASSVRAWANHSSLIIEKLKEKVMYVVGEDCKA

SEQ ID NO: 4583 - protein, 246 aa, Glycine max
  misc_feature (1)..(246): Ceres Seq. ID no. 13639491
MRLRVVGLTYKTRQDKPKEGIVAIWNPTETQRQELVEGGAYAISGLMPSSSDSDILHLDTRGSSTKWLPLSYNSRKQFKPFFCNRKSIPLTSLGDIPLSNEFDITAYVVHVGGVYISNQQKKQWVFVTDGSIMNGLQSEKLIDSLLAICFCSPLIDHDSFPPINYNLAGSTVGFCNLIKKEKDHTNHIWVADANENSAYYLNFDSTNCSHLRNAASSVRAWANHSSLIIEKLKEKVMYVVGEDCKA

SEQ ID NO: 4584 - DNA, 771 bp, Glycine max
  misc_feature (1)..(771): Ceres Seq. ID no. 13639520
accgggccgcccctcgagtcagttacgtagggccccccccctcaccttttaaggagaaaacaacatttaatgagtctgaaggtgtaagtcaatcacgtcaagacagtgcaatggatgggataatggatgcaaactggatattaatgaaattgggcaatgatgcaattggaaagagagttgaagttcatcagacatctgacaattcttggcacaagggagtggttactgatgtagtggaaggcacttcaaagttatatgttgcattagacgatgggaaagtgaagaacgtggaactcaggaaacaaggggtccgttttgttcctcaaaagcagaagagatctaagacatgaactaaacttgtccaccctttgtgatcatttaatgtggatacttttcttaattgactttgaagatttttcatctttgaggcctcttactgaatttatgttcgtagctgctcacattgccgctgatttttgggtgaagcattcttgattggagcaaatttcagtcgaaagaattaaccatttacctcagtcctttttctgggctgcaggttcttgatcgcgagttagatttttgttccttttctacatgtatctgatttcaaagtagatcctacctgtgatgtataggttcaccatttctgtagaatagattagttaaggccaacgtgttagctgtatgattaatattggtagtatatttgtgaattccaggtttcatgatttgagatattatcttgaaagatgaaattatcgtcaacttttt

SEQ ID NO: 4585 - protein, 115 aa, Glycine max
  misc_feature (1)..(115): Ceres Seq. ID no. 13639521
RAAPRVSYVGPPPSPFKEKTTFNESEGVSQSRQDSAMDGIMDANWILMKLGNDAIGKRVEVHQTSDNSWHKGVVTDVVEGTSKLYVALDDGKVKNVELRKQGVRFVPQKQKRSKT

SEQ ID NO: 4586 - protein, 79 aa, Glycine max
  misc_feature (1)..(79): Ceres Seq. ID no. 13639522
MDGIMDANWILMKLGNDAIGKRVEVHQTSDNSWHKGVVTDVVEGTSKLYVALDDGKVKNVELRKQGVRFVPQKQKRSKT

SEQ ID NO: 4587 - protein, 75 aa, Glycine max
  misc_feature (1)..(75): Ceres Seq. ID no. 13639523
MDANWILMKLGNDAIGKRVEVHQTSDNSWHKGVVTDVVEGTSKLYVALDDGKVKNVELRKQGVRFVPQKQKRSKT

(The sequence listing continues in the following parts.)
